United States Patent Application Publication US 2021/0107993 A1 - sequence listing, part 3

SEQ ID NO: 10090 - protein, 948 aa, Homo Sapiens
MVSRCSCLGVQCLLLSLLLLAAWEVGSGQLHYSVYEEARHGTFVGRIAQDLGLELAELVQRLFRVASKRHGDLLEVNLQNGILFVNSRIDREELCGRSVECSIHLEVIVDRPLQVFHVDVEVKDINDNPPRFSVTEQKLSIPESRLLDSRFPLEGASDADVGENALLTYKLSPNEYFVLDIINKKDKDKFPVLVLRKLLDREENPQLKLLLTATDGGKPEFTGSVSLLILVLDANDNAPIFDRPVYEVKMYENQVNQTLVIRLNASDSDEGINKEMMYSFSSLVPPTIRRKFWINERTGEIKVNDAIDFEDSNTYEIHVDVTDKGNPPMVGHCTVLVELLDENDNSPEVIVTSLSLPVKEDAQVGTVIALISVSDHDSGANGQVTCSLTPHVPFKLVSTYKNYYSLVLDSALDRERVSAYELVVTARDGGSPPLWATASVSVEVADVNDNAPAFAQSEYTVFVKENNPPGCHIFTVSAWDADAQENALVSYSLVERRLGERSLSSYVSVHAESGKVYALQPLDHEELELLQFQVSARDGGVPPLGSNLTLQVFVLDENDNAPALLASPAGSAGGAVSELVLRSVVAGHVVAKVRAVDADSGYNAWLSYELQSAAVGARIPFRVGLYTGEISTTRALDETDSPRQRLLVLVKDHGEPSLTATATVLVSLVEGSQAPKASSRASVGVAPEVALVDVNVYLIIAICAVSSLLVLTLLLYTALRCSAAPTEGACGPVKPTLVCSSAVGSWSYSQQRRQRVCSGEGLPKADLMAFSPSLPPCPMVDVDGEDQSIGGDHSRKPRQPNPDWRYSASLRAGMHSSVHLEEAGILRAGPGGPDQQWPTVSSATPEPEAGEVSPPVGAGVNSNSWTFKYGPGNPKQSGPGELPDKFIIPGSPAIISIRQEPTNSQIDKSDFITFGKKEETKKKKKKKKGNKTQEKKEKGNSTTDNSDQ

SEQ ID NO: 10091 - protein, 844 aa, Homo Sapiens
MVSRCSCLGVQCLLLSLLLLAAWEVGSGQLHYSVYEEARHGTFVGRIAQDLGLELAELVQRLFRVASKRHGDLLEVNLQNGILFVNSRIDREELCGRSVECSIHLEVIVDRPLQVFHVDVEVKDINDNPPRFSVTEQKLSIPESRLLDSRFPLEGASDADVGENALLTYKLSPNEYFVLDIINKKDKDKFPVLVLRKLLDREENPQLKLLLTATDGGKPEFTGSVSLLILVLDANDNAPIFDRPVYEVKMYENQVNQTLVIRLNASDSDEGINKEMMYSFSSLVPPTIRRKFWINERTGEIKVNDAIDFEDSNTYEIHVDVTDKGNPPMVGHCTVLVELLDENDNSPEVIVTSLSLPVKEDAQVGTVIALISVSDHDSGANGQVTCSLTPHVPFKLVSTYKNYYSLVLDSALDRERVSAYELVVTARDGGSPPLWATASVSVEVADVNDNAPAFAQSEYTVFVKENNPPGCHIFTVSAWDADAQENALVSYSLVERRLGERSLSSYVSVHAESGKVYALQPLDHEELELLQFQVSARDGGVPPLGSNLTLQVFVLDENDNAPALLASPAGSAGGAVSELVLRSVVAGHVVAKVRAVDADSGYNAWLSYELQSAAVGARIPFRVGLYTGEISTTRALDETDSPRQRLLVLVKDHGEPSLTATATVLVSLVEGSQAPKASSRASVGVAPEVALVDVNVYLIIAICAVSSLLVLTLLLYTALRCSAAPTEGACGPVKPTLVCSSAVGSWSYSQQRRQRVCSGEGLPKADLMAFSPSLPPCPMVDVDGEDQSIGGDHSRKVGYYVFIFLLCFMNNIFSYRIFSNMYQNISFLSTFHLCLNISSDTFVI

SEQ ID NO: 10092 - protein, 685 aa, Homo Sapiens
MVSRCSCLGVQCLLLSLLLLAAWEVGSGQLHYSVYEEARHGTFVGRIAQDLGLELAELVQRLFRVASKRHGDLLEVNLQNGILFVNSRIDREELCGRSVECSIHLEVIVDRPLQVFHVDVEVKDINDNPPRFSVTEQKLSIPESRLLDSRFPLEGASDADVGENALLTYKLSPNEYFVLDIINKKDKDKFPVLVLRKLLDREENPQLKLLLTATDGGKPEFTGSVSLLILVLDANDNAPIFDRPVYEVKMYENQVNQTLVIRLNASDSDEGINKEMMYSFSSLVPPTIRRKFWINERTGEIKVNDAIDFEDSNTYEIHVDVTDKGNPPMVGHCTVLVELLDENDNSPEVIVTSLSLPVKEDAQVGTVIALISVSDHDSGANGQVTCSLTPHVPFKLVSTYKNYYSLVLDSALDRERVSAYELVVTARDGGSPPLWATASVSVEVADVNDNAPAFAQSEYTVFVKENNPPGCHIFTVSAWDADAQENALVSYSLVERRLGERSLSSYVSVHAESGKVYALQPLDHEELELLQFQPRQPNPDWRYSASLRAGMHSSVHLEEAGILRAGPGGPDQQWPTVSSATPEPEAGEVSPPVGAGVNSNSWTFKYGPGNPKQSGPGELPDKFIIPGSPAIISIRQEPTNSQIDKSDFITFGKKEETKKKKKKKKGNKTQEKKEKGNSTTDNSDQ

SEQ ID NO: 10093 - protein, 949 aa, Homo Sapiens
MFGFQRRGLGTPRLQLWLLLLEFWEVGSGQLHYSVSEEAKHGTFVGRIAQDLGLELAELVQRLFRVASKTHGDLLEVNLQNGILFVNSRIDREELCGQSAECSIHLEVIVDRPLQVFHVNVEVKDINDNPPVFSLREQKLLIAESKQSDSRFPLEGASDADIEENALLTYRLSKNEYFSLDSPTNGKQIKRLSLILKKSLDREKTPELNLLLTATDGGKPELTGTVRLLVQVLDVNDNDPEFDKSEYKVSLMENAAKETLVLKLNATDRDEGVNGEVTYSLMSIKPNGRHLFTLDQNNGEVRVNGTLDYEENKFYKIEVQATDKGTPPMAGHCTVWVEILDTNDNSPEVAVTSLSLPVREDAQPSTVIALISVSDRDSGVNGQVTCSLTPHVPFKLVSTFKNYYSLVLDSALDRENVWAYELVVTARDGGSPSLWATARVSVEVADVNDNAPAFAQPEYTVFVKENNPPGCHIFTVSARDADAQENALVSYSLVERRLGDRALSSYVSVHAESGKVYALQPLDHEELELLQFQVSARDAGVPPLSSNVTLQVFVLDENDNAPALLATQAGSAGGAVNKLVPRSVGAGHVVAKVRAVDADSGYNAWLSYELQPAAGGSRIPFRVGLYTGEISTTRALDEADSPRHRLLVLVKDHGEPALTATATVLVSLVESGQAPKASSRTLAGAASPEAALVDVNVYLIIAICVVSSLLVLTLLLYTALWWSATPTEGACAPGKPTLVCSRAVGSWSYSQQRRQRVCSEEGPPKTDLMAFSPSLPLGLNKEEEGERQEPGSNHPGQPRQPNPDWRYSASLRAGMHSSVHLEEAGILRAGPGGPDQQWPTVSSATPEPEAGEVSPPVGAGVNSNSWTFKYGPGNPKQSGPGELPDKFIIPGSPAIISIRQEPTNSQIDKSDFITFGKKEETKKKKKKKKGNKTQEKKEKGNSTTDNSDQ

SEQ ID NO: 10094 - protein, 810 aa, Homo Sapiens
MFGFQRRGLGTPRLQLWLLLLEFWEVGSGQLHYSVSEEAKHGTFVGRIAQDLGLELAELVQRLFRVASKTHGDLLEVNLQNGILFVNSRIDREELCGQSAECSIHLEVIVDRPLQVFHVNVEVKDINDNPPVFSLREQKLLIAESKQSDSRFPLEGASDADIEENALLTYRLSKNEYFSLDSPTNGKQIKRLSLILKKSLDREKTPELNLLLTATDGGKPELTGTVRLLVQVLDVNDNDPEFDKSEYKVSLMENAAKETLVLKLNATDRDEGVNGEVTYSLMSIKPNGRHLFTLDQNNGEVRVNGTLDYEENKFYKIEVQATDKGTPPMAGHCTVWVEILDTNDNSPEVAVTSLSLPVREDAQPSTVIALISVSDRDSGVNGQVTCSLTPHVPFKLVSTFKNYYSLVLDSALDRENVWAYELVVTARDGGSPSLWATARVSVEVADVNDNAPAFAQPEYTVFVKENNPPGCHIFTVSARDADAQENALVSYSLVERRLGDRALSSYVSVHAESGKVYALQPLDHEELELLQFQVSARDAGVPPLSSNVTLQVFVLDENDNAPALLATQAGSAGGAVNKLVPRSVGAGHVVAKVRAVDADSGYNAWLSYELQPAAGGSRIPFRVGLYTGEISTTRALDEADSPRHRLLVLVKDHGEPALTATATVLVSLVESGQAPKASSRTLAGAASPEAALVDVNVYLIIAICVVSSLLVLTLLLYTALWWSATPTEGACAPGKPTLVCSRAVGSWSYSQQRRQRVCSEEGPPKTDLMAFSPSLPLGLNKEEEGERQEPGSNHPGQVSFLQIPPIRKCM

SEQ ID NO: 10095 - protein, 199 aa, Homo Sapiens
  misc_feature (1)..(1): Xaa can be any naturally occurring amino acid
XVSSLLVLTLLLYTALWWSATPTEGACAPGKPTLVCSRAVGSWSYSQQRRQRVCSEEGPPKTDLMAFSPSLPLGLNKEEEGERQEPGSNHPGQPRQPNPDWRYSASLRAGMHSSVHLEEAGILRAGPGGPDQQWPTVSSATPEPEAGEVSPPVGAGVNSNSWTFKYGPGNPKQSGPEPKKQTQVSFLLRRKGEASQPRQ

SEQ ID NO: 10096 - protein, 803 aa, Homo Sapiens
MVFTPEDRLGKQCLLLPLLLLAAWKVGSGQLHYSVPEEAKHGTFVGRIAQDLGLELAELVPRLFRMASKDREDLLEVNLQNGILFVNSRIDREELCGRSAECSIHLEVIVDRPLQVFHVDVEVRDINDNPPLFPVEEQRVLIYESRLPDSVFPLEGASDADVGSNSILTYKLSSSEYFGLDVKINSDDNKQIGLLLKKSLDREEAPAHNLFLTATDGGKPELTGTVQLLVTVLDVNDNAPTFEQSEYEVRIFENADNGTTVIRLNASDRDEGANGAISYSFNSLVAAMVIDHFSIDRNTGEIVIRGNLDFEQENLYKILIDATDKGHPPMAGHCTVLVRILDKNDNVPEIALTSLSLPVREDAQFGTVIALISVNDLDSGANGQVNCSLTPHVPFKLVSTFKNYYSLVLDSALDRESVSAYELVVTARDGGSPSLWATASLSVEVADMNDNAPAFAQPEYTVFVKENNPPGCHIFTVSARDADAQENALVSYSLVERRVGERALSSYISVHAESGKVYALQPLDHEELELLQFQVSARDAGVPPLGSNVTLQVFVLDENDNAPALLAPRVGGTGGAVSELVPRSLGAGQVVAKVRAVDADSGYNAWLSYELQPPASSARFPFRVGLYTGEISTTRVLDEADSPRHRLLVLVKDHGEPALTATATVLVSLVESGQAPKASSRASVGAAGPEAALVDVNVYLIIAICAVSSLLVLTLLLYTALRCSAPPTEGACTADKPTLVCSSAVGSWSYSQQRRQRVCSGEGPPKMDLMAFSPSLSPCPIMMGKAENQDLNEDHDAKVSEFS

SEQ ID NO: 10097 - protein, 686 aa, Homo Sapiens
MVFTPEDRLGKQCLLLPLLLLAAWKVGSGQLHYSVPEEAKHGTFVGRIAQDLGLELAELVPRLFRMASKDREDLLEVNLQNGILFVNSRIDREELCGRSAECSIHLEVIVDRPLQVFHVDVEVRDINDNPPLFPVEEQRVLIYESRLPDSVFPLEGASDADVGSNSILTYKLSSSEYFGLDVKINSDDNKQIGLLLKKSLDREEAPAHNLFLTATDGGKPELTGTVQLLVTVLDVNDNAPTFEQSEYEVRIFENADNGTTVIRLNASDRDEGANGAISYSFNSLVAAMVIDHFSIDRNTGEIVIRGNLDFEQENLYKILIDATDKGHPPMAGHCTVLVRILDKNDNVPEIALTSLSLPVREDAQFGTVIALISVNDLDSGANGQVNCSLTPHVPFKLVSTFKNYYSLVLDSALDRESVSAYELVVTARDGGSPSLWATASLSVEVADMNDNAPAFAQPEYTVFVKENNPPGCHIFTVSARDADAQENALVSYSLVERRVGERALSSYISVHAESGKVYALQPLDHEELELLQFQPRQPNPDWRYSASLRAGMHSSVHLEEAGILRAGPGGPDQQWPTVSSATPEPEAGEVSPPVGAGVNSNSWTFKYGPGNPKQSGPGELPDKFIIPGSPAIISIRQEPTNSQIDKSDFITFGKKEETKKKKKKKKGNKTQEKKEKGNSTTDNSDQ

SEQ ID NO: 10098 - protein, 950 aa, Homo Sapiens
MVFTPEDRLGKQCLLLPLLLLAAWKVGSGQLHYSVPEEAKHGTFVGRIAQDLGLELAELVPRLFRMASKDREDLLEVNLQNGILFVNSRIDREELCGRSAECSIHLEVIVDRPLQVFHVDVEVRDINDNPPLFPVEEQRVLIYESRLPDSVFPLEGASDADVGSNSILTYKLSSSEYFGLDVKINSDDNKQIGLLLKKSLDREEAPAHNLFLTATDGGKPELTGTVQLLVTVLDVNDNAPTFEQSEYEVRIFENADNGTTVIRLNASDRDEGANGAISYSFNSLVAAMVIDHFSIDRNTGEIVIRGNLDFEQENLYKILIDATDKGHPPMAGHCTVLVRILDKNDNVPEIALTSLSLPVREDAQFGTVIALISVNDLDSGANGQVNCSLTPHVPFKLVSTFKNYYSLVLDSALDRESVSAYELVVTARDGGSPSLWATASLSVEVADMNDNAPAFAQPEYTVFVKENNPPGCHIFTVSARDADAQENALVSYSLVERRVGERALSSYISVHAESGKVYALQPLDHEELELLQFQVSARDAGVPPLGSNVTLQVFVLDENDNAPALLAPRVGGTGGAVSELVPRSLGAGQVVAKVRAVDADSGYNAWLSYELQPPASSARFPFRVGLYTGEISTTRVLDEADSPRHRLLVLVKDHGEPALTATATVLVSLVESGQAPKASSRASVGAAGPEAALVDVNVYLIIAICAVSSLLVLTLLLYTALRCSAPPTEGACTADKPTLVCSSAVGSWSYSQQRRQRVCSGEGPPKMDLMAFSPSLSPCPIMMGKAENQDLNEDHDAKPRQPNPDWRYSASLRAGMHSSVHLEEAGILRAGPGGPDQQWPTVSSATPEPEAGEVSPPVGAGVNSNSWTFKYGPGNPKQSGPGELPDKFIIPGSPAIISIRQEPTNSQIDKSDFITFGKKEETKKKKKKKKGNKTQEKKEKGNSTTDNSDQ

SEQ ID NO: 10099 - protein, 458 aa, Homo Sapiens
MDVNDNAPEITVSSITSPIPENTPETVVMVFRIRDRDSGDNGKMVCSIPEDIPFVLKSSVNNYYTLETERPLDRESRAEYNITITVTDLGTPRLKTEHNITVLVSDVNDNAPAFTQTSYALFVRENNSPALHIGSISATDRDSGTNAQVNYSLLPSQDPHLPLASLVSINADNGHLFALRSLDYEALQGFQFRVGATDHGSPALSSEALVRVLVLDANDNSPFVLYPLQNGSAPCTELVPWAAEPGYLVTKVVAVDGDSGQNAWLSYQLLKATEPGLFGVWAHNGEVRTARLLSERDAAKHRLVVLVKDNGEPPRSATATLHVLLVDGFSQPYLPLPEAAPAQAQADSLTVYLVVALASVSSLFLFSVLLFVAVRLCRRSRAAPVGRCSVPEGPFPGHLVDVSGTGTLSQSYHYEVCVTGGSRSNKFKFLKPIIPNFLPQSTGSEVEENPPFQNNLGF

SEQ ID NO: 10100 - protein, 67 aa, Homo Sapiens
MENGGAGTLQIRQVLLFFVLLGMSQAGSETGNFLVMEELQSGSFVGNLAKTLGLEHLWILKQLSHTQ

SEQ ID NO: 10101 - protein, 795 aa, Homo Sapiens
MENGGAGTLQIRQVLLFFVLLGMSQAGSETGNFLVMEELQSGSFVGNLAKTLGLEVSELSSRGARVVSNDNKECLQLDTNTGDLLLREMLDREELCGSNEPCVLYFQVLMKNPTQFLQIELQVRDINDHSPVFLEKEMLLEIPENSPVGAVFLLESAKDLDVGINAVKSYTINPNSHFHVKIRVNPDNRKYPELVLDKALDYEERPELSFILTALDGGSPPRSGTALVRVVVVDINDNSPEFEQAFYEVKILENSILGSLVVTVSAWDLDSGTNSELSYTFSHASEDIRKTFEINQKSGDITLTAPLDFEAIESYSIIIQATDGGGLFGKSTVRIQVMDVNDNAPEITVSSITSPIPENTPETVVMVFRIRDRDSGDNGKMVCSIPEDIPFVLKSSVNNYYTLETERPLDRESRAEYNITITVTDLGTPRLKTEHNITVLVSDVNDNAPAFTQTSYALFVRENNSPALHIGSISATDRDSGTNAQVNYSLLPSQDPHLPLASLVSINADNGHLFALRSLDYEALQGFQFRVGATDHGSPALSSEALVRVLVLDANDNSPFVLYPLQNGSAPCTELVPWAAEPGYLVTKVVAVDGDSGQNAWLSYQLLKATEPGLFGVWAHNGEVRTARLLSERDAAKHRLVVLVKDNGEPPRSATATLHVLLVDGFSQPYLPLPEAAPAQAQADSLTVYLVVALASVSSLFLFSVLLFVAVRLCRRSRAAPVGRCSVPEGPFPGHLVDVSGTGTLSQSYHYEVCVTGGSRSNKFKFLKPIIPNFLPQSTGSEVEENPPFQNNLGF

SEQ ID NO: 10102 - protein, 935 aa, Homo Sapiens
MANRLQRGDRSRLLLLLCIFLGTLRGFRARQIRYSVPEETEKGSFVGNISKDLGLEPRELAKRGVRIVSRGKTQLFAVNPRSGSLITAGRIDREELCETVSSCFLNMELLVEDTLKIYGVEVEIIDINDNAPSFQEDEVEIKVSEHAIPGARFALPNARDPDVGVNSLQSYQLSPNNYFSLQLRGRTDGAKNPELVLEGSLDREKEAAHLLLLTALDGGDPIRKGAVPIRVVVLDVNDHIPMFTQSVYRVSVPENISSGTRVLMVNATDPDEGINGEVMYSFRNMESKASEIFQLDSQTGEVQVRGSLDFEKYRFYEMEIQGQDGGGLFTTTTMLITVVDVNDNAPEITITSSINSILENSPPGTVIALLNVQDQDSGENGQVSCFIPNHLPFKLEKTYGNYYKLITSRVLDRELVQSYNITLTATDQGSPPLSAETHVWLNVADDNDNPPVFPHSSYSAYIPENNPRGASIFSVTALDPDSKQNALVTYSLTDDTVQGVPLSSYVSINSNTGVLYALQSFDYEQFRDLELRVIARDSGDPPLSSNVSLSLFVLDQNDNAPEILYPALPTDGSTGVELAPRSAEPGYLVTKVVAVDKDSGQNAWLSYRLLKASEPGLFAVGEHTGEVRTARALLDRDALKQSLVVAVQDHGQPPLSATVTLTVAVADSIPEVLADLGSLESLANSETSDLSLYLVVAVAAVSCIFLVFVIVLLALRLWRWHKSRLLQASEGGLAGMPTSHFVGVDGVQAFLQTYSHEVSLIADSQKSHLIFPQPNYGDTLISQESCEKSEPLLIAEDSAIILGKCDPTSNQQAPPNTDWRFSQAQRPGTSGSQNGDDTGTWPNNQFDTEMLQAMILASASEAADGSSTLGGGAGTMGLSARYGPQFTLQHVPDYRQNVYIPGSNATLTNAAGKRDGKAPAGGNGNKKKSGKKEKK

SEQ ID NO: 10103 - protein, 750 aa, Homo Sapiens
MANRLQRGDRSRLLLLLCIFLGTLRGFRARQIRYSVPEETEKGSFVGNISKDLGLEPRELAKRGVRIVSRGKTQLFAVNPRSGSLITAGRIDREELCETVSSCFLNMELLVEDTLKIYGVEVEIIDINDNAPSFQEDEVEIKVSEHAIPGARFALPNARDPDVGVNSLQSYQLSPNNYFSLQLRGRTDGAKNPELVLEGSLDREKEAAHLLLLTALDGGDPIRKGAVPIRVVVLDVNDHIPMFTQSVYRVSVPENISSGTRVLMVNATDPDEGINGEVMYSFRNMESKASEIFQLDSQTGEVQVRGSLDFEKYRFYEMEIQGQDGGGLFTTTTMLITVVDVNDNAPEITITSSINSILENSPPGTVIALLNVQDQDSGENGQVSCFIPNHLPFKLEKTYGNYYKLITSRVLDRELVQSYNITLTATDQGSPPLSAETHVWLNVADDNDNPPVFPHSSYSAYIPENNPRGASIFSVTALDPDSKQNALVTYSLTDDTVQGVPLSSYVSINSNTGVLYALQSFDYEQFRDLELRVIARDSGDPPLSSNVSLSLFVLDQNDNAPEILYPALPTDGSTGVELAPRSAEPGYLVTKVVAVDKDSGQNAWLSYRLLKASEPGLFAVGEHTGEQAPPNTDWRFSQAQRPGTSGSQNGDDTGTWPNNQFDTEMLQAMILASASEAADGSSTLGGGAGTMGLSARYGPQFTLQHVPDYRQNVYIPGSNATLTNAAGKRDGKAPAGGNGNKKKSGKKEKK

SEQ ID NO: 10104 - protein, 837 aa, Homo Sapiens
MANRLQRGDRSRLLLLLCIFLGTLRGFRARQIRYSVPEETEKGSFVGNISKDLGLEPRELAKRGVRIVSRGKTQLFAVNPRSGSLITAGRIDREELCETVSSCFLNMELLVEDTLKIYGVEVEIIDINDNAPSFQEDEVEIKVSEHAIPGARFALPNARDPDVGVNSLQSYQLSPNNYFSLQLRGRTDGAKNPELVLEGSLDREKEAAHLLLLTALDGGDPIRKGAVPIRVVVLDVNDHIPMFTQSVYRVSVPENISSGTRVLMVNATDPDEGINGEVMYSFRNMESKASEIFQLDSQTGEVQVRGSLDFEKYRFYEMEIQGQDGGGLFTTTTMLITVVDVNDNAPEITITSSINSILENSPPGTVIALLNVQDQDSGENGQVSCFIPNHLPFKLEKTYGNYYKLITSRVLDRELVQSYNITLTATDQGSPPLSAETHVWLNVADDNDNPPVFPHSSYSAYIPENNPRGASIFSVTALDPDSKQNALVTYSLTDDTVQGVPLSSYVSINSNTGVLYALQSFDYEQFRDLELRVIARDSGDPPLSSNVSLSLFVLDQNDNAPEILYPALPTDGSTGVELAPRSAEPGYLVTKVVAVDKDSGQNAWLSYRLLKASEPGLFAVGEHTGEVRTARALLDRDALKQSLVVAVQDHGQPPLSATVTLTVAVADSIPEVLADLGSLESLANSETSDLSLYLVVAVAAVSCIFLVFVIVLLALRLWRWHKSRLLQASEGGLAGMPTSHFVGVDGVQAFLQTYSHEVSLIADSQKSHLIFPQPNYGDTLISQESCEKSEPLLIAEDSAIILGKCDPTSNQVRFISLPPNCWCLGTSLLRRCFLSLL

SEQ ID NO: 10105 - protein, 198 aa, Homo Sapiens
MLTCLVLSGVAQPVAFGQGQQFLPVHPQNPGFVQNPSGALPKAYPDNHLSQVDVNELFSKLLKTGILKLSQTDSATTQVSEVTAQPPPEEEEDQNEDQDVPDLTNFTVEELKQRYDSVINRLYTGIQCYSCGMRFTTSQTDVYADHLDWHYRQNRTEKDVSRKVTHRRWYYSLTDWIEFEEIADLEERAKSQFFEKVH

SEQ ID NO: 10106 - protein, 1555 aa, Homo Sapiens
MSEQTPAEAGAAGAREDACRDYQSSLEDLTFNSKPHINMLTILAEENLPFAKEIVSLIEAQTAKAPSSEKLPVMYLMDSIVKNVGREYLTAFTKNLVATFICVFEKVDENTRKSLFKLRSTWDEIFPLKKLYALDVRVNSLDPAWPIKPLPPNVNTSSIHVNPKFLNKSPEEPSTPGTVVSSPSISTPPIVPDIQKNLTQEQLIRQQLLAKQKQLLELQQKKLELELEQAKAQLAVSLSVQQETSNLGPGSAPSKLHVSQIPPMAVKAPHQVPVQSEKSRPGPSLQIQDLKGTNRDPRLNRISQHSHGKDQSHRKEFLMNTLNQSDTKTSKTIPSEKLNSSKQEKSKSGEKITKKELDQLDSKSKSKSKSPSPLKNKLSHTKDLKNQESESMRLSDMNKRDPRLKKHLQDKTDGKDDDVKEKRKTAEKKDKDEHMKSSEHRLAGSRNKIINGIVQKQDTITEESEKQGTKPGRSSTRKRSRSRSPKSRSPIIHSPKRRDRRSPKRRQRSMSPTSTPKAGKIRQSGAKQSHMEEFTPPSREDRNAKRSTKQDIRDPRRMKKTEEERPQETTNQHSTKSGTEPKENVENWQSSKSAKRWKSGWEENKSLQQVDEHSKPPHLRHRESWSSTKGILSPRAPKQQQHRLSVDANLQIPKELTLASKRELLQKTSERLASGEITQDDFLVVVHQIRQLFQYQEGVREEQRSPFNDRFPLKRPRYEDSDKPFVDSPASRFAGLDTNQRLTALAEDRPLFDGPSRPSVARDGPTKMIFEGPNKLSPRIDGPPTPASLRFDGSPGQMGGGGPLRFEGPQGQLGGGCPLRFEGPPGPVGTPLRFEGPIGQAGGGGFRFEGSPGLRFEGSPGGLRFEGPGGQPVGGLRFEGHRGQPVGGLRFEGPHGQPVGGLRFDNPRGQPVGGLRFEGGHGPSGAAIRFDGPHGQPGGGIRFEGPLLQQGVGMRFEGPHGQSVAGLRFEGQHNQLGGNLRFEGPHGQPGVGIRFEGPLVQQGGGMRFEGPSVPGGGLRIEGPLGQGGPRFEGCHALRFDGQPGQPSLLPRFDGLHGQPGPRFERTPGQPGPQRFDGPPGQQVQPRFDGVPQRFDGPQHQQASRFDIPLGLQGTRFDNHPSQRLESVSFNQTGPYNDPPGNAFNAPSQGLQFQRHEQIFDSPQGPNFNGPHGPGNQSFSNPLNRASGHYFDEKNLQSSQFGNFGNIPAPMTVGNIQASQQVLSGVAQPVAFGQGQQFLPVHPQNPGFVQNPSGALPKAYPDNHLSQVDVNELFSKLLKTGILKLSQTDSATTQVSEVTAQPPPEEEEDQNEDQDVPDLTNFTVEELKQRYDSVINRLYTGIQCYSCGMRFTTSQTDVYADHLDWHYRQNRTEKDVSRKVTHRRWYYSLTDWIEFEEIADLEERAKSQFFEKVHEEVVLKTQEAAKEKEFQSVPAGPAGAVESCEICQEQFEQYWDEEEEEWHLKNAIRVDGKIYHPSCYEDYQNTSSFDCTPSPSKTPVENPLNIMLNIVKNELQEPCDSPKVKEERIDTPPACTEESIATPSEIKTENDTVESV

SEQ ID NO: 10107 - protein, 999 aa, Homo Sapiens
MSEQTPAEAGAAGAREDACRDYQSSLEDLTFNSKPHINMLTILAEENLPFAKEIVSLIEAQTAKAPSSEKLPVMYLMDSIVKNVGREYLTAFTKNLVATFICVFEKVDENTRKSLFKLRSTWDEIFPLKKLYALDVRVNSLDPAWPIKPLPPNVNTSSIHVNPKFLNKSPEEPSTPGTVVSSPSISTPPIVPDIQKNLTQEQLIRQQLLAKQKQLLELQQKKLELELEQAKAQLAVSLSVQQETSNLGPGSAPSKLHVSQIPPMAVKAPHQVPVQSEKSRPGPSLQIQDLKGTNRDPRLNRISQHSHGKDQSHRKEFLMNTLNQSDTKTSKTIPSEKLNSSKQEKSKSGEKITKKELDQLDSKSKSKSKSPSPLKNKLSHTKDLKNQESESMRLSDMNKRDPRLKKHLQDKTDGKDDDVKEKRKTAEKKDKDEHMKSSEHRLAGSRNKIINGIVQKQDTITEESEKQGTKPGRSSTRKRSRSRSPKSRSPIIHSPKRRDRRSPKRRQRSMSPTSTPKAGKIRQSGAKQSHMEEFTPPSREDRNAKRSTKQDIRDPRRMKKTEEERPQETTNQHSTKSGTEPKENVENWQSSKSAKRWKSGWEENKSLQQVDEHSKPPHLRHRESWSSTKGILSPRAPKQQQHRLSVDANLQIPKELTLASKRELLQKTSERLASGEITQDDFLVVVHQIRQLFQYQEGKHRCNVRDSPTEENKGGLKKKPLLSDAELTYYEHKAKLKRTQVQHSFPRLDLLDPDIFDYPLTDALLSGIECEPSKSKHASRNSGAQFDRKEQFSERARRLSPISGSRTYAENLSPHEGRRRHDEQVSAKGVREEQRSPFNDRFPLKRPRYEDSDKPFVDSPASRFAGLDTNQRLTALAEDRPLFDGPSRPSVARDGPTKMIFEGPNKLSPRIDGPPTPASLRFDGSPGQMGGGGPLRFEGPQGQLGGGCPLRFEGPPGPVGTPLRFEGPIGQAGGGGFRFEGSPGLRFEGSPGGLRFEGP

SEQ ID NO: 10108 - protein, 784 aa, Homo Sapiens
MSEQTPAEAGAAGAREDACRDYQSSLEDLTFNSKPHINMLTILAEENLPFAKEIVSLIEAQTAKAPSSEKLPVMYLMDSIVKNVGREYLTAFTKNLVATFICVFEKVDENTRKSLFKLRSTWDEIFPLKKLYALDVRVNSLDPAWPIKPLPPNVNTSSIHVNPKFLNKSPEEPSTPGTVVSSPSISTPPIVPDIQKNLTQEQLIRQQLLAKQKQLLELQQKKLELELEQAKAQLAVSLSVQQETSNLGPGSAPSKLHVSQIPPMAVKAPHQVPVQSEKSRPGPSLQIQDLKGTNRDPRLNRISQHSHGKDQSHRKEFLMNTLNQSDTKTSKTIPSEKLNSSKQEKSKSGEKITKKELDQLDSKSKSKSKSPSPLKNKLSHTKDLKNQESESMRLSDMNKRDPRLKKHLQDKTDGKDDDVKEKRKTAEKKDKDEHMKSSEHRLAGSRNKIINGIVQKQDTITEESEKQGTKPGRSSTRKRSRSRSPKSRSPIIHSPKRRDRRSPKRRQRSMSPTSTPKAGKIRQSGAKQSHMEEFTPPSREDRNAKRSTKQDIRDPRRMKKTEEERPQETTNQHSTKSGTEPKENVENWQSSKSAKRWKSGWEENKSLQQVDEHSKPPHLRHRESWSSTKGILSPRAPKQQQHRLSVDANLQIPKELTLASKRELLQKTSERLASGEITQDDFLVVVHQIRQLFQYQEGVREEQRSPFNDRFPLKRPRYEDSDKPFVDSPASRFAGLDTNQRLTALAEDRPLFDGPSRPSVARDGPTKMIFEGPNKLSPRIDGPP

SEQ ID NO: 10109 - protein, 99 aa, Homo Sapiens
MSEQTPAEAGAAGAREDACRDYQSSLEDLTFNSKPHINMLTILAEENLPFAKEIVSLIEAQTAKVDENTRKSLFKLRSTWDEIFPLKKLYALDVRVNSL

SEQ ID NO: 10110 - protein, 449 aa, Homo Sapiens
MLPAATASLLGPLLTACALLPFAQGQTPNYTRPVFLCGGDVKGESGYVASEGFPNLYPPNKECIWTITVPEGQTVSLSFRVFDLELHPACRYDALEVFAGSGTSGQRLGRFCGTFRPAPLVAPGNQVTLRMTTDEGTGGRGFLLWYSGRATSGTEHQFCGGRLEKAQGTLTTPNWPESDYPPGISCSWHIIAPPDQVIALTFEKFDLEPDTYCRYDSVSVFNGAVSDDSRRLGKFCGDAVPGSISSEGNELLVQFVSDLSVTADGFSASYKTLPRGTAKEGQGPGPKRGTEPKVKLPPKSQPPEKTEESPSAPDAPTCPKQCRRTGTLQSNFCASSLVVTATVKSMVREPGEGLAVTVSLIGAYKTGGLDLPSPPTGASLKFYVPCKQCPPMKKGVSYLLMGQVEENRGPVLPPESFVVLHRPNQDQILTNLSKRKCPSQPVRAAASQD

SEQ ID NO: 10111 - protein, 303 aa, Homo Sapiens
MRGANAWAPLCLLLAAATQLSRQQSPERPVFTCGGILTGESGFIGSEGFPGVYPPNSKCTWKITVPEGKVVVLNFRFIDLESDNLCRYDFVDVYNGHANGQRIGRFCGTFRPGALVSSGNKMMVQMISDANTAGNGFMAMFSAAEPNERGDQYCGGLLDRPSGSFKTPNWPDRDYPAGVTCVWHIVAPKNQLIELKFEKFDVERDNYCRYDYVAVFNGGEVNDARRIGKYCGDSPPAISRHCYHNHHSRWEFARHSLDHQHLQRGKFGDSAGGQEHECQADCRLQAVPSPQKRSKLHYYGPSR

SEQ ID NO: 10112 - protein, 415 aa, Homo Sapiens
MRGANAWAPLCLLLAAATQLSRQQSPERPVFTCGGILTGESGFIGSEGFPGVYPPNSKCTWKITVPEGKVVVLNFRFIDLESDNLCRYDFVDVYNGHANGQRIGRFCGTFRPGALVSSGNKMMVQMISDANTAGNGFMAMFSAAEPNERGDQYCGGLLDRPSGSFKTPNWPDRDYPAGVTCVWHIVAPKNQLIELKFEKFDVERDNYCRYDYVAVFNGGEVNDARRIGKYCGDSPPAPIVSERNELLIQFLSDLSLTADGFIGHYIFRPKKLPTTTEQPVTTTFPVTTGLKPTVALCQQKCRRTGTLEGNYCSSDFVLAGTVITTITRDGSLHATVSIINIYKEGNLAIQQAGKNMSARLTVVCKQCPLLRRGLNYIIMGQVGEDGRGKIMPNSFIMMFKTKNQKLLDALKNKQC

SEQ ID NO: 10113 - protein, 140 aa, Homo Sapiens
TEQPVTTTFPVTTGLKPTVALCQQKCRRTGTLEGNYCSSDFVLAGTVITTITRDGSLHATVSIINIYKEGNLAIQQAGKNMSARLTVVCKQCPLLRRGLNYIIMGQVGEDGRGKIMPNSFIMMFKTKNQKLLDALKNKQC

SEQ ID NO: 10114 - protein, 101 aa, Homo Sapiens
  misc_feature (1)..(1): Xaa can be any naturally occurring amino acid
XGTFRPGALVSSGNKMMVQMISDANTAGNGFMAMFSAAEPNERGKKKKRGPESTSPLSRVAMLCQGISIVEDSLTDLPALLKPPTGQTGITLQESLVCGTL

SEQ ID NO: 10115 - protein, 158 aa, Homo Sapiens
MERRAWSLQCTAFVLFCAWCALNSAKAKRQFVNEWAAEIPGGPEAASAIAEELGYDLLGQIGSLENHYLFKHKNHPRRSRRSAFHITKRLSDDDRVIWAEQQYEKERSKRSALRDSALNLFNDPMWNQQWYLQDTRMTAALPKLDLHVIPVWQKGITG

SEQ ID NO: 10116 - protein, 753 aa, Homo Sapiens
MERRAWSLQCTAFVLFCAWCALNSAKAKRQFVNEWAAEIPGGPEAASAIAEELGYDLLGQIGSLENHYLFKHKNHPRRSRRSAFHITKRLSDDDRVIWAEQQYEKERSKRSALRDSALNLFNDPMWNQQWYLQDTRMTAALPKLDLHVIPVWQKGITGKGVVITVLDDGLEWNHTDIYANYDPEASYDFNDNDHDPFPRYDPTNENKHGTRCAGEIAMQANNHKCGVGVAYNSKVGGIRMLDGIVTDAIEASSIGFNPGHVDIYSASWGPNDDGKTVEGPGRLAQKAFEYGVKQGRQGKGSIFVWASGNGGRQGDNCDCDGYTDSIYTISISSASQQGLSPWYAEKCSSTLATSYSSGDYTDQRITSADLHNDCTETHTGTSASAPLAAGIFALALEANPNLTWRDMQHLVVWTSEYDPLANNPGWKKNGAGLMVNSRFGFGLLNAKALVDLADPRTWRSVPEKKECVVKDNDFEPRALKANGEVIIEIPTRACEGQENAIKSLEHVQFEATIEYSRRGDLHVTLTSAAGTSTVLLAERERDTSPNGFKNWDFMSVHTWGENPIGTWTLRITDMSGRIQNEGRIVNWKLILHGTSSQPEHMKQPRVYTSYNTVQNDRRGVEKMVDPGEEQPTQENPKENTLVSKSPSSSSVGGRRDELEEGAPSQAMLRLLQSAFSKNSPPKQSPKKSPSAKLNIPYENFYEALEKLNKPSQLKDSEDSLYNDYVDVFYNTKPYKHRDDRLLQALVDILNEEN

SEQ ID NO: 10117 - protein, 706 aa, Homo Sapiens
MGKGSISFLFFSQIGSLENHYLFKHKNHPRRSRRSAFHITKRLSDDDRVIWAEQQYEKERSKRSALRDSALNLFNDPMWNQQWYLQDTRMTAALPKLDLHVIPVWQKGITGKGVVITVLDDGLEWNHTDIYANYDPEASYDFNDNDHDPFPRYDPTNENKHGTRCAGEIAMQANNHKCGVGVAYNSKVGGIRMLDGIVTDAIEASSIGFNPGHVDIYSASWGPNDDGKTVEGPGRLAQKAFEYGVKQGRQGKGSIFVWASGNGGRQGDNCDCDGYTDSIYTISISSASQQGLSPWYAEKCSSTLATSYSSGDYTDQRITSADLHNDCTETHTGTSASAPLAAGIFALALEANPNLTWRDMQHLVVWTSEYDPLANNPGWKKNGAGLMVNSRFGFGLLNAKALVDLADPRTWRSVPEKKECVVKDNDFEPRALKANGEVIIEIPTRACEGQENAIKSLEHVQFEATIEYSRRGDLHVTLTSAAGTSTVLLAERERDTSPNGFKNWDFMSVHTWGENPIGTWTLRITDMSGRIQNEGRIVNWKLILHGTSSQPEHMKQPRVYTSYNTVQNDRRGVEKMVDPGEEQPTQENPKENTLVSKSPSSSSVGGRRDELEEGAPSQAMLRLLQSAFSKNSPPKQSPKKSPSAKLNIPYENFYEALEKLNKPSQLKDSEDSLYNDYVDVFYNTKPYKHRDDRLLQALVDILNEEN

SEQ ID NO: 10118 - protein, 260 aa, Homo Sapiens
MAGSPLLWGPRAGGVGLLVLLLLGLFRPPPALCARPVKEPRGLSAASPPLAETGAPRRFRRSVPRGEAAGAVQELARALAHLLEAERQERARAEAQEAEDQQARVLAQLLRVWGAPRNSDPALGLDDDPDAPAAQLARALLRARLDPAALAAQLVPAPVPAAALRPRPPVYDDGPAGPDAEEAGDETPDVDPELLRYLLGRILAGSADSEGVAAPRRLRRAADHDVGSELPPEGVLGALLRVKRLETPAPQVPARRLLPP

SEQ ID NO: 10119 - protein, 638 aa, Homo Sapiens
MKGGCVSQWKAAAGFLFCVMVFASAERPVFTNHFLVELHKGGEDKARQVAAEHGFGVRKLPFAEGLYHFYHNGLAKAKRRRSLHHKQQLERDPRVKMALQQEGFDRKKRGYRDINEIDINMNDPLFTKQWYLINTGQADGTPGLDLNVAEAWELGYTGKGVTIGIMDDGIDYLHPDLASNYNAEASYDFSSNDPYPYPRYTDDWFNSHGTRCAGEVSAAANNNICGVGVAYNSKVAGIRMLDQPFMTDIIEASSISHMPQLIDIYSASWGPTDNGKTVDGPRELTLQAMADGVNKGRGGKGSIYVWASGDGGSYDDCNCDGYASSMWTISINSAINDGRTALYDESCSSTLASTFSNGRKRNPEAGVATTDLYGNCTLRHSGTSAAAPEAAGVFALALEANLGLTWRDMQHLTVLTSKRNQLHDEVHQWRRNGVGLEFNHLFGYGVLDAGAMVKMAKDWKTVPERFHCVGGSVQDPEKIPSTGKLVLTLTTDACEGKENFVRYLEHVQAVITVNATRRGDLNINMTSPMGTKSILLSRRPRDDDSKVGFDKWPFMTTHTWGEDARGTWTLELGFVGSAPQKGVLKEWTLMLHGTQSAPYIDQVVRDYQSKLAMSKKEELEEELDEAVERSLKSILNKN

SEQ ID NO: 10120 - protein, 603 aa, Homo Sapiens
MKGGCVSQWKAAAGFLFCVMVFASAERPVFTNHFLVELHKGGEDKARQVAAEHGFGVRKVKMALQQEGFDRKKRGYRDINEIDINMNDPLFTKQWYLINTGQADGTPGLDLNVAEAWELGYTGKGVTIGIMDDGIDYLHPDLASNYNAEASYDFSSNDPYPYPRYTDDWFNSHGTRCAGEVSAAANNNICGVGVAYNSKVAGIRMLDQPFMTDIIEASSISHMPQLIDIYSASWGPTDNGKTVDGPRELTLQAMADGVNKGRGGKGSIYVWASGDGGSYDDCNCDGYASSMWTISINSAINDGRTALYDESCSSTLASTFSNGRKRNPEAGVATTDLYGNCTLRHSGTSAAAPEAAGVFALALEANLGLTWRDMQHLTVLTSKRNQLHDEVHQWRRNGVGLEFNHLFGYGVLDAGAMVKMAKDWKTVPERFHCVGGSVQDPEKIPSTGKLVLTLTTDACEGKENFVRYLEHVQAVITVNATRRGDLNINMTSPMGTKSILLSRRPRDDDSKVGFDKWPFMTTHTWGEDARGTWTLELGFVGSAPQKGVLKEWTLMLHGTQSAPYIDQVVRDYQSKLAMSKKEELEEELDEAVERSLKSILNKN

SEQ ID NO: 10121 - protein, 619 aa, Homo Sapiens
MVFASAERPVFTNHFLVELHKGGEDKARQVAAEHGFGVRKLPFAEGLYHFYHNGLAKAKRRRSLHHKQQLERDPRVKMALQQEGFDRKKRGYRDINEIDINMNDPLFTKQWYLINTGQADGTPGLDLNVAEAWELGYTGKGVTIGIMDDGIDYLHPDLASNYNAEASYDFSSNDPYPYPRYTDDWFNSHGTRCAGEVSAAANNNICGVGVAYNSKVAGIRMLDQPFMTDIIEASSISHMPQLIDIYSASWGPTDNGKTVDGPRELTLQAMADGVNKGRGGKGSIYVWASGDGGSYDDCNCDGYASSMWTISINSAINDGRTALYDESCSSTLASTFSNGRKRNPEAGVATTDLYGNCTLRHSGTSAAAPEAAGVFALALEANLGLTWRDMQHLTVLTSKRNQLHDEVHQWRRNGVGLEFNHLFGYGVLDAGAMVKMAKDWKTVPERFHCVGGSVQDPEKIPSTGKLVLTLTTDACEGKENFVRYLEHVQAVITVNATRRGDLNINMTSPMGTKSILLSRRPRDDDSKVGFDKWPFMTTHTWGEDARGTWTLELGFVGSAPQKGVLKEWTLMLHGTQSAPYIDQVVRDYQSKLAMSKKEELEEELDEAVERSLKSILNKN

SEQ ID NO: 10122 - protein, 755 aa, Homo Sapiens
MRPAPIALWLRLVLALALVRPRAVGWAPVRAPIYVSSWAVQVSQGNREVERLARKFGFVNLGPIFPDGQYFHLRHRGVVQQSLTPHWGHRLHLKKNPKVQWFQQQTLQRRVKRSVVVPTDPWFSKQWYMNSEAQPDLSILQAWSQGLSGQGIVVSVLDDGIEKDHPDLWANYDPLASYDFNDYDPDPQPRYTPSKENRHGTRCAGEVAAMANNGFCGVGVAFNARIGGVRMLDGTITDVIEAQSLSLQPQHIHIYSASWGPEDDGRTVDGPGILTREAFRRGVTKGRGGLGTLFIWASGNGGLHYDNCNCDGYTNSIHTLSVGSTTQQGRVPWYSEACASTLTTTYSSGVATDPQIVTTDLHHGCTDQHTGTSASAPLAAGMIALALEANPFLTWRDMQHLVVRASKPAHLQAEDWRTNGVGRQVSHHYGYGLLDAGLLVDTARTWLPTQPQRKCAVRVQSRPTPILPLIYIRENVSACAGLHNSIRSLEHVQAQLTLSYSRRGDLEISLTSPMGTRSTLVAIRPLDVSTEGYNNWVFMSTHFWDENPQGVWTLGLENKGYYFNTGTLYRYTLLLYGTAEDMTARPTGPQVTSSACVQRDTEGLCQACDGPAYILGQLCLAYCPPRFFNHTRLVTAGPGHTAAPALRVCSSCHASCYTCRGGSPRDCTSCPPSSTLDQQQGSCMGPTTPDSRPRLRAAACPHHRCPASAMVLSLLAVTLGGPVLCGMSMDLPLYAWLSRARATPTKPQVWLPAGT

SEQ ID NO: 10123 - protein, 230 aa, Homo Sapiens
MRPAPIALWLRLVLALALVRPRAVGWAPVRAPIYVSSWAVQVSQGNREVERLARKFGFVNLGPIFPDGQYFHLRHRGVVQQSLTPHWGHRLHLKKNPKVQWFQQQTLQRRVKRSVVVPTDPWFSKQWYMNSEAQPDLSILQAWSQGLSGQGIVVSVLDDGIEKDHPDLWANYDPLASYDFNDYDPDPQPRYTPSKENRRTDAGRYHHRCHRGPVAEPAAAAHPHLQRQLG

SEQ ID NO: 10124 - protein, 318 aa, Homo Sapiens
  misc_feature (1)..(1): Xaa can be any naturally occurring amino acid
XPIALWLRLVLALALVRPRAVGWAPVRAPIYVSSWAVQVSQGNREVERLARKFGFVNLGPIFPDGQYFHLRHRGVVQQSLTPHWGHRLHLKKNPKVQWFQQQTLQRRVKRSVVVPTDPWFSKQWYMNSEAQPDLSILQAWSQGLSGQGIVVSVLDDGIEKDHPDLWANYDPLASYDFNDYDPDPQPRYTPSKENRRTDAGRYHHRCHRGPVAEPAAAAHPHLQRQLGSRGRRPHGGRPRHPHPRGLPAWCDQASTRFPWAAPPSRAACPGTAKPAPPPSPPPTAAAWPPTPRSSPRTCITGAQTSTRAPRPQPHWRPA

SEQ ID NO: 10125 - protein, 101 aa, Homo Sapiens
CQPCHRFCATCAGAGADGCINCTEGYFMEDGRCVQSCSISYYFDHSSENGYKSCKKCDISCLTCNGPGFKNCTSCPSGYLLDLGMCQMGAICKDVSLFRGA

SEQ ID NO: 10126 - protein, 690 aa, Homo Sapiens
MGWGSRCCCPGRLDLLCVLALLGGCLLPVCRTRVYTNHWAVKIAGGFPEANRIASKYGFINIGQIGALKDYYHFYHSRTIKRSVISSRGTHSFISMEPKVEWIQQQVVKKRTKRDYDFSRAQSTYFNDPKWPSMWYMHCSDNTHPCQSDMNIEGAWKRGYTGKNIVVTILDDGIERTHPDLMQNYDALASCDVNGNDLDPMPRYDASNENKHGTRCAGEVAAAANNSHCTVGIAFNAKIGGVRMLDGDVTDMVEAKSVSFNPQHVHIYSASWGPDDDGKTVDGPAPLTRQAFENGVRMGRRGLGSVFVWASGNGGRSKDHCSCDGYTNSIYTISISSTAESGKKPWYLEECSSTLATTYSSGESYDKKIITTDLRQRCTDNHTGTSASAPMAAGIIALALEANPFLTWRDVQHVIVRTSRAGHLNANDWKTNAAGFKVSHLYGFGLMDAEAMVMEAEKWTTVPRQHVCVESTDRQIKTIRPNSAVRSIYKASGCSDNPNRHVNYLEHVVVRITITHPRRGDLAIYLTSPSGTRSQLLANRLFDHSMEGFKNWEFMTIHCWGERAAGDWVLEVYDTPSQLRNFKTPGKLKEWSLVLYGTSVQPYSPTNEFPKVERFRYSRVEDPTDDYGTEDYAGELASSGTQAKKRQLMHHPTTWENRMEWNGMKWNGMKWNGMEWNGMEWNRIESNRIE

SEQ ID NO: 10127 - protein, 913 aa, Homo Sapiens
MGWGSRCCCPGRLDLLCVLALLGGCLLPVCRTRVYTNHWAVKIAGGFPEANRIASKYGFINIGQIGALKDYYHFYHSRTIKRSVISSRGTHSFISMEPKVEWIQQQVVKKRTKRDYDFSRAQSTYFNDPKWPSMWYMHCSDNTHPCQSDMNIEGAWKRGYTGKNIVVTILDDGIERTHPDLMQNYDALASCDVNGNDLDPMPRYDASNENKHGTRCAGEVAAAANNSHCTVGIAFNAKIGGVRMLDGDVTDMVEAKSVSFNPQHVHIYSASWGPDDDGKTVDGPAPLTRQAFENGVRMGRRGLGSVFVWASGNGGRSKDHCSCDGYTNSIYTISISSTAESGKKPWYLEECSSTLATTYSSGESYDKKIITTDLRQRCTDNHTGTSASAPMAAGIIALALEANPFLTWRDVQHVIVRTSRAGHLNANDWKTNAAGFKVSHLYGFGLMDAEAMVMEAEKWTTVPRQHVCVESTDRQIKTIRPNSAVRSIYKASGCSDNPNRHVNYLEHVVVRITITHPRRGDLAIYLTSPSGTRSQLLANRLFDHSMEGFKNWEFMTIHCWGERAAGDWVLEVYDTPSQLRNFKTPGKLKEWSLVLYGTSVQPYSPTNEFPKVERFRYSRVEDPTDDYGTEDYAGPCDPECSEVGCDGPGPDHCNDCLHYYYKLKNNTRICVSSCPPGHYHADKKRCRKCAPNCESCFGSHGDQCMSCKYGYFLNEETNSCVTHCPDGSYQDTKKNLCRKCSENCKTCTEFHNCTECRDGLSLQGSRCSVSCEDGRYFNGQDCQPCHRFCATCAGAGADGCINCTEGYFMEDGRCVQSCSISYYFDHSSENGYKSCKKCDISCLTCNGPGFKNCTSCPSGYLLDLGMCQMGAICKDATEESWAEGGFCMLVKKNNLCQRKVLQQLCCKTCTFQG

SEQ ID NO: 10128 - protein, 1860 aa, Homo Sapiens
MGWGSRCCCPGRLDLLCVLALLGGCLLPVCRTRVYTNHWAVKIAGGFPEANRIASKYGFINIGQIGALKDYYHFYHSRTIKRSVISSRGTHSFISMEPKVEWIQQQVVKKRTKRDYDFSRAQSTYFNDPKWPSMWYMHCSDNTHPCQSDMNIEGAWKRGYTGKNIVVTILDDGIERTHPDLMQNYDALASCDVNGNDLDPMPRYDASNENKHGTRCAGEVAAAANNSHCTVGIAFNAKIGGVRMLDGDVTDMVEAKSVSFNPQHVHIYSASWGPDDDGKTVDGPAPLTRQAFENGVRMGRRGLGSVFVWASGNGGRSKDHCSCDGYTNSIYTISISSTAESGKKPWYLEECSSTLATTYSSGESYDKKIITTDLRQRCTDNHTGTSASAPMAAGIIALALEANPFLTWRDVQHVIVRTSRAGHLNANDWKTNAAGFKVSHLYGFGLMDAEAMVMEAEKWTTVPRQHVCVESTDRQIKTIRPNSAVRSIYKASGCSDNPNRHVNYLEHVVVRITITHPRRGDLAIYLTSPSGTRSQLLANRLFDHSMEGFKNWEFMTIHCWGERAAGDWVLEVYDTPSQLRNFKTPGKLKEWSLVLYGTSVQPYSPTNEFPKVERFRYSRVEDPTDDYGTEDYAGPCDPECSEVGCDGPGPDHCNDCLHYYYKLKNNTRICVSSCPPGHYHADKKRCRKCAPNCESCFGSHGDQCMSCKYGYFLNEETNSCVTHCPDGSYQDTKKNLCRKCSENCKTCTEFHNCTECRDGLSLQGSRCSVSCEDGRYFNGQDCQPCHRFCATCAGAGADGCINCTEGYFMEDGRCVQSCSISYYFDHSSENGYKSCKKCDISCLTCNGPGFKNCTSCPSGYLLDLGMCQMGAICKDGEYVDEHGHCQTCEASCAKCQGPTQEDCTTCPMTRIFDDGRCVSNCPSWKFEFENQCHPCHHTCQRCQGSGPTHCTSCGADNYGREHFLYQGECGDSCPEGHYATEGNTCLPCPDNCELCHSVHVCTRCMKGYFIAPTNHTCQKLECGQGEVQDPDYEECVPCEEGCLGCSLDDPGTCTSCAMGYYRFDHHCYKTCPEKTYSEEVECKACDSNCGSCDQNGCYWCEEGFFLLGGSCVRKCGPGFYGDQEMGECESCHRACETCTGPGHDECSSCQEGLQLLRGMCVHATKTQEEGKFWNDILRKLQPCHSSCKTCNGSATLCTSCPKGAYLLAQACVSSCPQGTWPSVRSGSCENCTEACAICSGADLCKKCQMQPGHPLFLHEGRCYSKCPEGSYAEDGICERCSSPCRTCEGNATNCHSCEGGHVLHHGVCQENCPERHVAVKGVCKHCPEMCQDCIHEKTCKECTPEFFLHDDMCHQSCPRGFYADSRHCVPCHKDCLECSGPKADDCELCLESSWVLYDGLCLEECPAGTYYEKETKECRDCHKSCLTCSSSGTCTTCQKGLIMNPRGSCMANEKCSPSEYWDEDAPGCKPCHVKCFHCMGPAEDQCQTCPMNSLLLNTTCVKDCPEGYYADEDSNRCAHCHSSCRTCEGRHSRQCHSCRPGWFQLGKECLLQCREGYYADNSTGRCERCNRSCKGCQGPRPTDCLSCDRFFFLLRSKGECHRSCPDHYYVEQSTQTCERCHPTCDQCKGKGALNCLSCVWSYHLMGGICTSDCLVGEYRVGEGEKFNCEKCHESCMECKGPGAKNCTLCPANLVLHMDDSHCLHCCNTSDPPSAQECCDCQDTTDECILRTSKVRPATEHFKTALFITSSMMLVLLLGAAVVVWKKSRGRVQPAAKAGYEKLADPNKSYSSYKSSYRESTSFEEDQVIEYRDRDYDEDDDDDIVYMGQDGTVYRKFKYGLLDDDDIDELEYDDESYSYYQ

SEQ ID NO: 10129 - protein, 1560 aa, Homo Sapiens
NSIYTISISSTAESGKKPWYLEECSSTLATTYSSGESYDKKIITTDLRQRCTDNHTGTSASAPMAAGIIALALEANPFLTWRDVQHVIVRTSRAGHLNANDWKTNAAGFKVSHLYGFGLMDAEAMVMEAEKWTTVPRQHVCVESTDRQIKTIRPNSAVRSIYKASGCSDNPNRHVNYLEHVVVRITITHPRRGDLAIYLTSPSGTRSQLLANRLFDHSMEGFKNWEFMTIHCWGERAAGDWVLEVYDTPSQLRNFKTPGKLKEWSLVLYGTSVQPYSPTNEFPKVERFRYSRVEDPTDDYGTEDYAGPCDPECSEVGCDGPGPDHCNDCLHYYYKLKNNTRICVSSCPPGHYHADKKRCRKCAPNCESCFGSHGDQCMSCKYGYFLNEETNSCVTHCPDGSYQDTKKNLCRKCSENCKTCTEFHNCTECRDGLSLQGSRCSVSCEDGRYFNGQDCQPCHRFCATCAGAGADGCINCTEGYFMEDGRCVQSCSISYYFDHSSENGYKSCKKCDISCLTCNGPGFKNCTSCPSGYLLDLGMCQMGAICKDGEYVDEHGHCQTCEASCAKCQGPTQEDCTTCPMTRIFDDGRCVSNCPSWKFEFENQCHPCHHTCQRCQGSGPTHCTSCGADNYGREHFLYQGECGDSCPEGHYATEGNTCLPCPDNCELCHSVHVCTRCMKGYFIAPTNHTCQKLECGQGEVQDPDYEECVPCEEGCLGCSLDDPGTCTSCAMGYYRFDHHCYKTCPEKTYSEEVECKACDSNCGSCDQNGCYWCEEGFFLLGGSCVRKCGPGFYGDQEMGECESCHRACETCTGPGHDECSSCQEGLQLLRGMCVHATKTQEEGKFWNEAVSTANLSVVKSLLQERRRWKVQIKRDILRKLQPCHSSCKTCNGSATLCTSCPKGAYLLAQACVSSCPQGTWPSVRSGSCENCTEACAICSGADLCKKCQMQPGHPLFLHEGRCYSKCPEGSYAEDGICERCSSPCRTCEGNATNCHSCEGGHVLHHGVCQENCPERHVAVKGVCKHCPEMCQDCIHEKTCKECTPEFFLHDDMCHQSCPRGFYADSRHCVPCHKDCLECSGPKADDCELCLESSWVLYDGLCLEECPAGTYYEKETKECRDCHKSCLTCSSSGTCTTCQKGLIMNPRGSCMANEKCSPSEYWDEDAPGCKPCHVKCFHCMGPAEDQCQTCPMNSLLLNTTCVKDCPEGYYADEDSNRCAHCHSSCRTCEGRHSRQCHSCRPGWFQLGKECLLQCREGYYADNSTGRCERCNRSCKGCQGPRPTDCLSCDRFFFLLRSKGECHRSCPDHYYVEQSTQTCERCHPTCDQCKGKGALNCLSCVWSYHLMGGICTSDCLVGEYRVGEGEKFNCEKCHESCMECKGPGAKNCTLCPANLVLHMDDSHCLHCCNTSDPPSAQECCDCQDTTDECILRTSKVRPATEHFKTALFITSSMMLVLLLGAAVVVWKKSRGRVQPAAKAGYEKLADPNKSYSSYKSSYRESTSFEEDQVIEYRDRDYDEDDDDDIVYMGQDGTVYRKFKYGLLDDDDIDELEYDDESYSYYQ

SEQ ID NO: 10130 - protein, 692 aa, Homo Sapiens
MGTVSSRRSWWPLPLLLLLLLLLGPAGARAQEDEDGDYEELVLALRSEEDGLAEAPEHGTTATFHRCAKDPWRLPGTYVVVLKEETHLSQSERTARRLQAQAARRGYLTKILHVFHGLLPGFLVKMSGDLLELALKLPHVDYIEEDSSVFAQSIPWNLERITPPRYRADEYQPPDGGSLVEVYLLDTSIQSDHREIEGRVMVTDFENVPEEDGTRFHRQASKCDSHGTHLAGVVSGRDAGVAKGASMRSLRVLNCQGKGTVSGTLIGLEFIRKSQLVQPVGPLVVLLPLAGGYSRVLNAACQRLARAGVVLVTAAGNFRDDACLYSPASAPEVITVGATNAQDQPVTLGTLGTNFGRCVDLFAPGEDIIGASSDCSTCFVSQSGTSQAAAHVAGIAAMMLSAEPELTLAELRQRLIHFSAKDVINEAWFPEDQRVLTPNLVAALPPSTHGAGWQLFCRTVWSAHSGPTRMATAVARCAPDEELLSCSSFSRSGKRRGERMEAQGGKLVCRAHNAFGGEGVYAIARCCLLPQANCSVHTAPPAEASMGTRVHCHQQGHVLTGCSSHWEVEDLGTHKPPVLRPRGQPNQCVGHREASIHASCCHAPGLECKVKEHGIPAPQEQVTVACEEGWTLTGCSALPGTSHVLGAYAVDNTCVVRSRDVSTTGSTSEGAVTAVAICCRSRHLAQASQELQ

SEQ ID NO: 10131 - protein, 293 aa, Homo Sapiens
MGRVVAELVSSLLGLWLLLCSCGCPEGAELRAPPDKIAIIGAGIGGTSAAYYLRQKFGKDVKIDLFEREEVGGRLATMMVQGQEYEAGGSVIHPLNLHMKRFVKDLGLSAVQASGGLLGIYNGETLVFEESNWFIINVIKLVWRYGFQSLRMHMWVEDVLDKFMRIYRYQSHDYAFSSVEKLLHALGGDDFLGMLNRTLLETLQKAGFSEKFLNEMIAPVMRVNYGQSTDINAFVGAVSLSCSDSGLWAVEGGNKLVCSGLLQASKSNLISGSVMYIEEKTKTKYTVLGLCPL

SEQ ID NO: 10132 - protein, 505 aa, Homo Sapiens
MGRVVAELVSSLLGLWLLLCSCGCPEGAELRAPPDKIAIIGAGIGGTSAAYYLRQKFGKDVKIDLFEREEVGGRLATMMVQGQEYEAGGSVIHPLNLHMKRFVKDLGLSAVQASGGLLGIYNGETLVFEESNWFIINVIKLVWRYGFQSLRMHMWVEDVLDKFMRIYRYQSHDYAFSSVEKLLHALGGDDFLGMLNRTLLETLQKAGFSEKFLNEMIAPVMRVNYGQSTDINAFVGAVSLSCSDSGLWAVEGGNKLVCSGLLQASKSNLISGSVMYIEEKTKTKYTGNPTKMYEVVYQIGTETRSDFYDIVLVATPLNRKMSNITFLNFDPPIEEFHQYYQHIVTTLVKGELNTSIFSSRPIDKFGLNTVLTTDNSDLFINSIGIVPSVREKEDPEPSTDGTYVWKIFSQETLTKAQILKLFLSYDYAVKKPWLAYPHYKPPEKCPSIILHDRLYYLNGIECAASAMEMSAIAAHNAALLAYHRWNGHTDMIDQDGLYEKLKTEL

SEQ ID NO: 10133 - protein, 130 aa, Homo Sapiens
MMVQGQEYEAGGSVIHPLNLHMKRFVKDLGLSAVQASGGLLGIYNGETLVFEESNWFIINVIKLVWRYGFQSLRMHMWVEDVLDKFMRIYRYQSHDYAFSSVEKLLHALGGDDFLGMLNRTLLETLQKAG

SEQ ID NO: 10134 - protein, 154 aa, Homo Sapiens
MMVQGQEYEAGGSVIHPLNLHMKRFVKDLGLSAVQASGGLLGIYNGETLVFEESNWFIINVIKLVWRYGFQSLRMHMWVEDVLDKFMRIYRYQSHDYAFSSVEKLLHALGGDDFLGMLNRTLLETLQKAGFSEKFLNEMIAPVMRVNYGQSTDI

SEQ ID NO: 10135 - protein, 209 aa, Homo Sapiens
MMVQGQEYEAGGSVIHPLNLHMKRFVKDLGLSAVQASGGLLGIYNGETLVFEESNWFIINVIKLVWRYGFQSLRMHMWVEDVLDKFMRIYRYQSHDYAFSSVEKLLHALGGDDFLGMLNRTLLETLQKAGFSEKFLNEMIAPVMRVNYGQSTDINAFVGAVSLSCSDSGLWAVEGGNKLVCSGLLQASKSNLISGSVMYIEEKTKTKYT

SEQ ID NO: 10136 - protein, 111 aa, Homo Sapiens
MARAAPLLAALTALLAAAAAGGDAPPGKIAVVGAGIGGSAVAHFLQQHFGPRVQIDVYEKGTVGGRLATISVNKQHYESGAASFHSLSLHMQDFVKLLDGATETREGKELA

SEQ ID NO: 10137 - protein, 494 aa, Homo Sapiens
MARAAPLLAALTALLAAAAAGGDAPPGKIAVVGAGIGGSAVAHFLQQHFGPRVQIDVYEKGTVGGRLATISVNKQHYESGAASFHSLSLHMQDFVKLLGLRHRREVVGRSAIFGGEHFMLEETDWYLLNLFRLWWHYGISFLRLQMWVEEVMEKFMRIYKYQAHGYAFSGVEELLYSLGESTFVNMTQHSVAESLLQVGVTQRFIDDVVSAVLRASYGQSAAMPAFAGAMSLAGAQGSLWSVEGGNKLVCSGLLKLTKANVIHATVTSVTLHSTEGKALYQVAYENEVGNSSDFYDIVVIATPLHLDNSSSNLTFAGFHPPIDDVQGSFQPTVVSLVHGYLNSSYFGFPDPKLFPFANILTTDFPSFFCTLDNICPVNISASFRRKQPQEAAVWRVQSPKPLFRTQLKTLFRSYYSVQTAEWQAHPLYGSRPTLPRFALHDQLFYLNALEWAASSVEVMAVAAKNVALLAYNRWYQDLDKIDQKDLMHKVKTEL

SEQ ID NO: 10138 - protein, 82 aa, Homo Sapiens
MARAAPLLAALTALLAAAAAGGDAPPGKIGAGRTRGGWGWDWGLCCGPFSPAALWTSGADRRVREGNRGWPLGHHLSQQAAL

SEQ ID NO: 10139 - protein, 82 aa, Homo Sapiens; identical to SEQ ID NO: 10138

SEQ ID NO: 10140 - protein, 404 aa, Homo Sapiens
MQDFVKLLGLRHRREVVGRSAIFGGEHFMLEETDWYLLNLFRLWWHYGISFLRLQMWVEEVMEKFMRIYKYQAHGYAFSGVEELLYSLGESTFVNMTQHSVAESLLQVGVTQRFIDDVVSAVLRASYGQSAAMPAFAGAMSLAGAQGSLWSVEGGNKLVCSGLLKLTKANVIHATVTSVTLHSTEGKALYQVAYENEVGNSSDFYDIVVIATPLHLDNSSSNLTFAGFHPPIDDVQGSFQPTVVSLVHGYLNSSYFGFPDPKLFPFANILTTDFPSFFCTLDNICPVNISASFRRKQPQEAAVWRVQSPKPLFRTQLKTLFRSYYSVQTAEWQAHPLYGSRPTLPRFALHDQLFYLNALEWAASSVEVMAVAAKNVALLAYNRWYQDLDKIDQKDLMHKVKTEL

SEQ ID NO: 10141 - protein, 933 aa, Homo Sapiens
MAASRLDFGEVETFLDRHPELFEDYLMRKGKQEMVEKWLQRHSQGQGALGPRPSLAGTSSLAHSTCRGGSSVGGGTGPNGSAHSQPLPGGGDCGGVPLSPSWAGGSRGDGNLQRRASQKELRKSFARSKAIHVNRTYDEQVTSRAQEPLSSVRRRALLRKASSLPPTTAHILSALLESRVNLPRYPPTAIDYKCHLKKHNERQFFLELVKDISNDLDLTSLSYKILIFVCLMVDADRCSLFLVEGAAAGKKTLVSKFFDVHAGTPLLPCSSTENSNEVQVPWGKGIIGYVGEHGETVNIPDAYQDRRFNDEIDKLTGYKTKSLLCMPIRSSDGEIIGVAQAINKIPEGAPFTEDDEKVMQMYLPFCGIAISNAQLFAASRKEYERSRALLEVVNDLFEEQTDLEKIVKKIMHRAQTLLKCERCSVLLLEDIESPVVKFTKSFELMSPKCSADAENSFKESMEKSSYSDWLINNSIAELVASTGLPVNISDAYQDPRFDAEADQISGFHIRSVLCVPIWNSNHQIIGVAQVLNRLDGKPFDDADQRLFEAFVIFCGLGINNTIMYDQVKKSWAKQSVALDVLSYHATCSKAEVDKFKAANIPLVSELAIDDIHFDDFSLDVDAMITAALRMFMELGMVQKFKIDYETLCRWLLTVRKNYRMVLYHNWRHAFNVCQLMFAMLTTAGFQDILTEVEILAVIVGCLCHDLDHRGTNNAFQAKSGSALAQLYGTSATLEHHHFNHAVMILQSEGHNIFANLSSKEYSDLMQLLKQSILATDLTLYFERRTEFFELVSKGEYDWNIKNHRDIFRSMLMTACDLGAVTKPWEISRQVAELVTSEFFEQGDRERLELKLTPSAIFDRNRKDELPRLQLEWIDSICMPLYQALVKVNVKLKPMLDSVATNRSKWEELHQKRLLASTASSSPASVMVAKEDRN

SEQ ID NO: 10142 - protein, 575 aa, Homo Sapiens
MQMYLPFCGIAISNAQLFAASRKEYERSRALLEVVNDLFEEQTDLEKIVKKIMHRAQTLLKCERCSVLLLEDIESPVVKFTKSFELMSPKCSADAENSFKESMEKSSYSDWLINNSIAELVASTGLPVNISDAYQDPRFDAEADQISGFHIRSVLCVPIWNSNHQIIGVAQVLNRLDGKPFDDADQRLFEAFVIFCGLGINNTIMYDQVKKSWAKQSVALDVLSYHATCSKAEVDKFKAANIPLVSELAIDDIHFDDFSLDVDAMITAALRMFMELGMVQKFKIDYETLCRWLLTVRKNYRMVLYHNWRHAFNVCQLMFAMLTTAGFQDILTEVEILAVIVGCLCHDLDHRGTNNAFQAKSGSALAQLYGTSATLEHHHFNHAVMILQSEGHNIFANLSSKEYSDLMQLLKQSILATDLTLYFERRTEFFELVSKGEYDWNIKNHRDIFRSMLMTACDLGAVTKPWEISRQVAELVTSEFFEQGDRERLELKLTPSAIFDRNRKDELPRLQLEWIDSICMPLYQALVKVNVKLKPMLDSVATNRSKWEELHQKRLLASTASSSPASVMVAKEDRN

SEQ ID NO: 10143 - protein, 36 aa, Homo Sapiens
MQMYLPFCGIAISNAQLFAASRKEYERSRSYVRDVY

SEQ ID NO: 10144 - protein, 489 aa, Homo Sapiens
MSPKCSADAENSFKESMEKSSYSDWLINNSIAELVASTGLPVNISDAYQDPRFDAEADQISGFHIRSVLCVPIWNSNHQIIGVAQVLNRLDGKPFDDADQRLFEAFVIFCGLGINNTIMYDQVKKSWAKQSVALDVLSYHATCSKAEVDKFKAANIPLVSELAIDDIHFDDFSLDVDAMITAALRMFMELGMVQKFKIDYETLCRWLLTVRKNYRMVLYHNWRHAFNVCQLMFAMLTTAGFQDILTEVEILAVIVGCLCHDLDHRGTNNAFQAKSGSALAQLYGTSATLEHHHFNHAVMILQSEGHNIFANLSSKEYSDLMQLLKQSILATDLTLYFERRTEFFELVSKGEYDWNIKNHRDIFRSMLMTACDLGAVTKPWEISRQVAELVTSEFFEQGDRERLELKLTPSAIFDRNRKDELPRLQLEWIDSICMPLYQALVKVNVKLKPMLDSVATNRSKWEELHQKRLLASTASSSPASVMVAKEDRN

SEQ ID NO: 10145 - protein, 437 aa, Homo Sapiens
  misc_feature (1)..(1): Xaa can be any naturally occurring amino acid
XLPFCGIAISNAQLFAASRKEYERSRALLEVVNDLFEEQTDLEKIVKKIMHRAQTLLKCERCSVLLLEDIESPVVKFTKSFELMSPKCSADAENSFKESMEKSSYSDWLINNSIAELVASTGLPVNISDAYQDPRFDAEADQISGFHIRSVLCVPIWNSNHQIIGVAQVLNRLDGKPFDDADQRLFEVLSYHATCSKAEVDKFKAANIPLVSELAIDDIHFDDFSLDVDAMITAALRMFMELGMVQKFKIDYETLCRWLLTVRKNYRMVLYHNWRHAFNVCQLMFAMLTTAGFQDILTEVEILAVIVGCLCHDLDHRGTNNAFQAKSGSALAQLYGTSATLEHHHFNHAVMILQSEGHNIFANLSSKEYSDLMQLLKQSILATDLTLYFERRTEFFELVSKGEYDWNIKNHRDIFRSMLMTACDLGAVTKPWEISRQ

SEQ ID NO: 10146 - protein, 136 aa, Homo Sapiens
  misc_feature (1)..(1): Xaa can be any naturally occurring amino acid
XVLPLVEERKISMLMTACDLGAVTKPWEISRQVAELVTSEFFEQGDRERLELKLTPSAIFDRNRKDELPRLQLEWIDSICMPLYQALVKVNVKLKPMLDSVATNRSKWEELHQKRLLASTASSSPASVMVAKEDRN

SEQ ID NO: 10147 - protein, 327 aa, Homo Sapiens
FPTASSVPEHKGVGFHAWDVRNLRKLRGQVPAGSLPPTDPSLHRWFLAPLPSPEVIGVAELVNKINGPWFSKFDEDLATAFSIYCGISIAHSLLYKKVNEAQYRSHLANEMMMYHMKVSDDEYTKLLHDGIQPVAAIDSNFASFTYTPRSLPEDDTSMAILSMLQDMNFINNYKIDCPTLARFCLMVKKGYRDPPYHNWMHAFSVSHFCYLLYKNLELTNYLEDIEIFALFISCMCHDLDHRGTNNSFQVASKSVLAALYSSEGSVMERHHFAQAIAILNTHGCNIFDHFSRKDYQRMLDLMRDIILATDLAHHLRIFKDLQKMAEG

SEQ ID NO: 10148 - protein, 38 aa, Homo Sapiens
MGQACGHSILCRSQQYPAARPAEPQPGPPCKGARTPRE

SEQ ID NO: 10149 - protein, 941 aa, Homo Sapiens
MGQACGHSILCRSQQYPAARPAEPRGQQVFLKPDEPPPPPQPCADSLQDALLSLGSVIDISGLQRAVKEALSAVLPRVETVYTYLLDGESQLVCEDPPHELPQEGKVREAIISQKRLGCNGLGFSDLPGKPLARLVAPLAPDTQVLVMPLADKEAGAVAAVILVHCGQLSDNEEWSLQAVEKHTLVALRRVQVLQQRGPREAPRAVQNPPEGTAEDQKGGAAYTDRDRKILQLCGELYDLDASSLQLKVLQYLQQETRASRCCLLLVSEDNLQLSCKVIGDKVLGEEVSFPLTGCLGQVVEDKKSIQLKDLTSEDVQQLQSMLGCELQAMLCVPVISRATDQVVALACAFNKLEGDLFTDEDEHVIQHCFHYTSTVLTSTLAFQKEQKLKCECQALLQVAKNLFTHLDDVSVLLQEIITEARNLSNAEICSVFLLDQNELVAKVFDGGVVDDESYEIRIPADQGIAGHVATTGQILNIPDAYAHPLFYRGVDDSTGFRTRNILCFPIKNENQEVIGVAELVNKINGPWFSKFDEDLATAFSIYCGISIAHSLLYKKVNEAQYRSHLANEMMMYHMKVSDDEYTKLLHDGIQPVAAIDSNFASFTYTPRSLPEDDTSMAILSMLQDMNFINNYKIDCPTLARFCLMVKKGYRDPPYHNWMHAFSVSHFCYLLYKNLELTNYLEDIEIFALFISCMCHDLDHRGTNNSFQVASKSVLAALYSSEGSVMERHHFAQAIAILNTHGCNIFDHFSRKDYQRMLDLMRDIILATDLAHHLRIFKDLQKMAEVGYDRNNKQHHRLLLCLLMTSCDLSDQTKGWKTTRKIAELIYKEFFSQGDLEKAMGNRPMEMMDREKAYIPELQISFMEHIAMPIYKLLQDLFPKAAELYERVASNREHWTKVSHKFTIRGLPSNNSLDFLDEEYEVPDLDGTRAPINGCCSLDAE

SEQ ID NO: 10150 - protein, 826 aa, Homo Sapiens
MGQACGHSILCRSQQYPAARPAEPRGQQVFLKPDEPPPPPQPCADSLQVHCGQLSDNEEWSLQAVEKHTLVALRRVQVLQQRGPREAPRAVQNPPEGTAEDQKGGAAYTDRDRKILQLCGELYDLDASSLQLKVLQYLQQETRASRCCLLLVSEDNLQLSCKVIGDKVLGEEVSFPLTGCLGQVVEDKKSIQLKDLTSEDVQQLQSMLGCELQAMLCVPVISRATDQVVALACAFNKLEGDLFTDEDEHVIQHCFHYTSTVLTSTLAFQKEQKLKCECQALLQVAKNLFTHLDDVSVLLQEIITEARNLSNAEICSVFLLDQNELVAKVFDGGVVDDESYEIRIPADQGIAGHVATTGQILNIPDAYAHPLFYRGVDDSTGFRTRNILCFPIKNENQEVIGVAELVNKINGPWFSKFDEDLATAFSIYCGISIAHSLLYKKVNEAQYRSHLANEMMMYHMKVSDDEYTKLLHDGIQPVAAIDSNFASFTYTPRSLPEDDTSMAILSMLQDMNFINNYKIDCPTLARFCLMVKKGYRDPPYHNWMHAFSVSHFCYLLYKNLELTNYLEDIEIFALFISCMCHDLDHRGTNNSFQVASKSVLAALYSSEGSVMERHHFAQAIAILNTHGCNIFDHFSRKDYQRMLDLMRDIILATDLAHHLRIFKDLQKMAEVGYDRNNKQHHRLLLCLLMTSCDLSDQTKGWKTTRKIAELIYKEFFSQGDLEKAMGNRPMEMMDREKAYIPELQISFMEHIAMPIYKLLQDLFPKAAELYERVASNREHWTKVSHKFTIRGLPSNNSLDFLDEEYEVPDLDGTRAPINGCCSLDAE

SEQ ID NO: 10151 - protein, 39 aa, Homo Sapiens
MGQACGHSILCRSQQYPAARPAEPSLQLPEHCFHTCDLI

SEQ ID NO: 10152 - protein, 932 aa, Homo Sapiens
MKKQRIQEGKSLAHRRGQQVFLKPDEPPPPPQPCADSLQDALLSLGSVIDISGLQRAVKEALSAVLPRVETVYTYLLDGESQLVCEDPPHELPQEGKVREAIISQKRLGCNGLGFSDLPGKPLARLVAPLAPDTQVLVMPLADKEAGAVAAVILVHCGQLSDNEEWSLQAVEKHTLVALRRVQVLQQRGPREAPRAVQNPPEGTAEDQKGGAAYTDRDRKILQLCGELYDLDASSLQLKVLQYLQQETRASRCCLLLVSEDNLQLSCKVIGDKVLGEEVSFPLTGCLGQVVEDKKSIQLKDLTSEDVQQLQSMLGCELQAMLCVPVISRATDQVVALACAFNKLEGDLFTDEDEHVIQHCFHYTSTVLTSTLAFQKEQKLKCECQALLQVAKNLFTHLDDVSVLLQEIITEARNLSNAEICSVFLLDQNELVAKVFDGGVVDDESYEIRIPADQGIAGHVATTGQILNIPDAYAHPLFYRGVDDSTGFRTRNILCFPIKNENQEVIGVAELVNKINGPWFSKFDEDLATAFSIYCGISIAHSLLYKKVNEAQYRSHLANEMMMYHMKVSDDEYTKLLHDGIQPVAAIDSNFASFTYTPRSLPEDDTSMAILSMLQDMNFINNYKIDCPTLARFCLMVKKGYRDPPYHNWMHAFSVSHFCYLLYKNLELTNYLEDIEIFALFISCMCHDLDHRGTNNSFQVASKSVLAALYSSEGSVMERHHFAQAIAILNTHGCNIFDHFSRKDYQRMLDLMRDIILATDLAHHLRIFKDLQKMAEVGYDRNNKQHHRLLLCLLMTSCDLSDQTKGWKTTRKIAELIYKEFFSQGDLEKAMGNRPMEMMDREKAYIPELQISFMEHIAMPIYKLLQDLFPKAAELYERVASNREHWTKVSHKFTIRGLPSNNSLDFLDEEYEVPDLDGTRAPINGCCSLDAE

SEQ ID NO: 10153 - protein, 198 aa, Homo Sapiens
MLQDMNFINNYKIDCPTLARFCLMVKKGYRDPPYHNWMHAFSVSHFCYLLYKNLELTNYLEDIEIFALFISCMCHDLDHRGTNNSFQVASKSVLAALYSSEGSVMERHHFAQAIAILNTHGCNIFDHFSRKDYQRMLDLMRDIILATDLAHHLRIFKDLQKMAEVGYDRNNKQHHRLLLCLLMTSCDLSDQTKGWKTT

SEQ ID NO: 10154 - protein, 178 aa, Homo Sapiens
MMMYHMKVSDDEYTKLLHDGIQPVAAIDSNFASFTYTPRSLPEDDTSMAILSMLQDMNFINNYKIDCPTLARFCLMVKKGYRDPPYHNWMHAFSVSHFCYLLYKNLELTNYLEDIEIFALFISCMCHDLDHRGTNNSFQVASKSVLAALYSSEGSVMERHHFAQAIAILNTHGCNIFD

SEQ ID NO: 10155 - protein, 87 aa, Homo Sapiens
MRRQPAASLDPLAKEPGPPGSRDDRLEDALLSLGSVIDISGLQRAVKEALSAVLPRVETVYTYLLDGESQLVCEDPPHELPQEGKVR

SEQ ID NO: 10156 - protein, 144 aa, Homo Sapiens
MRRQPAASLDPLAKEPGPPGSRDDRLEDALLSLGSVIDISGLQRAVKEALSAVLPRVETVYTYLLDGESQLVCEDPPHELPQEGKVREAIISQKRLGCNGLGFSDLPGKPLARLVAPLAPDTQVLVMPLADKEAGAVAAVILVH

SEQ ID NO: 10157 - protein, 920 aa, Homo Sapiens
MRRQPAASLDPLAKEPGPPGSRDDRLEDALLSLGSVIDISGLQRAVKEALSAVLPRVETVYTYLLDGESQLVCEDPPHELPQEGKVREAIISQKRLGCNGLGFSDLPGKPLARLVAPLAPDTQVLVMPLADKEAGAVAAVILVHCGQLSDNEEWSLQAVEKHTLVALRRVQVLQQRGPREAPRAVQNPPEGTAEDQKGGAAYTDRDRKILQLCGELYDLDASSLQLKVLQYLQQETRASRCCLLLVSEDNLQLSCKVIGDKVLGEEVSFPLTGCLGQVVEDKKSIQLKDLTSEDVQQLQSMLGCELQAMLCVPVISRATDQVVALACAFNKLEGDLFTDEDEHVIQHCFHYTSTVLTSTLAFQKEQKLKCECQALLQVAKNLFTHLDDVSVLLQEIITEARNLSNAEICSVFLLDQNELVAKVFDGGVVDDESYEIRIPADQGIAGHVATTGQILNIPDAYAHPLFYRGVDDSTGFRTRNILCFPIKNENQEVIGVAELVNKINGPWFSKFDEDLATAFSIYCGISIAHSLLYKKVNEAQYRSHLANEMMMYHMKVSDDEYTKLLHDGIQPVAAIDSNFASFTYTPRSLPEDDTSMAILSMLQDMNFINNYKIDCPTLARFCLMVKKGYRDPPYHNWMHAFSVSHFCYLLYKNLELTNYLEDIEIFALFISCMCHDLDHRGTNNSFQVASKSVLAALYSSEGSVMERHHFAQAIAILNTHGCNIFDHFSRKDYQRMLDLMRDIILATDLAHHLRIFKDLQKMAEVGYDRNNKQHHRLLLCLLMTSCDLSDQTKGWKTTRKIAELIYKEFFSQGDLEKAMGNRPMEMMDREKAYIPELQISFMEHIAMPIYKLLQDLFPKAAELYERVASNREHWTKVSHKFTIRGLPSNNSLDFLDEEYEVPDLDGTRAPINGCCSLDAE

SEQ ID NO: 10158 - protein, 92 aa, Homo Sapiens
MSYILKMPGTCLPGEGTTYELPPSSLHPSSAPVTSGGTCPALLTEAGWEAPIMAFTEAASAVGPSWTHSGASRSSSSRTSRRRRRSHAPTAC

SEQ ID NO: 10159 - protein, 106 aa, Homo Sapiens
MVLVLHHILIAVVQFLRRGQQVFLKPDEPPPPPQPCADSLQDALLSLGSVIDISGLQRAVKEALSAVLPRVETVYTYLLDGESQLVCEDPPHELPQEGKVRCTVAS

SEQ ID NO: 10160 - protein, 934 aa, Homo Sapiens
MVLVLHHILIAVVQFLRRGQQVFLKPDEPPPPPQPCADSLQDALLSLGSVIDISGLQRAVKEALSAVLPRVETVYTYLLDGESQLVCEDPPHELPQEGKVREAIISQKRLGCNGLGFSDLPGKPLARLVAPLAPDTQVLVMPLADKEAGAVAAVILVHCGQLSDNEEWSLQAVEKHTLVALRRVQVLQQRGPREAPRAVQNPPEGTAEDQKGGAAYTDRDRKILQLCGELYDLDASSLQLKVLQYLQQETRASRCCLLLVSEDNLQLSCKVIGDKVLGEEVSFPLTGCLGQVVEDKKSIQLKDLTSEDVQQLQSMLGCELQAMLCVPVISRATDQVVALACAFNKLEGDLFTDEDEHVIQHCFHYTSTVLTSTLAFQKEQKLKCECQALLQVAKNLFTHLDDVSVLLQEIITEARNLSNAEICSVFLLDQNELVAKVFDGGVVDDESYEIRIPADQGIAGHVATTGQILNIPDAYAHPLFYRGVDDSTGFRTRNILCFPIKNENQEVIGVAELVNKINGPWFSKFDEDLATAFSIYCGISIAHSLLYKKVNEAQYRSHLANEMMMYHMKVSDDEYTKLLHDGIQPVAAIDSNFASFTYTPRSLPEDDTSMAILSMLQDMNFINNYKIDCPTLARFCLMVKKGYRDPPYHNWMHAFSVSHFCYLLYKNLELTNYLEDIEIFALFISCMCHDLDHRGTNNSFQVASKSVLAALYSSEGSVMERHHFAQAIAILNTHGCNIFDHFSRKDYQRMLDLMRDIILATDLAHHLRIFKDLQKMAEVGYDRNNKQHHRLLLCLLMTSCDLSDQTKGWKTTRKIAELIYKEFFSQGDLEKAMGNRPMEMMDREKAYIPELQISFMEHIAMPIYKLLQDLFPKAAELYERVASNREHWTKVSHKFTIRGLPSNNSLDFLDEEYEVPDLDGTRAPINGCCSLDAE

SEQ ID NO: 10161 - protein, 685 aa, Homo Sapiens
MVLVLHHILIAVVQFLRRGQQVFLKPDEPPPPPQPCADSLQDALLSLGSVIDISGLQRAVKEALSAVLPRVETVYTYLLDGESQLVCEDPPHELPQEGKVRFTDEDEHVIQHCFHYTSTVLTSTLAFQKEQKLKCECQALLQVAKNLFTHLDDVSVLLQEIITEARNLSNAEICSVFLLDQNELVAKVFDGGVVDDESYEIRIPADQGIAGHVATTGQILNIPDAYAHPLFYRGVDDSTGFRTRNILCFPIKNENQEVIGVAELVNKINGPWFSKFDEDLATAFSIYCGISIAHSLLYKKVNEAQYRSHLANEMMMYHMKVSDDEYTKLLHDGIQPVAAIDSNFASFTYTPRSLPEDDTSMAILSMLQDMNFINNYKIDCPTLARFCLMVKKGYRDPPYHNWMHAFSVSHFCYLLYKNLELTNYLEDIEIFALFISCMCHDLDHRGTNNSFQVASKSVLAALYSSEGSVMERHHFAQAIAILNTHGCNIFDHFSRKDYQRMLDLMRDIILATDLAHHLRIFKDLQKMAEVGYDRNNKQHHRLLLCLLMTSCDLSDQTKGWKTTRKIAELIYKEFFSQGDLEKAMGNRPMEMMDREKAYIPELQISFMEHIAMPIYKLLQDLFPKAAELYERVASNREHWTKVSHKFTIRGLPSNNSLDFLDEEYEVPDLDGTRAPINGCCSLDAE

SEQ ID NO: 10162 - protein, 92 aa, Homo Sapiens
MVLVLHHILIAVVQFLRRGQQVFLKPDEPPPPPQPCADSLQETVYTYLLDGRLSSPRSGWAAMGWASQTCQGSPWPGWWLHWLLIPKCWSCR

SEQ ID NO: 10163 - protein, 65 aa, Homo Sapiens
MVLVLHHILIAVVQFLRRGQQVFLKPDEPPPPPQPCADSLQPAWTPLQRSQDPQGVETTDWRTPC

SEQ ID NO: 10164 - protein, 65 aa, Homo Sapiens; identical to SEQ ID NO: 10163

SEQ ID NO: 10165 - protein, 65 aa, Homo Sapiens; identical to SEQ ID NO: 10163

SEQ ID NO: 10166 - protein, 336 aa, Homo Sapiens
PGLDRSRGRGRAELGGEVGGLGDPGSRRRARRGAERRLRDPDTEVRRGPLSDRRLALAGELYDLDASSLQLKVLQYLQQETRASRCCLLLVSEDNLQLSCKVIGDKVLGEEVSFPLTGCLGQVVEDKKSIQLKDLTSEDVQQLQSMLGCELQAMLCVPVISRATDQVVALACAFNKLEGDLFTDEDEHVIQHCFHYTSTVLTSTLAFQKEQKLKCECQALLQVAKNLFTHLDDVSVLLQEIITEARNLSNAEICSVFLLDQNELVAKVFDGGVVDDESYEIRIPADQGIAGHVATTGQILNIPDAYAHPLFYRGVDDSTGFRTRNILCFPIKNENQ

SEQ ID NO: 10167 - protein, 75 aa, Homo Sapiens
  misc_feature (1)..(1): Xaa can be any naturally occurring amino acid
XLWLVASGGRHSAFPVSHPKGVGLACLPSTVASTGGCHWETGRAWEFRELRPAWTPLQRSQDPQGVETTDWRTPC

SEQ ID NO: 10168 - protein, 172 aa, Homo Sapiens
  misc_feature (1)..(1): Xaa can be any naturally occurring amino acid
XSAVTPSPCLSLSQLQQETRASRCCLLLVSEDNLQLSCKVIGDKVLGEEVSFPLTGCLGQVVEDKKSIQLKDLTSEDVQQLQSMLGCELQAMLCVPVISRATDQVVALACAFNKLEGDLFTDEDEHVIQHCFHYTSTVLTSTLAFQKEQKLKCECQALLQVAKNLFTHLDDV

SEQ ID NO: 10169 - protein, 482 aa, Homo Sapiens
MEVCYQLPVLPLDRPVPQHVLSRRGAISFSSSSALFGCPNPRQLSQRRGAISYDSSDQTALYIRMLGDVRVRSRAGFESERRGSHPYIDFRIFHSQSEIEVSVSARNIRRLLSFQRYLRSSRFFRGTAVSNSLNILDDDYNGQAKCMLEKVGNWNFDIFLFDRLTNGNSLVSLTFHLFSLHGLIEYFHLDMMKLRRFLVMIQEDYHSQNPYHNAVHAADVTQAMHCYLKEPKLANSVTPWDILLSLIAAATHDLDHPGVNQPFLIKTNHYLATLYKNTSVLENHHWRSAVGLLRESGLFSHLPLESRQQMETQIGALILATDISRQNEYLSLFRSHLDRGDLCLEDTRHRHLVLQMALKCADICNPCRTWELSKQWSEKVTEEFFHQGDIEKKYHLGVSPLCDRHTESIANIQIGFMTYLVEPLFTEWARFSNTRLSQTMLGHVGLNKASWKGLQREQSSSEDTDAAFELNSQLLPQENRLS

SEQ ID NO: 10170 - protein, 424 aa, Homo Sapiens
MEVCYQLPVLPLDRPVPQHVLSRRGAISFSSSSALFGCPNPRQLSQRRGAISYDSSDQTALYIRMLGDVRVRSRAGFESERRGSHPYIDFRIFHSQSEIEVSVSARNIRRLLSFQRYLRSSRFFRGTAVSNSLNILDDDYNGQAKCMLEKVGNWNFDIFLFDRLTNGNSLVSLTFHLFSLHGLIEYFHLDMMKLRRFLVMIQEDYHSQNPYHNAVHAADVTQAMHCYLKEPKLANSVTPWDILLSLIAAATHDLDHPGVNQPFLIKTNHYLATLYKNTSVLENHHWRSAVGLLRESGLFSHLPLESRQQMETQIGALILATDISRQNEYLSLFRSHLDRGDLCLEDTRHRHLVLQMALKCADICNPCRTWELSKQWSEKVTEEFFHQGDIEKKYHLGVSPLCDRHTESIANIQIGNYTYLDIAG

SEQ ID NO: 10171 - protein, 86 aa, Homo Sapiens
MGITLIWCLALVLIKWITSKRRGAISYDSSDQTALYIRMLGDVRVRSRAGFESERRGSHPYIDFRIFHSQSEIEVSVSARNIRRLL

SEQ ID NO: 10172 - protein, 456 aa, Homo Sapiens
MGITLIWCLALVLIKWITSKRRGAISYDSSDQTALYIRMLGDVRVRSRAGFESERRGSHPYIDFRIFHSQSEIEVSVSARNIRRLLSFQRYLRSSRFFRGTAVSNSLNILDDDYNGQAKCMLEKVGNWNFDIFLFDRLTNGNSLVSLTFHLFSLHGLIEYFHLDMMKLRRFLVMIQEDYHSQNPYHNAVHAADVTQAMHCYLKEPKLANSVTPWDILLSLIAAATHDLDHPGVNQPFLIKTNHYLATLYKNTSVLENHHWRSAVGLLRESGLFSHLPLESRQQMETQIGALILATDISRQNEYLSLFRSHLDRGDLCLEDTRHRHLVLQMALKCADICNPCRTWELSKQWSEKVTEEFFHQGDIEKKYHLGVSPLCDRHTESIANIQIGFMTYLVEPLFTEWARFSNTRLSQTMLGHVGLNKASWKGLQREQSSSEDTDAAFELNSQLLPQENRLS

SEQ ID NO: 10173 - protein, 243 aa, Homo Sapiens
MARLWGALSLWPLWAAVPWGGAAAVGVRACSSTAAPDGVEGPALRRSYWRHLRRLVLGPPEPPFSHVCQVGDPVLRGVAAPVERAQLGGPELQRLTQRLVQVMRRRRCVGLSAPQLGVPRQVLALELPEALCRECPPRQRALRQMEPFPLRVFVNPSLRVLDSRLVTFPEGCESVAGFLACVPRFQAVQISGLDPNGEQVVWQASGWAARIIQHEMDHLQGCLFIDKMDSRTFTNVYWMKVND

SEQ ID NO: 10174 - protein, 86 aa, Homo Sapiens
MRTLACLLLLGCGYLAHVLAEEAEIPREVIERLARSQIHSIRDLQRLLEIDSVGSEDSLDTSLRAHGVHATKHVPEKRPLPIRRKR

SEQ ID NO: 10175 - protein, 196 aa, Homo Sapiens
MRTLACLLLLGCGYLAHVLAEEAEIPREVIERLARSQIHSIRDLQRLLEIDSVGSEDSLDTSLRAHGVHATKHVPEKRPLPIRRKRSIEEAVPAVCKTRTVIYEIPRSQVDPTSANFLIWPPCVEVKRCTGCCNTSSVKCQPSRVHHRSVKVAKVEYVRKKPKLKEVQVRLEEHLECACATTSLNPDYREEDTDVR

SEQ ID NO: 10176 - protein, 211 aa, Homo Sapiens [sequence omitted]

SEQ ID NO: 10177 - protein, 205 aa, Homo Sapiens
QRQAAALGSQSPSPAGLRAGAVPPARACLQEAEIPREVIERLARSQIHSIRDLQRLLEIDSVGSEDSLDTSLRAHGVHATKHVPEKRPLPIRRKRSIEEAVPAVCKTRTVIYEIPRSQVDPTSANFLIWPPCVEVKRCTGCCNTSSVKCQPSRVHHRSVKVAKVEYVRKKPKLKEVQVRLEEHLECACATTSLNPDYREEDTDVR

SEQ ID NO: 10178 - protein, 226 aa, Homo Sapiens
MFIMGLGDPIPEELYEMLSDHSIRSFDDLQRLLHGDPGEEDGAELDLNMTRSHSGGELESLARGRRSLGSLTIAEPAMIAECKTRTEVFEISRRLIDRTNANFLVWPPCVEVQRCSGCCNNRNVQCRPTQVQLRPVQVRKIEIVRKKPIFKKATVTLEDHLACKCETVAAARPVTRSPGGSQEQRAKTPQTRVTIRTVRVRRPPKGKHRKFKHTHDKTALKETLGA

SEQ ID NO: 10179 - protein, 136 aa, Homo Sapiens
MLSDHSIRSFDDLQRLLHGDPGEEDGAELDLNMTRSHSGGELESLARGRRSLGSLTIAEPAMIAECKTRTEVFEISRRLIDRTNANFLVWPPCVEVQRCSGCCNNRNVQCRPTQVQLRPVQVRKIEIVRKKPIFKK

SEQ ID NO: 10180 - protein, 144 aa, Homo Sapiens
MLSDHSIRSFDDLQRLLHGDPGEEDGAELDLNMTRSHSGGELESLARGRRSLGSLTIAEPAMIAECKTRTEVFEISRRLIDRTNANFLVWPPCVEVQRCSGCCNNRNVQCRPTQVQLRPVQVRKIEIVRKKPIFKKATVTLEDH

SEQ ID NO: 10181 - protein, 241 aa, Homo Sapiens
MNRCWALFLSLCCYLRLVSAEGDPIPEELYEMLSDHSIRSFDDLQRLLHGDPGEEDGAELDLNMTRSHSGGELESLARGRRSLGSLTIAEPAMIAECKTRTEVFEISRRLIDRTNANFLVWPPCVEVQRCSGCCNNRNVQCRPTQVQLRPVQVRKIEIVRKKPIFKKATVTLEDHLACKCETVAAARPVTRSPGGSQEQRAKTPQTRVTIRTVRVRRPPKGKHRKFKHTHDKTALKETLGA

SEQ ID NO: 10182 - protein, 50 aa, Homo Sapiens
MSLFGLLLLTSALAGQRQGTQAESNLSSKFQFSSNKEQNGRNYIQASGLA

SEQ ID NO: 10183 - protein, 282 aa, Homo Sapiens
MSLFGLLLLTSALAGQRQGTQAESNLSSKFQFSSNKEQNGVQDPQHERIITVSTNGSIHSPRFPHTYPRNTVLVWRLVAVEENVWIQLTFDERFGLEDPEDDICKYDFVEVEEPSDGTILGRWCGSGTVPGKQISKGNQIRIRFVSDEYFPSEPGFCIHYNIVMPQFTEAVSPSVLPPSALPLDLLNNAITAFSTLEDLIRYLEPERWQLDLEDLYRPTWQLLGKAFVFGRKSRVVDLNLLTEEVLQLRPKTGVRGLHKSLTDVALEHHEECDCVCRGSTGG

SEQ ID NO: 10184 - protein, 345 aa, Homo Sapiens
MSLFGLLLLTSALAGQRQGTQAESNLSSKFQFSSNKEQNGVQDPQHERIITVSTNGSIHSPRFPHTYPRNTVLVWRLVAVEENVWIQLTFDERFGLEDPEDDICKYDFVEVEEPSDGTILGRWCGSGTVPGKQISKGNQIRIRFVSDEYFPSEPGFCIHYNIVMPQFTEAVSPSVLPPSALPLDLLNNAITAFSTLEDLIRYLEPERWQLDLEDLYRPTWQLLGKAFVFGRKSRVVDLNLLTEEVRLYSCTPRNFSVSIREELKRTDTIFWPGCLLVKRCGGNCACCLHNCNECQCVPSKVTKKYHEVLQLRPKTGVRGLHKSLTDVALEHHEECDCVCRGSTGG

SEQ ID NO: 10185 - protein, 53 aa, Homo Sapiens
  misc_feature (1)..(1): Xaa can be any naturally occurring amino acid
XTFDERFGLEDPEDDICKYDFVEVEEPSDGTILGRWCGSGFCIHYNIVMPNLP

SEQ ID NO: 10186 - protein, 206 aa, Homo Sapiens
IFEAVGAQGTVVLDEESLHVDDLDLFDGDSGLRFAEDLEVSELKVGADLEREGDLGEVPPHAVHESNHLTDLYRRDETIQVKGNGYVQSPRFPNSYPRNLLLTWRLHSQENTRIQLVFDNQFGLEEAENDICRYDFVEVEDISETSTIIRGRWCGHKEVPPRIKSRTNQIKITFKSDDYFVAKPGFKIYYSLLEDFQPAAASETNW

SEQ ID NO: 10187 - protein, 364 aa, Homo Sapiens
MHRLIFVYTLICANFCSCRDTSATPQSASIKALRNANLRRDDLYRRDETIQVKGNGYVQSPRFPNSYPRNLLLTWRLHSQENTRIQLVFDNQFGLEEAENDICRYDFVEVEDISETSTIIRGRWCGHKEVPPRIKSRTNQIKITFKSDDYFVAKPGFKIYYSLLEDFQPAAASETNWESVTSSISGVSYNSPSVTDPTLIADALDKKIAEFDTVEDLLKYFNPESWQEDLENMYLDTPRYRGRSYHDRKSKVDLDRLNDDAKRYSCTPRNYSVNIREELKLANVVFFPRCLLVQRCGGNCGCGTVNWRSCTCNSGKTVKKYHEVLQFEPGHIKRRGRAKTMALVDIQLDHHERCDCICSSRPPR

SEQ ID NO: 10188 - protein, 370 aa, Homo Sapiens
MHRLIFVYTLICANFCSCRDTSATPQSASIKALRNANLRRDESNHLTDLYRRDETIQVKGNGYVQSPRFPNSYPRNLLLTWRLHSQENTRIQLVFDNQFGLEEAENDICRYDFVEVEDISETSTIIRGRWCGHKEVPPRIKSRTNQIKITFKSDDYFVAKPGFKIYYSLLEDFQPAAASETNWESVTSSISGVSYNSPSVTDPTLIADALDKKIAEFDTVEDLLKYFNPESWQEDLENMYLDTPRYRGRSYHDRKSKVDLDRLNDDAKRYSCTPRNYSVNIREELKLANVVFFPRCLLVQRCGGNCGCGTVNWRSCTCNSGKTVKKYHEVLQFEPGHIKRRGRAKTMALVDIQLDHHERCDCICSSRPPR

SEQ ID NO: 10189 - protein, 154 aa, Homo Sapiens
MGTSHPAFLVLGCLLTGLSLILCQLSLPSILPNENEKVVQLNSSFSLRCFGESEVSWQYPMSEEESSDVEIRNEENNSGLFVTVLEVSSASAAHTGLYTCYYNHTQTEENELEGRHIYIYVPDPDVAFVPLGMTDYLVIVEDDDSAIIPCRTTD

SEQ ID NO: 10190 - protein, 158 aa, Homo Sapiens
MGTSHPAFLVLGCLLTGLSLILCQLSLPSILPNENEKVVQLNSSFSLRCFGESEVSWQYPMSEEESSDVEIRNEENNSGLFVTVLEVSSASAAHTGLYTCYYNHTQTEENELEGRHIYIYVPDPDVAFVPLGMTDYLVIVEDDDSAIIPCRTTDPETP

SEQ ID NO: 10191 - protein, 159 aa, Homo Sapiens
MGTSHPAFLVLGCLLTGLSLILCQLSLPSILPNENEKVVQLNSSFSLRCFGESEVSWQYPMSEEESSDVEIRNEENNSGLFVTVLEVSSASAAHTGLYTCYYNHTQTEENELEGRHIYIYVPDPDVAFVPLGMTDYLVIVEDDDSAIIPCRTTDPETPV

SEQ ID NO: 10192 - protein, 1089 aa, Homo Sapiens
MGTSHPAFLVLGCLLTGLSLILCQLSLPSILPNENEKVVQLNSSFSLRCFGESEVSWQYPMSEEESSDVEIRNEENNSGLFVTVLEVSSASAAHTGLYTCYYNHTQTEENELEGRHIYIYVPDPDVAFVPLGMTDYLVIVEDDDSAIIPCRTTDPETPVTLHNSEGVVPASYDSRQGFNGTFTVGPYICEATVKGKKFQTIPFNVYALKATSELDLEMEALKTVYKSGETIVVTCAVFNNEVVDLQWTYPGEVKGKGITMLEEIKVPSIKLVYTLTVPEATVKDSGDYECAARQATREVKEMKKVTISVHEKGFIEIKPTFSQLEAVNLHEVKHFVVEVRAYPPPRISWLKNNLTLIENLTEITTDVEKIQEIRYRSKLKLIRAKEEDSGHYTIVAQNEDAVKSYTFELLTQVPSSILDLVDDHHGSTGGQTVRCTAEGTPLPDIEWMICKDIKKCNNETSWTILANNVSNIITEIHSRDRSTVEGRVTFAKVEETIAVRCLAKNLLGAENRELKLVAPTLRSELTVAAAVLVLLVIVIISLIVLVVIWKQKPRYEIRWRVIESISPDGHEYIYVDPMQLPYDSRWEFPRDGLVLGRVLGSGAFGKVVEGTAYGLSRSQPVMKVAVKMLKPTARSSEKQALMSELKIMTHLGPHLNIVNLLGACTKSGPIYIITEYCFYGDLVNYLHKNRDSFLSHHPEKPKKELDIFGLNPADESTRSYVILSFENNGDYMDMKQADTTQYVPMLERKEVSKYSDIQRSLYDRPASYKKKSMLDSEVKNLLSDDNSEGLTLLDLLSFTYQVARGMEFLASKNCVHRDLAARNVLLAQGKIVKICDFGLARDIMHDSNYVSKGSTFLPVKWMAPESIFDNLYTTLSDVWSYGILLWEIFSLGGTPYPGMMVDSTFYNKIKSGYRMAKPDHATSEVYEIMVKCWNSEPEKRPSFYHLSEIVENLLPGQYKKSYEKIHLDFLKSDHPAVARMRVDSDNAYIGVTYKNEEDKLKDWEGGLDEQRLSADSGYIIPLPDIDPVPEEEDLGKRNRHSSQTSEESAIETGSSSSTFIKREDETIEDIDMMDDIGIDSSDLVEDSFL

SEQ ID NO: 10193 - protein, 743 aa, Homo Sapiens
MGTSHPAFLVLGCLLTGLSLILCQLSLPSILPNENEKVVQLNSSFSLRCFGESEVSWQYPMSEEESSDVEIRNEENNSGLFVTVLEVSSASAAHTGLYTCYYNHTQTEENELEGRHIYIYVPDPDVAFVPLGMTDYLVIVEDDDSAIIPCRTTDPETPVTLHNSEGVVPASYDSRQGFNGTFTVGPYICEATVKGKKFQTIPFNVYALKATSELDLEMEALKTVYKSGETIVVTCAVFNNEVVDLQWTYPGEVKGKGITMLEEIKVPSIKLVYTLTVPEATVKDSGDYECAARQATREVKEMKKVTISVHEKGFIEIKPTFSQLEAVNLHEVKHFVVEVRAYPPPRISWLKNNLTLIENLTEITTDVEKIQEIRYRSKLKLIRAKEEDSGHYTIVAQNEDAVKSYTFELLTQVPSSILDLVDDHHGSTGGQTVRCTAEGTPLPDIEWMICKDIKKCNNETSWTILANNVSNIITEIHSRDRSTVEGRVTFAKVEETIAVRCLAKNLLGAENRELKLVAPTLRSELTVAAAVLVLLVIVIISLIVLVVIWKQKPRYEIRWRVIESISPDGHEYIYVDPMQLPYDSRWEFPRDGLVLGRVLGSGAFGKVVEGTAYGLSRSQPVMKVAVKMLKPTARSSEKQALMSELKIMTHLGPHLNIVNLLGACTKSGPIYIITEYCFYGDLVNYLHKNRDSFLSHHPEKPKKELDIFGLNPADESTRSSGQGCLSSGTLQELSVDLQARGPC

SEQ ID NO: 10194 - protein, 218 aa, Homo Sapiens
MGTSHPAFLVLGCLLTGLSLILCQLSLPSILPNENEKVVQLNSSFSLRCFGESEVSWQYPMSEEESSDVEIRNEENNSGLFVTVLEVSSASAAHTGLYTCYYNHTQTEENELEGRHIYIYVPDPDVAFVPLGMTDYLVIVEDDDSAIIPCRTTDPETPVTLHNSEGVVPASYDSRQGFNGTFTVGPYICEATVKGKKFQTIPFNVYALKGTCIISFLL

SEQ ID NO: 10195 - protein, 147 aa, Homo Sapiens
MLPRLVLNSWAQMICLPQLPKFPRAMGTSHPAFLVLGCLLTGLSLILCQLSLPSILPNENEKVVQLNSSFSLRCFGESEVSWQYPMSEEESSDVEIRNEENNSGLFVTVLEVSSASAAHTGLYTCYYNHTQTEENELEGRHIYIYVP

SEQ ID NO: 10196 - protein, 174 aa, Homo Sapiens
MRLPGAMPALALKGELLLLSLLLLLEPQISQGLVVTPPGPELVLNVSSTFVLTCSGSAPVVWERMSQEPPQEMAKAQDGTFSSVLTLTNLTGLDTGEYFCTHNDSRGLETDERKRLYIFVPDPTVGFLPNDAEELFIFLTEITEITIPCRVTDPQLVVTLHEKKGDVALPVPYD

SEQ ID NO: 10197 - protein, 239 aa, Homo Sapiens
MRLPGAMPALALKGELLLLSLLLLLEPQISQGLVVTPPGPELVLNVSSTFVLTCSGSAPVVWERMSQEPPQEMAKAQDGTFSSVLTLTNLTGLDTGEYFCTHNDSRGLETDERKRLYIFVPDPTVGFLPNDAEELFIFLTEITEITIPCRVTDPQLVVTLHEKKGDVALPVPYDHQRGFSGIFEDRSYICKTTIGDREVDSDAYYVYRLQGEPPFWPDAQQSVIHQRLCERSADCGPPG

SEQ ID NO: 10198 - protein, 1106 aa, Homo Sapiens
MRLPGAMPALALKGELLLLSLLLLLEPQISQGLVVTPPGPELVLNVSSTFVLTCSGSAPVVWERMSQEPPQEMAKAQDGTFSSVLTLTNLTGLDTGEYFCTHNDSRGLETDERKRLYIFVPDPTVGFLPNDAEELFIFLTEITEITIPCRVTDPQLVVTLHEKKGDVALPVPYDHQRGFSGIFEDRSYICKTTIGDREVDSDAYYVYRLQVSSINVSVNAVQTVVRQGENITLMCIVIGNEVVNFEWTYPRKESGRLVEPVTDFLLDMPYHIRSILHIPSAELEDSGTYTCNVTESVNDHQDEKAINITVVESGYVRLLGEVGTLQFAELHRSRTLQVVFEAYPPPTVLWFKDNRTLGDSSAGEIALSTRNVSETRYVSELTLVRVKVAEAGHYTMRAFHEDAEVQLSFQLQINVPVRVLELSESHPDSGEQTVRCRGRGMPQPNIIWSACRDLKRCPRELPPTLLGNSSEEESQLETNVTYWEEEQEFEVVSTLRLQHVDRPLSVRCTLRNAVGQDTQEVIVVPHSLPFKVVVISAILALVVLTIISLIILIMLWQKKPRYEIRWKVIESVSSDGHEYIYVDPMQLPYDSTWELPRDQLVLGRTLGSGAFGQVVEATAHGLSHSQATMKVAVKMLKSTARSSEKQALMSELKIMSHLGPHLNVVNLLGACTKGGPIYIITEYCRYGDLVDYLHRNKHTFLQHHSDKRRPPSAELYSNALPVGLPLPSHVSLTGESDGGYMDMSKDESVDYVPMLDMKGDVKYADIESSNYMAPYDNYVPSAPERTCRATLINESPVLSYMDLVGFSYQVANGMEFLASKNCVHRDLAARNVLICEGKLVKICDFGLARDIMRDSNYISKGSTFLPLKWMAPESIFNSLYTTLSDVWSFGILLWEIFTLGGTPYPELPMNEQFYNAIKRGYRMAQPAHASDEIYEIMQKCWEEKFEIRPPFSQLVLLLERLLGEGYKKKYQQVDEEFLRSDHPAILRSQARLPGFHGLRSPLDTSSVLYTAVQPNEGDNDYIIPLPDPKPEVADEGPLEGSPSLASSTLNEVNTSSTISCDSPLEPQDEPEPEPQLELQVEPEPELEQLPDSGCPAPRAEAEDSFL

SEQ ID NO: 10199 - protein, 146 aa, Homo Sapiens
MSQEPPQEMAKAQDGTFSSVLTLTNLTGLDTGEYFCTHNDSRGLETDERKRLYIFVPDPTVGFLPNDAEELFIFLTEITEITIPCRVTDPQLVVTLHEKKGDVALPVPYDHQRGFSGIFEDRSYICKTTIGDREVDSDAYYVYRLQ

SEQ ID NO: 10200 - protein, 375 aa, Homo Sapiens
MKVWLLLGLLLVHEALEDVTGQHLPKNKRPKEPGENRIKPTNKKVKPKIPKMKDRDSANSAPKTQSIMMQVLDKGRFQKPAATLSLLAGQTVELRCKGSRIGWSYPAYLDTFKDSRLSVKQNERYGQLTLVNSTSADTGEFSCWVQLCSGYICRKDEAKTGSTYIFFTEKGELFVPSPSYFDVVYLNPDRQAVVPCRVTVLSAKVTLHREFPAKEIPANGTDIVYDMKRGFVYLQPHSEHQGVVYCRAEAGGRSQISVKYQLLYVAVPSGPPSTTILASSNKVKSGDDISVLCTVLGEPDVEVEFTWIFPGQKDERPVTIQDTWRLIHRGLGHTTRISQSVITVEDFETIDAGYYICTAQNLQGQTTVATTVEFS

SEQ ID NO: 10201 - protein, 375 aa, Homo Sapiens; identical to SEQ ID NO: 10200

SEQ ID NO: 10202 - protein, 109 aa, Homo Sapiens
MELQTYRYHGHSMSDPGVSYRTREEIQEVRSKSDPIMLLKDRMVNSNLASVEELKEIDVEVRKEIEDAAQFATADPEPPLEELGYHIYSSDPPFEVRGANQWIKFKSVS

SEQ ID NO: 10203 - protein, 359 aa, Homo Sapiens
MRKMLAAVSRVLSGASQKPASRVLVASRNFANDATFEIKKCDLHRLEEGPPVTTVLTREDGLKYYRMMQTVRRMELKADQLYKQKIIRGFCHLCDGQEACCVGLEAGINPTDHLITAYRAHGFTFTRGLSVREILAELTGRKGGCAKGKGGSMHMYAKNFYGGNGIVGAQGQIFEAYNMAALWKLPCIFICENNRYGMGTSVERAAASTDYYKRGDFIPGLRVDGMDILCVREATRFAAAYCRSGKGPILMELQTYRYHGHSMSDPGVSYRTREEIQEVRSKSDPIMLLKDRMVNSNLASVEELKEIDVEVRKEIEDAAQFATADPEPPLEELGYHIYSSDPPFEVRGANQWIKFKSVS

SEQ ID NO: 10204 - protein, 390 aa, Homo Sapiens
MRKMLAAVSRVLSGASQKPASRVLVASRNFANDATFEIKKCDLHRLEEGPPVTTVLTREDGLKYYRMMQTVRRMELKADQLYKQKIIRGFCHLCDGQEACCVGLEAGINPTDHLITAYRAHGFTFTRGLSVREILAELTGRKGGCAKGKGGSMHMYAKNFYGGNGIVGAQVPLGAGIALACKYNGKDEVCLTLYGDGAANQGQIFEAYNMAALWKLPCIFICENNRYGMGTSVERAAASTDYYKRGDFIPGLRVDGMDILCVREATRFAAAYCRSGKGPILMELQTYRYHGHSMSDPGVSYRTREEIQEVRSKSDPIMLLKDRMVNSNLASVEELKEIDVEVRKEIEDAAQFATADPEPPLEELGYHIYSSDPPFEVRGANQWIKFKSVS

SEQ ID NO: 10205 - protein, 180 aa, Homo Sapiens
MRKMLAAVSRVLSGASQKPASRVLVASRNFANDATFEIKKCDLHRLEEGPPVTTVLTREDGLKYYRMMQTVRRMELKADQLYKQKIIRGFCHLCDGQEACCVGLEAGINPTDHLITAYRAHGFTFTRGLSVREILAELTGRKGGCAKGKGGSMHMYAKNFYGGNGIVGAQVVKDEDCVLL

SEQ ID NO: 10206 - protein, 204 aa, Homo Sapiens
MRKMLAAVSRVLSGASQKPASRVLVASRNFANDATFEIKKCDLHRLEEGPPVTTVLTREDGLKYYRMMQTVRRMELKADQLYKQKIIRGFCHLCDGQFLLPLTQEACCVGLEAGINPTDHLITAYRAHGFTFTRGLSVREILAELTGRKGGCAKGKGGSMHMYAKNFYGGNGIVGAQVPLGAGIALACKYNGKDEVCLTLYGDG

SEQ ID NO: 10207 - protein, 397 aa, Homo Sapiens
MRKMLAAVSRVLSGASQKPASRVLVASRNFANDATFEIKKCDLHRLEEGPPVTTVLTREDGLKYYRMMQTVRRMELKADQLYKQKIIRGFCHLCDGQFLLPLTQEACCVGLEAGINPTDHLITAYRAHGFTFTRGLSVREILAELTGRKGGCAKGKGGSMHMYAKNFYGGNGIVGAQVPLGAGIALACKYNGKDEVCLTLYGDGAANQGQIFEAYNMAALWKLPCIFICENNRYGMGTSVERAAASTDYYKRGDFIPGLRVDGMDILCVREATRFAAAYCRSGKGPILMELQTYRYHGHSMSDPGVSYRTREEIQEVRSKSDPIMLLKDRMVNSNLASVEELKEIDVEVRKEIEDAAQFATADPEPPLEELGYHIYSSDPPFEVRGANQWIKFKSVS

SEQ ID NO: 10208 - protein, 121 aa, Homo Sapiens
MRKMLAAVSRVLSGASQKPFAGSPPPRHLTVGRKLSSRYEVTFESAQASRVLVASRNFANDATFEIKKCDLHRLEEGPPVTTVLTREDGLKYYRMMQTVRRMELKADQLYKQKIIRGFCHL

SEQ ID NO: 10209 - protein, 205 aa, Homo Sapiens
MRKMLAAVSRVLSGASQKPRHGLATLPSLVSISRLKQSSHLGLPKCWDYSHSLKTRQASRVLVASRNFANDATFEIKKCDLHRLEEGPPVTTVLTREDGLKYYRMMQTVRRMELKADQLYKQKIIRGFCHLCDGQEACCVGLEAGINPTDHLITAYRAHGFTFTRGLSVREILAELTGRKGGCAKGKGGSMHMYAKNFYGGNGIV

SEQ ID NO: 10210 - protein, 428 aa, Homo Sapiens
MRKMLAAVSRVLSGASQKPRHGLATLPSLVSISRLKQSSHLGLPKCWDYSHSLKTRQASRVLVASRNFANDATFEIKKCDLHRLEEGPPVTTVLTREDGLKYYRMMQTVRRMELKADQLYKQKIIRGFCHLCDGQEACCVGLEAGINPTDHLITAYRAHGFTFTRGLSVREILAELTGRKGGCAKGKGGSMHMYAKNFYGGNGIVGAQVPLGAGIALACKYNGKDEVCLTLYGDGAANQGQIFEAYNMAALWKLPCIFICENNRYGMGTSVERAAASTDYYKRGDFIPGLRVDGMDILCVREATRFAAAYCRSGKGPILMELQTYRYHGHSMSDPGVSYRTREEIQEVRSKSDPIMLLKDRMVNSNLASVEELKEIDVEVRKEIEDAAQFATADPEPPLEELGYHIYSSDPPFEVRGANQWIKFKSVS

SEQ ID NO: 10211 - protein, 154 aa, Homo Sapiens
AVLNGQVKEIPPDWDQRPVKTLVGKNFEQVAFDETKNVFVKFYAPWCTHCKEMAPAWEALAEKYQDHEDIIIAELDATANELDAFAVHGFPTLKYFPAGPGRKVIEYKSTRDLETFSKFLDNGGVLPTEEPPEEPAAPFPEPPANSTMGSKEEL

SEQ ID NO: 10212 - protein, 522 aa, Homo Sapiens
MSRQLLPVLLLLLLRASCPWGQEQGARSPSEEPPEEEIPKEDGILVLSRHTLGLALREHPALLVEFYAPWCGHCQALAPEYSKAAAVLAAESMVVTLAKVDGPAQRELAEEFGVTEYPTLKFFRNGNRTHPEEYTGPRDAEGIAEWLRRRVGPSAMRLEDEAAAQALIGGRDLVVIGFFQDEDVATFLALAQDALDMTFGLTDRPRLFQQFGLTKDTVVLFKKFDEGRADFPVDEELGLDLGDLSRFLVTHSMRLVTEFNSQTSAKIFAARILNHLLLFVNQTLAAHRELLAGFGEAAPRFRGQVLFVVVDVAADNEHVLQYFGLKAEAAPTLRLVNLETTKKYAPVDGGPVTAASITAFCHAVLNGQVKPYLLSQEIPPDWDQRPVKTLVGKNFEQVAFDETKNVFVKFYAPWCTHCKEMAPAWEALAEKYQDHEDIIIAELDATANELDAFAVHGFPTLKYFPAGPGRKVIEYKSTRDLETFSKFLDNGGVLPTEEPPEEPAAPFPEPPANSTMGSKEEL

SEQ ID NO: 10213 - protein, 525 aa, Homo Sapiens
MSRQLLPVLLLLLLRASCPWGQEQGARSPSEEPPEEEIPKEDGILVLSRHTLGLALREHPALLVEFYAPWCGHCQALAPEYSKAAAVLAAESMVVTLAKVDGPAQRELAEEFGVTEYPTLKFFRNGNRTHPEEYTGPRDAEGIAEWLRRRVGPSAMRLEDEAAAQALIGGRDLVVIGFFQDLQDEDVATFLALAQDALDMTFGLTDRPRLFQQFGLTKDTVVLFKKFDEGRADFPVDEELGLDLGDLSRFLVTHSMRLVTEFNSQTSAKIFAARILNHLLLFVNQTLAAHRELLAGFGEAAPRFRGQVLFVVVDVAADNEHVLQYFGLKAEAAPTLRLVNLETTKKYAPVDGGPVTAASITAFCHAVLNGQVKPYLLSQEIPPDWDQRPVKTLVGKNFEQVAFDETKNVFVKFYAPWCTHCKEMAPAWEALAEKYQDHEDIIIAELDATANELDAFAVHGFPTLKYFPAGPGRKVIEYKSTRDLETFSKFLDNGGVLPTEEPPEEPAAPFPEPPANSTMGSKEEL

SEQ ID NO: 10214 - protein, 227 aa, Homo Sapiens
  misc_feature (1)..(1): Xaa can be any naturally occurring amino acid
XLLPVLLLLLLRASCPWGQEQGARSPSEEPPEEEIPKEDGILVLSRHTLGLALREHPALLVEFYAPWCGHCQALAPEYSKAAAVLAAESMVVTLAKVDGPAQRELAEEFGVTEYPTLKFFRNGNRTHPEEYTGPRDAEGIAEWLRRRVGPSAMRLEDEAAAQALIGGRDLVVIGFFQDALDMTFGLTDRPRLFQQFGLTKDTVVLFKKFDEGRADFPVDEELGLDLG

SEQ ID NO: 10215 - protein, 71 aa, Homo Sapiens
MRLRRLALFPGVALLLAAARLAAASDVLELTDDNFESRISDTGSAGLMLVEFFAPCSIPAGFEEESLLQPH

SEQ ID NO: 10216 - protein, 505 aa, Homo Sapiens
MRLRRLALFPGVALLLAAARLAAASDVLELTDDNFESRISDTGSAGLMLVEFFAPWCGHCKRLAPEYEAAATRLKGIVPLAKVDCTANTNTCNKYGVSGYPTLKIFRDGEEAGAYDGPRTADGIVSHLKKQAGPASVPLRTEEEFKKFISDKDASIVGFFDDSFSEAHSEFLKAASNLRDNYRFAHTNVESLVNEYDDNGEGIILFRPSHLTNKFEDKTVAYTEQKMTSGKIKKFIQENIFGICPHMTEDNKDLIQGKDLLIAYYDVDYEKNAKGSNYWRNRVMMVAKKFLDAGHKLNFAVASRKTFSHELSDFGLESTAGEIPVVAIRTAKGEKFVMQEEFSRDGKALERFLQDYFDGNLKRYLKSEPIPESNDGPVKVVVAENFDEIVNNENKDVLIEFYAPWCGHCKNLEPKYKELGEKLSKDPNIVIAKMDATANDVPSPYEVRGFPTIYFSPANKKLNPKKYEGGRELSDFISYLQREATNPPVIQEEKPKKKKKAQEDL

SEQ ID NO: 10217 - protein, 75 aa, Homo Sapiens
MRLRRLALFPGVALLLAAARLAAASDVLELTDDNFESRISDTGSAGLMLVEFFAPWLQNSPSQRDPSATLWLLKR

SEQ ID NO: 10218 - protein, 123 aa, Homo Sapiens
SDVLELTDDNFESRISDTGSAGLMLVEFFAPWCGHCKRLAPEYEAAATRLKGIVPLAKVDCTANTNTCNKYGVSGYPTLKIFRDGEEAGAYDGPRTAGVSSYFVLHISLTSLRTRLWHIQSKK

SEQ ID NO: 10219 - protein, 163 aa, Homo Sapiens
MRPRKAFLLLLLLGLVQLLAVAGAEGPDEDFRQVQANSRRTRPGSGKGEGEPLERRGEGVKKQVRVLWNSKHSFSKCDSSNRENAIEDEEEEEEEDDDEEEDDLEVKEENGVLVLNDANFDNFVADKDTVLLEFYAPWCGHCKQFAPEYEKIANILKDKDPPI

SEQ ID NO: 10220 - protein, 645 aa, Homo Sapiens
MRPRKAFLLLLLLGLVQLLAVAGAEGPDEDSSNRENAIEDEEEEEEEDDDEEEDDLEVKEENGVLVLNDANFDNFVADKDTVLLEFYAPWCGHCKQFAPEYEKIANILKDKDPPIPVAKIDATSASVLASRFDVSGYPTIKILKKGQAVDYEGSRTQEEIVAKVREVSQPDWTPPPEVTLVLTKENFDEVVNDADIILVEFYAPWCGHCKKLAPEYEKAAKELSKRSPPIPLAKVDATAETDLAKRFDVSGYPTLKIFRKGRPYDYNGPREKYGIVDYMIEQSGPPSKEILTLKQVQEFLKDGDDVIIIGVFKGESDPAYQQYQDAANNLREDYKFHHTFSTEIAKFLKVSQGQLVVMQPEKFQSKYEPRSHMMDVQGSTQDSAIKDFVLKYALPLVGHRKVSNDAKRYTRRPLVVVYYSVDFSFDYRAATQFWRSKVLEVAKDFPEYTFAIADEEDYAGEVKDLGLSESGEDVNAAILDESGKKFAMEPEEFDSDTLREFVTAFKKGKLKPVIKSQPVPKNNKGPVKVVVGKTFDSIVMDPKKDVLIEFYAPWCGHCKQLEPVYNSLAKKYKGQKGLVIAKMDATANDVPSDRYKVEGFPTIYFAPSGDKKNPVKFEGGDRDLEHLSKFIEEHATKLSRTKEEL

SEQ ID NO: 10221 - protein, 519 aa, Homo Sapiens
MARAGPAWLLLAIWVVLPSWLSSAKVSSLIERISDPKDLKKLLRTRNNVLVLYSKSEVAAENHLRLLSTVAQAVKGQGTICWVDCGDAESRKLCKKMKVDLSPKDKKVELFHYQDGAFHTEYNRAVTFKSIVAFLKDPKGPPLWEEDPGAKDVVHLDSEKDFRRLLKKEEKPLLIMFYAPWCSMCKRMMPHFQKAATQLRGHAVLAGMNVYSSEFENIKEEYSVRGFPTICYFEKGRFLFQYDNYGSTAEDIVEWLKNPQPPQPQVPETPWADEGGSVYHLTDEDFDQFVKEHSSVLVMFHAPWCGHCKKMKPEFEKAAEALHGEADSSGVLAAVDATVNKALAERFHISEFPTLKYFKNGEKYAVPVLRTKKKFLEWMQNPEAPPPPEPTWEEQQTSVLHLVGDNFRETLKKKKHTLVMFYAPWCPHCKKVIPHFTATADAFKDDRKIACAAVDCVKDKNQDLCQQEAVKGYPTFHYYHYGKFAEKYDSDRTELGFTNYIRALREGDHERLGKKKEEL

SEQ ID NO: 10222 - protein, 262 aa, Homo Sapiens
MARAGPAWLLLAIWVVLPSWLSSAKVSSLIERISDPKDLKKLLRTRNNVLVLYSKSEVAAENHLRLLSTVAQAVKGQGTICWVDCGDAESRKLCKKMKVDLSPKDKKVELFHYQDGAFHTEYNRAVTFKSIVAFLKDPKGPPLWEEDPGAKDVVHLDSEKDFRRLLKKEEKPLLIMFYAPWCSMCKRMMPHFQKAATQLRGHAVLAGMNVYSSEFENIKEEYSVRGFPTICYFEKGRFLFQYDNYGSTAEDIVEWLKKVWPL

SEQ ID NO: 10223 - protein, 64 aa, Homo Sapiens
MKVDLSPKDKKVELFHYQDGAFHTEYNRAVTFKSIVAFLKDPKGPPLWEEDPGAKDVVHLDSEK

SEQ ID NO: 10224 - protein, 83 aa, Homo Sapiens
  misc_feature (1)..(1): Xaa can be any naturally occurring amino acid
XTLVMFYAPWCPHCKKVIPHFTATADAFKDDRKIACAAVDCVKDKNQDLCQQEAVKGYPTFHYYHYGKFAEKYDSDRTVFSVG

SEQ ID NO: 10225 - protein, 440 aa, Homo Sapiens
MALLVLGLVSCTFFLAVNGLYSSSDDVIELTPSNFNREVIQSDSLWLVEFYAPWCGHCQRLTPEWKKAATALKDVVKVGAVDADKHHSLGGQYGVQGFPTIKIFGSNKNRPEDYQGGRTGEAIVDAALSALRQLVKDRLGGRSGGYSSGKQGRSDSSSKKDVIELTDDSFDKNVLDSEDVWMVEFYAPWCGHCKNLEPEWAAAASEVKEQTKGKVKLAAVDATVNQVLASRYGIRGFPTIKIFQKGESPVDYDGGRTRSDIVSRALDLFSDNAPPPELLEIINEDIAKRTCEEHQLCVVAVLPHILDTGAAGRNSYLEVLLKLADKYKKKMWGWLWTEAGAQSELETALGIGGFGYPAMAAINARKMKFALLKGSFSEQGINEFLRELSFGRGSTAPVGGGAFPTIVEREPWDGRDGELPVEDDIDLSDVELDDLGKDEL

SEQ ID NO: 10226 - protein, 437 aa, Homo Sapiens
MILGLVSCTFFLAVNGLYSSSDDVIELTPSNFNREVIQSDSLWLVEFYAPWCGHCQRLTPEWKKAATALKDVVKVGAVDADKHHSLGGQYGVQGFPTIKIFGSNKNRPEDYQGGRTGEAIVDAALSALRQLVKDRLGGRSGGYSSGKQGRSDSSSKKDVIELTDDSFDKNVLDSEDVWMVEFYAPWCGHCKNLEPEWAAAASEVKEQTKGKVKLAAVDATVNQVLASRYGIRGFPTIKIFQKGESPVDYDGGRTRSDIVSRALDLFSDNAPPPELLEIINEDIAKRTCEEHQLCVVAVLPHILDTGAAGRNSYLEVLLKLADKYKKKMWGWLWTEAGAQSELETALGIGGFGYPAMAAINARKMKFALLKGSFSEQGINEFLRELSFGRGSTAPVGGGAFPTIVEREPWDGRDGELPVEDDIDLSDVELDDLGKDEL

SEQ ID NO: 10227 - protein, 488 aa, Homo Sapiens
MRIITAPASKVSRGSNELMILARRSDRGSPTSPAHSLSRKSPIMYPSTTMANAPGLVSCTFFLAVNGLYSSSDDVIELTPSNFNREVIQSDSLWLVEFYAPWCGHCQRLTPEWKKAATALKDVVKVGAVDADKHHSLGGQYGVQGFPTIKIFGSNKNRPEDYQGGRTGEAIVDAALSALRQLVKDRLGGRSGGYSSGKQGRSDSSSKKDVIELTDDSFDKNVLDSEDVWMVEFYAPWCGHCKNLEPEWAAAASEVKEQTKGKVKLAAVDATVNQVLASRYGIRGFPTIKIFQKGESPVDYDGGRTRSDIVSRALDLFSDNAPPPELLEIINEDIAKRTCEEHQLCVVAVLPHILDTGAAGRNSYLEVLLKLADKYKKKMWGWLWTEAGAQSELETALGIGGFGYPAMAAINARKMKFALLKGSFSEQGINEFLRELSFGRGSTAPVGGGAFPTIVEREPWDGRDGELPVEDDIDLSDVELDDLGKDEL

SEQ ID NO: 10228 - protein, 492 aa, Homo Sapiens
MRRDLREKLVWVCRPLAPVEVPANISSDFQPCSPTSPAHSLSRKSPIMYPSTTMANAPGLVSCTFFLAVNGLYSSSDDVIELTPSNFNREVIQSDSLWLVEFYAPWCGHCQRLTPEWKKAATALKDVVKVGAVDADKHHSLGGQYGVQGFPTIKIFGSNKNRPEDYQGGRTGEAIVDAALSALRQLVKDRLGGRSGGYSSGKQGRSDSSSKKDVIELTDDSFDKNVLDSEDVWMVEFYAPWCGHCKNLEPEWAAAASEVKEQTKGKVKLAAVDATVNQVLASRYGIRGFPTIKIFQKGESPVDYDGGRTRSDIVSRALDLFSDNAPPPELLEIINEDIAKRTCEEHQLCVVAVLPHILDTGAAGRNSYLEVLLKLADKYKKKMWGWLWTEAGAQSELETALGIGGFGYPAMAAINARKMKFALLKGSFSEQGINEFLRELSFGRGSTAPVGGGAFPTIVEREPWDGRDGELPVEDDIDLSDVELDDLGKDEL

SEQ ID NO: 10229 - protein, 492 aa, Homo Sapiens; identical to SEQ ID NO: 10228

SEQ ID NO: 10230 - protein, 11 aa, Homo Sapiens
MYPSTTMANAP

SEQ ID NO: 10231 - protein, 445 aa, Homo Sapiens
MYPSTTMANAPGLVSCTFFLAVNGLYSSSDDVIELTPSNFNREVIQSDSLWLVEFYAPWCGHCQRLTPEWKKAATALKDVVKVGAVDADKHHSLGGQYGVQGFPTIKIFGSNKNRPEDYQGGRTGEAIVDAALSALRQLVKDRLGGRSGGYSSGKQGRSDSSSKKDVIELTDDSFDKNVLDSEDVWMVEFYAPWCGHCKNLEPEWAAAASEVKEQTKGKVKLAAVDATVNQVLASRYGIRGFPTIKIFQKGESPVDYDGGRTRSDIVSRALDLFSDNAPPPELLEIINEDIAKRTCEEHQLCVVAVLPHILDTGAAGRNSYLEVLLKLADKYKKKMWGWLWTEAGAQSELETALGIGGFGYPAMAAINARKMKFALLKGSFSEQGINEFLRELSFGRGSTAPVGGGAFPTIVEREPWDGRDGELPVEDDIDLSDVELDDLGKDEL

SEQ ID NO: 10232 - protein, 177 aa, Homo Sapiens
MDLLWMPLLLVAACVSAVHSSPEVNAGVSSIHITKPVHILEERSLLVLTPAGLTQMLNQTRFLMVLFHEVLLLLPRLKYNGAILAHRNLHLPGSSDSPASASQVAGITDNPSSKQSRNLAEELGKAVEIMGKGKNGIGFGKVDITIEKELQQEFGITKAPELKLFFEGNRSEPISCK

SEQ ID NO: 10233 - protein, 584 aa, Homo Sapiens
MDLLWMPLLLVAACVSAVHSSPEVNAGVSSIHITKPVHILEERSLLVLTPAGLTQMLNQTRFLMVLFHNPSSKQSRNLAEELGKAVEIMGKGKNGIGFGKVDITIEKELQQEFGITKAPELKLFFEGNRSEPISCKGVVESAALVVWLRRQISQKAFLFNSSEQVAEFVISRPLVIVGFFQDLEEEVAELFYDVIKDFPELTFGVITIGNVIGRFHVTLDSVLVFKKGKIVNRQKLINDSTNKQELNRVIKQHLTDFVIEYNTENKDLISELHIMSHMLLFVSKSSESYGIIIQHYKLASKEFQNKILFILVDADEPRNGRVFKYFRVTEVDIPSVQILNLSSDARYKMPSDDITYESLKKFGRSFLSKNATKHQSSEEIPKYWDQGLVKQLVGKNFNVVVFDKEKDVFVMFYAPWSKKCKMLFPLLEELGRKYQNHSTIIIAKIDVTANDIQLMYLDRYPFFRLFPSGSQQAVLYKGEHTLKGFSDFLESHIKTKIEDEDELLSVEQNEVIEEEVLAEEKEVPMMRKGLPEQQSPELENMTKYVSKLEEPAGKKKTSEEVVVVVAKPKGPPVQKKKPKVKEEL

SEQ ID NO: 10234 - protein, 254 aa, Homo Sapiens [sequence omitted]

SEQ ID NO: 10235 - protein, 254 aa, Homo Sapiens [sequence omitted]

SEQ ID NO: 10236 - protein, 254 aa, Homo Sapiens [sequence omitted]

SEQ ID NO: 10237 - protein, 1154 aa, Homo Sapiens
MGLLLMILASAVLGSFLTLLAQFFLLYRRQPEPPADEAARAGEGFRYIKPVPGLLLREYLYGGGRDEEPSGAAPEGGATPTAAPETPAPPTRETCYFLNATILFLFRELRDTALTRRWVTKKIKVEFEELLQTKTAGRLLEGLSLRDVFLGETVPFIKTIRLVRPVVPSATGEPDGPEGEALPAACPEELAFEAEVEYNGGFHLAIDVDLVFGKSAYLFVKLSRVVGRLRLVFTRVPFTHWFFSFVEDPLIDFEVRSQFEGRPMPQLTSIIVNQLKKIIKRKHTLPNYKIRFKPFFPYQTLQGFEEDEEHIHIQQWALTEGRLKVTLLECSRLLIFGSYDREANVHCTLELSSSVWEEKQRSSIKTVELIKGNLQSVGLTLRLVQSTDGYAGHVIIETVAPNSPAAIADLQRGDRLIAIGGVKITSTLQVLKLIKQAGDRVLVYYERPVGQSNQGAVLQDNFGQLEENFLSSSCQSGYEEEAAGLTVDTESRELDSEFEDLASDVRAQNEFKDEAQSLSHSPKRVPTTLSIKPLGAISPVLNRKLAVGSHPLPPKIQSKDGNKPPPLKTSEITDPAQVSKPTQGSAFKPPVPPRPQAKVPLPSADAPNQAEPDVLVEKPEKVVPPPLVDKSAEKQAKNVDAIDDAAAPKQFLAKQEVAKDVTSETSCPTKDSSDDRQTWESSEILYRNKLGKWTRTRASCLFDIEACHRYLNIALWCRDPFKLGGLICLGHVSLKLEDVALGCLATSNTEYLSKLRLEAPSPKAIVTRTALRNLSMQKGFNDKFCYGDITIHFKYLKEGESDHHVVTNVEKEKEPHLVEEVSVLPKEEQFVGQMGLTENKHSFQDTQFQNPTWCDYCKKKVWTKAASQCMFCAYVCHKKCQEKCLAETSVCGATDRRIDRTLKNLRLEGQETLLGLPPRVDAEASKSVNKTTGLTRHIINTSSRLLNLRQVSKTRLSEPGTDLVEPSPKHTPNTSDNEGSDTEVCGPNSPSKRGNSTGIKLVRKEGGLDDSVFIAVKEIGRDLYRGLPTEERIQKLEFMLDKLQNEIDQELEHNNSLVREEKETTDTRKKSLLSAALAKSGERLQALTLLMIHYRAGIEDIETLESLSLDQHSKKISKYTDDTEEDLDNEISQLIDSQPFSSISDDLFGPSESV

SEQ ID NO: 10238 - protein, 778 aa, Homo Sapiens
MGCNLCTFQKREEHYKLLYEVSQVNGKDLSKATHEEAVEAFRNAKEPIVVQVLRRTPLSRPAYGMASEVQLMNASTQTDITFEHIMALAKLRPPTPPVPDICPFLLSDSCHSLHPMEHEFYEDNEYISSLPADADRTEDFEYEEVELCRVSSQEKLGLTVCYRTDDEEDTGIYVSEVDPNSIAAKDGRIREGDRILQINGEDVQNREEAVALLSNDECKRIVLLVARPEIQLDEGWLEDERNEFLEELNLEMLEEEHNEAMQPTANEVEQPKKQEEEEGTTDTATSSSNNHEKDSGVGRTDESLRNDESSEQENAAEDPNSTSLKSKRDLGQSQDTLGSVELQYNESLVSGEYIDSDCIGNPDEDCERFRQLLELKCKIRNHGEYDLYYSSSTIECNQGEQEGVEHELQLLNEELRNIELECQNIMQAHRLQKVTDQYGDIWTLHDGGFRNYNTSIDMQRGKLDDIMEHPEKSDKDSSSAYNTAESCRSTPLTVDRSPDSSLPRVINLTNKKNLRSTMAATQSSSGQSSKESTSTKAKTTEQGCSAESKEKVLEGSKLPDQEKAVSEHIPYLSPYHSSSYRYANIPAHARHYQSYMQLIQQKSAVEYAQSQLSLVSMCKESQKCSEPKMEWKVKIRSDGTRYITKRPVRDRILKERALKIKEERSGMTTDDDTMSEMKMGRYWSKEERKQHLVRAKEQRRRREFMMRSRLECLKESPQSGSEGKKEINIIELSHKKMMKKRNKKILDNWMTIQELMTHGAKSPDGTRVHNAFLSVTTV

SEQ ID NO: 10239 - protein, 1036 aa, Homo Sapiens
MGFALERFAEAVDPALECKLCGQVLEEPLCTPCGHVFCASCLLPWAVRRRRCPLQCQPLAPGELYRVLPLRSLIQKLRVQCDYRARGCGHSVRLHELEAHVEHCDFGPARRLRSRGGCASGLGGGEVPARGGCGPTPRAGRGGGARGGPPGGRWGRGRGPGPRVLAWRRREKALLAQLWALQGEVQLTARRYQEKFTQYMAHVRNFVGDLGGGHRRDGEHKPFTIVLERENDTLGFNIIGGRPNQNNQEGTSTEGIYVSKILENGPADRADGLEIHDKIMEVNGKDLSKATHEEAVEAFRNAKEPIVVQVLRRTPLSRPAYGMASEVQLMNASTQTDITFEHIMALAKLRPPTPPVPDICPFLLSDSCHSLHPMEHEFYEDNEYISSLPADADRTEDFEYEEVELCRVSSQEKLGLTVCYRTDDEEDTGIYVSEVDPNSIAAKDGRIREGDRILQINGEDVQNREEAVALLSNDECKRIVLLVARPEIQLDEGWLEDERNEFLEELNLEMLEEEHNEAMQPTANEVEQPKKQEEEEGTTDTATSSSNNHEKDSGVGRTDESLRNDESSEQENAAEDPNSTSLKSKRDLGQSQDTLGSVELQYNESLVSGEYIDSDCIGNPDEDCERFRQLLELKCKIRNHGEYDLYYSSSTIECNQGEQEGVEHELQLLNEELRNIELECQNIMQAHRLQKVTDQYGDIWTLHDGGFRNYNTSIDMQRGKLDDIMEHPEKSDKDSSSAYNTAESCRSTPLTVDRSPDSSLPRVINLTNKKNLRSTMAATQSSSGQSSKESTSTKAKTTEQGCSAESKEKVLEGSKLPDQEKAVSEHIPYLSPYHSSSYRYANIPAHARHYQSYMQLIQQKSAVEYAQSQLSLVSMCKESQKCSEPKMEWKVKIRSDGTRYITKRPVRDRILKERALKIKEERSGMTTDDDTMSEMKMGRYWSKEERKQHLVRAKEQRRRREFMMRSRLECLKESPQSGSEGKKEINIIELSHKKMMKKRNKKILDNWMTIQELMTHGAKSPDGTRVHNAFLSVTTV

SEQ ID NO: 10240 - protein, 776 aa, Homo Sapiens
MSGKRQFFLKPLALLTCWPSTVNGKDLSKATHEEAVEAFRNAKEPIVVQVLRRTPLSRPAYGMASEVQLMNASTQTDITFEHIMALAKLRPPTPPVPDICPFLLSDSCHSLHPMEHEFYEDNEYISSLPADADRTEDFEYEEVELCRVSSQEKLGLTVCYRTDDEEDTGIYVSEVDPNSIAAKDGRIREGDRILQINGEDVQNREEAVALLSNDECKRIVLLVARPEIQLDEGWLEDERNEFLEELNLEMLEEEHNEAMQPTANEVEQPKKQEEEEGTTDTATSSSNNHEKDSGVGRTDESLRNDESSEQENAAEDPNSTSLKSKRDLGQSQDTLGSVELQYNESLVSGEYIDSDCIGNPDEDCERFRQLLELKCKIRNHGEYDLYYSSSTIECNQGEQEGVEHELQLLNEELRNIELECQNIMQAHRLQKVTDQYGDIWTLHDGGFRNYNTSIDMQRGKLDDIMEHPEKSDKDSSSAYNTAESCRSTPLTVDRSPDSSLPRVINLTNKKNLRSTMAATQSSSGQSSKESTSTKAKTTEQGCSAESKEKVLEGSKLPDQEKAVSEHIPYLSPYHSSSYRYANIPAHARHYQSYMQLIQQKSAVEYAQSQLSLVSMCKESQKCSEPKMEWKVKIRSDGTRYITKRPVRDRILKERALKIKEERSGMTTDDDTMSEMKMGRYWSKEERKQHLVRAKEQRRRREFMMRSRLECLKESPQSGSEGKKEINIIELSHKKMMKKRNKKILDNWMTIQELMTHGAKSPDGTRVHNAFLSVTTV

SEQ ID NO: 10241 - protein, 77 aa, Homo Sapiens
MSPPLCPLLLLAVGLRLAGTLNPSDPNTCSFWESFTTTTKESHSRPFSLLPSEPCERPWEGPHTCPQPTNSEETPGF

SEQ ID NO: 10242 - protein, 173 aa, Homo Sapiens
MSPPLCPLLLLAVGLRLAGTLNPSDPNTCSFWESFTTTTKESHSRPFSLLPSEPCERPWEGPHTCPQPTVVYRTVYRQVVKTDHRQRLQCCHGFYESRGFCVPLCAQECVHGRCVAPNQCQCVPGWRGDDCSSECAPGMWGPQCDKPCSCGNNSSCDPKSGVCSCPSGLQPPN

SEQ ID NO: 10243 - protein, 1037 aa, Homo Sapiens
MSPPLCPLLLLAVGLRLAGTLNPSDPNTCSFWESFTTTTKESHSRPFSLLPSEPCERPWEGPHTCPQPTVVYRTVYRQVVKTDHRQRLQCCHGFYESRGFCVPLCAQECVHGRCVAPNQCQCVPGWRGDDCSSECAPGMWGPQCDKPCSCGNNSSCDPKSGVCSCPSGLQPPNCLQPCTPGYYGPACQFRCQCHGAPCDPQTGACFCPAERTGPSCDVSCSQGTSGFFCPSTHSCQNGGVFQTPQGSCSCPPGWMGTICSLPCPEGFHGPNCSQECRCHNGGLCDRFTGQCRCAPGYTGDRCREECPVGRFGQDCAETCDCAPDARCFPANGACLCEHGFTGDRCTDRLCPDGFYGLSCQAPCTCDREHSLSCHPMNGECSCLPGWAGLHCNESCPQDTHGPGCQEHCLCLHGGVCQATSGLCQCAPGYTGPHCASLCPPDTYGVNCSARCSCENAIACSPIDGECVCKEGWQRGNCSVPCPPGTWGFSCNASCQCAHEAVCSPQTGACTCTPGWHGAHCQLPCPKGQFGEGCASRCDCDHSDGCDPVHGRCQCQAGWMGARCHLSCPEGLWGVNCSNTCTCKNGGTCLPENGNCVCAPGFRGPSCQRSCQPGRYGKRCVPCKCANHSFCHPSNGTCYCLAGWTGPDCSQPCPPGHWGENCAQTCQCHHGGTCHPQDGSCICPLGWTGHHCLEGCPLGTFGANCSQPCQCGPGEKCHPETGACVCPPGHSGAPCRIGIQEPFTVMPTTPVAYNSLGAVIGIAVLGSLVVALVALFIGYRHWQKGKEHHHLAVAYSSGRLDGSEYVMPDVPPSYSHYYSNPSYHTLSQCSPNPPPPNKVPGPLFASLQNPERPGGAQGHDNHTTLPADWKHRREPPPGPLDRGSSRLDRSYSYSYSNGPGPFYNKGLISEEELGASVASLSSENPYATIRDLPSLPGGPRESSYMEMKGPPSGSPPRQPPQFWDSQRRRQPQPQRDSGTYEQPSPLIHDRDSVGSQPPLPPGLPPGHYDSPKNSHIPGHYDLPPVRHPPSPPLRRQDR

SEQ ID NO: 10244 - protein, 1037 aa, Homo Sapiens; identical to SEQ ID NO: 10243

SEQ ID NO: 10245 - protein, 227 aa, Homo Sapiens
MGWTMRLVTAALLLGLMMVVTGDEDENSPCAHEALLDEDTLFCQGLEVFYPELGNIGCKVVPDCNNYRQKITSWMEPIVKFPGAVDGATYILVMVDPDAPSRAEPRQRFWRHWLVTDIKGADLKKGKIQGQELSAYQAPSPPAHSGFHRYQFFVYLQEGKVISLLPKENKTRGSWKMDRFLNRFHLGEPEASTQFMTQNYQDSPTLQAPRERASEPKHKNQAEIAAC

SEQ ID NO: 10246 - protein, 93 aa, Homo Sapiens
MSRRRAEPGCGGSGRRAGAPGEGRGRRRYAPGPAAKALPRRRLALQSQVPMGWTMRLVTAALLLGLMMVVTGDEDENSPCAHEALLDEDTLFC

SEQ ID NO: 10247 - protein, 135 aa, Homo Sapiens
MQPRWAQGATMWLGVLLTLLLCSSLEGQENSFTINSVDMKSLPDWTVQNGKNLTLQCFADVSTTSHVKPQHQMLFYKDDVLFYNISSMKSTESYFIPEVRIYDSGTYKCTVIVNNKEKTTAEYQVLVEGVPSPRV

SEQ ID NO: 10248 - protein, 230 aa, Homo Sapiens
MQPRWAQGATMWLGVLLTLLLCSSLEGQENSFTINSVDMKSLPDWTVQNGKNLTLQCFADVSTTSHVKPQHQMLFYKDDVLFYNISSMKSTESYFIPEVRIYDSGTYKCTVIVNNKEKTTAEYQVLVEGVPSPRVTLDKKEAIQGGIVRVNCSVPEEKAPIHFTIEKLELNEKMVKLKREKNSRDQNFVILEFPVEEQDRVLSFRCQARIISGIHMQTSESTKSELVTVT

SEQ ID NO: 10249 - protein, 738 aa, Homo Sapiens
MQPRWAQGATMWLGVLLTLLLCSSLEGQENSFTINSVDMKSLPDWTVQNGKNLTLQCFADVSTTSHVKPQHQMLFYKDDVLFYNISSMKSTESYFIPEVRIYDSGTYKCTVIVNNKEKTTAEYQVLVEGVPSPRVTLDKKEAIQGGIVRVNCSVPEEKAPIHFTIEKLELNEKMVKLKREKNSRDQNFVILEFPVEEQDRVLSFRCQARIISGIHMQTSESTKSELVTVTESFSTPKFHISPTGMIMEGAQLHIKCTIQVTHLAQEFPEIIIQKDKAIVAHNRHGNKAVYSVMAMVEHSGNYTCKVESSRISKVSSIVVNITELFSKPELESSFTHLDQGERLNLSCSIPGAPPANFTIQKEDTIVSQTQDFTKIASKSDSGTYICTAGIDKVVKKSNTVQIVVCEMLSQPRISYDAQFEVIKGQTIEVRCESISGTLPISYQLLKTSKVLENSTKNSNDPAVFKDNPTEDVEYQCVADNCHSHAKMLSEVLRVKVIAPVDEVQISILSSKVVESGEDIVLQCAVNEGSGPITYKFYREKEGKPFYQMTSNATQAFWTKQKASKEQEGEYYCTAFNRANHASSVPRSKILTVRVILAPWKKGLIAVVIIGVIIALLIIAAKCYFLRKAKAKQMPVEMSRPAVPLLNSNNEKMSDPNMEANSHYGHNDDVRNHAMKPINDNKEPLNSDVQYTEVQVSSAESHKDLGKKDTETVYSEVRKAVPDAVESRYSRTEGSLDGT

SEQ ID NO: 10250 - protein, 184 aa, Homo Sapiens [sequence omitted]

SEQ ID NO: 10251 - protein, 88 aa, Homo Sapiens
FLTLCTWLLLLGPGLLATVRAECSQDCATCSYRLVRPADINFLKHPRIDQFIHSTNEYLMEEAPDGGKSQCNASKWRHGVLMEKQQDL

SEQ ID NO: 10252 - protein, 105 aa, Homo Sapiens
MARFLTLCTWLLLLGPGLLATVRAECSQDCATCSYRLVRPADINFLACVMECEGKLPSLKIWETCKELLQLSKPELPQDGTSTLRENSKPEESHLLAKRYGGFMK

SEQ ID NO: 10253 - protein, 267 aa, Homo Sapiens
MARFLTLCTWLLLLGPGLLATVRAECSQDCATCSYRLVRPADINFLACVMECEGKLPSLKIWETCKELLQLSKPELPQDGTSTLRENSKPEESHLLAKRYGGFMKRYGGFMKKMDELYPMEPEEEANGSEILAKRYGGFMKKDAEEDDSLANSSDLLKELLETGDNRERSHHQDGSDNEEEVSKRYGGFMRGLKRSPQLEDEAKELQKRYGGFMRRVGRPEWWMDYQKRYGGFLKRFAEALPSDEEGESYSKEVPEMEKRYGGFMRF

SEQ ID NO: 10254 - protein, 267 aa, Homo Sapiens; identical to SEQ ID NO: 10253

SEQ ID NO: 10255 - protein, 79 aa, Homo Sapiens
MARFLTLCTWLLLLGPGLLATVRAECSQDCATCSYRLVRPADINFLDCGGGEEEGCSFQNFPYCFLCSCCYHLLLLSLL

SEQ ID NO: 10256 - protein, 92 aa, Homo Sapiens
MARFLTLCTWLLLLGPGLLATVRAECSQDCATCSYRLVRPADINFLVSVARGECCAPCETEFPQQYADCLRPTARRVWRFAPGRSRSGASPW

SEQ ID NO: 10257 - protein, 81 aa, Homo Sapiens
MSRSSKVVLGLSVLLTAATVAGVHVKQQWDQQRLRDGVIRDIERQIRKKENIRLLGEQIILTEQLEAEREKMLLAKGSQKS

SEQ ID NO: 10258 - protein, 101 aa, Homo Sapiens
MSSAAGFCASRPGLLFLGLLLLPLVVAFASAEAEEDGDLQCLCVKTTSQVRPRHITSLEVIKAGPHCPTAQLIATLKNGRKICLDLQAPLYKKIIKKLLES

SEQ ID NO: 10259 - protein, 104 aa, Homo Sapiens
MSSAARSRLTRATRQEMLFLALLLLPVVVAFARAEAEEDGDLQCLCVKTTSQVRPRHITSLEVIKAGPHCPTAQLIATLKNGRKICLDLQALLYKKIIKEHLES

SEQ ID NO: 10260 - protein, 776 aa, Homo Sapiens
MCGYERCRPCRGAHGYLRGGQGVLHLRGLPGHGGRRLKHRRGRLGECLQHPASGAVRGDWREKPGCWSHRFPCPGRHALVGGTIIGSARCQAFRTREGRLKAACNLLQRGITNLCVIGGDGSLTGANLFRKEWSGLLEELARNGQIDKEAVQKYAYLNVVGMVGSIDNDFCGTDMTIGTDSALHRIIEVVDAIMTTAQSHQRTFVLEVMGRHCGYLALVSALACGADWVFLPESPPEEGWEEQMCVKLSENRARKKRLNIIIVAEGAIDTQNKPITSEKIKELVVTQLGYDTRVTILGHVQRGGTPSAFDRILASRMGVEAVIALLEATPDTPACVVSLNGNHAVRLPLMECVQMTQDVQKAMDERRFQDAVRLRGRSFAGNLNTYKRLAIKLPDDQIPKTNCNVAVINVGAPAAGMNAAVRSAVRVGIADGHRMLAIYDGFDGFAKGQIKEIGWTDVGGWTGQGGSILGTKRVLPGKYLEEIATQMRTHSINALLIIGGFEAYLGLLELSAAREKHEEFCVPMVMVPATVSNNVPGSDFSIGADTALNTITDTCDRIKQSASGTKRRVFIIETMGGYCGYLANMGGLAAGADAAYIFEEPFDIRDLQSNVEHLTEKMKTTIQRGLVLRNESCSENYTTDFIYQLYSEEGKGVFDCRKNVLGHMQQGGAPSPFDRNFGTKISARAMEWITAKLKEARGRGKKFTTDDSICVLGISKRNVIFQPVAELKKQTDFEHRIPKEQWWLKLRPLMKILAKYKASYDVSDSGQLEHVQPWSV

SEQ ID NO: 10261 - protein, 784 aa, Homo Sapiens
MDADDSRAPKGSLRKFLEHLSGAGKAIGVLTSGGDAQGMNAAVRAVVRMGIYVGAKVYFIYEGYQGMVDGGSNIAEADWESVSSILQVGGTIIGSARCQAFRTREGRLKAACNLLQRGITNLCVIGGDGSLTGANLFRKEWSGLLEELARNGQIDKEAVQKYAYLNVVGMVGSIDNDFCGTDMTIGTDSALHRIIEVVDAIMTTAQSHQRTFVLEVMGRHCGYLALVSALACGADWVFLPESPPEEGWEEQMCVKLSENRARKKRLNIIIVAEGAIDTQNKPITSEKIKELVVTQLGYDTRVTILGHVQRGGTPSAFDRILASRMGVEAVIALLEATPDTPACVVSLNGNHAVRLPLMECVQMTQDVQKAMDERRFQDAVRLRGRSFAGNLNTYKRLAIKLPDDQIPKTNCNVAVINVGAPAAGMNAAVRSAVRVGIADGHRMLAIYDGFDGFAKGQIKEIGWTDVGGWTGQGGSILGTKRVLPGKYLEEIATQMRTHSINALLIIGGFEAYLGLLELSAAREKHEEFCVPMVMVPATVSNNVPGSDFSIGADTALNTITDTCDRIKQSASGTKRRVFIIETMGGYCGYLANMGGLAAGADAAYIFEEPFDIRDLQSNVEHLTEKMKTTIQRGLVLRNESCSENYTTDFIYQLYSEEGKGVFDCRKNVLGHMQQGGAPSPFDRNFGTKISARAMEWITAKLKEARGRGKKFTTDDSICVLGISKRNVIFQPVAELKKQTDFEHRIPKEQWWLKLRPLMKILAKYKASYDVSDSGQLEHVQPWSV

SEQ ID NO: 10262 - protein, 202 aa, Homo Sapiens
MGGYCGYLANMGGLAAGADAAYIFEEPFDIRDLQSNVEHLTEKMKTTIQRGLVLRNESCSENYTTDFIYQLYSEEGKGVFDCRKNVLGHMQQGGAPSPFDRNFGTKISARAMEWITAKLKEARGRGKKFTTDDSICVLGISKRNVIFQPVAELKKQTDFEHRIPKEQWWLKLRPLMKILAKYKASYDVSDSGQLEHVQPWSV

SEQ ID NO: 10263 - protein, 118 aa, Homo Sapiens
MGRHCGYLALVSALACGADWVFLPESPPEEGWEEQMCVKLSENRARKKRLNIIIVAEGAIDTQNKPITSEKIKELVVTQLGYDTRVTILGHVQRGGTPSAFDRILASRMGVEAVIALL

SEQ ID NO: 10264 - protein, 240 aa, Homo Sapiens
MGRHCGYLALVSALACGADWVFLPESPPEEGWEEQMCVKLSENRARKKRLNIIIVAEGAIDTQNKPITSEKIKELVVTQLGYDTRVTILGHVQRGGTPSAFDRILASRMGVEAVIALLEATPDTPACVVSLNGNHAVRLPLMECVQMTQDVQKAMDERRFQDAVRLRGRSFAGNLNTYKRLAIKLPDDQIPKTNCNVAVINVGAPAAGMNAAVRSAVRVGIADGHRMLAIYDGFDGFAKG

SEQ ID NO: 10265 - protein, 113 aa, Homo Sapiens
MNAAVRAVVRMGIYVGAKVYFIYEGYQGMVDGGSNIAEADWESVSSILQVGGTIIGSARCQAFRTREGRLKAACNLLQRGITNLCVIGGDGSLTGANLFRKEWSGLLEELARN

SEQ ID NO: 10266 - protein, 210 aa, Homo Sapiens
MNAAVRAVVRMGIYVGAKVYFIYEGYQGMVDGGSNIAEADWESVSSILQVGGTIIGSARCQAFRTREGRLKAACNLLQRGITNLCVIGGDGSLTGANLFRKEWSGLLEELARNGQIDKEAVQKYAYLNVVGMVGSIDNDFCGTDMTIGTDSALHRIIEVVDAIMTTAQSHQRTFVLEVMGRHCGYLALVSALACGADWVFLPESPPEEGW

SEQ ID NO: 10267 - protein, 166 aa, Homo Sapiens
  misc_feature (1)..(1): Xaa can be any naturally occurring amino acid
XADGHRMLAIYDGFDGFAKGQIKEIGWTDVGGWTGQGGSILGTKRVLPGKYLEEIATQMRTHSINALLIIGGFEAYKSACDMAEARGRHQELCIPLCVVPATISNNVPGTEISLGSDTGLNAVVETCDRIKQSASGTKRRVFIIETMGGYCGYLANMGGLAAGADA

SEQ ID NO: 10268 - protein, 103 aa, Homo Sapiens
  misc_feature (1)..(1): Xaa can be any naturally occurring amino acid
XFIYQLYSEEGKGVFDCRKNVLGHMQQGGAPSPFDRNFGTKISARAMEWITAKLKEARGRGKKFTTDDSICVLGISKRNVIFQPVAELKKQTDFETVSMQPPR

SEQ ID NO: 10269 - protein, 140 aa, Homo Sapiens
MAGWNAYIDNLMADGTCQDAAIVGYKDSPSVWAAVPGKTFVNITPAEVGVLVGKDRSSFYVNGLTLGGQKCSVIRDSLLQDGEFSMDLRTKSTGGAPTFNVTVTKTDKTLVLLMGKEGVHGGLINKKCYEMASHLRRSQY

SEQ ID NO: 10270 - protein, 104 aa, Homo Sapiens
MGAWFLFQPAEVGVLVGKDRSSFYVNGLTLGGQKCSVIRDSLLQDGEFSMDLRTKSTGGAPTFNVTVTKTDKTLVLLMGKEGVHGGLINKKCYEMASHLRRSQY

SEQ ID NO: 10271 - protein, 165 aa, Homo Sapiens
MHSRPRRRRRRGHTRRRPPVLPFGGGSGGARAAAQRAEPRSGRQRVPRALRLPPPASRGSSSPVRGPSSSAESSPSSSAMAGWNAYIDNLMADGTCQDAAIVGYKDSPSVWAAVPGKTFVNITPAEVGVLVGKDRSSFYVNGLTLGGQKCSVIRDSLLQDGEFSM

SEQ ID NO: 10272 - protein, 265 aa, Homo Sapiens
MEYFGTIGIGTPAQDFTVVFDTGSSNLWVPSVYCSSLACTNHNRFNPEDSSTYQSTSETVSITYGTGSMTGILGYDTVQVGGISDTNQIFGLSETEPGSFLYYAPFDGILGLAYPSISSSGATPVFDNIWNQGLVSQDLFSVYLSADDQSGSVVIFGGIDSSYYTGSLNWVPVTVEGYWQITVDSITMNGEAIACAEGCQAIVDTGTSLLTGPTSPIANIQSDIGASENSDGDMVVSCSAISSLPDIVFTINGVQYPVPPSAYIL

SEQ ID NO: 10273 - protein, 388 aa, Homo Sapiens
MKWLLLLGLVALSECIMYKVPLIRKKSLRRTLSERGLLKDFLKKHNLNPARKYFPQWKAPTLVDEQPLENYLDMEYFGTIGIGTPAQDFTVVFDTGSSNLWVPSVYCSSLACTNHNRFNPEDSSTYQSTSETVSITYGTGSMTGILGYDTVQVGGISDTNQIFGLSETEPGSFLYYAPFDGILGLAYPSISSSGATPVFDNIWNQGLVSQDLFSVYLSADDQSGSVVIFGGIDSSYYTGSLNWVPVTVEGYWQITVDSITMNGEAIACAEGCQAIVDTGTSLLTGPTSPIANIQSDIGASENSDGDMVVSCSAISSLPDIVFTINGVQYPVPPSAYILQSEGSCISGFQGMNLPTESGELWILGDVFIRQYFTVFDRANNQVGLAPVA

SEQ ID NO: 10274 - protein, 128 aa, Homo Sapiens
MNGEAIACAEGCQAIVDTGTSLLTGPTSPIANIQSDIGASENSDGDMVVSCSAISSLPDIVFTINGVQYPVPPSAYILQSEGSCISGFQGMNLPTESGELWILGDVFIRQYFTVFDRANNQVGLAPVA

SEQ ID NO: 10275 - protein, 234 aa, Homo Sapiens
MVSGNNSDSAHCIGTGLRGKETTLVTPQDSPRKCPIKGSPEEATADGHTNGRTKKFMSSPLTFHSDDQSGSVVIFGGIDSSYYTGSLNWVPVTVEGYWQITVDSITMNGEAIACAEGCQAIVDTGTSLLTGPTSPIANIQSDIGASENSDGDMVVSCSAISSLPDIVFTINGVQYPVPPSAYILQSEGSCISGFQGMNLPTESGELWILGDVFIRQYFTVFDRANNQVGLAPVA

SEQ ID NO: 10276 - protein, 388 aa, Homo Sapiens
MKWLLLLGLVALSECIMYKVPLIRKKSLRRTLSERGLLKDFLKKHNLNPARKYFPQWEAPTLVDEQPLENYLDMEYFGTIGIGTPAQDFTVVFDTGSSNLWVPSVYCSSLACTNHNRFNPEDSSTYQSTSETVSITYGTGSMTGILGYDTVQVGGISDTNQIFGLSETEPGSFLYYAPFDGILGLAYPSISSSGATPVFDNIWNQGLVSQDLFSVYLSADDQSGSVVIFGGIDSSYYTGSLNWVPVTVEGYWQITVDSITMNGEAIACAEGCQAIVDTGTSLLTGPTSPIANIQSDIGASENSDGDMVVSCSAISSLPDIVFTINGVQYPVPPSAYILQSEGSCISGFQGMNLPTESGELWILGDVFIRQYFTVFDRANNQVGLAPVA

SEQ ID NO: 10277 - protein, 128 aa, Homo Sapiens; identical to SEQ ID NO: 10274

SEQ ID NO: 10278 - protein, 234 aa, Homo Sapiens; identical to SEQ ID NO: 10275

SEQ ID NO: 10279 - protein, 388 aa, Homo Sapiens
MKWLLLLGLVALSECIMYKVPLIRKKSLRRTLSERGLLKDFLKKHNLNPARKYFPQWEAPTLVDEQPLENYLDMEYFGTIGIGTPAQDFTVVFDTGSSNLWVPSVYCSSLACTNHNRFNPEDSSTYQSTSETVSITYGTGSMTGILGYDTVQVGGISDTNQIFGLSETEPGSFLYYAPFDGILGLAYPSISSSGATPVFDNIWNQGLVSQDLFSVYLSADDKSGSVVIFGGIDSSYYTGSLNWVPVTVEGYWQITVDSITMNGETIACAEGCQAIVDTGTSLLTGPTSPIANIQSDIGASENSDGDMVVSCSAISSLPDIVFTINGVQYPVPPSAYILQSEGSCISGFQGMNVPTESGELWILGDVFIRQYFTVFDRANNQVGLAPVA

SEQ ID NO: 10280 - protein, 128 aa, Homo Sapiens
MNGETIACAEGCQAIVDTGTSLLTGPTSPIANIQSDIGASENSDGDMVVSCSAISSLPDIVFTINGVQYPVPPSAYILQSEGSCISGFQGMNVPTESGELWILGDVFIRQYFTVFDRANNQVGLAPVA

SEQ ID NO: 10281 - protein, 234 aa, Homo Sapiens
MVSGNNSDGAHCMGPGLRGKETTLVTPQDSPGKCPINGRSEEATADGHTNGRTKKFMSSPLTFHSDDKSGSVVIFGGIDSSYYTGSLNWVPVTVEGYWQITVDSITMNGETIACAEGCQAIVDTGTSLLTGPTSPIANIQSDIGASENSDGDMVVSCSAISSLPDIVFTINGVQYPVPPSAYILQSEGSCISGFQGMNVPTESGELWILGDVFIRQYFTVFDRANNQVGLAPVA

SEQ ID NO: 10282 - protein, 289 aa, Homo Sapiens
MAFRQALQLAACGLAGGSAAVLFSAVAVGKPRAGGDAEPRPAEPPAWAGGARPGPGVWDPNWDRREPLSLINVRKRNVESGEEELASKLDHYKAKATRHIFLIRHSQYHVDGSLEKDRTLTPLGREQAELTGLRLASLGLKFNKIVHSSMTRAIETTDIISRHLPGVCKVSTDLLREGAPIEPDPPVSHWKPEAVQYYEDGARIEAAFRNYIHRADARQEEDSYEIFICHANVIRYIVCRALQFPPEGWLRLSLNNGSITHLVIRPNGRVALRTLGDTGFMPPDKITRS

SEQ ID NO: 10283 - protein, 255 aa, Homo Sapiens
MAFRQALQLAACGLAGGSAAVLFSAVAVGKPRAGGDAEPRPAEPPAWAGGARPGPGVWDPNWDRREPLSLINVRKRNVESGEEELASKLDHYKAKATRHIFLIRHSQYHVDGSLEKDRTLTPLGREQAELTGLRLASLGLKFNKIVHSSMTRAIETTDIISRHLPGVCKVSTDLLREGAPIEPDPPVSHWKPEAVQYYEDGARIEAAFRNYIHRADARQEEDSYEIFICHANVIRYIVCSIPPLLSAGDFVLLGS

SEQ ID NO: 10284 - protein, 140 aa, Homo Sapiens
MTRAIETTDIISRHLPGVCKVSTDLLREGAPIEPDPPVSHWKPEAVQYYEDGARIEAAFRNYIHRADARQEEDSYEIFICHANVIRYIVCRALQFPPEGWLRLSLNNGSITHLVIRPNGRVALRTLGDTGFMPPDKITRS

SEQ ID NO: 10285 - protein, 140 aa, Homo Sapiens; identical to SEQ ID NO: 10284

SEQ ID NO: 10286 - protein, 269 aa, Homo Sapiens
MAGLAARLVLLAGAAALASGSQGDREPVYRDCVLQCEEQNCSGGALNHFRSRQPIYMSLAGWTCRDDCKYECMWVTVGLYLQEGHKVPQFHGKVSLNAWFWSTVFHTRDTDLTEKMDYFCASTVILHSIYLCCVRTVGLQHPAVVSAFRALLLLMLTVHVSYLSLIRFDYGYNLVANVAIGLVNVVWWLAWCLWNQRRLPHVRKCVVVVLLLQGLSLLELLDFPPLFWVLDAHAIWHISTIPVHVLFFSFLEDDSLYLLKESEDKFKLD

SEQ ID NO: 10287 - protein, 299 aa, Homo Sapiens
MAGLAARLVLLAGAAALASGSQGDREPVYRDCVLQCEEQNCSGGALNHFRSRQPIYMSLAGWTCRDDCKYECMWVTVGLYLQEGHKVPQFHGKWPFSRFLFFQEPASAVASFLNGLASLVMLCRYRTFVPASSPMYHTCVAFAWKMDYFCASTVILHSIYLCCVRTVGLQHPAVVSAFRALLLLMLTVHVSYLSLIRFDYGYNLVANVAIGLVNVVWWLAWCLWNQRRLPHVRKCVVVVLLLQGLSLLELLDFPPLFWVLDAHAIWHISTIPVHVLFFSFLEDDSLYLLKESEDKFKLD

SEQ ID NO: 10288 - protein, 148 aa, Homo Sapiens
MAGLAARLVLLAGAAALASGSQGDREPVYRDCVLQCEEQNCSGGALNHFRSRQPIYMSLAGWTCRDDCKYECMWVTVGLYLQEGHKVPQFHGKWPFSRFLFFQEPASAVASFLNGLASLVMLCRYRTFVPASSPMYHTCVAFAWLSGR

SEQ ID NO: 10289 - protein, 320 aa, Homo Sapiens
MAGLAARLVLLAGAAALASGSQGDREPVYRDCVLQCEEQNCSGGALNHFRSRQPIYMSLAGWTCRDDCKYECMWVTVGLYLQEGHKVPQFHGKWPFSRFLFFQEPASAVASFLNGLASLVMLCRYRTFVPASSPMYHTCVAFAWVSLNAWFWSTVFHTRDTDLTEKMDYFCASTVILHSIYLCCVRTVGLQHPAVVSAFRALLLLMLTVHVSYLSLIRFDYGYNLVANVAIGLVNVVWWLAWCLWNQRRLPHVRKCVVVVLLLQGLSLLELLDFPPLFWVLDAHAIWHISTIPVHVLFFSFLEDDSLYLLKESEDKFKLD

SEQ ID NO: 10290 - protein, 240 aa, Homo Sapiens
MKDVGPESCGQPTPCWPSPALESVLGKASQHLGLESGQPLYLLELNWGGTECALSSTGRTAACFLPISLLPTSPAAWLGPEALCLPGRPGTTGLRDTGGPLLLPPPTLLQDTTRWCWMLVLWPAKVHGDSPHGILRDQAAGIGKEFHPDHCPSQVPRRPHHTPFQGQGSSKPRARILCCCLVESLPPCVGSVGQAECIGDRAVSMGLGVCELRPRCAVWRRVLSGKRCGFKVCVCRGWVC

SEQ ID NO: 10291 - protein, 70 aa, Homo Sapiens
MWVTVGLYLQEGHKVPQFHGKWPFSRFLFFQEPASAVASFLNGLASLVMLCRYRTFVPASSPMYHTCVAF

SEQ ID NO: 10292 - protein, 44 aa, Homo Sapiens
SFLNGLASLVMLCRYRTFVPASSPMYHTCVAFAWMRKLRHSKAK

SEQ ID NO: 10293 - protein, 150 aa, Homo Sapiens
  misc_feature (1)..(1): Xaa can be any naturally occurring amino acid
XARLVLLAGAAALASGSQGDREPVYRDCVLQCEEQNCSGGALNHFRSRQPIYMSLAGWTCRDDCKYECMWVTVGLYLQEGHKVPQFHGKWPFSRFLFFQEPASAVASFLNGLASLVMLCRYRTFVPASSPMYHTCVAFAWMRKLRHSKAK

SEQ ID NO: 10294 - protein, 86 aa, Homo Sapiens
MCLHPSSTPPFHQPRKEAVICKQRVPLKKFKSIRETMKEKGLLGEFLRTHKYDPAWKYRFGDLSVTYEPMAYMDAAYFGEISIGTP

SEQ ID NO: 10295 - protein, 315 aa, Homo Sapiens
MKWMVVVLVCLQLLEAAVVKVPLKKFKSIRETMKEKGLLGEFLRTHKYDPAWKYRFGDLSVTYEPMAYMDAAYFGEISIGTPPQNFLVLFDTGSSNLWVPSVYCQSQACTSHSRFNPSESSTYSTNGQTFSLQYGSGSLTGFFGYDTLTVQSIQVPNQEFGLSENEPGTNFVYAQFDGIMGLAYPALSVDEATTAMQGMVQEGALTSPVFSVYLSNLVLESSGLGPLLTPSRAAPPSSTLQLPEKPLEQTWNILTPFTKTLPVSNLSRKVTSWAGVGIPVTCLPEAGSGGERRAECGLGVPTTRGPPRSQHHSGA

SEQ ID NO: 10296 - protein, 388 aa, Homo Sapiens
MKWMVVVLVCLQLLEAAVVKVPLKKFKSIRETMKEKGLLGEFLRTHKYDPAWKYRFGDLSVTYEPMAYMDAAYFGEISIGTPPQNFLVLFDTGSSNLWVPSVYCQSQACTSHSRFNPSESSTYSTNGQTFSLQYGSGSLTGFFGYDTLTVQSIQVPNQEFGLSENEPGTNFVYAQFDGIMGLAYPALSVDEATTAMQGMVQEGALTSPVFSVYLSNQQGSSGGAVVFGGVDSSLYTGQIYWAPVTQELYWQIGIEEFLIGGQASGWCSEGCQAIVDTGTSLLTVPQQYMSALLQATGAQEDEYGQFLVNCNSIQNLPSLTFIINGVEFPLPPSSYILSNNGYCTVGVEPTYLSSQNGQPLWILGDVFLRSYYSVYDLGNNRVGFATAA

SEQ ID NO: 10297 - protein, 140 aa, Homo Sapiens [sequence omitted]

SEQ ID NO: 10298 - protein, 221 aa, Homo Sapiens
MPVMRLFPCFLQLLAGLALPAVPPQQWALSAGNGSSEVEVVPFQEVWGRSYCRALERLVDVVSEYPSEVEHMFSPSCVSLLRCTGCCGDENLHCVPVETANVTMQLLKIRSGDRPSYVELTFSQHVRCECRHSPGRQSPDMPGDFRADAPSFLPPRRSLPMLFRMEWGCALTGSQSAVWPSSPVPEEIPRMHPGRNGKKQQRKPLREKMKPERCGDAVPRR

SEQ ID NO: 10299 - protein, 149 aa, Homo Sapiens
MPVMRLFPCFLQLLAGLALPAVPPQQWALSAGNGSSEVEVVPFQEVWGRSYCRALERLVDVVSEYPSEVEHMFSPSCVSLLRCTGCCGDENLHCVPVETANVTMQLLKIRSGDRPSYVELTFSQHVRCECRPLREKMKPERCGDAVPRR

SEQ ID NO: 10300 - protein, 170 aa, Homo Sapiens
MPVMRLFPCFLQLLAGLALPAVPPQQWALSAGNGSSEVEVVPFQEVWGRSYCRALERLVDVVSEYPSEVEHMFSPSCVSLLRCTGCCGDENLHCVPVETANVTMQLLKIRSGDRPSYVELTFSQHVRCECRPLREKMKPERRRPKGRGKRRREKQRPTDCHLCGDAVPRR

SEQ ID NO: 10301 - protein, 169 aa, Homo Sapiens
MPVMRLFPCFLQLLAGLALPAVPPQWALSAGNGSSEVEVVPFQEVWGRSYCRALERLVDVVSEYPSEVEHMFSPSCVSLLRCTGCCGDENLHCVPVETANVTMQLLKIRSGDRPSYVELTFSQHVRCECRPLREKMKPERRRPKGRGKRRREKQRPTDCHLCGDAVPRR

SEQ ID NO: 10302 - protein, 196 aa, Homo Sapiens
MSRRSMLLAWALPSLLRLGAAQETEDPACCSPIVPRNEWKALASECAQHLSLPLRYVVVSHTAGSSCNTPASCQQQARNVQHYHMKTLGWCDVGYNFLIGEDGLVYEGRGWNFTGAHSGHLWNPMSIGISFMGNYMDRVPTPQAIRAAQGLLACGVAQGALRSNYVLKGHRDVQRTLSPGNQLYHLIQNWPHYRSP

SEQ ID NO: 10303 - protein, 105 aa, Homo Sapiens
MAQGVLWILLGLLLWSDPGTASLPLLMDSVIQALAELEQKVPAAKTRHTASAWLMSAPNSGPHNRLYHFLLGAWSLNATELDPCPLSPELLGLTKEVARHDVREG

SEQ ID NO: 10304 - protein, 634 aa, Homo Sapiens
MAQGVLWILLGLLLWSDPGTASLPLLMDSVIQALAELEQKVPAAKTRHTASAWLMSAPNSGPHNRLYHFLLGAWSLNATELDPCPLSPELLGLTKEVARHDVREGKEYGVVLAPDGSTVAVEPLLAGLEAGLQGRRVINLPLDSMAAPWETGDTFPDVVAIAPDVRATSSPGLRDGSPDVTTADIGANTPDATKGCPDVQASLPDAKAKSPPTMVDSLLAVTLAGNLGLTFLRGSQTQSHPDLGTEGCWDQLSAPRTFTLLDPKASLLTMAFLNGALDGVILGDYLSRTPEPRPSLSHLLSQYYGAGVARDPGFRSNFRRQNGAALTSASILAQQVWGTLVLLQRLEPVHLQLQCMSQEQLAQVAANATKEFTEAFLGCPAIHPRCRWGAAPYRGRPKLLQLPLGFLYVHHTYVPAPPCTDFTRCAANMRSMQRYHQDTQGWGDIGYSFVVGSDGYVYEGRGWHWVGAHTLGHNSRGFGVAIVGNYTAALPTEAALRTVRDTLPSCAVRAGLLRPDYALLGHRQLVRTDCPGDALFDLLRTWPHFTAVSLRSLHYTARRPSVYTSSTRPLPPACNSCARTASARPPTSRRHVYSGNLGPAFAGHSAGNIPDPVTSAYAASAQPQTQPACPFPSS

SEQ ID NO: 10305 - protein, 576 aa, Homo Sapiens
MAQGVLWILLGLLLWSDPGTASLPLLMDSVIQALAELEQKVPAAKTRHTASAWLMSAPNSGPHNRLYHFLLGAWSLNATELDPCPLSPELLGLTKEVARHDVREGKEYGVVLAPDGSTVAVEPLLAGLEAGLQGRRVINLPLDSMAAPWETGDTFPDVVAIAPDVRATSSPGLRDGSPDVTTADIGANTPDATKGCPDVQASLPDAKAKSPPTMVDSLLAVTLAGNLGLTFLRGSQTQSHPDLGTEGCWDQLSAPRTFTLLDPKASLLTMAFLNGALDGVILGDYLSRTPEPRPSLSHLLSQYYGAGVARDPGFRSNFRRQNGAALTSASILAQQVWGTLVLLQRLEPVHLQLQCMSQEQLAQVAANATKEFTEAFLGCPAIHPRCRWGAAPYRGRPKLLQLPLGFLYVHHTYVPAPPCTDFTRCAANMRSMQRYHQDTQGWGDIGYSFVVGSDGYVYEGRGWHWVGAHTLGHNSRGFGVAIVGNYTAALPTEAALRTVRDTLPSCAVRAGLLRPDYALLGHRQLVRTDCPGDALFDLLRTWPHFTATVKPRPARSVSKRSRREPPPRTLPATDLQ

SEQ ID NO: 10306 - protein, 181 aa, Homo Sapiens
MGTRRRGRTFHCQPSTAEVLCRGQPEIPLGSWNPATMAQGVLWILLGLLLWSDPGTASLPLLMDSVIQALAELEQKVPAAKTRHTASAWLMSAPNSGPHNRLYHFLLGAWSLNATELDPCPLSPELLGLTKEVARHDVREGKEYGVVLAPDGSTVAVEPLLAGLEAGLQGRRVINLPLDSM

SEQ ID NO: 10307 - protein, 341 aa, Homo Sapiens
MGTLPWLLAFFILGLQAWDTPTIVSRKEWGARPLACRALLTLPVAYIITDQLPGMQCQQQSVCSQMLRGLQSHSVYTIGWCDVAYNFLVGDDGRVYEGVGWNIQGLHTQGYNNISLGIAFFGNKIGSSPSPAALSAAEGLISYAIQKGHLSPRYIQPLLLKEETCLDPQHPVMPRKVCPNIIKRSAWEARETHCPKMNLPAKYVIIIHTAGTSCTVSTDCQTVVRNIQSFHMDTRNFCDIGYHFLVGQDGGVYEGVGWHIQGSHTYGFNDIALGIAFIGYFVEKPPNAAALEAAQDLIQCAVVEGYLTPNYLLMGHSDVVNILSPGQALYNIISTWPHFKH

SEQ ID NO: 10308 - protein, 369 aa, Homo Sapiens
MLPWLLVFSALGIQAWGDSSWNKTQAKQVSEGLQYLFENISQLTEKDVSTTVSRKAWGAEAVGCSIQLTTPVNVLVIHHVPGLECHDQTVCSQRLRELQAHHVHNNSGCDVAYNFLVGDDGRVYEGVGWNIQGVHTQGYNNISLGFAFFGTKKGHSPSPAALSAMENLITYAVQKGHLSSSYVQPLLGKGENCLAPRQKTSLKKACPGVVPRSVWGARETHCPRMTLPAKYGIIIHTAGRTCNISDECRLLVRDIQSFYIDRLKSCDIGYNFLVGQDGAIYEGVGWNVQGSSTPGYDDIALGITFMGTFTGIPPNAAALEAAQDLIQCAMVKGYLTPNYLLVGHSDVARTLSPGQALYNIISTWPHFKH

SEQ ID NO: 10309 - protein, 373 aa, Homo Sapiens
MLPWLLVFSALGIQAWGDSSWNKTQAKQVSEGLQYLFENISQLTEKGLPTDVSTTVSRKAWGAEAVGCSIQLTTPVNVLVIHHVPGLECHDQTVCSQRLRELQAHHVHNNSGCDVAYNFLVGDDGRVYEGVGWNIQGVHTQGYNNISLGFAFFGTKKGHSPSPAALSAMENLITYAVQKGHLSSSYVQPLLGKGENCLAPRQKTSLKKACPGVVPRSVWGARETHCPRMTLPAKYGIIIHTAGRTCNISDECRLLVRDIQSFYIDRLKSCDIGYNFLVGQDGAIYEGVGWNVQGSSTPGYDDIALGITFMGTFTGIPPNAAALEAAQDLIQCAMVKGYLTPNYLLVGHSDVARTLSPGQALYNIISTWPHFKH

SEQ ID NO: 10310 - protein, 580 aa, Homo Sapiens
MDYPKMDYFLDVESAHRLLDVESAQRFFYSQGAQARRATLLLPPTLMAASSEDDIDRRPIRRVRSKSDTPYLAEARISFNLGAAEEVERLAAMRSDSLVPGTHTPPIRRRSKFANLGRIFKPWKWRKKKSEKFKHTSAALERKISMRQSREELIKRGVLKEIYDKDGELSISNEEDSLENGQSLSSSQLSLPALSEMEPVPMPRDPCSYEVLQPSDIMDGPDPGAPVKLPCLPVKLSPPLPPKKVMICMPVGGPDLSLVSYTAQKSGQQGVAQHHHTVLPSQIQHQLQYGSHGQHLPSTTGSLPMHPSGCRMIDELNKTLAMTMQRLESSEQRVPCSTSYHSSGLHSGDGVTKAGPMGLPEIRQVPTVVIECDDNKENVPHESDYEDSSCLYTREEEEEEEDEDDDSSLYTSSLAMKVCRKDSLAIKLSNRPSKRELEEKNILPRQTDEERLELRQQIGTKLTRRLSQRPTAEELEQRNILKPRNEQEEQEEKREIKRRLTRKLSQRPTVEELRERKILIRFSDYVEVADAQDYDRRADKPWTRLTAADKAAIRKELNEFKSTEMEVHELSRHLTRFHRP

SEQ ID NO: 10311 - protein, 484 aa, Homo Sapiens
MDYPKMDYFLDVESAHRLLDVESAQRFFYSQGAQARRATLLLPPTLMAASSEDDIDRRPIRRVRSKSDTPYLAEARISFNLGAAEEVERLAAMRSDSLVPGTHTPPIRRRSKFANLGRIFKPWKWRKKKSEKFKHTSAALERKISMRQSREELIKRGVLKEIYDKDGELSISNEEDSLENGQSLSSSQLSLPALSEMEPVPMPRDPCSYEVLQPSDIMDGPDPGAPVKLPCLPVKLSPPLPPKKVMICMPVGGPDLSLVSYTAQKSGQQGVAQHHHTVLPSQIQHQLQYGSHGQHLPSTTGSLPMHPSGCRMIDELNKTLAMTMQRLESSEQRVPCSTSYHSSGLHSGDGVTKAGPMGLPEIRQVPTVVIECDDNKENVPHESDYEDSSCLYTREEEEEEEDEDDDSSLYTSSLAMKVCRKDSLAIKLSNRPSKRELEEKNILPRQTDEERLELRQQIGTKLTRRLSQRPTAEELEQRNILKRK

SEQ ID NO: 10312 - protein, 169 aa, Homo Sapiens
MDYPKMDYFLDVESAHRLLDVESAQRFFYSQGAQARRATLLLPPTLMAASSEDDIDRRPIRRVRSKSDTPYLAEARISFNLGAGVSLFGDMDEARMGPAVPTLGRPLGLELCSLENHGLLKTAPTYTTSAHICSGPSTGGQFSTQGMSPVQGAKRRRVVWLPLEGEEFG

SEQ ID NO: 10313 - protein, 144 aa, Homo Sapiens
MYLQGPRKLMTQGGYDMVQKLFLDFFRRRLSQRPTAEELEQRNILKPRNEQEEQEEKREIKRRLTRKLSQRPTVEELRERKILIRFSDYVEVADAQDYDRRADKPWTRLTAADKAAIRKELNEFKSTEMEVHELSRHLTRFHRP

SEQ ID NO: 10314 - protein, 140 aa, Homo Sapiens
MYLQGPRKLMTQGGYDMVQKLFLDFFRRRLSQRPTAEELEQRNILKPRNEQEEQEEKREIKRRLTRKLSQRPTVEELRERKILIRFSDYVEVADAQDYDRRADKPWTRLTAADKVSRGECWRVGGRTVCWVSLGSPLGSV

SEQ ID NO: 10315 - protein, 230 aa, Homo Sapiens
NLGRIFKPWKWRKKKSEKFKHTSAALERKISMRQSREELIKRGVLKEIYDKDGELSISNEEDSLENGQSLSSSQLSLPALSEMEPVPMPRDPCSYEVLQPSDIMDGPVSEESPSASESGVLLSQDPSAKPVLLLPPKKPAAFPGDHEETPVKQLPLLKQPPALPPKPTTRIANHLTDWHQAHQVGQRHPLPPWQWAFSSPGSSKRIQSRPGAVAYACNPSTLGGRGRWIT

SEQ ID NO: 10316 - protein, 265 aa, Homo Sapiens
  misc_feature (1)..(1): Xaa can be any naturally occurring amino acid
XSPFTPFSPLLSFFLSPFFFLFPSLSHSLPTPSLPLPSPFPSPSPVREPLPLPSSPFRLSPSPSVSFSLSARRATLLLPPTLMAASSEDDIDRRPIRRVRSKSDTPYLAEARISFNLGAAEEVERLAAMRSDSLVPGTHTPPIRRRSKFANLGRIFKPWKWRKKKSEKFKHTSAALERKISMRQSREELIKRGVLKEIYDKDGELSISNEEDSLENGQSLSSSQLSLPALSEMEPVPMPRDPCSYEVLQPSDIMDGPVSEESPSA

SEQ ID NO: 10317 - protein, 124 aa, Homo Sapiens
MAAKVFESIGKFGLALAVAGGVVNSALYNVDAGHRAVIFDRFRGVQDIVVGEGTHFLIPWVQKPIIFDCRSRPRNVPVITGSKDLQNVNITLRILFRPVASQLPRIFTSIGEDYDERVLPSITT

SEQ ID NO: 10318 - protein, 201 aa, Homo Sapiens
MAAKVFESIGKFGLALAVAGGVVNSALYNVDAGHRAVIFDRFRGVQDIVVGEGTHFLIPWVQKPIIFDCRSRPRNVPVITGSKDLQNVNITLRILFRPVASQLPRIFTSIGEDYDERVLPSITTEILKSVVARFDAGELITQRELVSRQVSDDLTERAATFGLILDDVSLTHLTFGKEFTEAVEAKQVAQQEAERARFVVE

SEQ ID NO: 10319 - protein, 202 aa, Homo Sapiens
MAAKVFESIGKFGLALAVAGGVVNSALYNVDAGHRAVIFDRFRGVQDIVVGEGTHFLIPWVQKPIIFDCRSRPRNVPVITGSKDLQNVNITLRILFRPVASQLPRIFTSIGEDYDERVLPSITTEILKSVVARFDAGELITQRELVSRQVSDDLTERAATFGLILDDVSLTHLTFGKEFTEAVEAKQVAQQEAERARFVVEK

SEQ ID NO: 10320 - protein, 216 aa, Homo Sapiens
MAAKVFESIGKFGLALAVAGGVVNSALYNVDAGHRAVIFDRFRGVQDIVVGEGTHFLIPWVQKPIIFDCRSRPRNVPVITGSKDLQNVNITLRILFRPVASQLPRIFTSIGEDYDERVLPSITTEILKSVVARFDAGELITQRELVSRQVSDDLTERAATFGLILDDVSLTHLTFGKEFTEAVEAKQVAQQEAERARFVVEKAEQQKKAAIISAEG

SEQ ID NO: 10321 - protein, 246 aa, Homo Sapiens
MAAKVFESIGKFGLALAVAGGVVNSALYNVDAGHRAVIFDRFRGVQDIVVGEGTHFLIPWVQKPIIFDCRSRPRNVPVITGSKDLQNVNITLRILFRPVASQLPRIFTSIGEDYDERVLPSITTEILKSVVARFDAGELITQRELVSRQVSDDLTERAATFGLILDDVSLTHLTFGKEFTEAVEAKQVAQQEAERARFVVEKAEQQKKAAIISAEGDSKAAELIANSLATAGDGLIELRKLEAAED

SEQ ID NO: 10322 - protein, 272 aa, Homo Sapiens
MAAKVFESIGKFGLALAVAGGVVNSALYNVDAGHRAVIFDRFRGVQDIVVGEGTHFLIPWVQKPIIFDCRSRPRNVPVITGSKDLQNVNITLRILFRPVASQLPRIFTSIGEDYDERVLPSITTEILKSVVARFDAGELITQRELVSRQVSDDLTERAATFGLILDDVSLTHLTFGKEFTEAVEAKQVAQQEAERARFVVEKAEQQKKAAIISAEGDSKAAELIANSLATAGDGLIELRKLEAAEDIAYQLSRSRNITYLPAGQSVLLQLPQ

SEQ ID NO: 10323 - protein, 272 aa, Homo Sapiens; identical to SEQ ID NO: 10322

SEQ ID NO: 10324 - protein, 272 aa, Homo Sapiens; identical to SEQ ID NO: 10322

SEQ ID NO: 10325 - protein, 155 aa, Homo Sapiens
MAAKVFESIGKFGLALAVAGGVVNSALYNVDAGHRAVIFDRFRGVQDIVVGEGTHFLIPWVQKPIIFDCRSRPRNVPVITGSKDLQNVNITLRILFRPVASQLPRIFTSIGEDYDERVLPSITTEILKSVVARFDAGELITYLPAGQSVLLQLPQ

SEQ ID NO: 10326 - protein, 258 aa, Homo Sapiens
MIAISAVSSALLFSLLCEASTVVLLNSTDSSPPTNNFTDIEAALKAQLDSADIPKARRKRYISQNDMIAILDYHNQVRGKVFPPAANMEYMVWDENLAKSAEAWAATCIWDHGPSYLLRFLGQNLSVRTGRYRSILQLVKPWYDEVKDYAFPYPQDCNPRCPMRCFGPMCTHYTQMVWATSNRIGCAIHTCQNMNVWGSVWRRAVYLVCNYAPKGNWIGEAPYKVGVPCSSCPPSYGGSCTDNLCFPGVTSNYLYWFK

SEQ ID NO: 10327 - protein, 258 aa, Homo Sapiens; identical to SEQ ID NO: 10326

SEQ ID NO: 10328 - protein, 117 aa, Homo Sapiens
MRASSFLIVVVFLIAGTLVLEAAVTGVPVKGQDTVKGRVPFNGQDPVKGQVSVKGQDKVKAQEPVKGPVSTKPGSCPIILIRCAMLNPPNRCLKDTDCPGIKKCCEGSCGMACFVPQ

SEQ ID NO: 10329 - protein, 77 aa, Homo Sapiens [sequence omitted]

SEQ ID NO: 10330 - protein, 111 aa, Homo Sapiens
MESRMWPALLLSHLLPLWPLLLLPLPPPAQGSSSSPRTPPAPARPPCARGGPSAPRHVCVWERAPPPSRSPRVPRSRRQVLPGTAPPATPSGFEEGPPSSQYPWAIVWGPT

SEQ ID NO: 10331 - protein, 172 aa, Homo Sapiens
MESRMWPALLLSHLLPLWPLLLLPLPPPAQGSSSSPRTPPAPARPPCARGGPSAPRHVCVWERAPPPSRSPRVPRSRRQVLPGTAPPATPSGFEEGPPSSQYPWAIVWGPTVSREDGGDPNSANPGFLDYGFAAPHGLATPHPNSDSMRGDGDGLILGEAPATLRPFLFGGR

SEQ ID NO: 10332 - protein, 282 aa, Homo Sapiens
MESRMWPALLLSHLLPLWPLLLLPLPPPAQGSSSSPRTPPAPARPPCARGGPSAPRHVCVWERAPPPSRSPRVPRSRRQVLPGTAPPATPSGFEEGPPSSQYPWAIVWGPTVSREDGGDPNSANPGFLDYGFAAPHGLATPHPNSDSMRGDGDGLILGEAPATLRPFLFGGRGEGVDPQLYVTITISIIIVLVATGIIFKFCWDRSQKRRRPSGQQGALRQEESQQPLTDLSPAGVTVLGAFGDSPTPTPDHEEPRGGPRPGMPHPKGAPAFQLNRIPLVNL

SEQ ID NO: 10333 - protein, 282 aa, Homo Sapiens; identical to SEQ ID NO: 10332

SEQ ID NO: 10334 - protein, 276 aa, Homo Sapiens
MESRMWPALLLSHLLPLWPLLLLPLPPPAQGSSSSPRTPPAPARPPCARGGPSAPRHVCVWERAPPPSRSPRVPRSRRQVLPGTAPPATPSGFEEGPPSSQYPWAIVWGPTVSREDGGDPNSANPGFLDYGFAAPHGLATPHPNSDSMRGDGDGLILGEAPATLRPFLFGGRGEGVDPQLYVTITISIIIVLVATGIIFKFCWDRSQKRRRPSGQQGALRQEESQQPLTDLSPAGVTVLGAFGDSPTPTPDHEEPRGGPRPGMPHPKGAPAFQLNR

SEQ ID NO: 10335 - protein, 27 aa, Homo Sapiens
KNMELNVYGDDVEVDYRSYEGMVEMVS

SEQ ID NO: 10336 - protein, 395 aa, Homo Sapiens
MAVTDSLSRAATVLATVLLLSFGSVAASHIEDQAEQFFRSGHTNNWAVLVCTSRFWFNYRHVANTLSVYRSVKRLGIPDSHIVLMLADDMACNPRNPKPATVFSHKNMELNVYGDDVEVDYRSYEVTVENFLRVLTGRIPPSTPRSKRLLSDDRSNILIYMTGHGGNGFLKFQDSEEITNIELADAFEQMWQKRRYNELLFIIDTCQGASMYERFYSPNIMALASSQVGEDSLSHQPDPAIGVHLMDRYTFYVLEFLEEINPASQTNMNDLFQVCPKSLCVSTPGHRTDLFQRDPKNVLITDFFGSVRKVEITTETIKLQQDSEIMESSYKEDQMDEKLMEPLKYAEQLPVAQIIHQKPKLKDWHPPGGFILGLWALIIMVFFKTYGIKHMKFIF

SEQ ID NO: 10337 - protein, 332 aa, Homo Sapiens
MAVTDSLSRAATVLATVLLLSFGSVAASHIEDQAEQFFRSGHTNNWAVLVCTSRFWFNYRHVANTLSVYRSVKRLGIPDSHIVLMLADDMACNPRNPKPATVFSHKNMELNVYGDDVEVDYRSYEVTVENFLRVLTGRIPPSTPRSKRLLSDDRSNILIYMTGHGGNGFLKFQDSEEITNIELADAFEQMWQKRRYNELLFIIDTCQGASMYERFYSPNIMALASSQVGEDSLSHQPDPAIGVHLMDRYTFYVLEFLEEINPASQTNMNDLFQVCPKSLCVSTPGHRTDLFQRDPKNVLITDFFGSVRKVEITTETIKLQQDSEIMESRYSS

SEQ ID NO: 10338 - protein, 301 aa, Homo Sapiens
MAVTDSLSRAATVLATVLLLSFGSVAASHIEVTVENFLRVLTGRIPPSTPRSKRLLSDDRSNILIYMTGHGGNGFLKFQDSEEITNIELADAFEQMWQKRRYNELLFIIDTCQGASMYERFYSPNIMALASSQVGEDSLSHQPDPAIGVHLMDRYTFYVLEFLEEINPASQTNMNDLFQVCPKSLCVSTPGHRTDLFQRDPKNVLITDFFGSVRKVEITTETIKLQQDSEIMESSYKEDQMDEKLMEPLKYAEQLPVAQIIHQKPKLKDWHPPGGFILGLWALIIMVFFKTYGIKHMKFIF

SEQ ID NO: 10339 - protein, 101 aa, Homo Sapiens
MEAMWLLCVALAVLAWGFLWVWDSSERMKSREQGGRLGAESRTLLVIAHPDDEAMFFAPTVLGLARLRHWVYLLCFSAGISQMTQACSGTQSTWPESSFST

SEQ ID NO: 10340 - protein, 150 aa, Homo Sapiens
MEAMWLLCVALAVLAWGFLWVWDSSERMKSREQGGRLGAESRTLLVIAHPDDEAMFFAPTVLGLARLRHWVYLLCFSAGNYYNQGETRKKELLQSCDVLGIPLSSVMIIDNRDFPDDPGMQWDTEHVARVLLQHIEVNGINLKDRANSRL

SEQ ID NO: 10341 - protein, 188 aa, Homo Sapiens
MEAMWLLCVALAVLAWGFLWVWDSSERMKSREQGGRLGAESRTLLVIAHPDDEAMFFAPTVLGLARLRHWVYLLCFSAGNYYNQGETRKKELLQSCDVLGIPLSSVMIIDNRDFPDDPGMQWDTEHVARVLLQHIEVNGINLVVTFDAGGVSGHSNHIALYAAVRALHSEGKLPKESCPQPSRGSGWG

SEQ ID NO: 10342 - protein, 252 aa, Homo Sapiens
MEAMWLLCVALAVLAWGFLWVWDSSERMKSREQGGRLGAESRTLLVIAHPDDEAMFFAPTVLGLARLRHWVYLLCFSAGNYYNQGETRKKELLQSCDVLGIPLSSVMIIDNRDFPDDPGMQWDTEHVARVLLQHIEVNGINLVVTFDAGGVSGHSNHIALYAAVRALHSEGKLPKGCSVLTLQSVNVLRKYISLLDLPLSLLHTQDVLFVLNSKEVAQAKKAMSCHRSQLLWFRRLYIIFSRYMRINSLSFL

SEQ ID NO: 10343 - protein, 244 aa, Homo Sapiens
MEAMWLLCVALAVLAWGFLWVWDSSERMKSREQGGRLGAESRTLLVIAHPDDEAMFFAPTVLGLARLRHWVYLLCFSAGNYYNQGETRKKELLQSCDVLGIPLSSVMIIDNRDFPDDPGMQWDTEHVARVLLQHIEVNGINLVVTFDAGGVSGHSNHIALYAAVRVLCAHASVCECAAQVHLPSGSALVSASYAGCPLRAQQQRSGTGQESHVLPPQPAPLVPPPLHYLLPVHENQLTELPLKP

SEQ ID NO: 10344 - protein, 145 aa, Homo Sapiens
MEAMWLLCVALAVLAWGFLWVWDSSERMKSREQGGRLGAESRTLLVIAHPDDEAMFFAPTVLGLARLRHWVYLLCFSAGNYYNQGETRKKELLQSCDVLGIPLSSVMIIDNRLSYLRLMCLSEAQGPQQHTPVSQSSDYSSLGMG

SEQ ID NO: 10345 - protein, 102 aa, Homo Sapiens
VVTFDAGGVSGHSNHIALYAAVRVLCAHASVCECAAQVHLPSGSALVSASYAGCPLRAQQQRSGTGQESHVLPPQPAPLVPPPLHYLLPVHENQLTELPLKP

SEQ ID NO: 10346 - protein, 92 aa, Homo Sapiens
  misc_feature (1)..(1): Xaa can be any naturally occurring amino acid
XCVALAVLAWGFLWVWDSSERMKSREQGGRLGAESRTLLVIAHPDDEAMFFAPTVLGLARLRHWVYLLCFSAVFRRELSEYTEGLTSEPLTA

SEQ ID NO: 10347 - protein, 580 aa, Homo Sapiens
LALLVLLLLGPGGWCLAEPPRDSLREELVITPLPSGDVAATFQFRTRWDSELQREGVSHYRLFPKALGQLISKYSLRELHLSFTQGFWRTRYWGPPFLQAPSGAELWVWFQDTVTEREGSPTPSWDCPDCGARGGVGSRRVIPISGMWIPRGQSPRPTPDRPLSPSDTDHYFLRYAVLPREVVCTENLTPWKKLLPCSSKAGLSVLLKADRLFHTSYHSQAVHIRPVCRNARCTSISWELRQTLSVVFDAFITGQGKKDWSLFRMFSRTLTEPCPLASESRVYVDITTYNQDNETLEVHPPPTTTYQDVILGTRKTYAIYDLLDTAMINNSRNLNIQLKWKRPPENEAPPVPFLHAQRYVSGYGLQKGELSTLLYNTHPYRAFPVLLLDTVPWYLRLYVHTLTITSKGKENKPSYIHYQPAQDRLQPHLLEMLIQLPANSVTKVSIQFERALLKWTEYTPDPNHGFYVSPSVLSALVPSMVAAKPVDWEESPLFNSLFPVSDGSNYFVRLYTEPLLVNLPTPDFSMPYNVICLTCTVVAVCYGSFYNLLTRTFHIEEPRTGGLAKRLANLIRRARGVPPL

SEQ ID NO: 10348 - protein, 329 aa, Homo Sapiens
LRYAVLPREVVCTENLTPWKKLLPCSSKAGLSVLLKADRLFHTSYHSQAVHIRPVCRNARCTSISWELRQTLSVVFDAFITGQGKKDWSLFRMFSRTLTEPCPLASESRVYVDITTYNQDNETLEVHPPPTTTYQDVILGTRKTYAIYDLLDTAMINNSRNLNIQLKWKRPPENEAPPVPFLHAQRYVSGYGLQKGELSTLLYNTHPYRAFPVLLLDTVPWYLRLYVHTLTITSKGKENKPSYIHYQPAQDRLQPHLLEMLIQLPANSVTKVSIQFERALLKWTEYTPDPNHGFYVSPSVLSALVPSMVAAKPVDWEESPLFNSLLPWT

SEQ ID NO: 10349 - protein, 476 aa, Homo Sapiens
MAAAMPLALLVLLLLGPGGWCLAEPPRDSLREELVITPLPSGDVAATFQFRTRWDSELQREGDTDHYFLRYAVLPREVVCTENLTPWKKLLPCSSKAGLSVLLKADRLFHTSYHSQAVHIRPVCRNARCTSISWELRQTLSVVFDAFITGQGKKDWSLFRMFSRTLTEPCPLASESRVYVDITTYNQDNETLEVHPPPTTTYQDVILGTRKTYAIYDLLDTAMINNSRNLNIQLKWKRPPENEAPPVPFLHAQRYVSGYGLQKGELSTLLYNTHPYRAFPVLLLDTVPWYLRLYVHTLTITSKGKENKPSYIHYQPAQDRLQPHLLEMLIQLPANSVTKVSIQFERALLKWTEYTPDPNHGFYVSPSVLSALVPSMVAAKPVDWEESPLFNSLFPVSDGSNYFVRLYTEPLLVNLPTPDFSMPYNVICLTCTVVAVCYGSFYNLLTRTFHIEEPRTGGLAKRLANLIRRARGVPPL

SEQ ID NO: 10350 - protein, 275 aa, Homo Sapiens
MAAAMPLALLVLLLLGPGGWCLAEPPRDSLREELVITPLPSGDVAATFQFRTRWDSELQREGDTDHYFLRYAVLPREVVCTENLTPWKKLLPCSSKAGLSVLLKADRLFHTSYHSQAVHIRPVCRNARCTSISWELRQTLSVVFDAFITGQGKKDWSLFRMFSRTLTEPCPLASESRVYVDITTYNQDNETLEVHPPPTTTYQDVILGTRKTYAIYDLLDTAMINNSRNLNIQLKWKRPPENGYIHYQPAQDRLQPHLLEMLIQLPANSVTKVSI

SEQ ID NO: 10351 - protein, 101 aa, Homo Sapiens
MAAAMPLALLVLLLLGPGGWCLAEPPRDSLREELVITPLPSGDVAATFQFRTRWDSELQREGDTDHYFLRYAVLPREVVCTENLTPWKKLLPCSSKASLCC

SEQ ID NO: 10352 - protein, 384 aa, Homo Sapiens
MAAAMPLALLVLLLLGPGGWCLAEPPRDSLREELVITPLPSGDVAATFQFRTRWDSELQREGDWSLFRMFSRTLTEPCPLASESRVYVDITTYNQDNETLEVHPPPTTTYQDVILGTRKTYAIYDLLDTAMINNSRNLNIQLKWKRPPENEAPPVPFLHAQRYVSGYGLQKGELSTLLYNTHPYRAFPVLLLDTVPWYLRLYVHTLTITSKGKENKPSYIHYQPAQDRLQPHLLEMLIQLPANSVTKVSIQFERALLKWTEYTPDPNHGFYVSPSVLSALVPSMVAAKPVDWEESPLFNSLFPVSDGSNYFVRLYTEPLLVNLPTPDFSMPYNVICLTCTVVAVCYGSFYNLLTRTFHIEEPRTGGLAKRLANLIRRARGVPPL

SEQ ID NO: 10353 - protein, 441 aa, Homo Sapiens
MAAAMPLALLVLLLLGPGGWCLAEPPRDSLREELVITPLPSGDVAATFQFRTRWDSELQREGGLSVLLKADRLFHTSYHSQAVHIRPVCRNARCTSISWELRQTLSVVFDAFITGQGKKDWSLFRMFSRTLTEPCPLASESRVYVDITTYNQDNETLEVHPPPTTTYQDVILGTRKTYAIYDLLDTAMINNSRNLNIQLKWKRPPENEAPPVPFLHAQRYVSGYGLQKGELSTLLYNTHPYRAFPVLLLDTVPWYLRLYVHTLTITSKGKENKPSYIHYQPAQDRLQPHLLEMLIQLPANSVTKVSIQFERALLKWTEYTPDPNHGFYVSPSVLSALVPSMVAAKPVDWEESPLFNSLFPVSDGSNYFVRLYTEPLLVNLPTPDFSMPYNVICLTCTVVAVCYGSFYNLLTRTFHIEEPRTGGLAKRLANLIRRARGVPPL

SEQ ID NO: 10354 - protein, 96 aa, Homo Sapiens
MAAAMPLALLVLLLLGPGGWCLAEPPRDSLREELVITPLPSGDVAATFQFRTRWDSELQREGGRPLCAAEGRSLVPHQLPLPGSAYPPCLQKCTLY

SEQ ID NO: 10355 - protein, 522 aa, Homo Sapiens
MAAAMPLALLVLLLLGPGGWCLAEPPRDSLREELVITPLPSGDVAATFQFRTRWDSELQREGVSHYRLFPKALGQLISKYSLRELHLSFTQGFWRTRYWGPPFLQAPSDTDHYFLRYAVLPREVVCTENLTPWKKLLPCSSKAGLSVLLKADRLFHTSYHSQAVHIRPVCRNARCTSISWELRQTLSVVFDAFITGQGKKDWSLFRMFSRTLTEPCPLASESRVYVDITTYNQDNETLEVHPPPTTTYQDVILGTRKTYAIYDLLDTAMINNSRNLNIQLKWKRPPENEAPPVPFLHAQRYVSGYGLQKGELSTLLYNTHPYRAFPVLLLDTVPWYLRLYVHTLTITSKGKENKPSYIHYQPAQDRLQPHLLEMLIQLPANSVTKVSIQFERALLKWTEYTPDPNHGFYVSPSVLSALVPSMVAAKPVDWEESPLFNSLFPVSDGSNYFVRLYTEPLLVNLPTPDFSMPYNVICLTCTVVAVCYGSFYNLLTRTFHIEEPRTGGLAKRLANLIRRARGVPPL

SEQ ID NO: 10356 - protein, 314 aa, Homo Sapiens
MAAAMPLALLVLLLLGPGGWCLAEPPRDSLREELVITPLPSGDVAATFQFRTRWDSELQREGVSHYRLFPKALGQLISKYSLRELHLSFTQGFWRTRYWGPPFLQAPSGAELVDKSWKELSNVLSGIFCASLNFIDSTNTVTPTASFKPLGLANDTDHYFLRYAVLPREVVCTENLTPWKKLLPCSSKAGLSVLLKADRLFHTSYHSQAVHIRPVCRNARCTSISWELRQTLSVVFDAFITGQGKKDWSLFRMFSRTLTEPCPLASESRVYVDITTYNQDNETLEVHPPPTTTYQDVILGTRKTYAIYDLLDTA

SEQ ID NO: 10357 - protein, 240 aa, Homo Sapiens
MAAAMPLALLVLLLLGPGGWCLAEPPRDSLREELVITPLPSGDVAATFQFRTRWDSELQREGVSHYRLFPKALGQLISKYSLRELHLSFTQGFWRTRYWGPPFLQAPSGAELWVWFQDTVTDVDKSWKELSNVLSGIFCASLNFIDSTNTVTPTASFKPLGLANDTDHYFLRYAVLPREVVCTENLTPWKKLLPCSSKAGLSVLLKADRLFHTSYHSQAVHIRPVCRHLLGAEADPVSCI

SEQ ID NO: 10358 - protein, 578 aa, Homo Sapiens
MAAAMPLALLVLLLLGPGGWCLAEPPRDSLREELVITPLPSGDVAATFQFRTRWDSELQREGVSHYRLFPKALGQLISKYSLRELHLSFTQGFWRTRYWGPPFLQAPSGAELWVWFQDTVTDVDKSWKELSNVLSGIFCASLNFIDSTNTVTPTASFKPLGLANDTDHYFLRYAVLPREVVCTENLTPWKKLLPCSSKAGLSVLLKADRLFHTSYHSQAVHIRPVCRNARCTSISWELRQTLSVVFDAFITGQGKKDWSLFRMFSRTLTEPCPLASESRVYVDITTYNQDNETLEVHPPPTTTYQDVILGTRKTYAIYDLLDTAMINNSRNLNIQLKWKRPPENEAPPVPFLHAQRYVSGYGLQKGELSTLLYNTHPYRAFPVLLLDTVPWYLRLYVHTLTITSKGKENKPSYIHYQPAQDRLQPHLLEMLIQLPANSVTKVSIQFERALLKWTEYTPDPNHGFYVSPSVLSALVPSMVAAKPVDWEESPLFNSLFPVSDGSNYFVRLYTEPLLVNLPTPDFSMPYNVICLTCTVVAVCYGSFYNLLTRTFHIEEPRTGGLAKRLANLIRRARGVPPL

SEQ ID NO: 10359 - protein, 511 aa, Homo Sapiens
MAAAMPLALLVLLLLGPGGWCLAEPPRDSLREELVITPLPSGDVAATFQFRTRWDSELQREGVSHYRLFPKALGQLISKYSLRELHLSFTQGFWRTRYWGPPFLQAPSGAELWVWFQDTVTDVDKSWKELSNVLSGIFCASLNFIDSTNTVTPTASFKPLGLANDTDHYFLRYAVLPREVVCTENLTPWKKLLPCSSKAGLSVLLKADRLFHTSYHSQAVHIRPVCRNARCTSISWELRQTLSVVFDAFITGQGKKDWSLFRMFSRTLTEPCPLASESRVYVDITTYNQDNETLEVHPPPTTTYQDVILGTRKTYAIYDLLDTAMINNSRNLNIQLKWKRPPENGYIHYQPAQDRLQPHLLEMLIQLPANSVTKVSIQFERALLKWTEYTPDPNHGFYVSPSVLSALVPSMVAAKPVDWEESPLFNSLFPVSDGSNYFVRLYTEPLLVNLPTPDFSMPYNVICLTCTVVAVCYGSFYNLLTRTFHIEEPRTGGLAKRLANLIRRARGVPPL

SEQ ID NO: 10360 - protein, 331 aa, Homo Sapiens
MAAAMPLALLVLLLLGPGGWCLAEPPRDSLREELVITPLPSGDVAATFQFRTRWDSELQREGVSHYRLFPKALGQLISKYSLRELHLSFTQGFWRTRYWGPPFLQAPSGAELWVWFQDTVTDVDKSWKELSNVLSGIFCASLNFIDSTNTVTPTASFKPLGLANDTDHYFLRYAVLPREVVCTENLTPWKKLLPCSSKAGLSVLLKADRLFHTSYHSQAVHIRPVCRNARCTSISWELRQTLSVVFDAFITGQGKKALRSVSQTGPSSGCSPEPSRSPAPWLQRAESMWTSPPTTSPAFVSPGQRDIRGAPTPDHYISGRHPRHSEDLCHL

SEQ ID NO: 10361 - protein, 300 aa, Homo Sapiens
MAAAMPLALLVLLLLGPGGWCLAEPPRDSLREELVITPLPSGDVAATFQFRTRWDSELQREGVSHYRLFPKALGQLISKYSLRELHLSFTQGFWRTRYWGPPFLQAPSGAELWVWFQDTVTDVDKSWKELSNVLSGIFCASLNFIDSTNTVTPTASFKPLGLANDTDHYFLRYAVLPREVVCTENLTPWKKLLPCSSKAGLSVLLKADRLFHTSYHSQAVHIRPVCRNARCTSISWELRQTLSVVFDAFITGQGKKDWSLFRMFSRTLTEPCPLASESRVYVDITTYNQPCLCVPRTTRH

SEQ ID NO: 10362 - protein, 505 aa, Homo Sapiens
MAAAMPLALLVLLLLGPGGWCLAEPPRDSLREELVITPLPSGDVAATFQFRTRWDSELQREGVSHYRLFPKALGQLISKYSLRELHLSFTQGFWRTRYWGPPFLQAPSGAELWVWFQDTVTDVDKSWKELSNVLSGIFCASLNFIDSTNTVTPTASFKPLGLANDTDHYFLRYAVLPREVVCTENLTPWKKLLPCSSKAGLSVLLKADRLFHTSYHSQAVHIRPVCRNARCTSISWELRQTLSVVFDAFITGQGKKDWSLFRMFSRTLTEPCPLASESRVYVDITTYNQDNETLEVHPPPTTTYQDVILGTRKTYAIYDLLDTAMINNSRNLNIQLKWKRPPENEAPPVPFLHAQRYVSGYGLQKGELSTLLYNTHPYRAFPVLLLDTVPWYLRLYVHTLTITSKGKENKPSYIHYQPAQDRLQPHLLEMLIQLPANSVTKVSIQFERALLKWTEYTPDPNHGFYVSPSVLSALVPSMVAAKPVDWEESPLFNSLEPVTCAALRC

SEQ ID NO: 10363 - protein, 499 aa, Homo Sapiens
MAAAMPLALLVLLLLGPGGWCLAEPPRDSLREELVITPLPSGDVAATFQFRTRWDSELQREGVSHYRLFPKALGQLISKYSLRELHLSFTQGFWRTRYWGPPFLQAPSGAELWVWFQDTVTDVDKSWKELSNVLSGIFCASLNFIDSTNTVTPTASFKPLGLANDTDHYFLRYAVLPREVVCTENLTPWKKLLPCSSKAGLSVLLKADRLFHTSYHSQAVHIRPVCRNARCTSISWELRQTLSVVFDAFITGQGKKDWSLFRMFSRTLTEPCPLASESRVYVDITTYNQDNETLEVHPPPTTTYQDVILGTRKTYAIYDLLDTAMINNSRNLNIQLKWKRPPENEAPPVPFLHAQRYVSGYGLQKGELSTLLYNTHPYRAFPVLLLDTVPWYLRLYVHTLTITSKGKENKPSYIHYQPAQDRLQPHLLEMLIQLPANSVTKVSIQFERALLKWTEYTPDPNHGFYVSPSVLSALVPSMVAAKPVDWEESPLFNSLLPWT

SEQ ID NO: 10364 - protein, 499 aa, Homo Sapiens; identical to SEQ ID NO: 10363

SEQ ID NO: 10365 - protein, 300 aa, Homo Sapiens; identical to SEQ ID NO: 10361

SEQ ID NO: 10366 - protein, 429 aa, Homo Sapiens
MAAAMPLALLVLLLLGPGGWCLAEPPRDSLREELVITPLPSGDVAATFQFRTRWDSELQREGVSHYRLFPKALGQLISKYSLRELHLSFTQGFWRTRYWGPPFLQAPSGAELWVWFQDTVTDVDKSWKELSNVLSGIFCASLNFIDSTNTVTPTASFKPLGLANDTDHYFLRYAVLPREVVCTENLTPWKKLLPCSSKAGLSVLLKADRLFHTSYHSQAVHIRPVCRNARCTSISWELRQTLSVVFDAFITGQGKKDWSLFRMFSRTLTEPCPLASESRVYVDITTYNQDNETLEVHPPPTTTYQDVILGTRKTYAIYDLLDTAMINNSRNLNIQLKWKRPPENEAPPVPFLHAQRYVSGYGLQKGELSTLLYNTHPYRAFPVLLLDTVPWYLRLLHPLPACPGPAATPPPGDADSAAGQLSHQGFHPV

SEQ ID NO: 10367 - protein, 432 aa, Homo Sapiens
MAAAMPLALLVLLLLGPGGWCLAEPPRDSLREELVITPLPSGDVAATFQFRTRWDSELQREGVSHYRLFPKALGQLISKYSLRELHLSFTQGFWRTRYWGPPFLQAPSGAELWVWFQDTVTDVDKSWKELSNVLSGIFCASLNFIDSTNTVTPTASFKPLGLANDTDHYFLRYAVLPREVVCTENLTPWKKLLPCSSKAGLSVLLKADRLFHTSYHSQAVHIRPVCRNARCTSISWELRQTLSVVFDAFITGQGKKDWSLFRMFSRTLTEPCPLASESRVYVDITTYNQDNETLEVHPPPTTTYQDVILGTRKTYAIYDLLDTAMINNSRNLNIQLKWKRPPENGYIHYQPAQDRLQPHLLEMLIQLPANSVTKVSIQFERALLKWTEYTPDPNHGFYVSPSVLSALVPSMVAAKPVDWEESPLFNSLLPWT

SEQ ID NO: 10368 - protein, 495 aa, Homo Sapiens
MAAAMPLALLVLLLLGPGGWCLAEPPRDSLREELVITPLPSGDVAATFQFRTRWDSELQREGVSHYRLFPKALGQLISKYSLRELHLSFTQGFWRTRYWGPPFLQAPSGAELWVWFQDTVTDVDKSWKELSNVLSGIFCASLNFIDSTNTVTPTASFKPLGLANDTDHYFLRYAVLPREVVCTENLTPWKKLLPCSSKAGLSVLLKADRLFHTSYHSQAVHIRPVCRNARCTSISWELRQTLSVVFDAFITGQGKKDWSLFRMFSRTLTEPCPLASESRVYVDITTYNQDNETLEVHPPPTTTYQDVILGTRKTYAIYDLLDTAMINNSRNLNIQLKWKRPPENEAPPVPFLHAQRYVSGYGLQKGELSTLLYNTHPYRAFPVLLLDTVPWYLRLYVHTLTITSKGKENKPSYIHYQPAQDRLQPHLLEMLIQLPANSVTKVSIQFERALLKWTEYTPDPNHGFYVSPSVLSALVPSMVAAKPVDWEESPLFNSL

SEQ ID NO: 10369 - protein, 232 aa, Homo Sapiens
MAAAMPLALLVLLLLGPGGWCLAEPPRDSLREELVITPLPSGDVAATFQFRTRWDSELQREGVSHYRLFPKALGQLISKYSLRELHLSFTQGFWRTRYWGPPFLQAPSGAELWVWFQDTVTDVDKSWKELSNVLSGIFCASLNFIDSTNTVTPTASFKPLGLANDTDHYFLRYAVLPREVVCTENLTPWKKLLPCSSKAGLSVLLKADRLFHTSYHSQAVHIRPVCRVSHGE

SEQ ID NO: 10370 - protein, 203 aa, Homo Sapiens
MAAAMPLALLVLLLLGPGGWCLAEPPRDSLREELVITPLPSGDVAATFQFRTRWDSELQREGVSHYRLFPKALGQLISKYSLRELHLSFTQGFWRTRYWGPPFLQAPSGAELWVWFQDTVTDVDKSWKELSNVLSGIFCASLNFIDSTNTVTPTASFKPLGLANDTDHYFLRYAVLPREVVCTENLTPWKKLLPCSSKASLCC

SEQ ID NO: 10371 - protein, 242 aa, Homo Sapiens
MAAAMPLALLVLLLLGPGGWCLAEPPRDSLREELVITPLPSGDVAATFQFRTRWDSELQREGVSHYRLFPKALGQLISKYSLRELHLSFTQGFWRTRYWGPPFLQAPSGAELWVWFQDTVTDVDKSWKELSNVLSGIFCASLNFIDSTNTVTPTASFKPLGLANDTDHYFLRYAVLPREVVCTENLTPWKKLLPCSSKGFSYLFPSPPGRPLCAAEGRSLVPHQLPLPGSAYPPCLQKCTLY

SEQ ID NO: 10372 - protein, 355 aa, Homo Sapiens [sequence omitted]

SEQ ID NO: 10373 - protein, 198 aa, Homo Sapiens
MAAAMPLALLVLLLLGPGGWCLAEPPRDSLREELVITPLPSGDVAATFQFRTRWDSELQREGVSHYRLFPKALGQLISKYSLRELHLSFTQGFWRTRYWGPPFLQAPSGAELWVWFQDTVTDVDKSWKELSNVLSGIFCASLNFIDSTNTVTPTASFKPLGLANGRPLCAAEGRSLVPHQLPLPGSAYPPCLQKCTLY

SEQ ID NO: 10374 - protein, 140 aa, Homo Sapiens
MAAAMPLALLVLLLLGPGGWCLAEPPRDSLREELVITPLPSGDVAATFQFRTRWDSELQREGVSHYRLFPKALGQLISKYSLRELHLSFTQGFWRTRYWGPPFLQAPSGAELWVWFQDTVTEFSSQLWTLKEGAEVAPGQ

SEQ ID NO: 10375 - protein, 140 aa, Homo Sapiens; identical to SEQ ID NO: 10374

SEQ ID NO: 10376 - protein, 140 aa, Homo Sapiens; identical to SEQ ID NO: 10374

SEQ ID NO: 10377 - protein, 140 aa, Homo Sapiens; identical to SEQ ID NO: 10374

SEQ ID NO: 10378 - protein, 123 aa, Homo Sapiens
MAAAMPLALLVLLLLGPGGWCLAEPPRDSLREELVITPLPSGDVAATFQFRTRWDSELQREGVSHYRLFPKALGQLISKYSLRELHLSFTQGFWRTRYWGPPFLQAPSGAELWVWFQDTVTEH

SEQ ID NO: 10379 - protein, 123 aa, Homo Sapiens; identical to SEQ ID NO: 10378

SEQ ID NO: 10380 - protein, 123 aa, Homo Sapiens; identical to SEQ ID NO: 10378

SEQ ID NO: 10381 - protein, 183 aa, Homo Sapiens
MAAAMPLALLVLLLLGPGGWCLAEPPRDSLREELVITPLPSGDVAATFQFRTRWDSELQREGVSHYRLFPKALGQLISKYSLRELHLSFTQGFWRTRYWGPPFLQAPSGAELWVWFQDTVTELVPLPDVLPNPHGALPPGFREPSLCGHHHLQPGQRDIRGAPTPDHYISGRHPRHSEDLCHL

SEQ ID NO: 10382 - protein, 316 aa, Homo Sapiens
MAAAMPLALLVLLLLGPGGWCLAEPPRDSLREELVITPLPSGDVAATFQFRTRWDSELQREGVSHYRLFPKALGQLISKYSLRELHLSFTQGFWRTRYWGPPFLQAPSGAELWVWFQDTVTEPLSPSDTDHYFLRYAVLPREVVCTENLTPWKKLLPCSSKAGLSVLLKADRLFHTSYHSQAVHIRPVCRNARCTSISWELRQTLSVVFDAFITGQGKKDWSLFRMFSRTLTEPCPLASESRVYVDITTYNQDNETLEVHPPPTTTYQDVILGTRKTYAIYDLLDTAMINNSRNLNIQLKWKRPPENEAPPVPFLH

SEQ ID NO: 10383 - protein, 128 aa, Homo Sapiens
MAAAMPLALLVLLLLGPGGWCLAEPPRDSLREELVITPLPSGDVAATFQFRTRWDSELQREGVSHYRLFPKALGQLISKYSLRELHLSFTQGFWRTRYWGPPFLQAPSGAELWVWFQDTVTEQASLCC

SEQ ID NO: 10384 - protein, 116 aa, Homo Sapiens
MAAAMPLALLVLLLLGPGGWCLAEPPRDSLREELVITPLPSGDVAATFQFRTRWDSELQREGVSHYRLFPKALGQLISKYSLRELHLSFTQGFWRTRYWGPPFLQAPSGLAASCGL

SEQ ID NO: 10385 - protein, 393 aa, Homo Sapiens
MAAAMPLALLVLLLLGPGGWCLAEPPRDSLREELVITPLPSGDVAATFQFRTRWDSELQREGVSHYRLFPKALGQLISKYSLRELHLSFTQGFWRTRYWGPPFLQAPSVWINLGRSSVMSSQGSSAPLSTSSTPPTQSLPLPPSNPWVWPMAGLSVLLKADRLFHTSYHSQAVHIRPVCRNARCTSISWELRQTLSVVFDAFITGQGKKDWSLFRMFSRTLTEPCPLASESRVYVDITTYNQDNETLEVHPPPTTTYQDVILGTRKTYAIYDLLDTAMINNSRNLNIQLKWKRPPENEAPPVPFLHAQRYVSGYGLQKGELSTLLYNTHPYRAFPVLLLDTVPWYLRLYVHTLTITSKGKENKPSYIHYQPAQDRLQPHLLEMLIQLPANSVT

SEQ ID NO: 10386 - protein, 191 aa, Homo Sapiens
MAAAMPLALLVLLLLGPGGWCLAEPPRDSLREELVITPLPSGDVAATFQFRTRWDSELQREGVSHYRLFPKALGQLISKYSLRELHLSFTQGFWRTRYWGPPFLQAPSVWINLGRSSVMSSQGSSAPLSTSSTPPTQSLPLPPSNPWVWPMTLTTTFCAMLCCRGRWSAPKTSPPGRSSCPVVPRQASLCC

SEQ ID NO: 10387 - protein, 318 aa, Homo Sapiens
MAAAMPLALLVLLLLGPGGWCLAEPPRDSLREELVITPLPSGDVAATFQFRTRWDSELQREGVWINLGRSSVMSSQGSSAPLSTSSTPPTQSLPLPPSNPWVWPMAGLSVLLKADRLFHTSYHSQAVHIRPVCRNARCTSISWELRQTLSVVFDAFITGQGKKDWSLFRMFSRTLTEPCPLASESRVYVDITTYNQDNETLEVHPPPTTTYQDVILGTRKTYAIYDLLDTAMINNSRNLNIQLKWKRPPENEAPPVPFLHAQRYVSGYGLQKGELSTLLYNTHPYRAFPVLLLDTVPWYLRLYVHTLTITSKGKENKP

SEQ ID NO: 10388 - protein, 171 aa, Homo Sapiens
MAAAMPLALLVLLLLGPGGWCLAEPPRDSLREELVITPLPSGDVAATFQFRTRWDSELQREGVWINLGRSSVMSSQGSSAPLSTSSTPPTQSLPLPPSNPWVWPMTLTTTFCAMLCCRGRWSAPKTSPPGRSSCPVVPRPLCAAEGRSLVPHQLPLPGSAYPPCLQKCTLY

SEQ ID NO: 10389 - protein, 145 aa, Homo Sapiens
MAAAMPLALLVLLLLGPGGWCLAEPPRDSLREELVITPLPSGDVAATFQFRTRWDSELQREGVWINLGRSSVMSSQGSSAPLSTSSTPPTQSLPLPPSNPWVWPMTLTTTFCAMLCCRGRWSAPKTSPPGRSSCPVVPRQASLCC

SEQ ID NO: 10390 - protein, 145 aa, Homo Sapiens; identical to SEQ ID NO: 10389

SEQ ID NO: 10391 - protein, 18 aa, Homo Sapiens
RWDSELQREGGLAASCGL

SEQ ID NO: 10392 - protein, 77 aa, Homo Sapiens
SHYRLFPKALGQLISKYSLRELHLSFTQGFWRTRYWGPPFLQAPSGAELWVWFQDTVTEFSSQLWTLKEGAEVAPGQ

SEQ ID NO: 10393 - protein, 61 aa, Homo Sapiens
  misc_feature (1)..(1): Xaa can be any naturally occurring amino acid
XLIQLPANSVTKVSIQFERALLKWTEYTPDPNHGFYVRWEHGPSLCFSVAHLSSAPLCPAW

SEQ ID NO: 10394 - protein, 78 aa, Homo Sapiens
  misc_feature (1)..(1): Xaa can be any naturally occurring amino acid
XLQPHLLEMLIQLPANSVTKVSIQFERALLKWTEYTPDPNHGFYVSPSVLSALVPSMVAAKPVDWEESPLFNSLLPWT

SEQ ID NO: 10395 - protein, 532 aa, Homo Sapiens
  misc_feature (1)..(1): Xaa can be any naturally occurring amino acid
XQLISKYSLRELHLSFTQGFWRTRYWGPPFLQAPSGAELWVWFQDTVTDVDKSWKELSNVLSGIFCASLNFIDSTNTVTPTASFKPLGLANDTDHYFLRYAVLPREVVCTENLTPWKKLLPCSSKAGLSVLLKADRLFHTSYHSQAVHIRPVCRNARCTSISWELRQTLSVVFDAFITGQGKKDWSLFRMFSRTLTEPCPLASESRVYVDITTYNQDNETLEVHPPPTTTYQDVILGTRKTYAIYDLLDTAMINNSRNLNIQLKWKRPPENEAPPVPFLHAQRYVSGYGLQKGELSTLLYNTHPYRAFPVLLLDTVPWYLRLYVHTLTITSKGKENKPSEDLSPEPGPQPALSCPLQVPQTLISQGYIHYQPAQDRLQPHLLEMLIQLPANSVTKVSIQFERALLKWTEYTPDPNHGFYVSPSVLSALVPSMVAAKPVDWEESPLFNSLFPVSDGSNYFVRLYTEPLLVNLPTPDFSMPYNVICLTCTVVAVCYGSFYNLLTRTFHIEEPRTGGLAKRLANLIRRARGVPPL

SEQ ID NO: 10396 - protein, 12 aa, Homo Sapiens
  misc_feature (1)..(1): Xaa can be any naturally occurring amino acid
XWVWFQDTVTEH

SEQ ID NO: 10397 - protein, 128 aa, Homo Sapiens
  misc_feature (1)..(1): Xaa can be any naturally occurring amino acid
XYAIYDLLDTAMINNSRNLNIQLKWKRPPENEAPPVPFLHAQRYVSGYGLQKGELSTLLYNTHPYRAFPVLLLDTVPWYLRLYVHTLTITSKGKENKPSEDLSPEPGPQPALSCPLQVPQTLISQGSS

SEQ ID NO: 10398 - protein, 136 aa, Homo Sapiens
  misc_feature (1)..(1): Xaa can be any naturally occurring amino acid
XYQPAQDRLQPHLLEMLIQLPANSVTKVSIQFERALLKWTEYTPDPNHGFYVRFPVSDGSNYFVRLYTEPLLVNLPTPDFSMPYNVICLTCTVVAVCYGSFYNLLTRTFHIEEPRTGGLAKRLANLIRRARGVPPL

SEQ ID NO: 10399 - protein, 144 aa, Homo Sapiens
  misc_feature (1)..(1): Xaa can be any naturally occurring amino acid
XYVSGYGLQKGELSTLLYNTHPYRAFPVLLLDTVPWYLRLYVHTLTITSKGKENKPSYIHYQPAQDRLQPHLLEMLIQLPANSVTKVSIQFERALLKWTEYTPDPNHGFYVSPSVLSALVPSMVAAKPVDWEESPLFNSLLPWT

SEQ ID NO: 10400 - protein, 213 aa, Homo Sapiens
YNQDNETLEVHPPPTTTYQDVILGTRKTYAIYDLLDTAMINNSRNLNIQLKWKRPPENEAPPVPFLHAQRYVSGYGLQKGELSTLLYNTHPYRAFPVLLLDTVPWYLRLYVHTLTITSKGKENKPSYIHYQPAQDRLQPHLLEMLIQLPANSVTKVSIQFERALLKWTEYTPDPNHGFYVSPSVLSALVPSMVAAKPVDWEESPLFNSLLPWT

SEQ ID NO: 10401 - protein, 579 aa, Homo Sapiens
MQICGSSVASVAAGTSFQVLGPVCWQQLDLKMAVRVLWGGLSLLRVLWCLLPQTGYVHPDEFFQSPEVMAEDILGVQAARPWEFYPSSSCRSVLFPLLISGSTFWLLRLWEELGPWPGLVSGYALLVGPRLLLTALSFALDGAVYHLAPPMGADRWNALALLSGSYVTLVFYTRTFSNTIEGLLFTWLLVLVSSHVTWGPTRKEPAPGPRWRSWLLGGIVAAGFFNRPTFLAFAVVPLYLWGTRGATNPGLKSLTREALVLLPGAALTAAVFVATDSWYFSSPATSRNLVLTPVNFLHYNLNPQNLARHGTHARLTHLAVNGFLLFGVLHAQALQAAWQRLQVGLQASAQMGLLRALGARSLLSSPRSYLLLLYFMPLALLSAFSHQEARFLIPLLVPLVLLCSPQTQPVPWKGTVVLFNALGALLFGCLHQGGLVPGLEYLEQVVHAPVLPSTPTHYTLLFTHTYMPPRHLLHLPGLGAPVEVVDMGGTEDWALCQTLKSFTRQPACQVAGGPWLCRLFVVTPGTTRRAVEKCSFPFKNETLLFPHLTLEDPPALSSLLSGAWRDHLSLHIVELGEET

SEQ ID NO: 10402 - protein, 92 aa, Homo Sapiens
MQICGSSVASVAAGTSFQVLGPVCWQQLDLKMAVRVLWGGLSLLRVLWCLLPQTGYVHPDEFFQSPEVMAGPSPTPLRDSSSRGCWCWYPPM

SEQ ID NO: 10403 - protein, 49 aa, Homo Sapiens
  misc_feature (1)..(1): Xaa can be any naturally occurring amino acid
XRVLWGGLSLLRVLWCLLPQTGYVHPDEFFQSPEVMAGSGRSWGRGLAW

SEQ ID NO: 10404 - protein, 805 aa, Homo Sapiens
MAASGVPRGCDILIVYSPDAEEWCQYLQTLFLSSRQVRSQKILTHRLGPEASFSAEDLSLFLSTRCVVVLLSAELVQHFHKPALLPLLQRAFHPPHRVVRLLCGVRDSEEFLDFFPDWAHWQELTCDDEPETYVAAVKKAISEDSGCDSVTDTEPEDEKVVSYSKQQNLPTVTSPGNLMVVQPDRIRCGAETTVYVIVRCKLDDRVATEAEFSPEDSPSVRMEAKVENEYTISVKAPNLSSGNVSLKIYSGDLVVCETVISYYTDMEEIGNLLSNAANPVEFMCQAFKIVPYNTETLDKLLTESLKNNIPASGLHLFGINQLEEEDMMTNQRDEELPTLLHFAAKYGLKNLTALLLTCPGALQAYSVANKHGHYPNTIAEKHGFRDLRQFIDEYVETVDMLKSHIKEELMHGEEADAVYESMAHLSTDLLMKCSLNPGCDEDLYESMAAFVPAATEDLYVEMLQASTSNPIPGDGFSRATKDSMIRKFLEGNSMGMTNLERDQCHLGQEEDVYHTVDDDEAFSVDLASRPPVPVPRPETTAPGAHQLPDNEPYIFKVFAEKSQERPGNFYVSSESIRKGPPVRPWRDRPQSSIYDPFAGMKTPGQRQLITLQEQVKLGIVNVDEAVLHFKEWQLNQKKRSESFRFQQENLKRLRDSITRRQREKQKSGKQTDLEITVPIRHSQHLPAKVEFGVYESGPRKSVIPPRTELRRGDWKTDSTSSTASSTSNRSSTRSLLSVSSGMEGDNEDNEVPEVTRSRSPGPPQVDGTPTMSLERPPRVPPRAASQRPPTRETFHPPPPVPPRGR

SEQ ID NO: 10405 - protein, 404 aa, Homo Sapiens
MRFFTSVACYGSCLFASELLIRCKDWLKGRPALFTALLACVLYLCEWTGAKHVPGSSYVEMLQASTSNPIPGDGFSRATKDSMIRKFLEGNSMGMTNLERDQCHLGQEEDVYHTVDDDEAFSVDLASRPPVPVPRPETTAPGAHQLPDNEPYIFKVFAEKSQERPGNFYVSSESIRKGPPVRPWRDRPQSSIYDPFAGMKTPGQRQLITLQEQVKLGIVNVDEAVLHFKEWQLNQKKRSESFRFQQENLKRLRDSITRRQREKQKSGKQTDLEITVPIRHSQHLPAKVEFGVYESGPRKSVIPPRTELRRGDWKTDSTSSTASSTSNRSSTRSLLSVSSGMEGDNEDNEVPEVTRSRSPGPPQVDGTPTMSLERPPRVPPRAASQRPPTRETFHPPPPVPPRGR

SEQ ID NO: 10406 - protein, 627 aa, Homo Sapiens
MVVQPDRIRCGAETTVYVIVRCKLDDRVATEAEFSPEDSPSVRMEAKVENEYTISVKAPNLSSGNVSLKIYSGDLVVCETVISYYTDMEEIGNLLSNAANPVEFMCQAFKIVPYNTETLDKLLTESLKNNIPASGLHLFGINQLEEEDMMTNQRDEELPTLLHFAAKYGLKNLTALLLTCPGALQAYSVANKHGHYPNTIAEKHGFRDLRQFIDEYVETVDMLKSHIKEELMHGEEADAVYESMAHLSTDLLMKCSLNPGCDEDLYESMAAFVPAATEDLYVEMLQASTSNPIPGDGFSRATKDSMIRKFLEGNSMGMTNLERDQCHLGQEEDVYHTVDDDEAFSVDLASRPPVPVPRPETTAPGAHQLPDNEPYIFKVFAEKSQERPGNFYVSSESIRKGPPVRPWRDRPQSSIYDPFAGMKTPGQRQLITLQEQVKLGIVNVDEAVLHFKEWQLNQKKRSESFRFQQENLKRLRDSITRRQREKQKSGKQTDLEITVPIRHSQHLPAKVEFGVYESGPRKSVIPPRTELRRGDWKTDSTSSTASSTSNRSSTRSLLSVSSGMEGDNEDNEVPEVTRSRSPGPPQVDGTPTMSLERPPRVPPRAASQRPPTRETFHPPPPVPPRGR

SEQ ID NO: 10407 - protein, 173 aa, Homo Sapiens
MLLAWVQAFLVSNMLLAEAYGSGGCFWDNGHLYREDQTSPAPGLRCLNWLDAQSGLASAPVSGAGNHSYCRNPDEDPRGPWCYVSGEAGVPEKRPCEDLRCPETTSQALPAFTTEIQEASEGPGADEVQVFAPANALPARSEAAAVQPVIGISQRVRMNSKEKKDLGTLGGRI

SEQ ID NO: 10408 - protein, 263 aa, Homo Sapiens
MLLAWVQAFLVSNMLLAEAYGSGGCFWDNGHLYREDQTSPAPGLRCLNWLDAQSGLASAPVSGAGNHSYCRNPDEDPRGPWCYVSGEAGVPEKRPCEDLRCPETTSQALPAFTTEIQEASEGPGADEVQVFAPANALPARSEAAAVQPVIGISQRVRMNSKEKKDLGTLGYVLGITMMVIIIAIGAGIILGYSYKRGKDLKEQHDQKVCEREMQRITLPLSAFTNPTCEIVDEKTVVVHTSQTPVDPQEGTTPLMGQAGTPGA

SEQ ID NO: 10409 - protein, 234 aa, Homo Sapiens
MLLAWVQAFLVSNMLLAEAYGSGGCFWDNGHLYREDQTSPAPGLRCLNWLDAQSGLASAPVSGAGNHSYCRNPDEDPRGPWCYVSGEAGVPEKRPCEDLRCPETTSQALPAFTTEIQEASEGPGADEVQVFAPANALPARSEAAAVQPVIGISQRVRMNSKEKKDLGTLGYVLGITMMVIIIAIGAGIILGYSYKRSVASLLGPLRRRGGRYTKSNFVAFLPKRKQDVENQLKM

SEQ ID NO: 10410 - protein, 145 aa, Homo Sapiens [sequence omitted]

SEQ ID NO: 10411 - protein, 303 aa, Homo Sapiens
MGRPLLLPLLPLLLPPAFLQPSGSTGSGPSYLYGVTQPKHLSASMGGSVEIPFSFYYPWELATAPDVRISWRRGHFHRQSFYSTRPPSIHKDYVNRLFLNWTEGQKSGFLRISNLQKQDQSVYFCRVELDTRSSGRQQWQSIEGTKLSITQAVTTTTQRPSSMTTTWRLSSTTTTTGLRVTQGKRRSDSWHISLETAVGVAVAVTVLGIMILGLICLLRWRRRKGQQRTKATTPAREPFQNTEEPYENIRNEGQNTDPKLNPKDDGIVYASLALSSSTSPRAPPSHRPLKSPQNETLYSVLKA

SEQ ID NO: 10412 - protein, 175 aa, Homo Sapiens
MGRPLLLPLLPLLLPPAFLQPSGSTGSGPSYLYGVTQPKHLSASMGGSVEIPFSFYYPWELATAPDVRISWRRGHFHRQSFYSTRPPSIHKDYVNRLFLNWTEGQKSGFLRISNLQKQDQSVYFCRVELDTRSSGRQQWQSIEGTKLSITQGNPSKTQRSHMRISGMKDKIQIPS

SEQ ID NO: 10413 - protein, 166 aa, Homo Sapiens
MGRPLLLPLLPLLLPPAFLQPSGSTGSGPSYLYGVTQPKHLSASMGGSVEIPFSFYYPWELATAPDVRISWRRGHFHRQSFYSTRPPSIHKDYVNRLFLNWTEGQKSGFLRISNLQKQDQSVYFCRVELDTRSSGRQQWQSIEGTKLSITQGQQRTKATTPAREPF

SEQ ID NO: 10414 - protein, 230 aa, Homo Sapiens
MGRPLLLPLLPLLLPPAFLQPSGSTGSGPSYLYGVTQPKHLSASMGGSVEIPFSFYYPWELATAPDVRISWRRGHFHRQSFYSTRPPSIHKDYVNRLFLNWTEGQKSGFLRISNLQKQDQSVYFCRVELDTRSSGRQQWQSIEGTKLSITQGQQRTKATTPAREPFQNTEEPYENIRNEGQNTDPKLNPKDDGIVYASLALSSSTSPRAPPSHRPLKSPQNETLYSVLKA

SEQ ID NO: 10415 - protein, 226 aa, Homo Sapiens
MGRPLLLPLLPLLLPPAFLQPSGSTGSGPSYLYGVTQPKHLSASMGGSVEIPFSFYYPWELATAPDVRISWRRGHFHRQSFYSTRPPSIHKDYVNRLFLNWTEGQKSGFLRISNLQKQDQSVYFCRVELDTRSSGRQQWQSIEGTKLSITQGQQRTKATTPAREPFQNTEEPYENIRNEGQNTDPKLNPKLHLTQSTSQPPSPQEPPERDPVLCLKGLTNGQPSQD

SEQ ID NO: 10416 - protein, 108 aa, Homo Sapiens
MGRASYGGSPVGHQSSSDHPRAKTCRSPVRDGPRTLCGVPTVALSLHFLREASSGSRTCGRRTSLCTSAKSSWTYRSGRLSWQSIKGTHLTITQALRQPLHRAPLLPG

SEQ ID NO: 10417 - protein, 271 aa, Homo Sapiens
MGRASYGGSPVGHQSSSDHPRAKTCRSPVRDGPRTLCGVPTVALSLHFLREASSGSRTCGRRTSLCTSAKSSWTYRSGRLSWQSIKGTHLTITQALRQPLHRAPLLPGQLCWSPRPLEKNKAMGRPLLLPLLLLLQPPAFLQPGLCEPALSELDRGSGERLPQDLKPAEGGPVCVFLPSRAGHPEIREAAVAVHQGDQTHHHPGCHNHHHLEAQQHNHHSRPQGHRKQRALRIMAPKSGHCHQGCIGCRCAQNCHFGTAVPPPPVVEEKER

SEQ ID NO: 10418 - protein, 46 aa, Homo Sapiens
MGRPLLLPLLLLLQPPAFLQPEGQESGFLRISNLRKEDQSVYFCRV

SEQ ID NO: 10419 - protein, 121 aa, Homo Sapiens
MGRPLLLPLLLLLQPPAFLQPGGSTGSGPSYLYGVTQPKHLSASMGGSVEIPFSFYYPWELAIVPNVRISWRRGHFHGQSFYSTRPPSIHKDYVNRLFLNWTEGQESGFLRISNLRKEDQS

SEQ ID NO: 10420 - protein, 127 aa, Homo Sapiens
MGRPLLLPLLLLLQPPAFLQPGGSTGSGPSYLYGVTQPKHLSASMGGSVEIPFSFYYPWELAIVPNVRISWRRGHFHGQSFYSTRPPSIHKDYVNRLFLNWTEGQESGFLRISNLRKEDQSVYFCRV

SEQ ID NO: 10421 - protein, 127 aa, Homo Sapiens; identical to SEQ ID NO: 10420

SEQ ID NO: 10422 - protein, 127 aa, Homo Sapiens; identical to SEQ ID NO: 10420

SEQ ID NO: 10423 - protein, 127 aa, Homo Sapiens; identical to SEQ ID NO: 10420

SEQ ID NO: 10424 - protein, 138 aa, Homo Sapiens
MGRPLLLPLLLLLQPPAFLQPGGSTGSGPSYLYGVTQPKHLSASMGGSVEIPFSFYYPWELAIVPNVRISWRRGHFHGQSFYSTRPPSIHKDYVNRLFLNWTEGQESGFLRISNLRKEDQSVYFCRVELDTRRSGRQQ

SEQ ID NO: 10425 - protein, 227 aa, Homo Sapiens
MGRPLLLPLLLLLQPPAFLQPGGSTGSGPSYLYGVTQPKHLSASMGGSVEIPFSFYYPWELAIVPNVRISWRRGHFHGQSFYSTRPPSIHKDYVNRLFLNWTEGQESGFLRISNLRKEDQSVYFCRVELDTRRSGRQQLQSIKGTKLTITQAVTTTTTWRPSSTTTIAGLRVTESKGHSESWHLSLDTAIRVALAVAVLKTVILGLLCLLLLWWRRRKGSRAPSSDF

SEQ ID NO: 10426 - protein, 227 aa, Homo Sapiens; identical to SEQ ID NO: 10425

SEQ ID NO: 10427 - protein, 60 aa, Homo Sapiens
MGRPLLLPLLLLLQPPAFLQPGLCEPALSELDRGSGERLPQDLKPAEGGPVCVFLPSRAG

SEQ ID NO: 10428 - protein, 116 aa, Homo Sapiens
MGPKDHMVTSSFCCQSDGCNSAFLSVPLTNLTENGLMCPACTASFRDKCMGPMTHCTGKENHCVSLSGHVQAGIFKPRFAMRGCATESMCFTKPGAEVPTGTNVLFLHHIECTHSP

SEQ ID NO: 10429 - protein, 116 aa, Homo Sapiens; identical to SEQ ID NO: 10428

SEQ ID NO: 10430 - protein, 116 aa, Homo Sapiens; identical to SEQ ID NO: 10428

SEQ ID NO: 10431 - protein, 204 aa, Homo Sapiens
MRLSRRPETFLLAFVLLCTLLGLGCPLHCEICTAAGSRCHGQMKTCSSDKDTCVLLVGKATSKGKELVHTYKGCIRSQDCYSGVISTTMGPKDHMVTSSFCCQSDGCNSAFLSVPLTNLTENGLMCPACTASFRDKCMGPMTHCTGKENHCVSLSGHVQAGIFKPRFAMRGCATESMCFTKPGAEVPTGTNVLFLHHIECTHSP

SEQ ID NO: 10432 - protein, 228 aa, Homo Sapiens
MWVQTHPSSASYKSWGPGTADTHTMRLSRRPETFLLAFVLLCTLLGLGCPLHCEICTAAGSRCHGQMKTCSSDKDTCVLLVGKATSKGKELVHTYKGCIRSQDCYSGVISTTMGPKDHMVTSSFCCQSDGCNSAFLSVPLTNLTENGLMCPACTASFRDKCMGPMTHCTGKENHCVSLSGHVQAGIFKPRFAMRGCATESMCFTKPGAEVPTGTNVLFLHHIECTHSP

SEQ ID NO: 10433 - protein, 146 aa, Homo Sapiens
MRLLQLLFRASPATLLLVLCLQLGANKAQDNTRKIIIKNFDIPKSVRPNDEVTAVLAVQTELKECMVVKTYLISSIPLQGAFNYKYTACLCDDNPKTFYWDFYTNRTVQIAAVVDVIRELGICPDDAAVIPIKNNRFYTIEILKVE

SEQ ID NO: 10434 - protein, 118 aa, Homo Sapiens
MERGVKNKQDFMDLSICTREKLAHVRNCKTGSSGIPVKLVTNLFNLDFPQDWQLYQYHVTYIPDLASRRLRIALLYSHSELSNKAKAFDGAILFLSQKLEEKVTELSSETQRGETIKM

SEQ ID NO: 10435 - protein, 453 aa, Homo Sapiens
MERGVKNKQDFMDLSICTREKLAHVRNCKTGSSGIPVKLVTNLFNLDFPQDWQLYQYHVTYIPDLASRRLRIALLYSHSELSNKAKAFDGAILFLSQKLEEKVTELSSETQRGETIKMTITLKRELPSSSPVCIQVFNIIFRKILKKLSMYQIGRNFYNPSEPMEIPQHKLSLWPGFAISVSYFERKLLFSADVSYKVLRNETVLEFMTALCQRTGLSCFTQTCEKQLIGLIVLTRYNNRTYSIDDIDWSVKPTHTFQKRDGTEITYVDYYKQQYDITVSDLNQPMLVSLLKKKRNDNSEAQLAHLIPELCFLTGLTDQATSDFQLMKAVAEKTRLSPSGRQQRLARLVDNIQRNTNARFELETWGLHFGSQISLTGRIVPSEKILMQDHICQPVSAADWSKDIRTCKILNAQSLNTWLILCSDRTEYVAESFLNCLRRVAGSMGFNVDYPKM

SEQ ID NO: 10436 - protein, 203 aa, Homo Sapiens
MGMLFFVGIRKVILFLLTPNSAGALNKWYKYNHDLPARIIVYRAGVGDGQLKTLIEYEVPQLLSSVAESSSNTSSRLSVIVVRKKCMPRFFTEMNRTVQNPPLGTVVDSEATRNEWYDFYLISQVACRGTVSPTYYNVIYDDNGLKPDHMQRLTFKLCHLYYNWPGIVSVPAPCQYAHKLTFLVAQSIHKEPSLELANHLFYL

SEQ ID NO: 10437 - protein, 495 aa, Homo Sapiens
MGPRSVDLSNNEASSSNGFLGTSRISTNDKYGISSGDAGSTFMERGVKNKQDFMDLSICTREKLAHVRNCKTGSSGIPVKLVTNLFNLDFPQDWQLYQYHVTYIPDLASRRLRIALLYSHSELSNKAKAFDGAILFLSQKLEEKVTELSSETQRGETIKMTITLKRELPSSSPVCIQVFNIIFRKILKKLSMYQIGRNFYNPSEPMEIPQHKLSLWPGFAISVSYFERKLLFSADVSYKVLRNETVLEFMTALCQRTGLSCFTQTCEKQLIGLIVLTRYNNRTYSIDDIDWSVKPTHTFQKRDGTEITYVDYYKQQYDITVSDLNQPMLVSLLKKKRNDNSEAQLAHLIPELCFLTGLTDQATSDFQLMKAVAEKTRLSPSGRQQRLARLVDNIQRNTNARFELETWGLHFGSQISLTGRIVPSEKILMQDHICQPVSAADWSKDIRTCKILNAQSLNTWLILCSDRTEYVAESFLNCLRRVAGSMGFNVDYPKM

SEQ ID NO: 10438 - protein, 852 aa, Homo Sapiens
MSGRARVKARGIARSPSATEVGRIQASPLPRSVDLSNNEASSSNGFLGTSRISTNDKYGISSGDAGSTFMERGVKNKQDFMDLSICTREKLAHVRNCKTGSSGIPVKLVTNLFNLDFPQDWQLYQYHVTYIPDLASRRLRIALLYSHSELSNKAKAFDGAILFLSQKLEEKVTELSSETQRGETIKMTITLKRELPSSSPVCIQVFNIIFRKILKKLSMYQIGRNFYNPSEPMEIPQHKLSLWPGFAISVSYFERKLLFSADVSYKVLRNETVLEFMTALCQRTGLSCFTQTCEKQLIGLIVLTRYNNRTYSIDDIDWSVKPTHTFQKRDGTEITYVDYYKQQYDITVSDLNQPMLVSLLKKKRNDNSEAQLAHLIPELCFLTGLTDQATSDFQLMKAVAEKTRLSPSGRQQRLARLVDNIQRNTNARFELETWGLHFGSQISLTGRIVPSEKILMQDHICQPVSAADWSKDIRTCKILNAQSLNTWLILCSDRTEYVAESFLNCLRRVAGSMGFNVDYPKIIKVQENPAAFVRAIQQYVDPDVQLVMCILPSNQKTYYDSIKKYLSSDCPVPSQCVLARTLNKQGMMMSIATKIAMQMTCKLGGELWAVEIPLKSLMVVGIDVCKDALSKDVMVVGCVASVNPRITRWFSRCILQRTMTDVADCLKVFMTGALNKWYKYNHDLPARIIVYRAGVGDGQLKTLIEYEVPQLLSSVAESSSNTSSRLSVIVVRKKCMPRFFTEMNRTVQNPPLGTVVDSEATRNEWYDFYLISQVACRGTVSPTYYNVIYDDNGLKPDHMQRLTFKLCHLYYNWPGIVSVPAPCQYAHKLTFLVAQSIHKEPSLELANHLFYL

SEQ ID NO: 10439 - protein, 181 aa, Homo Sapiens
MRRRRAAVAAGFCASFLLGSVLNVLFAPGSEPPRPGQSPEPSPAPGPGRRGGRGELARQIRARYEEAGPRLPAQAPPARARAWAAPRFATCPARSTWAQATPRPCTGSACPAVPRWRSRRWTLAATIWAAACASSGYGGAAIGWRPTSCLRRWCCWSGCGTPTCCSSMATATRTARTSQTP

SEQ ID NO: 10440 - protein, 493 aa, Homo Sapiens
MRRRRAAVAAGFCASFLLGSVLNVLFAPGSEPPRPGQSPEPSPAPGPGRRGGRGELARQIRARYEEVQRYSRGGPGPGAGRPERRRLMDLAPGGPGLPRPRPPWARPLSDGAPGWPPAPGPGSPGPGPRLGCAALRNVSGAQYMGSGYTKAVYRVRLPGGAAVALKAVDFSGHDLGSCVREFGVRRGCYRLAAHKLLKEMVLLERLRHPNVLQLYGYCYQDSEDIPDTLTTITELGAPVEMIQLLQTSWEDRFRICLSLGRLLHHLAHSPLGSVTLLDFRPRQFVLVDGELKVTDLDDARVEETPCAGSTDCILEFPARNFTLPCSAQGWCEGMNEKRNLYNAYRFFFTYLLPHSAPPSLRPLLDSIVNATGELAWGVDETLAQLEKVLHLYRSGQYLQNSTASSSTEYQCIPDSTIPQEDYRCWPSYHHGSCLLSVFNLAEAVDVCESHAQCRAFVVTNQTTWTGRQLVFFKTGWSQVVPDPNKTTYVKASG

SEQ ID NO: 10441 - protein, 4074 aa, Homo Sapiens
MTAWLISLMSIEVLLLAVRHLSLHIEPEEGSLAGGTWITVIFDGLELGVLYPNNGSQLEIHLVNVNMVVPALRSVPCDVFPVFLDLPVVTCRTRSVLSEAHEGLYFLEAYFGGQLVSSPNPGPRDSCTFKFSKAQTPIVHQVYPPSGVPGKLIHVYGWIITGRLETFDFDAEYIDSPVILEAQGDKWVTPCSLINRQMGSCYPIQEDHGLGTLQCHVEGDYIGSQNVSFSVFNKGKSMVHKKAWLISAKQDLFLYQTHSEILSVFPETGSLGGRTNITITGDFFDNSAQVTIAGIPCDIRHVSPRKIECTTRAPGKDVRLTTPQPGNRGLLFEVGDAVEGLELTEATPGYRWQIVPNASSPFGFWSQEGQPFRARLSGFFVAPETNNYTFWIQADSQASLHFSWSEEPRTKVKVASISVGTADWFDSWEQNRDEGTWQQKTPKLELLGGAMYYLEAEHHGIAPSRGMRIGVQIHNTWLNPDVVTTYLREKHQIRVRAQRLPEVQVLNVSGRGNFFLTWDNVSSQPIPANATAHLIQTTIEELLAVKCKLEPLWSNILLRLGFERGPEVSNSDGDLTSGTEPFCGRFSLRQPRHLVLTPPAAQKGYRLDQYTHLCLAYKGHMNKILKMIVSFTIGFQNMVKNTTCDWSLTRTSPESWQFDCTDLWETCVRCFGDLQPPPANSPVLVHQINLLPLAQETGLFYVDEIIIADTNVTVSQADSGTARPGGNLVESVSVVGSPPVYSVTSWLAGCGTELPLITARSVPTEGTEEGSGLVLVTTQRRQRTSPPLGGHFRIQLPNTVISDVPVQISAHHLHQLLQNNADDFTSRYLNASDFTVKEDLYTCYEHVWTLSWSTQIGDLPNFIRVSDENLTGVNPAAATRVVYDGGVFLGPIFGDMLATANQHTQVVVRVNDVPAHCPGSCSFQYLQGSTPCVHSVWYSIDGDINLMIYITGTGFSGDSQFLQVTVNKTSCKVIFSNQTNVVCQTDLLPVGMHRILMLVRPSGLAISATGEDLFLNVKPRLDMVEPSRAADIGGLWATIRGSSLEGVSLILFGSYSCAINVATSNSSRIQCKVPPRGKDGRIVNVTVIRGDYSAVLPRAFTYVSSLNPVIVTLSRNISNIAGGETLVIGVARLMNYTDLDVEVHVQDALAPVHTQSAWGLEVALPPLPAGLHRISVSINGVSIHSQGVDLHIQYLTEVFSIEPCCGSLLGGTILSISGIGFSRDPALVWVLVGNRSCDIVNLTEASIWCETLPAPQIPDAGAPTVPAAVEVWAGNRFFARGPSPSLVGKGFTFMYEAAATPVVTAMQGEITNSSLSLHVGGSNLSNSVILLGNLNCDVETQSFQGNVSLSGCSIPLHSLEAGIYPLQVRQKQMGFANMSVVLQQFAVMPRIMAIFPSQGSACGGTILTVRGLLLNSRRRSVRVDLSGPFTCVILSLGDHTILCQVSLEGDPLPGASFSLNVTVLVNGLTSECQGNCTLFIREEASPVMDALSTNTSGSLTTVLIRGQRLATTADEPMVFVDDQLPCNVTFFNASHVVCQTRDLAPGPHYLSVFYTRNGYACSGNVSRHFYIMPQVFHYFPKNFSLHGGSLLTIEGTGLRGQNTTSVYIDQQTCLTVNIGAELIRCIVPTGNGSVALEIEVDGLWYHIGVIGYNKAFTPELISISQSDDILTFAVAQISGAANIDIFIGMSPCVGVSGNHTVLQCVVPSLPAGEYHVRGYDCIRGWASSALVFTSRVIITAVTENFGCLGGRLVHVFGAGFSPGNVSAAVCGAPCRVLANATVSAFSCLVLPLDVSLAFLCGLKREEDSCEAARHTYVQCDLTVAMATEQLLESWPYLYICEESSQCLFVPDHWAESMFPSFSGLFISPKLERDEVLIYNSSCNITMETEAEMECETPNQPITVKITEIRKRWGQNTQGNFSLQFCRRWSRTHSWFPERLPQDGDNVTVENGQLLLLDTNTSILNLLHIKGGKLIFMAPGPIELRAHAILVSDGGELRIGSEDKPFQGRAQITLYGSSYSTPFFPYGVKFLAVRNGTLSLHGSLPEVIVTCLRATAHALDTVLALEDAVDWNPGDEVVIISGTGVKGAKPMEEIVTVETVQDTDLYLKSPLRYSHNFTENWVAGEHHILKATVALLSRSITIQGNLTNEREKLLVSCQEANAPEGNLQHCLYSMSEKMLGSRDMGARVIVQSFPEEPSQVQLKGVQFQVLGQAFHKHLSSLTLVGAMRESFIQGCTVRNSFSRGLSMCGTLGLKVDSNVFYNILGHALLVGTCTEMRYISWEAIHGRKDDWSGHGNIIRNNVIIQVSGAEGLSNPEMLTPSGIYICSPTNVIEGNRVCGAGYGYFFHLMTNQTSQAPLLSFTQNIAHSCTRYGLFVYPKFQPPWDNVTGTTLFQSFTVWESAGGAQIFRSSNLRLKNFKVYSCRDFGIDVLESDANTSVTDSLLLGHFAHKGSLCMSSGIKTPKRWELMVSNTTFVNFDLINCVAIRTCSDCSQGQGGFTVKTSQLKFTNSSNLVAFPFPHAAILEDLDGSLSGKNRSHILASMETLSASCLVNSSFGRVVHGSACGGGVLFHRMSIGLANTPEVSYDLTMTDSRNKTTTVNYVRDTLSNPRGWMALLLDQETYSLQSENLWINRSLQYSATFDNFAPGNYLLLVHTDLPPYPDILLRCGSRVGLSFPFLPSPGQNQGCDWFFNSQLRQLTYLVSGEGQVQVILRVKEGMPPTISASTSAPESALKWSLPETWQGVEEGWGGYNNTIPGPGDDVLILPNRTVLVDTDLPFFKGLYVMGTLDFPVDRSNVLSVACMVIAGGELKVGTLENPLEKEQKLLILLRASEGVFCDRMNGIHIDPGTIGVYGKVHLYSAYPKNSWTHLGADIASGNERIIVEDAVDWRPHDKIVLSSSSYEPHEAEVLTVKEVKGHHVRIYERLKHRHIGSVHVTEDGRHIRLAAEVGLLTRNIQIQPDVSCRGRLFVGSFRKSSREEFSGVLQLLNVEIQNFGSPLYSSVEFSNVSAGSWIISSTLHQSCGGGIHAAASHGVLLNDNIVFGTAGHGIDLEGQAYTVTNNLVVLMTQPAWSTIWVAGIKVNQVKDINLHGNVVAGSERLGFHIRGHKCSSCELLWSDNVAHSSLHGLHLYKESGLDNCTRISGFLAFKNFDYGAMLHVENSVEIENITLVDNTIGLLAVVYVFSAPQNSVKKVQIVLRNSVIVATSSSFDCIQDKVKPHSANLTSTDRAPSNPRGGRIGILWPVFTSEPNQWPQEPWHKVRNDHSISGIMKLQDVTFSSFVKSCYSDDLDVCILPNAENSGIMHPITAERTRMLKIKDKNKFYFPSLQPRKDLGKVVCPELDCASPRKYLFKDLDGRALGLPPPVSVFPKTEAEWTASFFNAGTFREEQKCTYQFLMQGFICKQTDQVVLILDSADAIWAIQKLYPVVSVTSGFVDVFSSVNANIPCSTSGSVSTFYSILPIRQITKVCFMDQTPQVLRFFLLGNKSTSKLLLAVFYHELQSPHVFLGESFIPPTLVQSASLLLNESIGANYFNIMDNLLYVVLQGEEPIEIRSGVSIHLALTVMVSVLEKGWEIVILERLTNFLQIGQNQIRFIHEMPGHEETLKAIADSRAKRKRNCPTVTCTSHYRRVGQRRPLMMEMNSHRASPPMTVETISKVIVIEIGDSPTVRSTGMISSLSSNKLQNLAHRVITAQQTGVLENVLNMTIGALLVTQSKGVIGYGNTSSFKTGNLIYIRPYALSILVQPSDGEVGNELPVQPQLVFLDEQNRRVESLGPPSEPWTISASLEGASDSVLKGCTQAETQDGYVSFYNLAVLISGSNWHFIFTVTSPPGVNFTARSKPFAVLPVTRKEKSTIILAASLSSVASWLALSCLVCCWLKRSKSRKTKPEEIPESQTNNQNIHIHISSKRRESQGPKKEDTVVGEDMRMKVMLGKVNQCPHQLMNGVSRRKVSRHIVREEEAAVPAPGTTGITSHGHICAPGAPAQQVYLQETGNWKEGQEQLLRYQLAGQNQLLLLCPDFRQERQQLPGQSRLSKQSGSLGLSQEKKASCGATEAFCLHSVHPETIQEQL

SEQ ID NO: 10442 - protein, 3396 aa, Homo Sapiens
MTAWLISLMSIEVLLLAVRHLSLHIEPEEGSLAGGTWITVIFDGLELGVLYPNNGSQLEIHLVNVNMVVPALRSVPCDVFPVFLDLPVVTCRTRSVLSEAHEGLYFLEAYFGGQLVSSPNPGPRDSCTFKFSKAQTPIVHQVYPPSGVPGKLIHVYGWIITGRLETFDFDAEYIDSPVILEAQGDKWVTPCSLINRQMGSCYPIQEDHGLGTLQCHVEGDYIGSQNVSFSVFNKGKSMVHKKAWLISAKQDLFLYQTHSEILSVFPETGSLGGRTNITITGDFFDNSAQVTIAGIPCDIRHVSPRKIECTTRAPGKDVRLTTPQPGNRGLLFEVGDAVEGLELTEATPGYRWQIVPNASSPFGFWSQEGQPFRARLSGFFVAPETNNYTFWIQADSQASLHFSWSEEPRTKVKVASISVGTADWFDSWEQNRDEGTWQQKTPKLELLGGAMYYLEAEHHGIAPSRGMRIGVQIHNTWLNPDVVTTYLREKHQIRVRAQRLPEVQVLNVSGRGNFFLTWDNVSSQPIPANATAHLIQTTIEELLAVKCKLEPLWSNILLRLGFERGPEVSNSDGDLTSGTEPFCGRFSLRQPRHLVLTPPAAQKGYRLDQYTHLCLAYKGHMNKILKMIVSFTIGFQNMVKNTTCDWSLTRTSPESWQFDCTDLWETCVRCFGDLQPPPANSPVLVHQINLLPLAQETGLFYVDEIIIADTNVTVSQADSGTARPGGNLVESVSVVGSPPVYSVTSWLAGCGTELPLITARSVPTEGTEEGSGLVLVTTQRRQRTSPPLGGHFRIQLPNTVISDVPVQISAHHLHQLLQNNADDFTSRYLNASDFTVKEDLYTCYEHVWTLSWSTQIGDLPNFIRVSDENLTGVNPAAATRVVYDGGVFLGPIFGDMLATANQHTQVVVRVNDVPAHCPGSCSFQYLQGSTPCVHSVWYSIDGDINLMIYITGTGFSGDSQFLQVTVNKTSCKVIFSNQTNVVCQTDLLPVGMHRILMLVRPSGLAISATGEDLFLNVKPRLDMVEPSRAADIGGLWATIRGSSLEGVSLILFGSYSCAINVATSNSSRIQCKVPPRGKDGRIVNVTVIRGDYSAVLPRAFTYVSSLNPVIVTLSRNISNIAGGETLVIGVARLMNYTDLDVEVHVQDALAPVHTQSAWGLEVALPPLPAGLHRISVSINGVSIHSQGVDLHIQYLTEVFSIEPCCGSLLGGTILSISGIGFSRDPALVWVLVGNRSCDIVNLTEASIWCETLPAPQIPDAGAPTVPAAVEVWAGNRFFARGPSPSLVGKGFTFMYEAAATPVVTAMQGEITNSSLSLHVGGSNLSNSVILLGNLNCDVETQSFQGNVSLSGCSIPLHSLEAGIYPLQVRQKQMGFANMSVVLQQFAVMPRIMAIFPSQGSACGGTILTVRGLLLNSRRRSVRVDLSGPFTCVILSLGDHTILCQVSLEGDPLPGASFSLNVTVLVNGLTSECQGNCTLFIREEASPVMDALSTNTSGSLTTVLIRGQRLATTADEPMVFVDDQLPCNVTFFNASHVVCQTRDLAPGPHYLSVFYTRNGYACSGNVSRHFYIMPQVFHYFPKNFSLHGGSLLTIEGTGLRGQNTTSVYIDQQTCLTVNIGAELIRCIVPTGNGSVALEIEVDGLWYHIGVIGYNKAFTPELISISQSDDILTFAVAQISGAANIDIFIGMSPCVGVSGNHTVLQCVVPSLPAGEYHVRGYDCIRGWASSALVFTSRVIITAVTENFGCLGGRLVHVFGAGFSPGNVSAAVCGAPCRVLANATVSAFSCLVLPLDVSLAFLCGLKREEDSCEAARHTYVQCDLTVAMATEQLLESWPYLYICEESSQCLFVPDHWAESMFPSFSGLFISPKLERDEVLIYNSSCNITMETEAEMECETPNQPITVKITEIRKRWGQNTQGNFSLQFCRRWSRTHSWFPERLPQDGDNVTVENGQLLLLDTNTSILNLLHIKGGKLIFMAPGPIELRAHAILVSDGGELRIGSEDKPFQGRAQITLYGSSYSTPFFPYGVKFLAVRNGTLSLHGSLPEVIVTCLRATAHALDTVLALEDAVDWNPGDEVVIISGTGVKGAKPMEEIVTVETVQDTDLYLKSPLRYSHNFTENWVAGEHHILKATVALLSRSITIQGNLTNEREKLLVSCQEANAPEGNLQHCLYSMSEKMLGSRDMGARVIVQSFPEEPSQVQLKGVQFQVLGQAFHKHLSSLTLVGAMRESFIQGCTVRNSFSRGLSMCGTLGLKVDSNVFYNILGHALLVGTCTEMRYISWEAIHGRKDDWSGHGNIIRNNVIIQVSGAEGLSNPEMLTPSGIYICSPTNVIEGNRVCGAGYGYFFHLMTNQTSQAPLLSFTQNIAHSCTRYGLFVYPKFQPPWDNVTGTTLFQSFTVWESAGGAQIFRSSNLRLKNFKVYSCRDFGIDVLESDANTSVTDSLLLGHFAHKGSLCMSSGIKTPKRWELMVSNTTFVNFDLINCVAIRTCSDCSQGQGGFTVKTSQLKFTNSSNLVAFPFPHAAILEDLDGSLSGKNRSHILASMETLSASCLVNSSFGRVVHGSACGGGVLFHRMSIGLANTPEVSYDLTMTDSRNKTTTVNYVRDTLSNPRGWMALLLDQETYSLQSENLWINRSLQYSATFDNFAPGNYLLLVHTDLPPYPDILLRCGSRVGLSFPFLPSPGQNQGCDWFFNSQLRQLTYLVSGEGQVQVILRVKEGMPPTISASTSAPESALKWSLPETWQGVEEGWGGYNNTIPGPGDDVLILPNRTVLVDTDLPFFKGLYVMGTLDFPVDRSNVLSVACMVIAGGELKVGTLENPLEKEQKLLILLRASEGVFCDRMNGIHIDPGTIGVYGKVHLYSAYPKNSWTHLGADIASGNERIIVEDAVDWRPHDKIVLSSSSYEPHEAEVLTVKEVKGHHVRIYERLKHRHIGSVHVTEDGRHIRLAAEVGLLTRNIQIQPDVSCRGRLFVGSFRKSSREEFSGVLQLLNVEIQNFGSPLYSSVEFSNVSAGSWIISSTLHQSCGGGIHAAASHGVLLNDNIVFGTAGHGIDLEGQAYTVTNNLVVLMTQPAWSTIWVAGIKVNQVKDINLHGNVVAGSERLGFHIRGHKCSSCELLWSDNVAHSSLHGLHLYKESGLDNCTRISGFLAFKNFDYGAMLHVENSVEIENITLVDNTIGLLAVVYVFSAPQNSVKKVQIVLRNSVIVATSSSFDCIQDKVKPHSANLTSTDRAPSNPRGGRIGILWPVFTSEPNQWPQEPWHKVRNDHSISGIMKLQDVTFSSFVKSCYSDDLDVCILPNAENSGIMHPITAERTRMLKIKDKNKFYFPSLQPRKDLGKVVCPELDCASPRKYLFKDLDGRALGLPPPVSVFPKTEAEWTASFFNAVTTEQALKISE

SEQ ID NO: 10443 - protein, 440 aa, Homo Sapiens
MHKSSSIWGDAPPTPQPKCADFQSANLFEGTDLKVQFLLFVPSNPSCGQLVEGSSDLQNSGFNATLGTKLIIHGFRVLGTKPSWIDTFIRTLLRATNANVIAVDWIYGSTGVYFSAVKNVIKLSLEISLFLNKLLVLGVSESSIHIIGVSLGAHVGGMVGQLFGGQLGQITGLDPAGPEYTRASVEERLDAGDALFVEAIHTDTDNLGIRIPVGHVDYFVNGGQDQPGCPTFFYAGYSYLICDHMRAVHLYISALENSCPLMAFPCASYKAFLAGRCLDCFNPFLLSCPRIGLVEQGGVKIEPLPKEVKVYLLTTSSAPYCMHHSLVEFHLKELRNKDTNIEVTFLSSNITSSSKITIPKQQRYGKGIIAHATPQCQINQVKFKFQSSNRVWKKDRTTIIGKFCTALLPVNDREKMVCLPEPVNLQASVTVSCDLKIACV

SEQ ID NO: 10444 - protein, 456 aa, Homo Sapiens
MPPGPWESCFWVGGLILWLSVGSSGDAPPTPQPKCADFQSANLFEGTDLKVQFLLFVPSNPSCGQLVEGSSDLQNSGFNATLGTKLIIHGFRVLGTKPSWIDTFIRTLLRATNANVIAVDWIYGSTGVYFSAVKNVIKLSLEISLFLNKLLVLGVSESSIHIIGVSLGAHVGGMVGQLFGGQLGQITGLDPAGPEYTRASVEERLDAGDALFVEAIHTDTDNLGIRIPVGHVDYFVNGGQDQPGCPTFFYAGYSYLICDHMRAVHLYISALENSCPLMAFPCASYKAFLAGRCLDCFNPFLLSCPRIGLVEQGGVKIEPLPKEVKVYLLTTSSAPYCMHHSLVEFHLKELRNKDTNIEVTFLSSNITSSSKITIPKQQRYGKGIIAHATPQCQINQVKFKFQSSNRVWKKDRTTIIGKFCTALLPVNDREKMVCLPEPVNLQASVTVSCDLKIACV

SEQ ID NO: 10445 - protein, 440 aa, Homo Sapiens
MPPGPWESCFWVGGLILWLSVGSSGDAPPTPQPKCADFQSANLFEGTDLKVQFLLFVPSNPSCGQLVEGSSDLQNSGFNATLGTKLIIHGFRVLGTKPSWIDTFIRTLLRATNANVIAVDWIYGSTGVYFSAVKNVLGVSESSIHIIGVSLGAHVGGMVGQLFGGQLGQITGLDPAGPEYTRASVEERLDAGDALFVEAIHTDTDNLGIRIPVGHVDYFVNGGQDQPGCPTFFYAGYSYLICDHMRAVHLYISALENSCPLMAFPCASYKAFLAGRCLDCFNPFLLSCPRIGLVEQGGVKIEPLPKEVKVYLLTTSSAPYCMHHSLVEFHLKELRNKDTNIEVTFLSSNITSSSKITIPKQQRYGKGIIAHATPQCQINQVKFKFQSSNRVWKKDRTTIIGKFCTALLPVNDREKMVCLPEPVNLQASVTVSCDLKIACV

SEQ ID NO: 10446 - protein, 283 aa, Homo Sapiens
MVGQLFGGQLGQITGLDPAGPEYTRASVEERLDAGDALFVEAIHTDTDNLGIRIPVGHVDYFVNGGQDQPGCPTFFYAGYSYLICDHMRAVHLYISALENSCPLMAFPCASYKAFLAGRCLDCFNPFLLSCPRIGLVEQGGVKIEPLPKEVKVYLLTTSSAPYCMHHSLVEFHLKELRNKDTNIEVTFLSSNITSSSKITIPKQQRYGKGIIAHATPQCQINQVKFKFQSSNRVWKKDRTTIIGKFCTALLPVNDREKMVCLPEPVNLQASVTVSCDLKIACV

SEQ ID NO: 10447 - protein, 224 aa, Homo Sapiens
NVIKLSLEISLFLNKLLVLGVSESSIHIIGVSLGAHVGGMVGQLFGGQLGQITGLDPAGPEYTRASVEERLDAGDALFVEAIHTDTDNLGIRIPVGHVDYFVNGGQDQPGCPTFFYAGYSYLICDHMRAVHLYISALENSCPLMAFPCASYKAFLAGRCLDCFNPFLLSCPRIGLVEQGGVKIEPLPKEVKVYLLTTSSAPYCNAFQLLTVAPNHGISLKLGCW

SEQ ID NO: 10448 - protein, 165 aa, Homo Sapiens
MGPLPVCLPIMLLLLLPSLLLLLLLPGPGSGEASRILRVHRRGILELAGTVGCVGPRTPIAYMKYGCFCGLGGHGQPRDAIDWCCHGHDCCYTRAEEAGCSPKTERYSWQCVNQSVLCGPAENKCQELLCKCDQEIANCLAQTEYNLKYLFYPQFLCEPDSPKCD

SEQ ID NO: 10449 - protein, 130 aa, Homo Sapiens
MGPLPVCLPIMLLLLLPSLLLLLLLPGPGSGEASRILRVHRRGILELAGTVGCVGPRTPIAYMKYGCFCGLGGHGQPRDAIDWCCHGHDCCYTRAEEAGCSPKTERYSWQCVNQSVLCVLLCHPGWSAVV

SEQ ID NO: 10450 - protein, 70 aa, Homo Sapiens
MALLSRPALTLLLLLMAAVVRCQEQAQTTDWRATLKTIRNGVHKIDTYLNAALDLLGGEDGLCQYKCSDA

SEQ ID NO: 10451 - protein, 187 aa, Homo Sapiens
MALLSRPALTLLLLLMAAVVRCQEQAQTTDWRATLKTIRNGVHKIDTYLNAALDLLGGEDGLCQYKCSDGSKPFPRYGYKPSPPNGCGSPLFGLNIGIPSLTKCCNQHDRCYETCGKSKNDCDEEFQYCLSKICRDVQKTLGLTQHVQACETTVELLFDSVIHLGCKPYLDSQRAACRCHYEEKTDL

SEQ ID NO: 10452 - protein, 189 aa, Homo Sapiens
MALLSRPALTLLLLLMAAVVRCQEQAQTTDWRATLKTIRNGVHKIDTYLNAALDLLGGEDGLCQYKCSDGSKPFPRYGYKPSPPNGCGSPLFGVHLNIGIPSLTKCCNQHDRCYETCGKSKNDCDEEFQYCLSKICRDVQKTLGLTQHVQACETTVELLFDSVIHLGCKPYLDSQRAACRCHYEEKTDL

SEQ ID NO: 10453 - protein, 195 aa, Homo Sapiens
MKLASGFLVLWLSLGGGLAQSDTSPDTEESYSDWGLRHLRGSFESVNSYFDSFLELLGGKNGVCQYRCRYGKAPMPRPGYKPQEPNGCGSYFLGLKVPESMDLGIPAMTKCCNQLDVCYDTCGANKYRCDAKFRWCLHSICSDLKRSLGFVSKVEAACDSLVDTVFNTVWTLGCRPFMNSQRAACICAEEEKEEL

SEQ ID NO: 10454 - protein, 212 aa, Homo Sapiens
MGLHLRPYRVGLLPDGLLFLLLLLMLLADPALPAGRHPPVVLGDNNRIPVIGPLKIREQQRSAVSTSWLLPYNYTWSPEKVFVQTPTINYTLRDYRKFFQDIGFEDGWLMRQDTEGLVEATMPPGVQLHCLYGTGVPTPDSFYYESFPDRDPKICFGDGDGTVNLKSALQCQAWQSRQEHQVLLQELPGSEHIEMLANATTLAYLKRVLLGP

SEQ ID NO: 10455 - protein, 318 aa, Homo Sapiens
MGLHLRPYRVGLLPDGLLFLLLLLMLLADPALPAGRHPPVVLGWFTTKHPGPPSFLMVWMYVSLALGRPSHWSSWTPAKAAWVPISTPWWRALWAGATHGVRMSEGLPMTGAEPQRQPQAWKDKYIRAFVSLGAPWGGVAKTLRVLASGDNNRIPVIGPLKIREQQRSAVSTSWLLPYNYTWSPEKVFVQTPTINYTLRDYRKFFQDIGFEDGWLMRQDTEGLVEATMPPGVQLHCLYGTGVPTPDSFYYESFPDRDPKICFGDGDGTVNLKSALQCQAWQSRQEHQVLLQELPGSEHIEMLANATTLAYLKRVLLGP

SEQ ID NO: 10456 - protein, 86 aa, Homo Sapiens
MGLHLRPYRVGLLPDGLLFLLLLLMLLADPALPAGRHPPVVLVEMGFHHIGQAGLELLTASDPLTSASQSAGITGMSPCALPRSPW

SEQ ID NO: 10457 - protein, 242 aa, Homo Sapiens
MGLHLRPYRVGLLPDGLLFLLLLLMLLADPALPAGRHPPVVLVPGDLGNQLEAKLDKPTVVHYLCSKKTESYFTIWLNLELLLPVIIDCWIDNIRLECSGAISAHYTSASQAQALLLPQTPDNWDYRLVYNKTSRATQFPDGVDVRVPGFGKTFSLEFLDPSKSSVGSYFHTMVESLVGWGYTRGEDVRGAPYDWRRAPTAAAGLEGQVYPGLRVTGCALGGRGQDPARPGFRRQQPDPSHR

SEQ ID NO: 10458 - protein, 163 aa, Homo Sapiens
MGLHLRPYRVGLLPDGLLFLLLLLMLLADPALPAGRHPPVVLVPGDLGNQLEAKLDKPTVVHYLCSKKTESYFTIWLNLELLLPVIIDCWIDNIRLVYNKTSRATQFPDGVDVRVPGFGKTFSLEFLDPSKSSVDENGPYFLALREMIEEMYQLYGGPVVLVA

SEQ ID NO: 10459 - protein, 412 aa, Homo Sapiens
MGLHLRPYRVGLLPDGLLFLLLLLMLLADPALPAGRHPPVVLVPGDLGNQLEAKLDKPTVVHYLCSKKTESYFTIWLNLELLLPVIIDCWIDNIRLVYNKTSRATQFPDGVDVRVPGFGKTFSLEFLDPSKSSVGSYFHTMVESLVGWGYTRGEDVRGAPYDWRRAPNENGPYFLALREMIEEMYQLYGGPVVLVAHSMGNMYTLYFLQRQPQAWKDKYIRAFVSLGAPWGGVAKTLRVLASGDNNRIPVIGPLKIREQQRSAVSTSWLLPYNYTWSPEKVFVQTPTINYTLRDYRKFFQDIGFEDGWLMRQDTEGLVEATMPPGVQLHCLYGTGVPTPDSFYYESFPDRDPKICFGDGDGTVNLKSALQCQAWQSRQEHQVLLQELPGSEHIEMLANATTLAYLKRVLLGP

SEQ ID NO: 10460 - protein, 236 aa, Homo Sapiens
MGLHLRPYRVGLLPDGLLFLLLLLMLLADPALPAGRHPPVVLVPGDLGNQLEAKLDKPTVVHYLCSKKTESYFTIWLNLELLLPVIIDCWIDNIRLVYNKTSRATQFPDGVDVRVPGFGKTFSLEFLDPSKSSVGSYFHTMVESLVGWGYTRGEDVRGAPYDWRRAPTAAAGLEGQVYPGLRVTGCALGGRGQDPARPGFRRQQPDPSHRAPEDPGAAAVSCLHQLAAALQLHMVT

SEQ ID NO: 10461 - protein, 298 aa, Homo Sapiens
MGLHLRPYRVGLLPDGLLFLLLLLMLLADPALPAGRHPPVVLVPGDLGNQLEAKLDKPTVVHYLCSKKTESYFTIWLNLELLLPVIIDCWIDNIRLVYNKTSRATQFPDGVDVRVPGFGKTFSLEFLDPSKSSVGSYFHTMVESLVGWGYTRGEDVRGAPYDWRRAPTQWFRLQDPSHLTPAWLWPADENGPYFLALREMIEEMYQLYGGPVVLVAHSMGNMYTLYFLQRQPQAWKDKYIRAFVSLGAPWGGVAKTLRVLASGDNNRIPVIGPLKIREQQRSAVSTSWLLPYNYTWSP

SEQ ID NO: 10462 - protein, 119 aa, Homo Sapiens
MIKCVIPGSDPFLEYNNYGCYCGLGGSGTPVDELDKCCQTHDNCYDQAKKLDSCKFLLDNPYTHTYSYSCSGSAITCSSKNKECEAFICNCDRNAAICFSKAPYNKAHKNLDTKKYCQS

SEQ ID NO: 10463 - protein, 148 aa, Homo Sapiens
MKLLVLAVLLTVAAADSGISPRAVWQFRKMIKCVIPGSDPFLEYNNYGCYCGLGGSGTPVDELDKCCQTHDNCYDQAKKLDSCKFLLDNPYTHTYSYSCSGSAITCSSKNKECEAFICNCDRNAAICFSKAPYNKAHKNLDTKKYCQS

SEQ ID NO: 10464 - protein, 70 aa, Homo Sapiens
MKLLVLAVLLTVAAADSGISPRAVWQFRKMIKCVIPGSDPFLEYNNYGCYCGLGGSGTPVDELDKQKQRV

SEQ ID NO: 10465 - protein, 144 aa, Homo Sapiens
MKTLLLLAVIMIFGLLQAHGNLVNFHRMIKLTTGKEAALSYGFYGCHCGVGGRGSPKDATDRCCVTHDCCYKRLEKRGCGTKFLSYKFSNSGSRITCAKQDSCRSQLCECDKAAATCFARNKTTYNKKYQYYSNKHCRGSTPRC

SEQ ID NO: 10466 - protein, 144 aa, Homo Sapiens; identical to SEQ ID NO: 10465

SEQ ID NO: 10467 - protein, 149 aa, Homo Sapiens
MKVIAILTLLLFCSPTHSSFWQFQRRVKHITGRSAFFSYYGYGCYCGLGDKGIPVDDTDRHSPSSPSPYEKLKEFSCQPVLNSYQFHIVNGAVVCGCTLGPGASCHCRLKACECDKQSVHCFKESLPTYEKNFKQFSSQPRCGRHKPWC

SEQ ID NO: 10468 - protein, 150 aa, Homo Sapiens
MLIATSFFLFFSSVVAAPTHSSFWQFQRRVKHITGRSAFFSYYGYGCYCGLGDKGIPVDDTDSPSSPSPYEKLKEFSCQPVLNSYQFHIVNGAVVCGCTLGPGASCHCRLKACECDKQSVHCFKESLPTYEKNFKQFSSQPRCGRHKPWC

SEQ ID NO: 10469 - protein, 62 aa, Homo Sapiens
MELALLCGLVVMAGVIPIQGGILNLNKMVKQVTGKMPILSYWPYGCHCGLGGRGQPKDATDC

SEQ ID NO: 10470 - protein, 145 aa, Homo Sapiens
MELALLCGLVVMAGVIPIQGGILNLNKMVKQVTGKMPILSYWPYGCHCGLGGRGQPKDATDWCCQTHDCCYDHLKTQGCSIYKDYYRYNFSQGNIHCSDKGSWCEQQLCACDKEVAFCLKRNLDTYQKRLRFYWRPHCRGQTPGC

SEQ ID NO: 10471 - protein, 142 aa, Homo Sapiens
MKSPHVLVFLCLLVALVTGNLVQFGVMIEKMTGKSALQYNDYGCYCGIGGSHWPVDQTDWCCHAHDCCYGRLEKLGCEPKLEKYLFSVSERGIFCAGRTTCQRLTCECDKRAALCFRRNLGTYNRKYAHYPNKLCTGPTPPC

SEQ ID NO: 10472 - protein, 509 aa, Homo Sapiens
MGVQAGLFGMLGFLGVALGGSPALRWYRTSCHLTKAVPGNPLGYLSFLAKDAQGLALIHARWDAHRRLQSCSWEDEPELTAAYGALCAHETAWGSFIHTPGPELQRALATLQSQWEACRALEESPAGARKKRAAGQSGVPGGGHQREKRGWTMPGTLWCGVGDSAGNSSELGVFQGPDLCCREHDRCPQNISPLQYNYGIRNYRFHTISHCDCDTRFQQCLQNQHDSISDIVGVAFFNVLEIPCFVLEEQEACVAWYWWGGCRMYGTVPLARLQPRTFYNASWSSRATSPTPSSRSPAPPKPRQKQHLRKGPPHQKGSKRPSKANTTALQDPMVSPRLDVAPTGLQGPQGGLKPQGARWVCRSFRRHLDQCEHQIGPREIEFQLLNSAQEPLFHCNCTRRLARFLRLHSPPEVTNMLWELLGTTCFKLAPPLDCVEGKNCSRDPRAIRVSARHLRRLQQRRHQLQDKGTDERQPWPSEPLRGPMSFYNQCLQLTQAARRPDRQQKSWSQ

SEQ ID NO: 10473 - protein, 138 aa, Homo Sapiens
MKGLLPLAWFLACSVPAVQGGLLDLKSMIEKVTGKNALTNYGFYGCYCGWGGRGTPKDGTDWCCWAHDHCYGRLEEKGCNIRTQSYKYRFAWGVVTCEPGPFCHVNLCACDRKLVYCLKRNLRSYNPQYQYFPNILCS

SEQ ID NO: 10474 - protein, 441 aa, Homo Sapiens
MVPPKLHVLFCLCGCLAVVYPFDWQYINPVAHMKSSAWVNKIQVLMAAASFGQTKIPRGNGPYSVGCTDLMFDHTNKGTFLRLYYPSQDNDRLDTLWIPNKEYFWGLSKFLGTHWLMGNILRLLFGSMTTPANWNSPLRPGEKYPLVVFSHGLGAFRTLYSAIGIDLASHGFIVAAVEHRDRSASATYYFKDQSAAEIGDKSWLYLRTLKQEEETHIRNEQVRQRAKECSQALSLILDIDHGKPVKNALDLKFDMEQLKDSIDREKIAVIGHSFGGATVIQTLSEDQRFRCGIALDAWMFPLGDEVYSRIPQPLFFINSEYFQYPANIIKMKKCYSPDKERKMITIRGSVHQNFADFTFATGKIIGHMLKLKGDIDSNVAIDLSNKASLAFLQKHLGLHKDFDQWDCLIEGDDENLIPGTNINTTNQHIMLQNSSGIEKYN

SEQ ID NO: 10475 - protein, 441 aa, Homo Sapiens; identical to SEQ ID NO: 10474

SEQ ID NO: 10476 - protein, 1463 aa, Homo Sapiens
MLLSPSLLLLLLLGAPRGCAEGVAAALTPERLLEWQDKGIFVIQSESLKKCIQAGKSVLTLENCKQANKHMLWKWVSNHGLFNIGGSGCLGLNFSAPEQPLSLYECDSTLVSLRWRCNRKMITGPLQYSVQVAHDNTVVASRKYIHKWISYGSGGGDICEYLHKDLHTIKGNTHGMPCMFPFQYNHQWHHECTREGREDDLLWCATTSRYERDEKWGFCPDPTSAEVGCDTIWEKDLNSHICYQFNLLSSLSWSEAHSSCQMQGGTLLSITDETEENFIREHMSSKTVEVWMGLNQLDEHAGWQWSDGTPLNYLNWSPEVNFEPFVEDHCGTFSSFMPSAWRSRDCESTLPYICKKYLNHIDHEIVEKDAWKYYATHCEPGWNPYNRNCYKLQKEEKTWHEALRSCQADNSALIDITSLAEVEFLVTLLGDENASETWIGLSSNKIPVSFEWSNDSSVIFTNWHTLEPHIFPNRSQLCVSAEQSEGHWKVKNCEERLFYICKKAGHVLSDAESGCQEGWERHGGFCYKIDTVLRSFDQASSGYYCPPALVTITNRFEQAFITSLISSVVKMKDSYFWIALQDQNDTGEYTWKPVGQKPEPVQYTHWNTHQPRYSGGCVAMRGRHPLGRWEVKHCRHFKAMSLCKQPVENQEKAEYEERWPFHPCYLDWESEPGLASCFKVFHSEKVLMKRTWREAEAFCEEFGAHLASFAHIEEENFVNELLHSKFNWTEERQFWIGFNKRNPLNAGSWEWSDRTPVVSSFLDNTYFGEDARNCAVYKANKTLLPLHCGSKREWICKIPRDVKPKIPFWYQYDVPWLFYQDAEYLFHTFASEWLNFEFVCSWLHSDLLTIHSAHEQEFIHSKIKALSKYGASWWIGLQEERANDEFRWRDGTPVIYQNWDTGRERTVNNQSQRCGFISSITGLWGSEECSVSMPSICKRKKVWLIEKKKDTPKQHGTCPKGWLYFNYKCLLLNIPKDPSSWKNWTHAQHFCAEEGGTLVAIESEVEQAFITMNLFGQTTSVWIGLQNDDYETWLNGKPVVYSNWSPFDIINIPSHNTTEVQKHIPLCALLSSNPNFHFTGKWYFEDCGKEGYGFVCEKMQDTSGHGVNTSDMYPMPNTLEYGNRTYKIINANMTWYAAIKTCLMHKAQLVSITDQYHQSFLTVVLNRLGYAHWIGLFTTDNGLNFDWSDGTKSSFTFWKDEESSLLGDCVFADSNGRWHSTACESFLQGAICHVPPETRQSEHPELCSETSIPWIKFKSNCYSFSTVLDSMSFEAAHEFCKKEGSNLLTIKDEAENAFLLEELFAFGSSVQMVWLNAQFDGNNETIKWFDGTPTDQSNWGIRKPDTDYFKPHHCVALRIPEGLWQLSPCQEKKGFICKMEADIHTAEALPEKGPSHSIIPLAVVLTLIVIVAICTLSFCIYKHNGGFFRRLAGFRNPYYPATNFSTVYLEENILISDLEKSDQ

SEQ ID NO: 10477 - protein, 1324 aa, Homo Sapiens
MLLSPSLLLLLLLGAPRGCAEGVAAALTPERLLEWQDKGIFVIQSESLKKCIQAGKSVLTLENCKQANKHMLWKWVSNHGLFNIGGSGCLGLNFSAPEQPLSLYECDSTLVSLRWRCNRKMITGPLQYSVQVAHDNTVVASRKYIHKWISYGSGGGDICEYLHKDLHTIKGNTHGMPCMFPFQYNHQWHHECTREGREDDLLWCATTSRYERDEKWGFCPDPTSAEVGCDTIWEKDLNSHICYQFNLLSSLSWSEAHSSCQMQGGTLLSITDETEENFIREHMSSKTVEVWMGLNQLDEHAGWQWSDGTPLNYLNWSPEVNFEPFVEDHCGTFSSFMPSAWRSRDCESTLPYICKKYLNHIDHEIVEKDAWKYYATHCEPGWNPYNRNCYKLQKEEKTWHEALRSCQADNSALIDITSLAEVEFLVTLLGDENASETWIGLSSNKIPVSFEWSNDSSVIFTNWHTLEPHIFPNRSQLCVSAEQSEGHWKVKNCEERLFYICKKAGHVLSDAESGCQEGWERHGGFCYKIDTVLRSFDQASSGYYCPPALVTITNRFEQAFITSLISSVVKMKDSYFWIALQDQNDTGEYTWKPVGQKPEPVQYTHWNTHQPRYSGGCVAMRGRHPLGRWEVKHCRHFKAMSLCKQPVENQEKAEYEERWPFHPCYLDWESEPGLASCFKVFHSEKVLMKRTWREAEAFCEEFGAHLASFAHIEEENFVNELLHSKFNWTEERQFWIGFNKRNPLNAGSWEWSDRTPVVSSFLDNTYFGEDARNCAVYKANKTLLPLHCGSKREWICKIPRDVKPKIPFWYQYDVPWLFYQDAEYLFHTFASEWLNFEFVCSWLHSDLLTIHSAHEQEFIHSKIKALSKYGASWWIGLQEERANDEFRWRDGTPVIYQNWDTGRERTVNNQSQRCGFISSITGLWGSEECSVSMPSICKRKKVWLIEKKKDTPKQHGTCPKGWLYFNYKCLLLNIPKDPSSWKNWTHAQHFCAEEGGTLVAIESEVEQAFITMNLFGQTTSVWIGLQNDDYETWLNGKPVVYSNWSPFDIINIPSHNTTEVQKHIPLCALLSSNPNFHFTGKWYFEDCGKEGYGFVCEKMQDTSGHGVNTSDMYPMPNTLEYGNRTYKIINANMTWYAAIKTCLMHKAQLVSITDQYHQSFLTVVLNRLGYAHWIGLFTTDNGLNFDWSDGTKSSFTFWKDEESSLLGDCVFADSNGRWHSTACESFLQGAICHVPPETRQSEHPELCSETSIPWIKFKSNCYSFSTVLDSMSFEAAHEFCKKEGSNLLTIKDEAENAFLLEELFAFGSSVQMVWLNAQFDGNSK

SEQ ID NO: 10478 - protein, 212 aa, Homo Sapiens
MKVFKFIGLMILLTSAFSAGSGQSPMTVLCSIDWFMVTVHPFMLNNDVCVHFHELHLGLGCPPNHVQPHAYQFTYRVTECGIRAKAVSQDMVIYSTEIHYSSKGTPSKFVIPVSCAAPQKSPWLTKPCSMRVASKSRATAQKDEKCYEVFSLSQSSQRPNCDCPPCVFSEEEHTQVPCHQAGAQEAQPLQPSHFLDISEDWSLHTDDMIGSM

SEQ ID NO: 10479 - protein, 55 aa, Homo Sapiens
MAVQRRLDVMEEMVEKTVDHLGTEVKGLLGLLEELAWNLPPGPFSPAPDLLGDGF

SEQ ID NO: 10480 - protein, 87 aa, Homo Sapiens
MRPLLCALTGLALLRAAGSLAAAEPFSPPRGDSAQSTACDRHMAVQRRLDVMEEMASEPWSWSPAVGGGAPARQRPQNQPCPLDFLP

SEQ ID NO: 10481 - protein, 97 aa, Homo Sapiens
MRPLLCALTGLALLRAAGSLAAAEPFSPPRGDSAQSTACDRHMAVQRRLDVMEEMVEKTVDHLGTEVKGLLGLLEELAWNLPPGPFSPAPDLLGDGF

SEQ ID NO: 10482 - protein, 516 aa, Homo Sapiens
MDAMKRGLCCVLLLCGAVFVSPSQEIHARFRRGARSYQGCSEPRCFNGGTCQQALYFSDFVCQCPEGFAGKCCEIDTRATCYEDQGISYRGTWSTAESGAECTNWNSSALAQKPYSGRRPDAIRLGLGNHNYCRNPDRDSKPWCYVFKAGKYSSEFCSTPACSEGNSDCYFGNGSAYRGTHSLTESGASCLPWNSMILIGKVYTAQNPSAQALGLGKHNYCRNPDGDAKPWCHVLKNRRLTWEYCDVPSCSTCGLRQYSQPQFRIKGGLFADIASHPWQAAIFAKHRRSPGERFLCGGILISSCWILSAAHCFQERFPPHHLTVILGRTYRVVPGEEEQKFEVEKYIVHKEFDDDTYDNDIALLQLKSDSSRCAQESSVVRTVCLPPADLQLPDWTECELSGYGKHEALSPFYSERLKEAHVRLYPSSRCTSQHLLNRTVTDNMLCAGDTRSGGPQANLHDACQGDSGGPLVCLNDGRMTLVGIISWGLGCGQKDVPGVYTKVTNYLDWIRDNMRP

SEQ ID NO: 10483 - protein, 436 aa, Homo Sapiens
MDAMKRGLCCVLLLCGAVFVSPSQEIHARFRRGARSYQVICRDEKTQMIYQQHQSWLRPVLRSNRVEYCWCNSGRAQCHSVPVKRNSDCYFGNGSAYRGTHSLTESGASCLPWNSMILIGKVYTAQNPSAQALGLGKHNYCRNPDGDAKPWCHVLKNRRLTWEYCDVPSCSTCGLRQYSQPQFRIKGGLFADIASHPWQAAIFAKHRRSPGERFLCGGILISSCWILSAAHCFQERFPPHHLTVILGRTYRVVPGEEEQKFEVEKYIVHKEFDDDTYDNDIALLQLKSDSSRCAQESSVVRTVCLPPADLQLPDWTECELSGYGKHEALSPFYSERLKEAHVRLYPSSRCTSQHLLNRTVTDNMLCAGDTRSGGPQANLHDACQGDSGGPLVCLNDGRMTLVGIISWGLGCGQKDVPGVYTKVTNYLDWIRDNMRP

SEQ ID NO: 10484 - protein, 499 aa, Homo Sapiens
MDAMKRGLCCVLLLCGAVFVSPSQEIHARFRRGARSYQVICRDEKTQMIYQQHQSWLRPVLRSNRVEYCWCNSGRAQCHSVPVKSCSEPRCFNGGTCQQALYFSDFVCQCPEGFAGKCCEIDSKPWCYVFKAGKYSSEFCSTPACSEGNSDCYFGNGSAYRGTHSLTESGASCLPWNSMILIGKVYTAQNPSAQALGLGKHNYCRNPDGDAKPWCHVLKNRRLTWEYCDVPSCSTCGLRQYSQPQFRIKGGLFADIASHPWQAAIFAKHRRSPGERFLCGGILISSCWILSAAHCFQERFPPHHLTVILGRTYRVVPGEEEQKFEVEKYIVHKEFDDDTYDNDIALLQLKSDSSRCAQESSVVRTVCLPPADLQLPDWTECELSGYGKHEALSPFYSERLKEAHVRLYPSSRCTSQHLLNRTVTDNMLCAGDTRSGGPQANLHDACQGDSGGPLVCLNDGRMTLVGIISWGLGCGQKDVPGVYTKVTNYLDWIRDNMRP

SEQ ID NO: 10485 - protein, 157 aa, Homo Sapiens
MDAMKRGLCCVLLLCGAVFVSPSQEIHARFRRGARSYQVICRDEKTQMIYQQHQSWLRPVLRSNRVEYCWCNSGRAQCHSVPVKSCSEPRCFNGGTCQQALYFSDFVCQCPEGFAGKCCEIDTRATCYEDQGISYRGTWSTAESGAECTNWNSSALA

SEQ ID NO: 10486 - protein, 178 aa, Homo Sapiens
MDAMKRGLCCVLLLCGAVFVSPSQEIHARFRRGARSYQVICRDEKTQMIYQQHQSWLRPVLRSNRVEYCWCNSGRAQCHSVPVKSCSEPRCFNGGTCQQALYFSDFVCQCPEGFAGKCCEIDTRATCYEDQGISYRGTWSTAESGAECTNWNSSALAQKPYSGRRPDAIRLGLGNHNY

SEQ ID NO: 10487 - protein, 562 aa, Homo Sapiens
MDAMKRGLCCVLLLCGAVFVSPSQEIHARFRRGARSYQVICRDEKTQMIYQQHQSWLRPVLRSNRVEYCWCNSGRAQCHSVPVKSCSEPRCFNGGTCQQALYFSDFVCQCPEGFAGKCCEIDTRATCYEDQGISYRGTWSTAESGAECTNWNSSALAQKPYSGRRPDAIRLGLGNHNYCRNPDRDSKPWCYVFKAGKYSSEFCSTPACSEGNSDCYFGNGSAYRGTHSLTESGASCLPWNSMILIGKVYTAQNPSAQALGLGKHNYCRNPDGDAKPWCHVLKNRRLTWEYCDVPSCSTCGLRQYSQPQFRIKGGLFADIASHPWQAAIFAKHRRSPGERFLCGGILISSCWILSAAHCFQERFPPHHLTVILGRTYRVVPGEEEQKFEVEKYIVHKEFDDDTYDNDIALLQLKSDSSRCAQESSVVRTVCLPPADLQLPDWTECELSGYGKHEALSPFYSERLKEAHVRLYPSSRCTSQHLLNRTVTDNMLCAGDTRSGGPQANLHDACQGDSGGPLVCLNDGRMTLVGIISWGLGCGQKDVPGVYTKVTNYLDWIRDNMRP

SEQ ID NO: 10488 - protein, 562 aa, Homo Sapiens; identical to SEQ ID NO: 10487

SEQ ID NO: 10489 - protein, 473 aa, Homo Sapiens
MDAMKRGLCCVLLLCGAVFVSPSQEIHARFRRGARSYQVICRDEKTQMIYQQHQSWLRPVLRSNRVEYCWCNSGRAQCHSVPVKSCSEPRCFNGGTCQQALYFSDFVCQCPEGFAGKCCEIGNSDCYFGNGSAYRGTHSLTESGASCLPWNSMILIGKVYTAQNPSAQALGLGKHNYCRNPDGDAKPWCHVLKNRRLTWEYCDVPSCSTCGLRQYSQPQFRIKGGLFADIASHPWQAAIFAKHRRSPGERFLCGGILISSCWILSAAHCFQERFPPHHLTVILGRTYRVVPGEEEQKFEVEKYIVHKEFDDDTYDNDIALLQLKSDSSRCAQESSVVRTVCLPPADLQLPDWTECELSGYGKHEALSPFYSERLKEAHVRLYPSSRCTSQHLLNRTVTDNMLCAGDTRSGGPQANLHDACQGDSGGPLVCLNDGRMTLVGIISWGLGCGQKDVPGVYTKVTNYLDWIRDNMRP

SEQ ID NO: 10490 - protein, 96 aa, Homo Sapiens
  misc_feature (1)..(1): Xaa can be any naturally occurring amino acid
XFAGKCCEIDTRATCYEDQGISYRGTWSTAESGAECTNWNSSALAQKPYSGRRPDAIRLGLGNHNYCRTPVPRHWAWANIITAGILMGMPSPGATC

SEQ ID NO: 10491 - protein, 106 aa, Homo Sapiens
MRALLARLLLCVLVVSDSKGSNELHQVPSNCDCLNGGTCVSNKYFSNIHWCNCPKKFGGQHCEIDKSKTCYEGNGHFYRGKASTDTMGRPCLPWNSATVLQQTYHA

SEQ ID NO: 10492 - protein, 431 aa, Homo Sapiens
MRALLARLLLCVLVVSDSKGSNELHQVPSNCDCLNGGTCVSNKYFSNIHWCNCPKKFGGQHCEIDKSKTCYEGNGHFYRGKASTDTMGRPCLPWNSATVLQQTYHAHRSDALQLGLGKHNYCRNPDNRRRPWCYVQVGLKLLVQECMVHDCADGKKPSSPPEELKFQCGQKTLRPRFKIIGGEFTTIENQPWFAAIYRRHRGGSVTYVCGGSLISPCWVISATHCFIDYPKKEDYIVYLGRSRLNSNTQGEMKFEVENLILHKDYSADTLAHHNDIALLKIRSKEGRCAQPSRTIQTICLPSMYNDPQFGTSCEITGFGKENSTDYLYPEQLKMTVVKLISHRECQQPHYYGSEVTTKMLCAADPQWKTDSCQGDSGGPLVCSLQGRMTLTGIVSWGRGCALKDKPGVYTRVSHFLPWIRSHTKEENGLAL

SEQ ID NO: 10493 - protein, 414 aa, Homo Sapiens
MVFHLRTRYEQANCDCLNGGTCVSNKYFSNIHWCNCPKKFGGQHCEIDKSKTCYEGNGHFYRGKASTDTMGRPCLPWNSATVLQQTYHAHRSDALQLGLGKHNYCRNPDNRRRPWCYVQVGLKLLVQECMVHDCADGKKPSSPPEELKFQCGQKTLRPRFKIIGGEFTTIENQPWFAAIYRRHRGGSVTYVCGGSLISPCWVISATHCFIDYPKKEDYIVYLGRSRLNSNTQGEMKFEVENLILHKDYSADTLAHHNDIALLKIRSKEGRCAQPSRTIQTICLPSMYNDPQFGTSCEITGFGKENSTDYLYPEQLKMTVVKLISHRECQQPHYYGSEVTTKMLCAADPQWKTDSCQGDSGGPLVCSLQGRMTLTGIVSWGRGCALKDKPGVYTRVSHFLPWIRSHTKEENGLAL

SEQ ID NO: 10494 - protein, 78 aa, Homo Sapiens
MDGAWRLASWGLRCMQCKTNGDCRVEECALGQDLCRTTIVRLWEEGEELELVEKSCTHSEKTNRTLSYRTGLKITSLT

SEQ ID NO: 10495 - protein, 152 aa, Homo Sapiens
MDTNLNGRGLETWSSWGLRCMQCKTNGDCRVEECALGQDLCRTTIVRLWEEGEELELVEKSCTHSEKTNRTLSYRTGLKITSLTEVVCGLDLCNQGNSGRAVTYSRSRYLECISCGSSDMSCERGRHQSLQCRSPEEQCLDVVTHWIQEGEE

SEQ ID NO: 10496 - protein, 335 aa, Homo Sapiens
MGHPPLLPLLLLLHTCVPASWGLRCMQCKTNGDCRVEECALGQDLCRTTIVRLWEEGEELELVEKSCTHSEKTNRTLSYRTGLKITSLTEVVCGLDLCNQGNSGRAVTYSRSRYLECISCGSSDMSCERGRHQSLQCRSPEEQCLDVVTHWIQEGEEGRPKDDRHLRGCGYLPGCPGSNGFHNNDTFHFLKCCNTTKCNEGPILELENLPQNGRQCYSCKGNSTHGCSSEETFLIDCRGPMNQCLVATGTHEPKNQSYMVRGCATASMCQHAHLGDAFSMNHIDVSCCTKSGCNHPDLDVQYRSGAAPQPGPAHLSLTITLLMTARLWGGTLLWT

SEQ ID NO: 10497 - protein, 281 aa, Homo Sapiens
MGHPPLLPLLLLLHTCVPASWGLRCMQCKTNGDCRVEECALGQDLCRTTIVRLWEEGEELELVEKSCTHSEKTNRTLSYRTGLKITSLTEVVCGLDLCNQGNSGRAVTYSRSRYLECISCGSSDMSCERGRHQSLQCRSPEEQCLDVVTHWIQEGEEGRPKDDRHLRGCGYLPGCPGSNGFHNNDTFHFLKCCNTTKCNEGPILELENLPQNGRQCYSCKGNSTHGCSSEETFLIDCRGPMNQCLVATGTHERSLWGSWLPCKSTTALRPPCCEEAQATHV

SEQ ID NO: 10498 - protein, 286 aa, Homo Sapiens
MGHPPLLPLLLLLHTCVPASWGLRCMQCKTNGDCRVEECALGQDLCRTTIVRLWEEGEELELVEKSCTHSEKTNRTLSYRTGLKITSLTEVVCGLDLCNQGNSGRAVTYSRSRYLECISCGSSDMSCERGRHQSLQCRSPEEQCLDVVTHWIQEGEEGRPKDDRHLRGCGYLPGCPGSNGFHNNDTFHFLKCCNTTKCNEGPKPKNQSYMVRGCATASMCQHAHLGDAFSMNHIDVSCCTKSGCNHPDLDVQYRSGAAPQPGPAHLSLTITLLMTARLWGGTLLWT

SEQ ID NO: 10499 - protein, 290 aa, Homo Sapiens
MGHPPLLPLLLLLHTCVPASWGLRCMQCKTNGDCRVEECALGQDLCRTTIVRLWEEGEELELVEKSCTHSEKTNRTLSYRTGLKITSLTEVVCGLDLCNQGNSGRAVTYSRSRYLECISCGSSDMSCERGRHQSLQCRSPEEQCLDVVTHWIQEGEEVLELENLPQNGRQCYSCKGNSTHGCSSEETFLIDCRGPMNQCLVATGTHEPKNQSYMVRGCATASMCQHAHLGDAFSMNHIDVSCCTKSGCNHPDLDVQYRSGAAPQPGPAHLSLTITLLMTARLWGGTLLWT

SEQ ID NO: 10500 - protein, 46 aa, Homo Sapiens
MGHPPLLPLLLLLHTCVPAWATARDSISKKKKRKKKERRNLRRYNL

SEQ ID NO: 10501 - protein, 153 aa, Homo Sapiens
MQCKTNGDCRVEECALGQDLCRTTIVRLWEEGEELELVEKSCTHSEKTNRTLSYRTGLKITSLTEVVCGLDLCNQGNSGRAVTYSRSRYLECISCGSSDMSCERGRHQSLQCRSPEEQCLDVVTHWIQEGEEGRPKDDRHLRGCGYLPGCPGS

SEQ ID NO: 10502 - protein, 226 aa, Homo Sapiens
MQCKTNGDCRVEECALGQDLCRTTIVRLWEEGEELELVEKSCTHSEKTNRTLSYRTGLKITSLTEVVCGLDLCNQGNSGRAVTYSRSRYLECISCGSSDMSCERGRHQSLQCRSPEEQCLDVVTHWIQEGEEGRPKDDRHLRGCGYLPGCPGSNGFHNNDTFHFLKCCNTTKCNEGPILELENLPQNGRQCYSCKGNSTHGCSSEETFLIDCRGPMNQCLVATGTH

SEQ ID NO: 10503 - protein, 154 aa, Homo Sapiens
  misc_feature (1)..(1): Xaa can be any naturally occurring amino acid
XCERGRHQSLQCRSPEEQCLDVVTHWIQEGEEGRPKDDRHLRGCGYLPGCPGSNGFHNNDTFHFLKCCNTTKCNEGPILELENLPQNGRQCYSCKGNSTHGCSSEETFLIDCRGPMNQCLVATGTHGCGHFCHGKVEFRLGAVAEACTLSTLGG

SEQ ID NO: 10504 - protein, 133 aa, Homo Sapiens
  misc_feature (1)..(1): Xaa can be any naturally occurring amino acid
XRYLECISCGSSDMSCERGRHQSLQCRSPEEQCLDVVTHWIQEGEEGRPKDDRHLRGCGYLPGCPGSNGFHNNDTFHFLKCCNTTKCNEGPILELENLPQNGRQCYSCKGNSTHGCSSEETFLIDCRGTLLWT

SEQ ID NO: 10505 - protein, 185 aa, Homo Sapiens
  misc_feature (1)..(1): Xaa can be any naturally occurring amino acid
XSWGLRCMQCKTNGDCRVEECALGQDLCRTTIVRLWEGRAVTYSRSRYLECISCGSSDMSCERGRHQSLQCRSPEEQCLDVVTHWIQEGEEGRPKDDRHLRGCGYLPGCPGSNGFHNNDTFHFLKCCNTTKCNEGPILELENLPQNGRQCYSCKGNSTHGCSSEETFLIDCRGPMNQCLVATGTH

SEQ ID NO: 10506 - protein, 144 aa, Homo Sapiens
MPAEKTVQVKNVMDKNGDAYGFYNNSVKTTGWGILEIRAGYGSQTLSNEIIMFVAGFLEGYLTAPHMNDHYTNLYPQLITKPSIMDKVQDFMEKQDKWTRKNIKEYKTDSFWRHTGYVMAQIDGLYVGAKKRAILEGTKPMTLF

SEQ ID NO: 10507 - protein, 40 aa, Homo Sapiens
MTRGGPGGRPGLPQPPPLLLLLLLLPLLLVTAEPPKPADT

SEQ ID NO: 10508 - protein, 553 aa, Homo Sapiens
MTRGGPGGRPGLPQPPPLLLLLLLLPLLLVTAEPPKPAGVYYATAYWMPAEKTVQVKNVMDKNGDAYGFYNNSVKTTGWGILEIRAGYGSQTLSNEIIMFVAGFLEGYLTAPHMNDHYTNLYPQLITKPSIMDKVQDFMEKQDKWTRKNIKEYKTDSFWRHTGYVMAQIDGLYVGAKKRAILEGTKPMTLFQIQFLNSVGDLLDLIPSLSPTKNGSLKVFKRWDMGHCSALIKVLPGFENILFAHSSWYTYAAMLRIYKHWDFNVIDKDTSSSRLSFSSYPGFLESLDDFYILSSGLILLQTTNSVFNKTLLKQVIPETLLSWQRVRVANMMADSGKRWADIFSKYNSGTYNNQYMVLDLKKVKLNHSLDKGTLYIVEQIPTYVEYSEQTDVLRKGYWPSYNVPFHEKIYNWSGYPLLVQKLGLDYSYDLAPRAKIFRRDQGKVTDTASMKYIMRYNNYKKDPYSRGDPCNTICCREDLNSPNPSPGGCYDTKVADIYLASQYTSYAISGPTVQGGLPVFRWDRFNKTLHQGMPEVYNFDFITMKPILKLDIK

SEQ ID NO: 10509 - protein, 52 aa, Homo Sapiens
DGQVPPASRSRSVLLDVSAGQLLMVDGRHPDAVAWANLTNAIRETGSSTCTG

SEQ ID NO: 10510 - protein, 589 aa, Homo Sapiens
MVGQMYCYPGSHLARALTRALALALVLALLVGPFLSGLAGAIPAPGGRWARDGQVPPASRSRSVLLDVSAGQLLMVDGRHPDAVAWANLTNAIRETGWAFLELGTSGQYNDSLQAYAAGVVEAAVSEELIYMHWMNTVVNYCGPFEYEVGYCERLKSFLEANLEWMQEEMESNPDSPYWHQVRLTLLQLKGLEDSYEGRVSFPAGKFTIKPLGFLLLQLSGDLEDLELALNKTKIKPSLGSGSCSALIKLLPGQSDLLVAHNTWNNYQHMLRVIKKYWLQFREGPWGDYPLVPGNKLVFSSYPGTIFSCDDFYILGSGLVTLETTIGNKNPALWKYVRPRGCVLEWVRNIVANRLASDGATWADIFKRFNSGTYNNQWMIVDYKAFIPGGPSPGSRVLTILEQIPGMVVVADKTSELYQKTYWASYNIPSFETVFNASGLQALVAQYGDWFSYDGSPRAQIFRRNQSLVQDMDSMVRLMRYNDFLHDPLSLCKACNPQPNGENAISARSDLNPANGSYPFQALRQRSHGGIDVKVTSMSLARILSLLAASGPTWDQVPPFQWSTSPFSGLLHMGQPDLWKFAPVKVSWD

SEQ ID NO: 10511 - protein, 557 aa, Homo Sapiens
MVGQMYCYPGSHLARALTRALALALVLALLVGPFLSGLAGAIPAPGGRWARDGQVPPASRSRSVLLDVSAGQLLMVDGRHPDAVAWANLTNAIRETGWAFLELGTSGQYNDSLQAYAAGVVEAAVSEELIYMHWMNTVVNYCGPFEYEVGYCERLKSFLEANLEWMQEEMESNPDSPYWHQVRLTLLQLKGLEDSYEGRVSFPAGKFTIKPLGFLLLQLSGDLEDLELALNKTKIKPSLGSGSCSALIKLLPGQSDLLVAHNTWNNYQHMLRVIKKYWLQFREGPWGDYPLVPGNKLVFSSYPGTIFSCDDFYILGSGLVTLETTIGNKNPALWKYVRPRGCVLEWVRNIVANRLASDGATWADIFKRFNSGTGMVVVADKTSELYQKTYWASYNIPSFETVFNASGLQALVAQYGDWFSYDGSPRAQIFRRNQSLVQDMDSMVRLMRYNDFLHDPLSLCKACNPQPNGENAISARSDLNPANGSYPFQALRQRSHGGIDVKVTSMSLARILSLLAASGPTWDQVPPFQWSTSPFSGLLHMGQPDLWKFAPVKVSWD

SEQ ID NO: 10512 - protein, 136 aa, Homo Sapiens
MEHKEVVLLLLLFLKSGQGEPLDDYVNTQGASLFSVTKKQLGAGSIEECAAKCEEDEEFTCRAFQYHSKEQQCVIMAENRKSSIIIRMRDVVLFEKKVYLSECKTGNGKNYRGTMSKTKNGITCQKWSSTSPHRPR

SEQ ID NO: 10513 - protein, 810 aa, Homo Sapiens
MEHKEVVLLLLLFLKSGQGEPLDDYVNTQGASLFSVTKKQLGAGSIEECAAKCEEDEEFTCRAFQYHSKEQQCVIMAENRKSSIIIRMRDVVLFEKKVYLSECKTGNGKNYRGTMSKTKNGITCQKWSSTSPHRPRFSPATHPSEGLEENYCRNPDNDPQGPWCYTTDPEKRYDYCDILECEEECMHCSGENYDGKISKTMSGLECQAWDSQSPHAHGYIPSKFPNKNLKKNYCRNPDRELRPWCFTTDPNKRWELCDIPRCTTPPPSSGPTYQCLKGTGENYRGNVAVTVSGHTCQHWSAQTPHTHNRTPENFPCKNLDENYCRNPDGKRAPWCHTTNSQVRWEYCKIPSCDSSPVSTEQLAPTAPPELTPVVQDCYHGDGQSYRGTSSTTTTGKKCQSWSSMTPHRHQKTPENYPNAGLTMNYCRNPDADKGPWCFTTDPSVRWEYCNLKKCSGTEASVVAPPPVVLLPDVETPSEEDCMFGNGKGYRGKRATTVTGTPCQDWAAQEPHRHSIFTPETNPRAGLEKNYCRNPDGDVGGPWCYTTNPRKLYDYCDVPQCAAPSFDCGKPQVEPKKCPGRVVGGCVAHPHSWPWQVSLRTRFGMHFCGGTLISPEWVLTAAHCLEKSPRPSSYKVILGAHQEVNLEPHVQEIEVSRLFLEPTRKDIALLKLSSPAVITDKVIPACLPSPNYVVADRTECFITGWGETQGTFGAGLLKEAQLPVIENKVCNRYEFLNGRVQSTELCAGHLAGGTDSCQGDSGGPLVCFEKDKYILQGVTSWGLGCARPNKPGVYVRVSRFVTWIEGVMRNN

SEQ ID NO: 10514 - protein, 166 aa, Homo Sapiens
MEHKEVVLLLLLFLKSGQGEPLDDYVNTQGASLFSVTKKQLGAGSIEECAAKCEEDEEFTCRYFHCRCTYAGICNSDGKAFQYHSKEQQCVIMAENRKSSIIIRMRDVVLFEKKVYLSECKTGNGKNYRGTMSKTKNGITCQKWSSTSPHRPRFSPATHPSEGLEE

SEQ ID NO: 10515 - protein, 96 aa, Homo Sapiens
MEHKEVVLLLLLFLKSGQGEPLDDYVNTQGPSLFSVTKKQLGAGSREECAAKCEEDKEFTCRAFQYHSKEQQCVIMAENRKSSIIIRMRDAVLFEK

SEQ ID NO: 10516 - protein, 96 aa, Homo Sapiens; identical to SEQ ID NO: 10515

SEQ ID NO: 10517 - protein, 96 aa, Homo Sapiens; identical to SEQ ID NO: 10515

SEQ ID NO: 10518 - protein, 89 aa, Homo Sapiens
MEHKEVVLLLLLFLKSGQGEPLDDYVNTQGPSLFSVTKKQLGAGSREECAAKCEEDKEFTCRYFHRRCTYPEICNSDGHSNITVKSNNV

SEQ ID NO: 10519 - protein, 96 aa, Homo Sapiens; identical to SEQ ID NO: 10515

SEQ ID NO: 10520 - protein, 96 aa, Homo Sapiens; identical to SEQ ID NO: 10515

SEQ ID NO: 10521 - protein, 225 aa, Homo Sapiens
MRPLLLLALLGWLLLAEAKGDAKPEAPCCQEGLRAGGSGSLHLGRDFTVLAGARGSPSPSVSSIPRFWIPGSDNLLVLTVATKETEGFRRFKRSAQFFNYKIQALGLGEDWNVEKGTSAGGGQKVRLLKKALEKHADKEDLVILFADSYDVLFASGPRELLKKFRQARSQVVFSAEELIYPDRRLETKYPVVSDGKRFLGSGGFIGYAPNLSKLVAEWEGQDSDS

SEQ ID NO: 10522 - protein, 727 aa, Homo Sapiens
MRPLLLLALLGWLLLAEAKGDAKPEDNLLVLTVATKETEGFRRFKRSAQFFNYKIQALGLGEDWNVEKGTSAGGGQKVRLLKKALEKHADKEDLVILFADSYDVLFASGPRELLKKFRQARSQVVFSAEELIYPDRRLETKYPVVSDGKRFLGSGGFIGYAPNLSKLVAEWEGQDSDSDQLFYTKIFLDPEKREQINITLDHRCRIFQNLDGALDEVVLKFEMGHVRARNLAYDTLPVLIHGNGPTKLQLNYLGNYIPRFWTFETGCTVCDEGLRSLKGIGDEALPTVLVGVFIEQPTPFVSLFFQRLLRLHYPQKHMRLFIHNHEQHHKAQVEEFLAQHGSEYQSVKLVGPEVRMANADARNMGADLCRQDRSCTYYFSVDADVALTEPNSLRLLIQQNKNVIAPLMTRHGRLWSNFWGALSADGYYARSEDYVDIVQGRRVGVWNVPYISNIYLIKGSALRGELQSSDLFHHSKLDPDMAFCANIRQQDVFMFLTNRHTLGHLLSLDSYRTTHLHNDLWEVFSNPEDWKEKYIHQNYTKALAGKLVETPCPDVYWFPIFTEVACDELVEEMEHFGQWSLGNNKDNRIQGGYENVPTIDIHMNQIGFEREWHKFLLEYIAPMTEKLYPGYYTRAQFDLAFVVRYKPDEQPSLMPHHDASTFTINIALNRVGVDYEGGGCRFLRYNCSIRAPRKGWTLMHPGRLTHYHEGLPTTRGTRYIAVSFVDP

SEQ ID NO: 10523 - protein, 283 aa, Homo Sapiens
MRPLLLLALLGWLLLAEAKGDAKPEDNLLVLTVATKETEGFRRFKRSAQFFNYKIQALGLGEDWNVEKGTSAGGGQKVRLLKKALEKHADKEDLVILFADSYDVLFASGPRELLKKFRQARSQVVFSAEELIYPDRRLETKYPVVSDGKRFLGSGGFIGYAPNLSKLVAEWEGQDSDSDQLFYTKIFLDPEKREQINITLDHRCRIFQNLDGALVSPWGQGHLPGACYELTASVLTSELSVMPSFPAVVLQLNYLGNYIPRFWTFETGCTVCDEGLRSLKGIG

SEQ ID NO: 10524 - protein, 98 aa, Homo Sapiens
MGGCTVKPQLLLLALVLHPWNPCLGADSEKPSSIPTDKLLVITVATKESDGFHRFMQSAKYFNYTVKKEGSVSQVFSTNKRRTRRYLGPWSRRRMERW

SEQ ID NO: 10525 - protein, 758 aa, Homo Sapiens
MGGCTVKPQLLLLALVLHPWNPCLGADSEKPSSIPTDKLLVITVATKESDGFHRFMQSAKYFNYTVKVLGQGEEWRGGDGINSIGGGQKVRLMKEVMEHYADQDDLVVMFTECFDVIFAGGPEEVLKKFQKANHKVVFAADGILWPDKRLADKYPVVHIGKRYLNSGGFIGYAPYVNRIVQQWNLQDNDDDQLFYTKVYIDPLKREAINITLDHKCKIFQTLNGAVDEVVLKFENGKARAKNTFYETLPVAINGNGPTKILLNYFGNYVPNSWTQDNGCTLCEFDTVDLSAVDVHPNVSIGVFIEQPTPFLPRFLDILLTLDYPKEALKLFIHNKEVYHEKDIKVFFDKAKHEIKTIKIVGPEENLSQAEARNMGMDFCRQDEKCDYYFSVDADVVLTNPRTLKILIEQNRKIIAPLVTRHGKLWSNFWGALSPDGYYARSEDYVDIVQGNRVGVWNVPYMANVYLIKGKTLRSEMNERNYFVRDKLDPDMALCRNAREMTLQREKDSPTPETFQMLSPPKGVFMYISNRHEFGRLLSTANYNTSHYNNDLWQIFENPVDWKEKYINRDYSKIFTENIVEQPCPDVFWFPIFSEKACDELVEEMEHYGKWSGGKHHDSRISGGYENVPTDDIHMKQVDLENVWLHFIREFIAPVTLKVFAGYYTKGFALLNFVVKYSPERQRSLRPHHDASTFTINIALNNVGEDFQGGGCKFLRYNCSIESPRKGWSFMHPGRLTHLHEGLPVKNGTRYIAVSFIDP

SEQ ID NO: 10526 - protein, 737 aa, Homo Sapiens
MGGCTVKPQLLLLALVLHPWNPCLGADSEKPSSIPTDKLLVITVATKESDGFHRFMQSAKYFNYTVKVLGQGEEWRGGDGINSIGGGQKVRLMKEVMEHYADQDDLVVMFTECFDVIFAGGPEEVLKKFQKANHKVVFAADGILWPDKRLADKYPVVHIGKRYLNSGGFIGYAPYVNRIVQQWNLQDNDDDQLFYTKVYIDPLKREAINITLDHKCKIFQTLNGAVDEVVLKFENGKARAKNTFYETLPVAINGNGPTKILLNYFGNYVPNSWTQDNGCTLCEFDTVDLSAVDVHPNVSIGVFIEQPTPFLPRFLDILLTLDYPKEALKLFIHNKEVYHEKDIKVFFDKAKHEIKTIKIVGPEENLSQAEARNMGMDFCRQDEKCDYYFSVDADVVLTNPRTLKILIEQNRKIIAPLVTRHGKLWSNFWGALSPDGYYARSEDYVDIVQGNRVGVWNVPYMANVYLIKGKTLRSEMNERNYFVRDKLDPDMALCRNAREMGVFMYISNRHEFGRLLSTANYNTSHYNNDLWQIFENPVDWKEKYINRDYSKIFTENIVEQPCPDVFWFPIFSEKACDELVEEMEHYGKWSGGKHHDSRISGGYENVPTDDIHMKQVDLENVWLHFIREFIAPVTLKVFAGYYTKGFALLNFVVKYSPERQRSLRPHHDASTFTINIALNNVGEDFQGGGCKFLRYNCSIESPRKGWSFMHPGRLTHLHEGLPVKNGTRYIAVSFIDP

SEQ ID NO: 10527 - protein, 418 aa, Homo Sapiens
MLENHILHKRIYILTFFSQQIFILCHAHFIFFFTVRDFCRQDEKCDYYFSVDADVVLTNPRTLKILIEQNRKIIAPLVTRHGKLWSNFWGALSPDGYYARSEDYVDIVQGNRVGVWNVPYMANVYLIKGKTLRSEMNERNYFVRDKLDPDMALCRNAREMTLQREKDSPTPETFQMLSPPKGVFMYISNRHEFGRLLSTANYNTSHYNNDLWQIFENPVDWKEKYINRDYSKIFTENIVEQPCPDVFWFPIFSEKACDELVEEMEHYGKWSGGKHHDSRISGGYENVPTDDIHMKQVDLENVWLHFIREFIAPVTLKVFAGYYTKGFALLNFVVKYSPERQRSLRPHHDASTFTINIALNNVGEDFQGGGCKFLRYNCSIESPRKGWSFMHPGRLTHLHEGLPVKNGTRYIAVSFIDP

SEQ ID NO: 10528 - protein, 703 aa, Homo Sapiens
MQSAKYFNYTVKVLGQGEEWRGGDGINSIGGGQKVRLMKEVMEHYADQDDLVVMFTECFDVIFAGGPEEVLKKFQKANHKVVFAADGILWPDKRLADKYPVVHIGKRYLNSGGFIGYAPYVNRIVQQWNLQDNDDDQLFYTKVYIDPLKREAINITLDHKCKIFQTLNGAVDEVVLKFENGKARAKNTFYETLPVAINGNGPTKILLNYFGNYVPNSWTQDNGCTLCEFDTVDLSAVDVHPNVSIGVFIEQPTPFLPRFLDILLTLDYPKEALKLFIHNKEVYHEKDIKVFFDKAKHEIKTIKIVGPEENLSQAEARNMGMDFCRQDEKCDYYFSVDADVVLTNPRTLKILIEQNRKIIAPLVTRHGKLWSNFWGALSPDGYYARSEDYVDIVQGNRVGVWNVPYMANVYLIKGKTLRSEMNERNYFVRDKLDPDMALCRNAREMTLQREKDSPTPETFQMLSPPKGVFMYISNRHEFGRLLSTANYNTSHYNNDLWQIFENPVDWKEKYINRDYSKIFTENIVEQPCPDVFWFPIFSEKACDELVEEMEHYGKWSGGKHHDSRISGGYENVPTDDIHMKQVDLENVWLHFIREFIAPVTLKVFAGYYTKGFALLNFVVKYSPERQRSLRPHHDASTFTINIALNNVGEDFQGGGCKFLRYNCSIESPRKGWSFMHPGRLTHLHEGLPVKNGTRYIAVSFIDP

SEQ ID NO: 10529 - protein, 229 aa, Homo Sapiens
MTRFGVRLYKLLVITVATKESDGFHRFMQSAKYFNYTVKVLGQGEEWRGGDGINSIGGGQKVRLMKEVMEHYADQDDLVVMFTECFDVIFAGGPEEVLKKFQKANHKVVFAADGILWPDKRLADKYPVVHIGKRYLNSGGFIGYAPYVNRIVQQWNLQDNDDDQLFYTKVYIDPLKREAINITLDHKCKIFQTLNGAVDEVVLKFENGKARAKNTFYETLPVAINGNGP

SEQ ID NO: 10530 - protein, 171 aa, Homo Sapiens
MGHFKDVVTVFLQEILFSFGPCEDAVITKAAPGASPGRRGEKLLVITVATAETEGYLRFLRSAEFFNYTVRTLGLGEEWRGGDVARTVGGGQKVRWLKKEMEKYADREDMIIMFVDSYDVILAGSPTELLKKFVQSGSRLLFSAESFCWPEWGLAEQYPEVGTGKRFLNSG

SEQ ID NO: 10531 - protein, 76 aa, Homo Sapiens
MTSSGPGPRFLLLLPLLLPPAASASDRPRGRDPVNPEKLLVITVATAETEGYLRFLRSAEFFNYTVRTLGLGEEWR

SEQ ID NO: 10532 - protein, 738 aa, Homo Sapiens
MTSSGPGPRFLLLLPLLLPPAASASDRPRGRDPVNPEKLLVITVATAETEGYLRFLRSAEFFNYTVRTLGLGEEWRGGDVARTVGGGQKVRWLKKEMEKYADREDMIIMFVDSYDVILAGSPTELLKKFVQSGSRLLFSAESFCWPEWGLAEQYPEVGTGKRFLNSGGFIGFATTIHQIVRQWKYKDDDDDQLFYTRLYLDPGLREKLSLNLDHKSRIFQNLNGALDEVVLKFDRNRVRIRNVAYDTLPIVVHGNGPTKLQLNYLGNYVPNGWTPEGGCGFCNQDRRTLPGGQPPPRVFLAVFVEQPTPFLPRFLQRLLLLDYPPDRVTLFLHNNEVFHEPHIADSWPQLQDHFSAVKLVGPEEALSPGEARDMAMDLCRQDPECEFYFSLDADAVLTNLQTLRILIEENRKVIAPMLSRHGKLWSNFWGALSPDEYYARSEDYVELVQRKRVGVWNVPYISQAYVIRGDTLRMELPQRDVFSGSDTDPDMAFCKSFRDKGIFLHLSNQHEFGRLLATSRYDTEHLHPDLWQIFDNPVDWKEQYIHENYSRALEGEGIVEQPCPDVYWFPLLSEQMCDELVAEMEHYGQWSGGRHEDSRLAGGYENVPTVDIHMKQVGYEDQWLQLLRTYVGPMTESLFPGYHTKARAVMNFVVRYRPDEQPSLRPHHDSSTFTLNVALNHKGLDYEGGGCRFLRYDCVISSPRKGWALLHPGRLTHYHEGLPTTWGTRYIMVSFVDP

SEQ ID NO: 10533 - protein, 125 aa, Homo Sapiens
TLGLGEEWRGGDVARTVGGGQKVRWLKKEMEKYADREDMIIMFVDSYDVILAGSPTELLKKFVQSGSRLLFSAESFCWPEWGLAEQYPEDSSVLPPPSTKSCASGSTRMMTTTSCSTHGSTWTQD

SEQ ID NO: 10534 - protein, 270 aa, Homo Sapiens
  misc_feature (1)..(1): Xaa can be any naturally occurring amino acid
XFIGFATTIHQIVRQWKYKDDDDDQLFYTRLYLDPGLREKLSLNLDHKSRIFQNLNGALDEVVLKFDRNRVRIRNVAYDTLPIVVHGNGPTKLQLNYLGNYVPNGWTPEGGCGFCNQDRRTLPGGQEVFHEPHIADSWPQLQDHFSAVKLVGPEEALSPGEARDMAMDLCRQDPECEFYFSLDADAVLTNLQTLRILIEENRKVIAPMLSRHGKLWSNFWGALSPDEYYARSEDYVELVQRKRVGVWNVPYISQAYVIRGDTLRMELPQR

SEQ ID NO: 10535 - protein, 66 aa, Homo Sapiens
  misc_feature (1)..(1): Xaa can be any naturally occurring amino acid
XFSLDADAVLTNLQTLRILIEENRKVIAPMLSRHGKLWSNFWGALSPDEYYARSEDYVELVQRKRV

SEQ ID NO: 10536 - protein, 264 aa, Homo Sapiens
  misc_feature (1)..(1): Xaa can be any naturally occurring amino acid
XNFWGALSPDEYYARSEDYVELVQRKRVGVWNVPYISQAYVIRGDTLRMELPQRDVFSGSDTDPDMAFCKSFRDKGIFLHLSNQHEFGRLLATSRYDTEHLHPDLWQIFDNPVDWKEQYIHENYSRALEGEGIVEQPCPDVYWFPLLSEQMCDELVAEMEHYGQWSGGRHEARAVMNFVVRYRPDEQPSLRPHHDSSTFTLNVALNHKGLDYEGGGCRFLRYDCVISSPRKGWALLHPGRLTHYHEGLPTTWGTRYIMVSFVDP

SEQ ID NO: 10537 - protein, 398 aa, Homo Sapiens
MALFGALFLALLAGAHAEFPGCKIRVTSKALELVKQEGLRFLEQELETITIPDLRGKEGHFYYNISEKVYDFLSTFITSGMRFLLNQQICPVLYHAGTVLLNSLLDTVPVRSSVDELVGIDYSLMKDPVASTSNLDMDFRGAFFPLTERNWSLPNRAVEPQLQEEERMVYVAFSEFFFDSAMESYFRAGALQLLLVGDKVPHDLDMLLRATYFGSIVLLSPAVIDSPLKLELRVLAPPRCTIKPSGTTISVTASVTIALVPPDQPEVQLSSMTMDARLSAKMALRGKALRTQLDLRRFRIYSNHSALESLALIPLQAPLKTMLQIGVMPMLNERTWRGVQIPLPEGINFVHEVVTNHAGFLTIGADLHFAKGLREVIEKNRPADVRASTAPTPSTAAV

SEQ ID NO: 10538 - protein, 493 aa, Homo Sapiens
MALFGALFLALLAGAHAEFPGCKIRVTSKALELVKQEGLRFLEQELETITIPDLRGKEGHFYYNISEVKVTELQLTSSELDFQPQQELMLQITNASLGLRFRRQLLYWFFYDGGYINASAEGVSIRTGLELSRDPAGRMKVSNVSCQASVSRMHAAFGGTFKKVYDFLSTFITSGMRFLLNQQICPVLYHAGTVLLNSLLDTVPVRSSVDELVGIDYSLMKDPVASTSNLDMDFRGAFFPLTERNWSLPNRAVEPQLQEEERMVYVAFSEFFFDSAMESYFRAGALQLLLVGDKVPHDLDMLLRATYFGSIVLLSPAVIDSPLKLELRVLAPPRCTIKPSGTTISVTASVTIALVPPDQPEVQLSSMTMDARLSAKMALRGKALRTQLDLRRFRIYSNHSALESLALIPLQAPLKTMLQIGVMPMLNERTWRGVQIPLPEGINFVHEVVTNHAGFLTIGADLHFAKGLREVIEKNRPADVRASTAPTPSTAAV

SEQ ID NO: 10539 - protein, 493 aa, Homo Sapiens; identical to SEQ ID NO: 10538

SEQ ID NO: 10540 - protein, 441 aa, Homo Sapiens
MALFGALFLALLAGAHAEFPGCKIRVTSKALELVKQEGLRFLEQELETITIPDLRGKEGHFYYNISEVKVTELQLTSSELDFQPQQELMLQITNASLGLRFRRQLLYWFLKVYDFLSTFITSGMRFLLNQQICPVLYHAGTVLLNSLLDTVPVRSSVDELVGIDYSLMKDPVASTSNLDMDFRGAFFPLTERNWSLPNRAVEPQLQEEERMVYVAFSEFFFDSAMESYFRAGALQLLLVGDKVPHDLDMLLRATYFGSIVLLSPAVIDSPLKLELRVLAPPRCTIKPSGTTISVTASVTIALVPPDQPEVQLSSMTMDARLSAKMALRGKALRTQLDLRRFRIYSNHSALESLALIPLQAPLKTMLQIGVMPMLNERTWRGVQIPLPEGINFVHEVVTNHAGFLTIGADLHFAKGLREVIEKNRPADVRASTAPTPSTAAV

SEQ ID NO: 10541 - protein, 405 aa, Homo Sapiens
MLQITNASLGLRFRRQLLYWFFYDGGYINASAEGVSIRTGLELSRDPAGRMKVSNVSCQASVSRMHAAFGGTFKKVYDFLSTFITSGMRFLLNQQICPVLYHAGTVLLNSLLDTVPVRSSVDELVGIDYSLMKDPVASTSNLDMDFRGAFFPLTERNWSLPNRAVEPQLQEEERMVYVAFSEFFFDSAMESYFRAGALQLLLVGDKVPHDLDMLLRATYFGSIVLLSPAVIDSPLKLELRVLAPPRCTIKPSGTTISVTASVTIALVPPDQPEVQLSSMTMDARLSAKMALRGKALRTQLDLRRFRIYSNHSALESLALIPLQAPLKTMLQIGVMPMLNERTWRGVQIPLPEGINFVHEVVTNHAGFLTIGADLHFAKGLREVIEKNRPADVRASTAPTPSTAAV

SEQ ID NO: 10542 - protein, 1894 aa, Homo Sapiens
MKAMPWNWTCLLSHLLMVGMGSSTLLTRQPAPLSQKQRSFVTFRGEPAEGFNHLVVDERTGHIYLGAVNRIYKLSSDLKVLVTHETGPDEDNPKCYPPRIVQTCNEPLTTTNNVNKMLLIDYKENRLIACGSLYQGICKLLRLEDLFKLGEPYHKKEHYLSGVNESGSVFGVIVSYSNLDDKLFIATAVDGKPEYFPTISSRKLTKNSEADGMFAYVFHDEFVASMIKIPSDTFTIIPDFDIYYVYGFSSGNFVYFLTLQPEMVSPPGSTTKEQVYTSKLVRLCKEDTAFNSYVEVPIGCERSGVEYRLLQAAYLSKAGAVLGRTLGVHPDDDLLFTVFSKGQKRKMKSLDESALCIFILKQINDRIKERLQSCYRGEGTLDLAWLKVKDIPCSSALLTIDDNFCGLDMNAPLGVSDMVRGIPVFTEDRDRMTSVIAYVYKNHSLAFVGTKSGKLKKIRVDGPRGNALQYETVQVVDPGPVLRDMAFSKDHEQLYIMSERQLTRVPVESCGQYQSCGECLGSGDPHCGWCVLHNTCTRKERCERSKEPRRFASEMKQCVRLTVHPNNISVSQYNVLLVLETYNVPELSAGVNCTFEDLSEMDGLVVGNQIQCYSPAAKEVPRIITENGDHHVVQLQLKSKETGMTFASTSFVFYNCSVHNSCLSCVESPYRCHWCKYRHVCTHDPKTCSFQEGRVKLPEDCPQLLRVDKILVPVEVIKPITLKAKNLPQPQSGQRGYECILNIQGSEQRVPALRFNSSSVQCQNTSYSYEGMEINNLPVELTVVWNGHFNIDNPAQNKVHLYKCGAMRESCGLCLKADPDFACGWCQGPGQCTLRQHCPAQESQWLELSGAKSKCTNPRITEIIPVTGPREGGTKVTIRGENLGLEFRDIASHVKVAGVECSPLVDGYIPAEQIVCEMGEAKPSQHAGFVEICVAVCRPEFMARSSQLYYFMTLTLSDLKPSRGPMSGGTQVTITGTNLNAGSNVVVMFGKQPCLFHRRSPSYIVCNTTSSDEVLEMKVSVQVDRAKIHQDLVFQYVEDPTIVRIEPEWSIVSGNTPIAVWGTHLDLIQNPQIRAKHGGKEHINICEVLNATEMTCQAPALALGPDHQSDLTERPEEFGFILDNVQSLLILNKTNFTYYPNPVFEAFGPSGILELKPGTPIILKGKNLIPPVAGGNVKLNYTVLVGEKPCTVTVSDVQLLCESPNLIGRHKVMARVGGMEYSPGMVYIAPDSPLSLPAIVSIAVAGGLLIIFIVAVLIAYKRKSRESDLTLKRLQMQMDNLESRVALECKEAFAELQTDIHELTSDLDGAGIPFLDYRTYTMRVLFPGIEDHPVLRDLEVPGYRQERVEKGLKLFAQLINNKVFLLSFIRTLESQRSFSMRDRGNVASLIMTVLQSKLEYATDVLKQLLADLIDKNLESKNHPKLLLRRTESVAEKMLTNWFTFLLYKFLKECAGEPLFSLFCAIKQQMEKGPIDAITGEARYSLSEDKLIRQQIDYKTLVLSCVSPDNANSPEVPVKILNCDTITQVKEKILDAIFKNVPCSHRPKAADMDLEWRQGSGARMILQDEDITTKIENDWKRLNTLAHYQVPDGSVVALVSKQVTAYNAVNNSTVSRTSASKYENMIRYTGSPDSLRSRTPMITPDLESGVKMWHLVKNHEHGDQKEGDRGSKMVSEIYLTRLLATKGTLQKFVDDLFETIFSTAHRGSALPLAIKYMFDFLDEQADKHGIHDPHVRHTWKSNCLPLRFWVNMIKNPQFVFDIHKNSITDACLSVVAQTFMDSCSTSEHRLGKDSPSNKLLYAKDIPSYKNWVERYYSDIGKMPAISDQDMNAYLAEQSRMHMNEFNTMSALSEIFSYVGKYSEEILGPLDHDDQCGKQKLAYKLEQVITLMSLDS

SEQ ID NO: 10543 - protein, 1894 aa, Homo Sapiens; identical to SEQ ID NO: 10542

SEQ ID NO: 10544 - protein, 522 aa, Homo Sapiens
MKAMPWNWTCLLSHLLMVGMGSSTLLTRQPAPLSQKQRSFVTFRGEPAEGFNHLVVDERTGHIYLGAVNRIYKLSSDLKVLVTHETGPDEDNPKCYPPRIVQTCNEPLTTTNNVNKMLLIDYKENRLIACGSLYQGICKLLRLEDLFKLGEPYHKKEHYLSGVNESGSVFGVIVSYSNLDDKLFIATAVDGKPEYFPTISSRKLTKNSEADGMFAYVFHDEFVASMIKIPSDTFTIIPDFDIYYVYGFSSGNFVYFLTLQPEMVSPPGSTTKEQVYTSKLVRLCKEDTAFNSYVEVPIGCERSGVEYRLLQAAYLSKAGAVLGRTLGVHPDDDLLFTVFSKGQKRKMKSLDESALCIFILKQINDRIKERLQSCYRGEGTLDLAWLKVKDIPCSSALLTIDDNFCGLDMNAPLGVSDMVRGIPVFTEDRDRMTSVIAYVYKNHSLAFVGTKSGKLKKSFGTGPQGGITQEWIGVEGDPPGANIASQEQMLCVYLQCSSHKAISDQRVQPLLCCFLNVPGNSS

SEQ ID NO: 10545 - protein, 492 aa, Homo Sapiens
MKAMPWNWTCLLSHLLMVGMGSSTLLTRQPAPLSQKQRSFVTFRGEPAEGFNHLVVDERTGHIYLGAVNRIYKLSSDLKVLVTHETGPDEDNPKCYPPRIVQTCNEPLTTTNNVNKMLLIDYKENRLIACGSLYQGICKLLRLEDLFKLGEPYHKKEHYLSGVNESGSVFGVIVSYSNLDDKLFIATAVDGKPEYFPTISSRKLTKNSEADGMFAYVFHDEFVASMIKIPSDTFTIIPDFDIYYVYGFSSGNFVYFLTLQPEMVSPPGSTTKEQVYTSKLVRLCKEDTAFNSYVEVPIGCERSGVEYRLLQAAYLSKAGAVLGRTLGVHPDDDLLFTVFSKGQKRKMKSLDESALCIFILKQINDRIKERLQSCYRGEGTLDLAWLKVKDIPCSSALLTIDDNFCGLDMNAPLGVSDMVRGIPVFTEDRDRMTSVIAYVYKNHSLAFVGTKSGKLKKMPGTSLCPTLELQTGPRSHRATVTLELLFSSCSSN

SEQ ID NO: 10546 - protein, 160 aa, Homo Sapiens
GPDVTAGGPVEARQHPYALQCPGWSHPHPVQGGGLPAAGGQPAGPAWGAPCPPGGGEPGVAPGAADRRGGRGQVQERQREREGADEGHHRDLPDAAALSQGHTAAVCGQLLPERAGLGTRCHLQSSTSSTSWTSRQRSTTSRMKTPSTSGRRTAYRSGSG

SEQ ID NO: 10547 - protein, 162 aa, Homo Sapiens
MALQLWALTLLGLLGAGASLRPRKLDFFRSEKELNHLAVDEASGVVYLGAVNALYQLDAKLQLEQQVATGPALDNKKCTPPIEASQCHEAEMTDNVNQLLLLDPPRKRLVECGSLFKGICALRALSNISLRLFYEDGSGEKSFVASNDEGVATVGLVSSTGP

SEQ ID NO: 10548 - protein, 1838 aa, Homo Sapiens
MALQLWALTLLGLLGAGASLRPRKLDFFRSEKELNHLAVDEASGVVYLGAVNALYQLDAKLQLEQQVATGPALDNKKCTPPIEASQCHEAEMTDNVNQLLLLDPPRKRLVECGSLFKGICALRALSNISLRLFYEDGSGEKSFVASNDEGVATVGLVSSTGPGGDRVLFVGKGNGPHDNGIIVSTRLLDRTDSREAFEAYTDHATYKAGYLSTNTQQFVAAFEDGPYVFFVFNQQDKHPARNRTLLARMCREDPNYYSYLEMDLQCRDPDIHAAAFGTCLAASVAAPGSGRVLYAVFSRDSRSSGGPGAGLCLFPLDKVHAKMEANRNACYTGTREARDIFYKPFHGDIQCGGHAPGSSKSFPCGSEHLPYPLGSRDGLRGTAVLQRGGLNLTAVTVAAENNHTVAFLGTSDGRILKVYLTPDGTSSEYDSILVEINKRVKRDLVLSGDLGSLYAMTQDKVFRLPVQECLSYPTCTQCRDSQDPYCGWCVVEGRCTRKAECPRAEEASHWLWSRSKSCVAVTSAQPQNMSRRAQGEVQLTVSPLPALSEEDELLCLFGESPPHPARVEGEAVICNSPSSIPVTPPGQDHVAVTIQLLLRRGNIFLTSYQYPFYDCRQAMSLEENLPCISCVSNRWTCQWDLRYHECREASPNPEDGIVRAHMEDSCPQFLGPSPLVIPMNHETDVNFQGKNLDTVKGSSLHVGSDLLKFMEPVTMQESGTFAFRTPKLSHDANETLPLHLYVKSYGKNIDSKLHVTLYNCSFGRSDCSLCRAANPDYRCAWCGGQSRCVYEALCNTTSECPPPVITRIQPETGPLGGGIRITILGSNLGVQAGDIQRISVAGRNCSFQPERYSVSTRIVCVIEAAETPFTGGVEVDVFGKLGRSPPNVQFTFQQPKPLSVEPQQGPQAGGTTLTIHGTHLDTGSQEDVRVTLNGVPCKVTKFGAQLQCVTGPQATRGQMLLEVSYGGSPVPNPGIFFTYRENPVLRAFEPLRSFASGGRSINVTGQGFSLIQRFAMVVIAEPLQSWQPPREAESLQPMTVVGTDYVFHNDTKVVFLSPAVPEEPEAYNLTVLIEMDGHRALLRTEAGAFEYVPDPTFENFTGGVKKQVNKLIHARGTNLNKAMTLQEAEAFVGAERCTMKTLTETDLYCEPPEVQPPPKRRQKRDTTHNLPEFIVKFGSREWVLGRVEYDTRVSDVPLSLILPLVIVPMVVVIAVSVYCYWRKSQQAEREYEKIKSQLEGLEESVRDRCKKEFTDLMIEMEDQTNDVHEAGIPVLDYKTYTDRVFFLPSKDGDKDVMITGKLDIPEPRRPVVEQALYQFSNLLNSKSFLINFIHTLENQREFSARAKVYFASLLTVALHGKLEYYTDIMHTLFLELLEQYVVAKNPKLMLRRSETVVERMLSNWMSICLYQYLKDSAGEPLYKLFKAIKHQVEKGPVDAVQKKAKYTLNDTGLLGDDVEYAPLTVSVIVQDEGVDAIPVKVLNCDTISQVKEKIIDQVYRGQPCSCWPRPDSVVLEWRPGSTAQILSDLDLTSQREGRWKRVNTLMHYNVRDGATLILSKVGVSQQPEDSQQDLPGERHALLEEENRVWHLVRPTDEVDEGKSKRGSVKEKERTKAITEIYLTRLLSVKGTLQQFVDNFFQSVLAPGHAVPPAVKYFFDFLDEQAEKHNIQDEDTIHIWKTNSLPLRFWVNILKNPHFIFDVHVHEVVDASLSVIAQTFMDACTRTEHKLSRDSPSNKLLYAKEISTYKKMVEDYYKGIRQMVQVSDQDMNTHLAEISRAHTDSLNTLVALHQLYQYTQKYYDEIINALEEDPAAQKMQLAFRLQQIAAALENKVTDL

SEQ ID NO: 10549 - protein, 477 aa, Homo Sapiens
MALQLWALTLLGLLGAGASLRPRKLDFFRSEKELNHLAVDEASGVVYLGAVNALYQLDAKLQLEQQVATGPALDNKKCTPPIEASQCHEAEMTDNVNQLLLLDPPRKRLVECGSLFKGICALRALSNISLRLFYEDGSGEKSFVASNDEGVATVGLVSSTGPGGDRVLFVGKGNGPHDNGIIVSTRLLDRTDSREAFEAYTDHATYKAGYLSTNTQQFVAAFEDGPYVFFVFNQQDKHPARNRTLLARMCREDPNYYSYLEMDLQCRDPDIHAAAFGTCLAASVAAPGSGRVLYAVFSRDSRSSGGPGAGLCLFPLDKVHAKMEANRNACYTGTREARDIFYKPFHGDIQCGGHAPGSSKSFPCGSEHLPYPLGSRDGLRGTAVLQRGGLNLTAVTVAAENNHTVAFLGTSDGRILKVYLTPDGTSSEYDSILVEINKRVKRDLVLSGDLGSLYAMTQDKVFRLPVQECLSYPTCTQ

SEQ ID NO: 10550 - protein, 1838 aa, Homo Sapiens; identical to SEQ ID NO: 10548

SEQ ID NO: 10551 - protein, 347 aa, Homo Sapiens [sequence omitted]

SEQ ID NO: 10552 - protein, 189 aa, Homo Sapiens
  misc_feature (1)..(1): Xaa can be any naturally occurring amino acid
XEVWGAAPVCHWPPGDTGPDASGGLLRGVPRAQPRHLLHLPRKPRTASLRAATKLCQVVGTDYVFHNDTKVVFLSPAVPEEPEAYNLTVLIEMDGHRALLRTEAGAFEYVPDPTFENFTGGVKKQVNKLIHARGTNLNKAMTLQEAEAFVGAERCTMKTLTETDLYCEPPEVQPPPKRRQKRDTTHNLP

SEQ ID NO: 10553 - protein, 84 aa, Homo Sapiens
  misc_feature (1)..(1): Xaa can be any naturally occurring amino acid
XTDVNFQGKNLDTVKVWMSGGGGRGKPTEDVQRLLQTQGSSLHVGSDLLKFMEPVTMQESGTFAFRTPKLSHDANETLPLHLYV

SEQ ID NO: 10554 - protein, 234 aa, Homo Sapiens
YKPFHGDIQCGGHAPGSSKSFPCGSEHLPYPLGSRDGLRGTAVLQRGGLNLTAVTVAAENNHTVAFLEWRPGSTAQILSDLDLTSQREGRWKRVNTLMHYNVRDGATLILSKVGVSQQPEDSQQDLPGERHALLEEENRVWHLVRPTDEVDEGKSKRGSVKEKERTKAITEIYLTRLLSVKGTLQQFVDNFFQSVLAPGHAVPPAVKYFFDFLDEQAEKHNIQDEDTIHIWKTN

SEQ ID NO: 10555 - protein, 502 aa, Homo Sapiens
MAQRCVCVLALVAMLLLVFPTVSRSMGPRSGEHQRASRIPSQFSKEERVAMKEALKGAIQIPTVTFSSEKSNTTALAEFGKYIHKVFPTVVSTSFIQHEVVEEYSHLFTIQGSDPSLQPYLLMAHFDVVPAPEEGWEVPPFSGLERDGIIYGRGTLDDKNSVMALLQALELLLIRKYIPRRSFFISLGHDEESSGTGAQRISALLQSRGVQLAFIVDEGGFILDDFIPNFKKPIALIAVSEKGSMNLMLQVNMTSGHSSAPPKETSIGILAAAVSRLEQTPMPIIFGSGTVVTVLQQLANEFPFPVNIILSNPWLFEPLISRFMERNPLTNAIIRTTTALTIFKAGVKFNVIPPVAQATVNFRIHPGQTVQEVLELTKNIVADNRVQFHVLSAFDPLPVSPSDDKALGYQLLRQTVQSVFPEVNITAPVTSIGNTDSRFFTNLTTGIYRFYPIYIQPEDFKRIHGVNEKISVQAYETQVKFIFELIQNADTDQEPVSHLHKL

SEQ ID NO: 10556 - protein, 165 aa, Homo Sapiens
MAKMNLSSYILILTFSLFSQGILLSASKSIRNLDDDMVFNTFRLGKGFQKEDTAEKSVIAPSLEQYKNDESSFMNEEENKVSKNTGSKHNFLNHGLPLNLAIKPYLALKGSVAFPAENGVQNTESTQEKREIGDEENSAKFPIGRRDFDMLRCMLGRVYRPCWQV

SEQ ID NO: 10557 - protein, 290 aa, Homo Sapiens
MDLVLKRCLLHLAVIGALLAVGATKGGQVSLKVSNDGPTLIGANASFSIALNFPGSQKVLPDGQVIWVNNTIINGSQVWGGQPVYPQETDDACIFPDGGPCPSGSWSQKRSFVYVWKTWEGIESAEILQAVPSGEGDAFELTVSCQGGLPKEACMEISSPGCQPPAQRLCQPVLPSPACQLVLHQILKGGSGTYCLNVSLADTNSLAVVSTQLIMPGQEAGLGQVPLIVGILLVLMAVVLASLIYRRRLMKQDFSVPQLPHSSSHWLRLPRIFCSCPIGENSPLLSGQQV

SEQ ID NO: 10558 - protein, 575 aa, Homo Sapiens
MDLVLKRCLLHLAVIGALLAVGATKGSQVWGGQPVYPQETDDACIFPDGGPCPSGSWSQKRSFVYVWKTWGQYWQVLGGPVSGLSIGTGRAMLGTHTMEVTVYHRRGSRSYVPLAHSSSAFTITDQVPFSVSVSQLRALDGGNKHFLRNQPLTFALQLHDPSGYLAEADLSYTWDFGDSSGTLISRALVVTHTYLEPGPVTAQVVLQAAIPLTSCGSSPVPGTTDGHRPTAEAPNTTAGQVPTTEVVGTTPGQAPTAEPSGTTSVQVPTTEVISTAPVQMPTAESTGMTPEKVPVSEVMGTTLAEMSTPEATGMTPAEVSIVVLSGTTAAQVTTTEWVETTARELPIPEPEGPDASSIMSTESITGSLGPLLDGTATLRLVKRQVPLDCVLYRYGSFSVTLDIVQGIESAEILQAVPSGEGDAFELTVSCQGGLPKEACMEISSPGCQPPAQRLCQPVLPSPACQLVLHQILKGGSGTYCLNVSLADTNSLAVVSTQLIMPGQEAGLGQVPLIVGILLVLMAVVLASLIYRRRLMKQDFSVPQLPHSSSHWLRLPRIFCSCPIGENSPLLSGQQV

SEQ ID NO: 10559 - protein, 151 aa, Homo Sapiens
MDLVLKRCLLHLAVIGALLAVGATKVPRNQDWLGVSRQLRTKAWNRQLYPEWTEAQRLDCWRGGQVSLKVSNDGPTLIGANASFSIALNFPGSQKVLPDGQVIWVNNTIINGSQVWGGQPVYPQETDDACIFPDGGPCPSGSWSQKRSFVY

SEQ ID NO: 10560 - protein, 344 aa, Homo Sapiens
MDLVLKRCLLHLAVIGALLAVGATKVPRNQDWLGVSRQLRTKAWNRQLYPEWTEAQRLDCWRGGQVSLKVSNDGPTLIGANASFSIALNFPGSQKVLPDGQVIWVNNTIINGSQVWGGQPVYPQETDDACIFPDGGPCPSGSWSQKRSFVYVWKTWDQVPFSVSVSQLRALDGGNKHFLRNQPLTFALQLHDPSGYLAEADLSYTWDFGDSSGTLISRALVVTHTYLEPGPVTAQVVLQAAIPLTSCGSSPVPGTTDGHRPTAEAPNTTAGQVPTTEVVGTTPGQAPTAEPSGTTSVQVPTTEVISTAPVQMPTAESTGMTPEKVPVSEVMGTTLAEMSTPEAT

SEQ ID NO: 10561 - protein, 668 aa, Homo Sapiens
MDLVLKRCLLHLAVIGALLAVGATKVPRNQDWLGVSRQLRTKAWNRQLYPEWTEAQRLDCWRGGQVSLKVSNDGPTLIGANASFSIALNFPGSQKVLPDGQVIWVNNTIINGSQVWGGQPVYPQETDDACIFPDGGPCPSGSWSQKRSFVYVWKTWGQYWQVLGGPVSGLSIGTGRAMLGTHTMEVTVYHRRGSRSYVPLAHSSSAFTITDQVPFSVSVSQLRALDGGNKHFLRNQPLTFALQLHDPSGYLAEADLSYTWDFGDSSGTLISRALVVTHTYLEPGPVTAQVVLQAAIPLTSCGSSPVPGTTDGHRPTAEAPNTTAGQVPTTEVVGTTPGQAPTAEPSGTTSVQVPTTEVISTAPVQMPTAESTGMTPEKVPVSEVMGTTLAEMSTPEATGMTPAEVSIVVLSGTTAAQVTTTEWVETTARELPIPEPEGPDASSIMSTESITGSLGPLLDGTATLRLVKRQVPLDCVLYRYGSFSVTLDIVQGIESAEILQAVPSGEGDAFELTVSCQGGLPKEACMEISSPGCQPPAQRLCQPVLPSPACQLVLHQILKGGSGTYCLNVSLADTNSLAVVSTQLIMPVPGILLTGQEAGLGQVPLIVGILLVLMAVVLASLIYRRRLMKQDFSVPQLPHSSSHWLRLPRIFCSCPIGENSPLLSGQQV

SEQ ID NO: 10562 - protein, 661 aa, Homo Sapiens
MDLVLKRCLLHLAVIGALLAVGATKVPRNQDWLGVSRQLRTKAWNRQLYPEWTEAQRLDCWRGGQVSLKVSNDGPTLIGANASFSIALNFPGSQKVLPDGQVIWVNNTIINGSQVWGGQPVYPQETDDACIFPDGGPCPSGSWSQKRSFVYVWKTWGQYWQVLGGPVSGLSIGTGRAMLGTHTMEVTVYHRRGSRSYVPLAHSSSAFTITDQVPFSVSVSQLRALDGGNKHFLRNQPLTFALQLHDPSGYLAEADLSYTWDFGDSSGTLISRALVVTHTYLEPGPVTAQVVLQAAIPLTSCGSSPVPGTTDGHRPTAEAPNTTAGQVPTTEVVGTTPGQAPTAEPSGTTSVQVPTTEVISTAPVQMPTAESTGMTPEKVPVSEVMGTTLAEMSTPEATGMTPAEVSIVVLSGTTAAQVTTTEWVETTARELPIPEPEGPDASSIMSTESITGSLGPLLDGTATLRLVKRQVPLDCVLYRYGSFSVTLDIVQGIESAEILQAVPSGEGDAFELTVSCQGGLPKEACMEISSPGCQPPAQRLCQPVLPSPACQLVLHQILKGGSGTYCLNVSLADTNSLAVVSTQLIMPGQEAGLGQVPLIVGILLVLMAVVLASLIYRRRLMKQDFSVPQLPHSSSHWLRLPRIFCSCPIGENSPLLSGQQV

SEQ ID NO: 10563 - protein, 661 aa, Homo Sapiens; identical to SEQ ID NO: 10562

SEQ ID NO: 10564 - protein, 661 aa, Homo Sapiens; identical to SEQ ID NO: 10562

SEQ ID NO: 10565 - protein, 296 aa, Homo Sapiens
MDLVLKRCLLHLAVIGALLAVGATKVPRNQDWLGVSRQLRTKAWNRQLYPEWTEAQRLDCWRGGQVSLKVSNDGPTLIGANASFSIALNFPGSQKVLPDGQVIWVNNTIINGSQVWGGQPVYPQETDDACIFPDGGPCPSGSWSQKRSFVYVWKTWVPGTTDGHRPTAEAPNTTAGQVPTTEVVGTTPGQAPTAEPSGTTSVQVPTTEVISTAPVQMPTAESTAAQVTTTEWVETTARELPIPEPEGPDASSIMSTESITGSLGPLLDGTATLRLVKRQVPLDCVLYRYGSFSVTL

SEQ ID NO: 10566 - protein, 299 aa, Homo Sapiens
MDLVLKRCLLHLAVIGALLAVGATKVPRNQDWLGVSRQLRTKAWNRQLYPEWTEAQRLDCWRGSQVWGGQPVYPQETDDACIFPDGGPCPSGSWSQKRSFVYVWKTWGQYWQVLGGPVSGLSIGTGRAMLGTHTMEVTVYHRRGSRSYVPLAHSSSAFTITDQVPFSVSVSQLRALDGGNKHFLRNQPLTFALQLHDPSGYLAEADLSYTWDFGDSSGTLISRALVVTHTYLEPGPVTAQVVLQAAIPLTSCGSSPVPGTTDGHRPTAEAPNTTAGQVPTTEVVGTTPGQAPTAEPSGT

SEQ ID NO: 10567 - protein, 134 aa, Homo Sapiens
MGKEEIPRPTLTSVKTLLYTKEFPQTVKVPRNQDWLGVSRQLRTKAWNRQLYPEWTEAQRLDCWRGGQVSLKVSNDGPTLIGANASFSIALNFPGSQKVLPDGQVIWVNNTIINGSQVWGGQPVYPQETDDACI

SEQ ID NO: 10568 - protein, 452 aa, Homo Sapiens
  misc_feature (1)..(1): Xaa can be any naturally occurring amino acid
XQVWGGQPVYPQETDDACIFPDGGPCPSGSWSQKRSFVYVWKTWGQYWQVLGGPVSGLSIGTGRAMLGTHTMEVTVYHRRGSRSYVPLAHSSSAFTITDQVPFSVSVSQLRALDGGNKHFLRNQPLTFALQLHDPSGYLAEADLSYTWDFGDSSGTLISRALVVTHTYLEPGPVTAQVVLQAAIPLTSCGSSPVPGTTDGHRPTAEAPNTTAGQVPTTEVVGTTPGQAPTAEPSGTTSVQVPTTEVISTAPVQMPTAESTAAQVTTTEWVETTARELPIPEPEGPDASSIMSTESITGSLGPLLDGTATLRLVKRQVPLDCVLYRYGSFSVTLDIVQGIESAEILQAVPSGEGDAFELTVSCQGGLPKEACMEISSPGCQPPAQRLCQPVLPSPACQLVLHQILKGGSGTYCLNVSLADTNSLAVVSTQLIMPVPGILLTGQEAGLGQVPLI

SEQ ID NO: 10569 - protein, 252 aa, Homo Sapiens
MAELEFVQIIIIVVVMMVMVVVITCLLSHYKLSARSFISRHSQGRRREDALSSEGCLWPSESTVSGNGIPEPQVYAPPRPTDRLAVPPFAQRERFHRFQPTYPYLQHEIDLPPTISLSDGEEPPPYQGPCTLQLRDPEQQLELNRESVRAPPNRTIFDSDLMDSARLGGPCPPSSNSGISATCYGSGGRMEGPPPTYSEVIGHYPGSSFQHQQSSGPPSLLEGTRLHHTHIAPLESAAIWSKEKDKQKGHPL

SEQ ID NO: 10570 - protein, 227 aa, Homo Sapiens
MHRLMGVNSTAAAAAGQPNVSCTCNCKRSLFQSMEISCHGFPVCKSHQHQEWKSLCWSLRSPGGASSITGFGSMKVTNPAMNLPECQWLRIQKAELEFVQIIIIVVVMMVMVVVITCLLSHYKLSARSFISRHSQGRRREDALSSEGCLWPSESTVSGNGIPEPQVYAPPRPTDRLAVPPFAQRERFHRFQPTYPYLQHEIDLPPTISLSDGEEPPPYQGPCTLQLR

SEQ ID NO: 10571 - protein, 287 aa, Homo Sapiens
MHRLMGVNSTAAAAAGQPNVSCTCNCKRSLFQSMEITELEFVQIIIIVVVMMVMVVVITCLLSHYKLSARSFISRHSQGRRREDALSSEGCLWPSESTVSGNGIPEPQVYAPPRPTDRLAVPPFAQRERFHRFQPTYPYLQHEIDLPPTISLSDGEEPPPYQGPCTLQLRDPEQQLELNRESVRAPPNRTIFDSDLMDSARLGGPCPPSSNSGISATCYGSGGRMEGPPPTYSEVIGHYPGSSFQHQQSSGPPSLLEGTRLHHTHIAPLESAAIWSKEKDKQKGHPL

SEQ ID NO: 10572 - protein, 237 aa, Homo Sapiens
MMVMVVVITCLLSHYKLSARSFISRHSQGRRREDALSSEGCLWPSESTVSGNGIPEPQVYAPPRPTDRLAVPPFAQRERFHRFQPTYPYLQHEIDLPPTISLSDGEEPPPYQGPCTLQLRDPEQQLELNRESVRAPPNRTIFDSDLMDSARLGGPCPPSSNSGISATCYGSGGRMEGPPPTYSEVIGHYPGSSFQHQQSSGPPSLLEGTRLHHTHIAPLESAAIWSKEKDKQKGHPL

SEQ ID NO: 10573 - protein, 237 aa, Homo Sapiens; identical to SEQ ID NO: 10572

SEQ ID NO: 10574 - protein, 237 aa, Homo Sapiens; identical to SEQ ID NO: 10572

SEQ ID NO: 10575 - protein, 208 aa, Homo Sapiens
MPAIPAHGAELEFVQIIIIVVVMMVMVVVITCLLSHYKLSARSFISRHSQGRRREDALSSEGCLWPSESTVSGNGIPEPQVYAPPRPTDRLAVPPFAQRERFHRFQPTYPYLQHEIDLPPTISLSDGEEPPPYQGPCTLQLRDPEQQLELNRESVRAPPNRTIFDSDLMDSARLGGPCPPSSNSGISATCYGSGGRMEGPPPTYSEVI

SEQ ID NO: 10576 - protein, 465 aa, Homo Sapiens
MLPLWTLSLLLGAVAGKEVCYERLGCFSDDSPWSGITERPLHILPWSPKDVNTRFLLYTNENPNNFQEVAADSSSISGSNFKTNRKTRFIIHGFIDKGEENWLANVCKNLFKVESVNCICVDWKGGSRTGYTQASQNIRIVGAEVAYFVEFLQSAFGYSPSNVHVIGHSLGAHAAGEAGRRTNGTIGRITGLDPAEPCFQGTPELVRLDPSDAKFVDVIHTDGAPIVPNLGFGMSQVVGHLDFFPNGGVEMPGCKKNILSQIVDIDGIWEGTRDFAACNHLRSYKYYTDSIVNPDGFAGFPCASYNVFTANKCFPCPSGGCPQMGHYADRYPGKTNDVGQKFYLDTGDASNFARWRYKVSVTLSGKKVTGHILVSLFGNKGNSKQYEIFKGTLKPDSTHSNEFDSDVDVGDLQMVKFIWYNNVINPTLPRVGASKIIVETNVGKQFNFCSPETVREEVLLTLTPC

SEQ ID NO: 10577 - protein, 179 aa, Homo Sapiens
KLFEVEEVNCICVDWKKGSQATYTQAANNVRVVGAQVAQMLDILLTEYSYPPSKVHLIGHSLGAHVAGEAGSKTPGLSRITGLDPVEASFESTPEEVRLDPSDADFVDVIHTDAAPLIPFLGFGTNQQMGHLDFFPNGGESMPGCKKNALSQIVDLDGIWAGQVLPVSRSRMPTDGSLC

SEQ ID NO: 10578 - protein, 132 aa, Homo Sapiens
MLIFWTITLFLLGAAKGKEVCYEDLGCFSDTEPWGGTAIRPLKILPWSPEKIGTRFLLYTNENPNNFQILLLSDPSTIEASNFQMDRKTRFIIHGFIDKGDESWVTDMCKKLFEVEEVNCICVDWKKGSQAT

SEQ ID NO: 10579 - protein, 191 aa, Homo Sapiens
MLIFWTITLFLLGAAKGKEVCYEDLGCFSDTEPWGGTAIRPLKILPWSPEKIGTRFLLYTNENPNNFQILLLSDPSTIEASNFQMDRKTRFIIHGFIDKGDESWVTDMCKKLFEVEEVNCICVDWKKGSQATYTQAANNVRVVGAQVAQMLDILLTEYSYPPSKVHLIGHSLGAHVAGEAGSKTPGLSRIT

SEQ ID NO: 10580 - protein, 467 aa, Homo Sapiens
MLIFWTITLFLLGAAKGKEVCYEDLGCFSDTEPWGGTAIRPLKILPWSPEKIGTRFLLYTNENPNNFQILLLSDPSTIEASNFQMDRKTRFIIHGFIDKGDESWVTDMCKKLFEVEEVNCICVDWKKGSQATYTQAANNVRVVGAQVAQMLDILLTEYSYPPSKVHLIGHSLGAHVAGEAGSKTPGLSRITGLDPVEASFESTPEEVRLDPSDADFVDVIHTDAAPLIPFLGFGTNQQMGHLDFFPNGGESMPGCKKNALSQIVDLDGIWAGTRDFVACNHLRSYKYYLESILNPDGFAAYPCTSYKSFESDKCFPCPDQGCPQMGHYADKFAGRTSEEQQKFFLNTGEASNFARWRYGVSITLSGRTATGQIKVALFGNKGNTHQYSIFRGILKPGSTHSYEFDAKLDVGTIEKVKFLWNNNVINPTLPKVGATKITVQKGEEKTVYNFCSEDTVREDTLLTLTPC

SEQ ID NO: 10581 - protein, 467 aa, Homo Sapiens; identical to SEQ ID NO: 10580

SEQ ID NO: 10582 - protein, 467 aa, Homo Sapiens
MLIFWTITLFLLGAAKGKEVCYEDLGCFSDTEPWGGTAIRPLKILPWSPEKIGTRFLLYTNENPNNFQILLLSDPSTIEASNFQMDRKTRFIIHGFIDKGDESWVTDMCKKLFEVEEVNCICVDWKKGSQATYTQAANNVRVVGAQVAQMLDILLVKYSYPPSKVHLIGHSLGAHVAGEAGSKTPGLSRITGLDPVEASFESTPEEVRLDPSDADFVDVIHTDAAPLIPFLGFGTNQQMGHLDFFPNGGESMPGCKKNALSQIVDLDGIWAGTRDFVACNHLRSYKYYLESILNPDGFAAYPCTSYKSFESDKCFPCPDQGCPQMGHYADKFAGRTSEEQQKFFLNTGEASNFARWRYGVSITLSGRTATGQIKVALFGNKGNTHQYSIFRGILKPGSTHSYEFDAKLDVGTIEKVKFLWNNNVINPTLPKVGATKITVQKGEEKTVYNFCSEDTVREDTLLTLTPC

SEQ ID NO: 10583 - protein, 118 aa, Homo Sapiens
MLIFWTITLFLLGAAKGKEVCYEDLGCFSDTEPWGGTAIRPLKILPWSPEKIGTRFLLYTNENPNNFQILLLSDPSTIEASNFQMDRKTRFIIHGFIDKGDESWVTDMCKQPGASPRA

SEQ ID NO: 10584 - protein, 185 aa, Homo Sapiens
MLIFWTITLFLLGAAKGKEVCYEDLGCFSDTEPWGGTAIRPLKILPWSPEKIGTRFLLYTNENPNNFQILLLSDPSTIEASNFQMDRKTRFIIHGFIDKGDESWVTDMCKTEYSYPPSKVHLIGHSLGAHVAGEAGSKTPGLSRITGLDPVEASFESTPEEVRLDPSDADFVDVIHTDAAPLIPF

SEQ ID NO: 10585 - protein, 163 aa, Homo Sapiens
MLIFWTITLFLLGAAKGKEVCYEDLGCFSDTEPWGGTAIRPLKILPWSPEKIGTRFLLYTNENPNNFQILLLSDPSTIEASNFQMDRKTRFIIHGFIDKGDESWVTDMCKTPGLSRITGLDPVEASFESTPEEVRLDPSDADFVDVIHTDAAPLIPFLGFGTN

SEQ ID NO: 10586 - protein, 467 aa, Homo Sapiens
MLGIWIVAFLFFGTSRGKEVCYERLGCFKDGLPWTRTFSTELVGLPWSPEKINTRFLLYTIHNPNAYQEISAVNSSTIQASYFGTDKITRINIAGWKTDGKWQRDMCNVLLQLEDINCINLDWINGSREYIHAVNNLRVVGAEVAYFIDVLMKKFEYSPSKVHLIGHSLGAHLAGEAGSRIPGLGRITGLDPAGPFFHNTPKEVRLDPSDANFVDVIHTNAARILFELGVGTIDACGHLDFYPNGGKHMPGCEDLITPLLKFNFNAYKKEMASFFDCNHARSYQFYAESILNPDAFIAYPCRSYTSFKAGNCFFCSKEGCPTMGHFADRFHFKNMKTNGSHYFLNTGSLSPFARWRHKLSVKLSGSEVTQGTVFLRVGGAVRKTGEFAIVSGKLEPGMTYTKLIDADVNVGNITSVQFIWKKHLFEDSQNKLGAEMVINTSGKYGYKSTFCSQDIMGPNILQNLKPC

SEQ ID NO: 10587 - protein, 112 aa, Homo Sapiens
MARSSWQLSPAAPEHVAAALYQPRASEMQHLRRMPRVRSLFQEQEEPEPGMEEAGEMEQKQLQKRFGGFTGARKSARKLANQKRFSEFMRQYLVLSMQSSQRRRTLHQNGNV

SEQ ID NO: 10588 - protein, 154 aa, Homo Sapiens
MKVLLCDLLLLSLFSSVFSSCQRDCLTCQEKLHPALDSFDLEVCILECEEKVFPSPLWTPCTKVMARSSWQLSPAAPEHVAAALYQPRASEMQHLRRMPRVRSLFQEQEEPEPGMEEAGEMEQKQLQKRFGGFTGARKSARKLANQKRFSEFMR

SEQ ID NO: 10589 - protein, 176 aa, Homo Sapiens
MKVLLCDLLLLSLFSSVFSSCQRDCLTCQEKLHPALDSFDLEVCILECEEKVFPSPLWTPCTKVMARSSWQLSPAAPEHVAAALYQPRASEMQHLRRMPRVRSLFQEQEEPEPGMEEAGEMEQKQLQKRFGGFTGARKSARKLANQKRFSEFMRQYLVLSMQSSQRRRTLHQNGNV

SEQ ID NO: 10590 - protein, 93 aa, Homo Sapiens
MENGYTYEDYKNTAEWLLSHTKHRPQVAIICGSGLGGLTDKLTQAQIFDYGEIPNFPRSTVPGHAGRLVFGFLNGRACVMMQGRFHMYEGYPL

SEQ ID NO: 10591 - protein, 289 aa, Homo Sapiens
MENGYTYEDYKNTAEWLLSHTKHRPQVAIICGSGLGGLTDKLTQAQIFDYGEIPNFPRSTVPGHAGRLVFGFLNGRACVMMQGRFHMYEGYPLWKVTFPVRVFHLLGVDTLVVTNAAGGLNPKFEVGDIMLIRDHINLPGFSGQNPLRGPNDERFGDRFPAMSDAYDRTMRQRALSTWKQMGEQRELQEGTYVMVAGPSFETVAECRVLQKLGADAVGMSTVPEVIVARHCGLRVFGFSLITNKVIMDYESLEKANHEEVLAAGKQAAQKLEQFVSILMASIPLPDKAS

SEQ ID NO: 10592 - protein, 61 aa, Homo Sapiens
MMQGRFHMYEGYPLWKVTFPVRVFHLLGVDTLVVTNAAGGLNPKFEVGDIMLIRDHINLPG

SEQ ID NO: 10593 - protein, 221 aa, Homo Sapiens
MQRGLALSLVSGARRQSHAAASAGRDARGNRAGVAPPEQEGDRYTYEDYKNTAEWLLSHTKHRPQVAIICGSGLGGLTDKLTQAQIFDYGEIPNFPRSTVPGHAGRLVFGFLNGRACVMMQGRFHMYEGYPLWKVTFPVRVFHLLGVDTLVVTNAAGGLNPKFEVGDIMLIRDHINLPGFSGQNPLRGPNDERFGDRFPAMSDAYDRTMRQRALSTWKQMG

SEQ ID NO: 10594 - protein, 166 aa, Homo Sapiens
MARLRSGMESILPPSAHELAQNRLHVSITNAKTRENHLVSTFSSREDLIKVLLASSFVPIYAGLKLVEYKGQKWVDGGLTNALPILPVGRTVTISPFSGRLDISPQDKGQLDLYVNIAKQDIMLSLANLVRLNQALFPPSKRKMESLYQCGFDDTVKFLLKENWFE

SEQ ID NO: 10595 - protein, 190 aa, Homo Sapiens
MKHINLSFAACGFLGIYHLGAASALCRHGKKLVKDVKAFAGASAGSLVASVLLTAPEKIEECNQFTYKFAEEIRRQSFGAVTPGYDFMARLRSGMESILPPSAHELAQNRLHVSITNAKTRENHLVSTFSSREDLIKVLLASSFVPIYAGLKLVEYKGQKWVDGGLTNALPILPVGRTVTISPFSGRLDI

SEQ ID NO: 10596 - protein, 253 aa, Homo Sapiens
MKHINLSFAACGFLGIYHLGAASALCRHGKKLVKDVKAFAGASAGSLVASVLLTAPEKIEECNQFTYKFAEEIRRQSFGAVTPGYDFMARLRSGMESILPPSAHELAQNRLHVSITNAKTRENHLVSTFSSREDLIKVLLASSFVPIYAGLKLVEYKGQKWVDGGLTNALPILPVGRTVTISPFSGRLDISPQDKGQLDLYVNIAKQDIMLSLANLVRLNQALFPPSKRKMESLYQCGFDDTVKFLLKENWFE

SEQ ID NO: 10597 - protein, 253 aa, Homo Sapiens; identical to SEQ ID NO: 10596

SEQ ID NO: 10598 - protein, 135 aa, Homo Sapiens
LQLQRNQLRMLEPEPLAGLDQLRELSLAHNRLRVGDIGPGTWHELQALQMLDLSHNELSFVPPDLPEALEELHLEGNRIGHVGPEAFLSTPRLRALFLRCPEGDRRGGGGQGRAWEGHDRLSVQGQQASHDEHRG

SEQ ID NO: 10599 - protein, 512 aa, Homo Sapiens
MAESGLAMWPSLLLLLLLPGPPPVAGLEDAAFPHLGESLQPLPRACPLRCSCPRVDTVDCDGLDLRVFPDNITRAAQHLSLQNNQLQELPYNELSRLSGLRTLNLHNNLISSEGLPDEAFESLTQLQHLCVAHNKLSVAPQFLPRSLRVADLAANQVMEIFPLTFGEKPALRSVYLHNNQLSNAGLPPDAFRGSEAIATLSLSNNQLSYLPPSLPPSLERLHLQNNLISKVPRGALSRQTQLRELYLQHNQLTDSGLDATTFSKLHSLEYLDLSHNQLTTVPAGLPRTLAILHLGRNRIRQVEAARLHGARGLRYLLLQHNQLGSSGLPAGALRPLRGLHTLHLYGNGLDRVPPALPRRLRALVLPHNHVAALGARDLVATPGLTELNLAYNRLASARVHHRAFRRLRALRSLDLAGNQLTRLPMGLPTGLRTLQLQRNQLRMLEPEPLAGLDQLRELSLAHNRLRVGDIGPGTWHELQALQVRHRLVSHTVPRAPPSPCLPCHVPNILVSW

SEQ ID NO: 10600 - protein, 32 aa, Homo Sapiens
MAWTFECSRTTSPEPLSTSPCRTTSSRNSPTM

SEQ ID NO: 10601 - protein, 430 aa, Homo Sapiens
MAWTFECSRTTSPEPLSTSPCRTTSSRNSPTMSCPASVACEPSTSTTTSSPPKLSVAPQFLPRSLRVADLAANQVMEIFPLTFGEKPALRSVYLHNNQLSNAGLPPDAFRGSEAIATLSLSNNQLSYLPPSLPPSLERLHLQNNLISKVPRGALSRQTQLRELYLQHNQLTDSGLDATTFSKLHSLEYLDLSHNQLTTVPAGLPRTLAILHLGRNRIRQVEAARLHGARGLRYLLLQHNQLGSSGLPAGALRPLRGLHTLHLYGNGLDRVPPALPRRLRALVLPHNHVAALGARDLVATPGLTELNLAYNRLASARVHHRAFRRLRALRSLDLAGNQLTRLPMGLPTGLRTLQLQRNQLRMLEPEPLAGLDQLRELSLAHNRLRVGDIGPGTWHELQALQVRHRLVSHTVPRAPPSPCLPCHVPNILVSW

SEQ ID NO: 10602 - protein, 164 aa, Homo Sapiens
MAWTFECSRTTSPEPLSTSPCRTTSSRNSPTMSCPASVACEPSTSTTTSSPPKNNLISKVPRGALSRQTQLRELYLQHNQLTDSGLDATTFSKLHSLEYLDLSHNQLTTVPAGLPRTLAILHLGRNRIRQVEAARLHGARGLRYLLLQHNQLGSSGLPAGALRP

SEQ ID NO: 10603 - protein, 123 aa, Homo Sapiens
MGRPTQWPSLLLLLLLPGPPPVAGLEDAAFPHLGESLQPLPRACPLRCSCPRVDTVDCDGLDLRVFPDNITRAAQHLSLQNNQLQELPYNELSRLSGLRTLNLHNNLISSEEQSHLQGAPRSP

SEQ ID NO: 10604 - protein, 510 aa, Homo Sapiens
MGRPTQWPSLLLLLLLPGPPPVAGLEDAAFPHLGESLQPLPRACPLRCSCPRVDTVDCDGLDLRVFPDNITRAAQHLSLQNNQLQELPYNELSRLSGLRTLNLHNNLISSEGLPDEAFESLTQLQHLCVAHNKLSVAPQFLPRSLRVADLAANQVMEIFPLTFGEKPALRSVYLHNNQLSNAGLPPDAFRGSEAIATLSLSNNQLSYLPPSLPPSLERLHLQNNLISKVPRGALSRQTQLRELYLQHNQLTDSGLDATTFSKLHSLEYLDLSHNQLTTVPAGLPRTLAILHLGRNRIRQVEAARLHGARGLRYLLLQHNQLGSSGLPAGALRPLRGLHTLHLYGNGLDRVPPALPRRLRALVLPHNHVAALGARDLVATPGLTELNLAYNRLASARVHHRAFRRLRALRSLDLAGNQLTRLPMGLPTGLRTLQLQRNQLRMLEPEPLAGLDQLRELSLAHNRLRVGDIGPGTWHELQALQVRHRLVSHTVPRAPPSPCLPCHVPNILVSW

SEQ ID NO: 10605 - protein, 421 aa, Homo Sapiens
MGRPTQWPSLLLLLLLPGPPPVAGLEDAAFPHLGESLQPLPRACPLRCSCPRVDTVDCDGLDLRVFPDNITRAAQHLSLQNNQLQELPYNELSRLSGLRTLNLHNNLISSEGLPDEAFESLTQLQHLCVAHNKNNLISKVPRGALSRQTQLRELYLQHNQLTDSGLDATTFSKLHSLEYLDLSHNQLTTVPAGLPRTLAILHLGRNRIRQVEAARLHGARGLRYLLLQHNQLGSSGLPAGALRPLRGLHTLHLYGNGLDRVPPALPRRLRALVLPHNHVAALGARDLVATPGLTELNLAYNRLASARVHHRAFRRLRALRSLDLAGNQLTRLPMGLPTGLRTLQLQRNQLRMLEPEPLAGLDQLRELSLAHNRLRVGDIGPGTWHELQALQVRHRLVSHTVPRAPPSPCLPCHVPNILVSW

SEQ ID NO: 10606 - protein, 505 aa, Homo Sapiens
MWPSLLLLLLLPGPPPVAGLEDAAFPHLGESLQPLPRACPLRCSCPRVDTVDCDGLDLRVFPDNITRAAQHLSLQNNQLQELPYNELSRLSGLRTLNLHNNLISSEGLPDEAFESLTQLQHLCVAHNKLSVAPQFLPRSLRVADLAANQVMEIFPLTFGEKPALRSVYLHNNQLSNAGLPPDAFRGSEAIATLSLSNNQLSYLPPSLPPSLERLHLQNNLISKVPRGALSRQTQLRELYLQHNQLTDSGLDATTFSKLHSLEYLDLSHNQLTTVPAGLPRTLAILHLGRNRIRQVEAARLHGARGLRYLLLQHNQLGSSGLPAGALRPLRGLHTLHLYGNGLDRVPPALPRRLRALVLPHNHVAALGARDLVATPGLTELNLAYNRLASARVHHRAFRRLRALRSLDLAGNQLTRLPMGLPTGLRTLQLQRNQLRMLEPEPLAGLDQLRELSLAHNRLRVGDIGPGTWHELQALQVRHRLVSHTVPRAPPSPCLPCHVPNILVSW

SEQ ID NO: 10607 - protein, 574 aa, Homo Sapiens
MWPSLLLLLLLPGPPPVAGLEDAAFPHLGESLQPLPRACPLRCSCPRVDTVDCDGLDLRVFPDNITRAAQHLSLQNNQLQELPYNELSRLSGLRTLNLHNNLISSEGLPDEAFESLTQLQHLCVAHNKLSVAPQFLPRSLRVADLAANQVMEIFPLTFGEKPALRSVYLHNNQLSNAGLPPDAFRGSEAIATLSLSNNQLSYLPPSLPPSLERLHLQNNLISKVPRGALSRQTQLRELYLQHNQLTDSGLDATTFSKLHSLEYLDLSHNQLTTVPAGLPRTLAILHLGRNRIRQVEAARLHGARGLRYLLLQHNQLGSSGLPAGALRPLRGLHTLHLYGNGLDRVPPALPRRLRALVLPHNHVAALGARDLVATPGLTELNLAYNRLASARVHHRAFRRLRALRSLDLAGNQLTRLPMGLPTGLRTLQLQRNQLRMLEPEPLAGLDQLRELSLAHNRLRVGDIGPGTWHELQALQMLDLSHNELSFVPPDLPEALEELHLEGNRIGHVGPEAFLSTPRLRALFLRANRLHMTSIAAEAFLGLPNLRVVDTAGNPEQVLIRLPPTTPRGPRAGGP

SEQ ID NO: 10608 - protein, 151 aa, Homo Sapiens
RRLPRLRGHRHPQPLQQPAQLPAAQPAALTRAAPPAGSPANNLISKVPRGALSRQTQLRELYLQHNQLTDSGLDATTFSKLHSLEYLDLSHNQLTTVPAGLPRTLAILHLGRNRIRQVEAARLHGARGLRYLLLQHNQLGSSGLPAGALRP

SEQ ID NO: 10609 - protein, 182 aa, Homo Sapiens
  misc_feature (1)..(1): Xaa can be any naturally occurring amino acid
XFESLTQLQHLCVAHNKLSNAGLPPDAFRGSEAIATLSLSNNQLSYLPPSLPPSLERLHLQNNLISKVPRGALSRQTQLRELYLQHNQLTDSGLDATTFSKLHSLEYLDLSHNQLTTVPAGLPRTLAILHLGRNRIRQVEAARLHGARGLRYLLLQHNQLGSSGLPAGALRPLRGLHTLHLY

SEQ ID NO: 10610 - protein, 388 aa, Homo Sapiens
MGAAAWARPLSVSFLLLLLPLPGMPAGSWDPAGYLLYCPCMGRFGNQADHFLGSLAFAKLLNRTLAVPPWIEYQHHKPPFTNLHVSYQKYFKLEPLQAYHRVISLEDFMEKLAPTHWPPEKRVAYCFEVAAQRSPDKKTCPMKEGNPFGPFWDQFHVSFNKSELFTGISFSASYREQWSQRFSPKEHPVLALPGAPAQFPVLEEHRPLQKYMVWSDEMVKTGEAQIHAHLVRPYVGIHLRIGSDWKNACAMLKDGTAGSHFMASPQCVGYSRSTAAPLTMTMCLPDLKEIQRAVKLWVRSLDAQSVYVATDSESYVPELQQLFKGKVKVVSLKPEVAQVDLYILGQADHFIGNCVSSFTAFVKRERDLQGRPSSFFGMDRPPKLRDEF

SEQ ID NO: 10611 - protein, 194 aa, Homo Sapiens
MGAAAWARPLSVSFLLLLLPLPGMPAGSWDPAGYLLYCPCMGRFGNQADHFLGSLAFAKLLNRTLAVPPWIEYQHHKPPFTNLHVSYQKYFKLEPLQAYHRVISLEDFMEKLAPTHWPPEKRVAYCFEVAAQRSPDKKTCPMKEGNPFGPFWDQFHVSFNKSELFTGISFSASYREQWSQRRENHSCVTLLFPR

SEQ ID NO: 10612 - protein, 424 aa, Homo Sapiens
MATLSFVFLLLGAVSWPPASASGQEFWPGQSAADILSGAASRRRYLLYDVNPPEGFNLRRDVYIRIASLLKTLLKTEEWVLVLPPWGRLYHWQSPDIHQVRIPWSEFFDLPSLNKNIPVIEYEQFIAESGGPFIDQVYVLQSYAEGWKEGTWEEKVDERPCIDQLLYSQDKHEYYRGWFWGYEETRGLNVSCLSVQGSASIVAPLLLRNTSARSVMLDRAENLLHDHYGGKEYWDTRRSMVFARHLREVGDEFRSRHLNSTDDADRIPFQEDWMKMKVKLGSALGGPYLGVHLRRKDFIWGHRQDVPSLEGAVRKIRSLMKTHRLDKVFVATDAVRKEYEELKKLLPEMVRFEPTWEELELYKDGGVAIIDQWICAHARCLPTSLSAESGSGGFQRFFCPKYSVSEQMVACVHSGHFHTVCLLV

SEQ ID NO: 10613 - protein, 429 aa, Homo Sapiens
MATLSFVFLLLGAVSWPPASASGQEFWPGQSAADILSGAASRRRYLLYDVNPPEGFNLRRDVYIRIASLLKTLLKTEEWVLVLPPWGRLYHWQSPDIHQVRIPWSEFFDLPSLNKNIPVIEYEQFIAESGGPFIDQVYVLQSYAEGWKEGTWEEKVDERPCIDQLLYSQDKHEYYRGWFWGYEETRGLNVSCLSVQGSASIVAPLLLRNTSARSVMLDRAENLLHDHYGGKEYWDTRRSMVFARHLREVGDEFRSRHLNSTDDADRIPFQEDWMKMKVKLGSALGGPYLGVHLRRKDFIWGHRQDVPSLEGAVRKIRSLMKTHRLDKVFVATDAVRKEYEELKKLLPEMVRFEPTWEELELYKDGGVAIIDQWICAHARFFIGTSVSTFSFRIHEEREILGLDPKTTYNRFCGDQEKACEQPTHWKITY

SEQ ID NO: 10614 - protein, 380 aa, Homo Sapiens
MATLSFVFLLLGAVSWPPASASGQEFWPGQSAADILSGAASRRRYLLYDVNPPEGFNLRRDVYIRIASLLKTLLKTEEWVLVLPPWGRLYHWQSPDIHQVRIPWSEFFDLPSLNKNIPVIEYEQFIAESGGPFIDQVYVLQSYAEGWKEGTWEEKVDERPCIDQLLYSQDKHEYYRGWFWGYEETRGLNVSCLSVQGSASIVAPLLLRNTSARSVMLDRAENLLHDHYGGKEYWDTRRSMVFARHLREVGDEFRSRHLNSTDDADRIPFQEDWMKMKVKLGSALGGPYLGVHLRRKDFIWGHRQDVPSLEGAVRKIRSLMKTHRLDKVFVATDAVRKEYEELKKLLPEMVRFEPTWEELELYKDGGVAIIDQWICAHASS

SEQ ID NO: 10615 - protein, 212 aa, Homo Sapiens
MATLSFVFLLLGAVSWPPASASGQEFWPGQSAADILSGAASRRRYLLYDVNPPEGFNLRRDVYIRIASLLKTLLKTEEWVLVLPPWGRLYHWQSPDIHQVRIPWSEFFDLPSLNKNIPVIEYEQFIAGRRTACGVCFVVSQCSARDKESGGPFIDQVYVLQSYAEGWKEGTWEEKVDERPCIDQLLYSQDKHEYYRCLLRLLPLPQRMVLGL

SEQ ID NO: 10616 - protein, 141 aa, Homo Sapiens
MVFARHLREVGDEFRSRHLNSTDDADRIPFQEDWMKMKVKLGSALGGPYLGVHLRRKDFIWGHRQDVPSLEGAVRKIRSLMKTHRLDKVFVATDAVRKEYEELKKLLPEMVRFEPTWEELELYKDGGVAIIDQWICAHASS

SEQ ID NO: 10617 - protein, 265 aa, Homo Sapiens
  misc_feature (1)..(1): Xaa can be any naturally occurring amino acid
XQFIAESGGPFIDQVYVLQSYAEGWKEGTWEEKVDERPCIDQLLYSQDKHEYYRDGGLVSPKCRLPLKALTLPGLLWKSCQLTASMCPVPGQLALKHGRGWFWGYEETRGLNVSCLSVQGSASIVAPLLLRNTSARSVMLDRAENLLHDHYGGKEYWDTRRSMVFARHLREVGDEFRSRHLNSTDDADRIPFQEDWMKMKVKLGSALGGPYLGVHLRRKDFIWGHRQDVPSLEGAVRKIRSLMKTHRLDKVFVATDAVRKEYEEL

SEQ ID NO: 10618 - protein, 111 aa, Homo Sapiens
MEWWASSPLRLWLLLFLLPSAQGRQKESGGLRAVPSLPLGLGVWPESRGAPPRGRLPGRCRGRCSSELGRRHRGALRRRVQNGKYLLTKLTGLWRITNHVQVKTAAATMVS

SEQ ID NO: 10619 - protein, 163 aa, Homo Sapiens
MEWWASSPLRLWLLLFLLPSAQGRQKESGSKWKVFIDQINRSLENYEPCSSQNCSCYHGVIEEDLTPFRGGISRKMMAEVVRRKLGTHYQITKNRLYRENDCMFPSRCSGVEHFILEVIGRLPDMEMVINVRDYPQVPKWMEPAIPVFSFSKARLWKIGKIYL

SEQ ID NO: 10620 - protein, 187 aa, Homo Sapiens
MEWWASSPLRLWLLLFLLPSAQGRQKESGSKWKVFIDQINRSLENYEPCSSQNCSCYHGVIEEDLTPFRGGISRKMMAEVVRRKLGTHYQITKNRLYRENDCMFPSRCSGVEHFILEVIGRLPDMEMVINVRDYPQVPKWMEPAIPVFSFSKTCFISCVASGQRPHLCCISHGLASFLESVWFHCLS

SEQ ID NO: 10621 - protein, 392 aa, Homo Sapiens
MEWWASSPLRLWLLLFLLPSAQGRQKESGSKWKVFIDQINRSLENYEPCSSQNCSCYHGVIEEDLTPFRGGISRKMMAEVVRRKLGTHYQITKNRLYRENDCMFPSRCSGVEHFILEVIGRLPDMEMVINVRDYPQVPKWMEPAIPVFSFSKTSEYHDIMYPAWTFWEGGPAVWPIYPTGLGRWDLFREDLVRSAAQWPWKKKNSTAYFRGSRTSPERDPLILLSRKNPKLVDAEYTKNQAWKSMKDTLGKPAAKDVHLVDHCKYKYLFNFRGVAASFRFKHLFLCGSLVFHVGDEWLEFFYPQLKPWVHYIPVKTDLSNVQELLQFVKANDDVAQEIAERGSQFIRNHLQMDDITCYWENLLSEYSKFLSYNVTRRKGYDQIIPKMLKTEL

SEQ ID NO: 10622 - protein, 189 aa, Homo Sapiens
  misc_feature (1)..(1): Xaa can be any naturally occurring amino acid
XCGAALPPAPQRGICSSKWKVFIDQINRSLENYEPCSSQNCSCYHGVIEEDLTPFRGGISRKMMAEVVRRKLGTHYQITKNRLYRENDCMFPSRCSGVEHFILEVIGRLPDMEMVINVRDYPQVPKWMEPAIPVFSFSKTSEYHDIMYPAWTFWEGGPAVWPIYPTGLGRWDLFREDLVRSAAQWPWKK

SEQ ID NO: 10623 - protein, 334 aa, Homo Sapiens
MDPRGILKAFPKRQKIHADASSKPSCASALRCLCPESDIGADSACPGPAEWLSSLRAHVVRTGIGRARAELFEKQIVQHGGQLCPAQGPGVTHIVVDEGMDYERALRLLRLPQLPPGAQLVKSAWLSLCLQERRLVDVAGFSIFIPSRYLDHPQPSKAEQDASIPPGTHEALLQTALSPPPPPTRPVSPPQKAKEAPNTQAQPISDDEASDGEETQVSAADLEALISGHYPTSLEGDCEPSPAPAVLDKWVCAQPSSQKATNHNLHITEKLEVLAKAYSVQGDKWRALGYAKAINALKSFHKPVTSYQEACSIPGIGKRMAEKIIEILESGHLR

SEQ ID NO: 10624 - protein, 188 aa, Homo Sapiens
MDPRGILKAFPKRQKIHADASSKVLAKIPRREEGEEAEEWLSSLRAHVVRTGIGRARAELFEKQIVQHGGQLCPAQGPGVTHIVVDEGMDYERALRLLRLPQLPPGAQLVKSAWLSLCLQERRLVDVAGFSIFIPSRYLDHPQPSKAEQDASIPPGTHEALLQTALSPPPPPTRPVSPPQKAKEAPNT

SEQ ID NO: 10625 - protein, 470 aa, Homo Sapiens
MDPRGILKAFPKRQKIHADASSKVLAKIPRREEGEEAEEWLSSLRAHVVRTGIGRARAELFEKQIVQHGGQLCPAQGPGVTHIVVDEGMDYERALRLLRLPQLPPGAQLVKSAWLSLCLQERRLVDVAGFSIFIPSRYLDHPQPSKAEQDASIPPGTHEALLQTALSPPPPPTRPVSPPQKAKEAPNTQAQPISDDEASDGEETQEACSIPGIGKRMAEKIIEILESGHLRKLDHISESVPVLELFSNIWGAGTKTAQMWYQQGFRSLEDIRSQASLTTQQAIGLKHYSDFLERMPREEATEIEQTVQKAAQAFNSGLLCVACGSYRRGKATCGDVDVLITHPDGRSHRGIFSRLLDSLRQEAVPSVGPGFLTDDLVSQEENGQQQKYLGVCRLPGPGRRHRRLDIIVVPYSEFACALLYFTGSAHFNRSMRALAKTKGMSLSEHALSTAVVRNTHGCKVGPGRVLPTPT

SEQ ID NO: 10626 - protein, 575 aa, Homo Sapiens
MDPRGILKAFPKRQKIHADASSKVLAKIPRREEGEEAEEWLSSLRAHVVRTGIGRARAELFEKQIVQHGGQLCPAQGPGVTHIVVDEGMDYERALRLLRLPQLPPGAQLVKSAWLSLCLQERRLVDVAGFSIFIPSRYLDHPQPSKAEQDASIPPGTHEALLQTALSPPPPPTRPVSPPQKAKEAPNTQAQPISDDEASDGEETQVSAADLEALISGHYPTSLEGDCEPSPAPAVLDKWVCAQPSSQKATNHNLHITEKLEVLAKAYSVQGDKWRALGYAKAINALKSFHKPVTSYQEACSIPGIGKRMAEKIIEILESGHLRKLDHISESVPVLELFSNIWGAGTKTAQMWYQQGFRSLEDIRSQASLTTQQAIGLKHYSDFLERMPREEATEIEQTVQKAAQAFNSGLLCVACGSYRRGKATCGDVDVLITHPDGRSHRGIFSRLLDSLRQEGFLTDDLVSQEENGQQQKYLGVCRLPGPGRRHRRLDIIVVPYSEFACALLYFTGSAHFNRSMRALAKTKGMSLSEHALSTAVVRNTHGCKVGPGRVLPTPTEKDVFRLLGLPYREPAERDW

SEQ ID NO: 10627 - protein, 575 aa, Homo Sapiens; identical to SEQ ID NO: 10626

SEQ ID NO: 10628 - protein, 575 aa, Homo Sapiens; identical to SEQ ID NO: 10626

SEQ ID NO: 10629 - protein, 269 aa, Homo Sapiens
MDPRGILKAFPKRQKIHADASSKVLAKIPRREEGEEAEEWLSSLRAHVVRTGIGRARAELFEKQIVQHGGQLCPAQGPGVTHIVVDEGMDYERALRLLRLPQLPPGAQLVKSAWLSLCLQERRLVDVAGFSIFIPSRYLDHPQPSKAEQDASIPPGTHEALLQTALSPPPPPTRPVSPPQKAKEAPNTQAQPISDDEASDGEETQVSAADLEALISGHYPTSLEGDCEPSPAPAVLDKWVCAQPSSQKATNHNLHITEKLEVLAKAYSV

SEQ ID NO: 10630 - protein, 487 aa, Homo Sapiens
MDYERALRLLRLPQLPPGAQLVKSAWLSLCLQERRLVDVAGFSIFIPSRYLDHPQPSKAEQDASIPPGTHEALLQTALSPPPPPTRPVSPPQKAKEAPNTQAQPISDDEASDGEETQVSAADLEALISGHYPTSLEGDCEPSPAPAVLDKWVCAQPSSQKATNHNLHITEKLEVLAKAYSVQGDKWRALGYAKAINALKSFHKPVTSYQEACSIPGIGKRMAEKIIEILESGHLRKLDHISESVPVLELFSNIWGAGTKTAQMWYQQGFRSLEDIRSQASLTTQQAIGLKHYSDFLERMPREEATEIEQTVQKAAQAFNSGLLCVACGSYRRGKATCGDVDVLITHPDGRSHRGIFSRLLDSLRQEGFLTDDLVSQEENGQQQKYLGVCRLPGPGRRHRRLDIIVVPYSEFACALLYFTGSAHFNRSMRALAKTKGMSLSEHALSTAVVRNTHGCKVGPGRVLPTPTEKDVFRLLGLPYREPAERDW

SEQ ID NO: 10631 - protein, 152 aa, Homo Sapiens
MDYERALRLLRLPQLPPGAQLVKSAWLSLCLQERRLVDVAGFSIFIPSSPSLMMKPVMGKKPRLVQLIWKPSSVATTPPPLREIVSLAQPLLSWISGSVHSPQARRRPITTSISQRSWKFWPKPTVFRETSGGPWAMPRPSMPSRASISLSP

SEQ ID NO: 10632 - protein, 248 aa, Homo Sapiens
MEALCVCSLMPLHWSWILTASHLAAFFQGFRSLEDIRSQASLTTQQAIGLKHYSDFLERMPREEATEIEQTVQKAAQAFNSGLLCVACGSYRRGKATCGDVDVLITHPDGRSHRGIFSRLLDSLRQEGFLTDDLVSQEENGQQQKYLGVCRLPGPGRRHRRLDIIVVPYSEFACALLYFTGSAHFNRSMRALAKTKGMSLSEHALSTAVVRNTHGCKVGPGRVLPTPTEKDVFRLLGLPYREPAERDW

SEQ ID NO: 10633 - protein, 218 aa, Homo Sapiens
MHHQKYLQRFLGGKREKKQKEACSIPGIGKRMAEKIIEILESGHLRKLDHISESVPVLELFSNIWGAGTKTAQMWYQQGFRSLEDIRSQASLTTQQAIGLKHYSDFLERMPREEATEIEQTVQKAAQAFNSGLLCVACGSYRRGKATCGDVDVLITHPDGRSHRGIFSRLLDSLRQEGFLTDDLVSQEENGQQQKYLGVCRLPGPGRRHRRLDIIVVP

SEQ ID NO: 10634 - protein, 298 aa, Homo Sapiens
MHHQKYLQRFLGGKREKKQKEACSIPGIGKRMAEKIIEILESGHLRKLDHISESVPVLELFSNIWGAGTKTAQMWYQQGFRSLEDIRSQASLTTQQAIGLKHYSDFLERMPREEATEIEQTVQKAAQAFNSGLLCVACGSYRRGKATCGDVDVLITHPDGRSHRGIFSRLLDSLRQEGFLTDDLVSQEENGQQQKYLGVCRLPGPGRRHRRLDIIVVPYSEFACALLYFTGSAHFNRSMRALAKTKGMSLSEHALSTAVVRNTHGCKVGPGRVLPTPTEKDVFRLLGLPYREPAERDW

SEQ ID NO: 10635 - protein, 300 aa, Homo Sapiens
MLMHHQKYLQRFLGGKREKKQKEACSIPGIGKRMAEKIIEILESGHLRKLDHISESVPVLELFSNIWGAGTKTAQMWYQQGFRSLEDIRSQASLTTQQAIGLKHYSDFLERMPREEATEIEQTVQKAAQAFNSGLLCVACGSYRRGKATCGDVDVLITHPDGRSHRGIFSRLLDSLRQEGFLTDDLVSQEENGQQQKYLGVCRLPGPGRRHRRLDIIVVPYSEFACALLYFTGSAHFNRSMRALAKTKGMSLSEHALSTAVVRNTHGCKVGPGRVLPTPTEKDVFRLLGLPYREPAERDW

SEQ ID NO: 10636 - protein, 246 aa, Homo Sapiens
MPRSCCSRSGALLLALLLQASMEVRGWCLESSQCQDLTTESNLLECIRACKPDLSAETPMFPGNGDEQPLTENPRKYVMGHFRWDRFGRRNSSSSGSSGAGQKREDVSAGEDCGPLPEGGPEPRSDGAKPGPREGKRSYSMEHFRWGKPVGKKRRPVKVYPNGAEDESAEAFPLEFKRELTGQRLREGDGPDGPADDGAGAQADLEHSLLVAAEKKDEGPYRMEHFRWGSPPKDKRYGGFMTSEKS

SEQ ID NO: 10637 - protein, 267 aa, Homo Sapiens
MPRSCCSRSGALLLALLLQASMEVRGWCLESSQCQDLTTESNLLECIRACKPDLSAETPMFPGNGDEQPLTENPRKYVMGHFRWDRFGRRNSSSSGSSGAGQKREDVSAGEDCGPLPEGGPEPRSDGAKPGPREGKRSYSMEHFRWGKPVGKKRRPVKVYPNGAEDESAEAFPLEFKRELTGQRLREGDGPDGPADDGAGAQADLEHSLLVAAEKKDEGPYRMEHFRWGSPPKDKRYGGFMTSEKSQTPLVTLFKNAIIKNAYKKGE

SEQ ID NO: 10638 - protein, 267 aa, Homo Sapiens; identical to SEQ ID NO: 10637

SEQ ID NO: 10639 - protein, 267 aa, Homo Sapiens; identical to SEQ ID NO: 10637

SEQ ID NO: 10640 - protein, 267 aa, Homo Sapiens; identical to SEQ ID NO: 10637

SEQ ID NO: 10641 - protein, 580 aa, Homo Sapiens
MHLSAVFNALLVSVLAAVLWKHVRLREHAATLEEELALSRQATEPAPALRIDYPKALQILMEGGTHMVCTGRTHTDRICRFKWLCYSNEAEEFIFFHGNTSVMLPNLGSRRFQPALLDLSTVEDHNTQYFNFVELPAAALRFMPKPVFVPDVALIANRFNPDNLMHVFHDDLLPLFYTLRQFPGLAHEARLFFMEGWGEGAHFDLYKLLSPKQPLLRAQLKTLGRLLCFSHAFVGLSKITTWYQYGFVQPQGPKANILVSGNEIRQFARFMTEKLNVSHTGVPLGEEYILVFSRTQNRLILNEAELLLALAQEFQMKTVTVSLEDHTFADVVRLVSNASMLVSMHGAQLVTTLFLPRGATVVELFPYAVNPDHYTPYKTLAMLPGMDLQYVAWRNMMPENTVTHPERPWDQGGITHLDRAEQARILQSREVPRHLCCRNPEWLFRIYQDTKVDIPSLIQTIRRVVKGRPGPRKQKWTVGLYPGKVREARCQASVHGASEARLTVSWQIPWNLKYLKVREVKYEVWLQEQGENTYVPYILALQNHTFTENIKPFTTYLVWVRCIFNKILLGPFADVLVCNT

SEQ ID NO: 10642 - protein, 580 aa, Homo Sapiens; identical to SEQ ID NO: 10641

SEQ ID NO: 10643 - protein, 355 aa, Homo Sapiens [sequence omitted]

SEQ ID NO: 10644 - protein, 77 aa, Homo Sapiens
MAKLIALTLLGMGLALFRNHQSSYQTRLNALREVQPVELPNCNLVKGIETGSEDLEILPNGLAFISSSWKNTSDGPE

SEQ ID NO: 10645 - protein, 375 aa, Homo Sapiens
MAPPTELLARPERGSAPGSRAMGRLVAVGLLGIALALLGERLLALRNRLKASREVESVDLPHCHLIKGIEAGSEDIDILPNGLAFFSVGLKFPGLHSFAPDKPGGILMMDLKEEKPRARELRISRGFDLASFNPHGISTFIDNDDTVYLFVVNHPEFKNTVEIFKFEEAENSLLHLKTVKHELLPSVNDITAVGPAHFYATNDHYFSDPFLKYLETYLNLHWANVVYYSPNEVKVVAEGFDSANGINISPDDKYIYVADILAHEIHVLEKHTNMNLTQLKVLELDTLVDNLSIDPSSGDIWVGCHPNGQKLFVYDPNNPPSSEVLRIQNILSEKPTVTTVYANNGSVLQGSSVASVYDGKLLIGTLYHRALYCEL

SEQ ID NO: 10646 - protein, 354 aa, Homo Sapiens
MGRLVAVGLLGIALALLGERLLALRNRLKASREVESVDLPHCHLIKGIEAGSEDIDILPNGLAFFSVGLKFPGLHSFAPDKPGGILMMDLKEEKPRARELRISRGFDLASFNPHGISTFIDNDDTVYLFVVNHPEFKNTVEIFKFEEAENSLLHLKTVKHELLPSVNDITAVGPAHFYATNDHYFSDPFLKYLETYLNLHWANVVYYSPNEVKVVAEGFDSANGINISPDDKYIYVADILAHEIHVLEKHTNMNLTQLKVLELDTLVDNLSIDPSSGDIWVGCHPNGQKLFVYDPNNPPSSEVLRIQNILSEKPTVTTVYANNGSVLQGSSVASVYDGKLLIGTLYHRALYCEL

SEQ ID NO: 10647 - protein, 354 aa, Homo Sapiens; identical to SEQ ID NO: 10646

SEQ ID NO: 10648 - protein, 219 aa, Homo Sapiens
MGRLVAVGLLGIALALLGERLLALRNRLKASREVESVDLPHCHLIKGIEAGSEDIDILPNGLAFFSVGLKFPGLHSFAPDKPGGILMMDLKEEKPRARELRISRGFDLASFNPHGISTFIDNDDTVYLFVVNHPEFKNTVEIFKFEEAENSLLHLKTVKHELLPSVNDITAVGPAHFYATNDHYFSDPFLKYLETYLNLHWANVVYYSPNEVKVVYLCC

SEQ ID NO: 10649 - protein, 342 aa, Homo Sapiens
MGRLVAVGLLGIALALLGERLLALRNRLKASREVESVDLPHCHLIKGIEAGSEDIDILPNGLAFFSVGLKFPGLHSFAPDKPGGILMMDLKEEKPRARELRISRGFDLASFNPHGISTFIDNEFKNTVEIFKFEEAENSLLHLKTVKHELLPSVNDITAVGPAHFYATNDHYFSDPFLKYLETYLNLHWANVVYYSPNEVKVVAEGFDSANGINISPDDKYIYVADILAHEIHVLEKHTNMNLTQLKVLELDTLVDNLSIDPSSGDIWVGCHPNGQKLFVYDPNNPPSSEVLRIQNILSEKPTVTTVYANNGSVLQGSSVASVYDGKLLIGTLYHRALYCEL

SEQ ID NO: 10650 - protein, 84 aa, Homo Sapiens
MGRLVAVGLLGIALALLGERLLALRNRLKASREVESVDLPHCHLIKGIEAGSEDIDILPNGLAFFSVVSVFFLPQIQQRRYKGI

SEQ ID NO: 10651 - protein, 84 aa, Homo Sapiens; identical to SEQ ID NO: 10650

SEQ ID NO: 10652 - protein, 50 aa, Homo Sapiens
MGRLVAVGLLGIALALLGERLLALRNRLKASREVESVDLPHCHLIKGIVW

SEQ ID NO: 10653 - protein, 32 aa, Homo Sapiens
MMDLKEEKPRARELRISRGFDLASFNPHGIST

SEQ ID NO: 10654 - protein, 53 aa, Homo Sapiens
MMDLKEEKPRARELRISRGFDLASFNPHGISTFIDNDDTVYLFVVNHPEFKNT

SEQ ID NO: 10655 - protein, 69 aa, Homo Sapiens
MMDLKEEKPRARELRISRGFDLASFNPHGISTFIDNDDTVYLFVVNHPEFKNTVEIFKFEEAENSLLHL

SEQ ID NO: 10656 - protein, 113 aa, Homo Sapiens
MMDLKEEKPRARELRISRGFDLASFNPHGISTFIDNDDTVYLFVVNHPEFKNTVEIFKFEEAENSLLHLKTVKHELLPSVNDITAVGPAHFYATNDHYFSDPFLKYLETYLNL

SEQ ID NO: 10657 - protein, 122 aa, Homo Sapiens
  misc_feature (1)..(1): Xaa can be any naturally occurring amino acid
XENSLLHLKTVKHELLPSVNDITAVGPAHFYATNDHYFSDPFLKYLETYLNLHWANVVYYSPNEVKVVAEGFDSANGINISPDDKYIYVADILAHEIHVLEKHTNMNLTQLKILTISHLEGT

SEQ ID NO: 10658 - protein, 245 aa, Homo Sapiens
MGKLVALVLLGVGLSLVGEMFLAFRERVNASREVEPVEPENCHLIEELESGSEDIDILPSGLAFISSGLKYPGMPNFAPDEPGKIFLMDLNEQNPRAQALEISGGFDKELFNPHGISIFIDKDNTVYLYVVNHPHMKSTVEIFKFEEQQRSLVYLKTIKHELLKSVNDIVVLGPEQFYATRDHYFTNSLLSFFEMILDLRWTYVLFYSPREVKVVAKGFCSANGITVSADQKYFASRMFCLRSPG

SEQ ID NO: 10659 - protein, 354 aa, Homo Sapiens
MGKLVALVLLGVGLSLVGEMFLAFRERVNASREVEPVEPENCHLIEELESGSEDIDILPSGLAFISSGLKYPGMPNFAPDEPGKIFLMDLNEQNPRAQALEISGGFDKELFNPHGISIFIDKDNTVYLYVVNHPHMKSTVEIFKFEEQQRSLVYLKTIKHELLKSVNDIVVLGPEQFYATRDHYFTNSLLSFFEMILDLRWTYVLFYSPREVKVVAKGFCSANGITVSADQKYVYVADVAAKNIHIMEKHDNWDLTQLKVIQLGTLVDNLTVDPATGDILAGCHPNPMKLLNYNPEDPPGSEVLRIQNVLSEKPRVSTVYANNGSVLQGTSVASVYHGKILIGTVFHKTLYCEL

SEQ ID NO: 10660 - protein, 270 aa, Homo Sapiens
MGKLVALVLLGVGLSLVGEMFLAFRERVNASREVEPVEPENCHLIEELESGSEDIDILPSGLAFISSGLKYPGMPNFAPDEPGKIFLMDLNEQNPRAQALEISGGFDKELFNPHGISIFIDKDNTVYLYVVNHPHMKSTVEIFKFEEQQRSLVYLKTIKHELLKSVNDIVVLGPEQFYATRDHYFTNSLLSFFEMILDLRWTYVLFYSPREVKVVAKGFCSANGITVSADQKYVYVADVAAKNIHIMEKHDNWDLTQLKETFWQDAILIL

SEQ ID NO: 10661 - protein, 61 aa, Homo Sapiens
MGKLVALVLLGVGLSLVGEMFLAFRERVNASREVEPVEPENCHLIEELGIKISRHAKLCAR

SEQ ID NO: 10662 - protein, 46 aa, Homo Sapiens
MGKLVALVLLGVGLSLVGEMFLAFRVGFYLLQRKGECLSRSGASRT

SEQ ID NO: 10663 - protein, 46 aa, Homo Sapiens; identical to SEQ ID NO: 10662

SEQ ID NO: 10664 - protein, 808 aa, Homo Sapiens
MIPFLPMFSLLLLLIVNPINANNHYDKILAHSRIRGRDQGPNVCALQQILGTKKKYFSTCKNWYKKSICGQKTTVLYECCPGYMRMEGMKGCPAVLPIDHVYGTLGIVGATTTQRYSDASKLREEIEGKGSFTYFAPSNEAWDNLDSDIRRGLESNVNVELLNALHSHMINKRMLTKDLKNGMIIPSMYNNLGLFINHYPNGVVTVNCARIIHGNQIATNGVVHVIDRVLTQIGTSIQDFIEAEDDLSSFRAAAITSDILEALGRDGHFTLFAPTNEAFEKLPRGVLERIMGDKVASEALMKYHILNTLQCSESIMGGAVFETLEGNTIEIGCDGDSITVNGIKMVNKKDIVTNNGVIHLIDQVLIPDSAKQVIELAGKQQTTFTDLVAQLGLASALRPDGEYTLLAPVNNAFSDDTLSMDQRLLKLILQNHILKVKVGLNELYNGQILETIGGKQLRVFVYRTAVCIENSCMEKGSKQGRNGAIHIFREIIKPAEKSLHEKLKQDKRFSTFLSLLEAADLKELLTQPGDWTLFVPTNDAFKGMTSEEKEILIRDKNALQNIILYHLTPGVFIGKGFEPGVTNILKTTQGSKIFLKEVNDTLLVNELKSKESDIMTTNGVIHVVDKLLYPADTPVGNDQLLEILNKLIKYIQIKFVRGSTFKEIPVTVYTTKIITKVVEPKIKVIEGSLQPIIKTEGPTLTKVKIEGEPEFRLIKEGETITEVIHGEPIIKKYTKIIDGVPVEITEKETREERIITGPEIKYTRISTGGGETEETLKKLLQEDTPVRKLQANKKVQGSRRRLREGRSQ

SEQ ID NO: 10665 - protein, 779 aa, Homo Sapiens
MIPFLPMFSLLLLLIVNPINANNHYDKILAHSRIRGRDQGPNVCALQQILGTKKKYFSTCKNWYKKSICGQKTTVLYECCPGYMRMEGMKGCPAVLPIDHVYGTLGIVGATTTQRYSDASKLREEIEGKGSFTYFAPSNEAWDNLDSDIRRGLESNVNVELLNALHSHMINKRMLTKDLKNGMIIPSMYNNLGLFINHYPNGVVTVNCARIIHGNQIATNGVVHVIDRVLTQIGTSIQDFIEAEDDLSSFRAAAITSDILEALGRDGHFTLFAPTNEAFEKLPRGVLERIMGDKVASEALMKYHILNTLQCSESIMGGAVFETLEGNTIEIGCDGDSITVNGIKMVNKKDIVTNNGVIHLIDQVLIPDSAKQVIELAGKQQTTFTDLVAQLGLASALRPDGEYTLLAPVNNAFSDDTLSMDQRLLKLILQNHILKVKVGLNELYNGQILETIGGKQLRVFVYRTAVCIENSCMEKGSKQGRNGAIHIFREIIKPAEKSLHEKLKQDKRFSTFLSLLEAADLKELLTQPGDWTLFVPTNDAFKGMTSEEKEILIRDKNALQNIILYHLTPGVFIGKGFEPGVTNILKTTQGSKIFLKEVNDTLLVNELKSKESDIMTTNGVIHVVDKLLYPADTPVGNDQLLEILNKLIKYIQIKFVRGSTFKEIPVTVYKPIIKKYTKIIDGVPVEITEKETREERIITGPEIKYTRISTGGGETEETLKKLLQEEVTKVTKFIEGGDGHLFEDEEIKRLLQGDTPVRKLQANKKVQGSRRRLREGRSQ

SEQ ID NO: 10666 - protein, 809 aa, Homo Sapiens
MIPFLPMFSLLLLLIVNPINANNHYDKILAHSRIRGRDQGPNVCALQQILGTKKKYFSTCKNWYKKSICGQKTTVLYECCPGYMRMEGMKGCPAVLPIDHVYGTLGIVGATTTQRYSDASKLREEIEGKGSFTYFAPSNEAWDNLDSDIRRGLESNVNVELLNALHSHMINKRMLTKDLKNGMIIPSMYNNLGLFINHYPNGVVTVNCARIIHGNQIATNGVVHVIDRVLTQIGTSIQDFIEAEDDLSSFRAAAITSDILEALGRDGHFTLFAPTNEAFEKLPRGVLERIMGDKVASEALMKYHILNTLQCSESIMGGAVFETLEGNTIEIGCDGDSITVNGIKMVNKKDIVTNNGVIHLIDQVLIPDSAKQVIELAGKQQTTFTDLVAQLGLASALRPDGEYTLLAPVNNAFSDDTLSMDQRLLKLILQNHILKVKVGLNELYNGQILETIGGKQLRVFVYRTAVCIENSCMEKGSKQGRNGAIHIFREIIKPAEKSLHEKLKQDKRFSTFLSLLEAADLKELLTQPGDWTLFVPTNDAFKGMTSEEKEILIRDKNALQNIILYHLTPGVFIGKGFEPGVTNILKTTQGSKIFLKEVNDTLLVNELKSKESDIMTTNGVIHVVDKLLYPADTPVGNDQLLEILNKLIKYIQIKFVRGSTFKEIPVTVYRPTLTKVKIEGEPEFRLIKEGETITEVIHGEPIIKKYTKIIDGVPVEITEKETREERIITGPEIKYTRISTGGGETEETLKKLLQEEVTKVTKFIEGGDGHLFEDEEIKRLLQGDTPVRKLQANKKVQGSRRRLREGRSQ

SEQ ID NO: 10667 - protein, 836 aa, Homo Sapiens
MIPFLPMFSLLLLLIVNPINANNHYDKILAHSRIRGRDQGPNVCALQQILGTKKKYFSTCKNWYKKSICGQKTTVLYECCPGYMRMEGMKGCPAVLPIDHVYGTLGIVGATTTQRYSDASKLREEIEGKGSFTYFAPSNEAWDNLDSDIRRGLESNVNVELLNALHSHMINKRMLTKDLKNGMIIPSMYNNLGLFINHYPNGVVTVNCARIIHGNQIATNGVVHVIDRVLTQIGTSIQDFIEAEDDLSSFRAAAITSDILEALGRDGHFTLFAPTNEAFEKLPRGVLERIMGDKVASEALMKYHILNTLQCSESIMGGAVFETLEGNTIEIGCDGDSITVNGIKMVNKKDIVTNNGVIHLIDQVLIPDSAKQVIELAGKQQTTFTDLVAQLGLASALRPDGEYTLLAPVNNAFSDDTLSMDQRLLKLILQNHILKVKVGLNELYNGQILETIGGKQLRVFVYRTAVCIENSCMEKGSKQGRNGAIHIFREIIKPAEKSLHEKLKQDKRFSTFLSLLEAADLKELLTQPGDWTLFVPTNDAFKGMTSEEKEILIRDKNALQNIILYHLTPGVFIGKGFEPGVTNILKTTQGSKIFLKEVNDTLLVNELKSKESDIMTTNGVIHVVDKLLYPADTPVGNDQLLEILNKLIKYIQIKFVRGSTFKEIPVTVYTTKIITKVVEPKIKVIEGSLQPIIKTEGPTLTKVKIEGEPEFRLIKEGETITEVIHGEPIIKKYTKIIDGVPVEITEKETREERIITGPEIKYTRISTGGGETEETLKKLLQEEVTKVTKFIEGGDGHLFEDEEIKRLLQGDTPVRKLQANKKVQGSRRRLREGRSQ

SEQ ID NO: 10668 - protein, 781 aa, Homo Sapiens
MIPFLPMFSLLLLLIVNPINANNHYDKILAHSRIRGRDQGPNVCALQQILGTKKKYFSTCKNWYKKSICGQKTTVLYECCPGYMRMEGMKGCPAVLPIDHVYGTLGIVGATTTQRYSDASKLREEIEGKGSFTYFAPSNEAWDNLDSDIRRGLESNVNVELLNALHSHMINKRMLTKDLKNGMIIPSMYNNLGLFINHYPNGVVTVNCARIIHGNQIATNGVVHVIDRVLTQIGTSIQDFIEAEDDLSSFRAAAITSDILEALGRDGHFTLFAPTNEAFEKLPRGVLERIMGDKVASEALMKYHILNTLQCSESIMGGAVFETLEGNTIEIGCDGDSITVNGIKMVNKKDIVTNNGVIHLIDQVLIPDSAKQVIELAGKQQTTFTDLVAQLGLASALRPDGEYTLLAPVNNAFSDDTLSMDQRLLKLILQNHILKVKVGLNELYNGQILETIGGKQLRVFVYRTAVCIENSCMEKGSKQGRNGAIHIFREIIKPAEKSLHEKLKQDKRFSTFLSLLEAADLKELLTQPGDWTLFVPTNDAFKGMTSEEKEILIRDKNALQNIILYHLTPGVFIGKGFEPGVTNILKTTQGSKIFLKEVNDTLLVNELKSKESDIMTTNGVIHVVDKLLYPADTPVGNDQLLEILNKLIKYIQIKFVRGSTFKEIPVTVYRPTLTKVKIEGEPEFRLIKEGETITEVIHGEPIIKKYTKIIDGVPVEITEKETREERIITGPEIKYTRISTGGGETEETLKKLLQEDTPVRKLQANKKVQGSRRRLREGRSQ

SEQ ID NO: 10669 - protein, 749 aa, Homo Sapiens
MIPFLPMFSLLLLLIVNPINANNHYDKILAHSRIRGRDQGPNVCALQQILGTKKKYFSTCKNWYKKSICGQKTTVLYECCPGYMRMEGMKGCPAVLPIDHVYGTLGIVGATTTQRYSDASKLREEIEGKGSFTYFAPSNEAWDNLDSDIRRGLESNVNVELLNALHSHMINKRMLTKDLKNGMIIPSMYNNLGLFINHYPNGVVTVNCARIIHGNQIATNGVVHVIDRVLTQIGTSIQDFIEAEDDLSSFRAAAITSDILEALGRDGHFTLFAPTNEAFEKLPRGVLERIMGDKVASEALMKYHILNTLQCSESIMGGAVFETLEGNTIEIGCDGDSITVNGIKMVNKKDIVTNNGVIHLIDQVLIPDSAKQVIELAGKQQTTFTDLVAQLGLASALRPDGEYTLLAPVNNAFSDDTLSMDQRLLKLILQNHILKVKVGLNELYNGQILETIGGKQLRVFVYRTAVCIENSCMEKGSKQGRNGAIHIFREIIKPAEKSLHEKLKQDKRFSTFLSLLEAADLKELLTQPGDWTLFVPTNDAFKGMTSEEKEILIRDKNALQNIILYHLTPGVFIGKGFEPGVTNILKTTQGSKIFLKEVNDTLLVNELKSKESDIMTTNGVIHVVDKLLYPADTPVGNDQLLEILNKLIKYIQIKFVRGSTFKEIPVTVYSPEIKYTRISTGGGETEETLKKLLQEEVTKVTKFIEGGDGHLFEDEEIKRLLQGDTPVRKLQANKKVQGSRRRLREGRSQ

SEQ ID NO: 10670 - protein, 128 aa, Homo Sapiens
MSLRLDTTPSCNSARPLHALQVLLLLSLLLTALASSTKGQTKRNLAKGKEESLDSDLYAELRCMCIKTTSGIHPKNIQSLEVIGKGTHCNQVEVIATLKDGRKICLDPDAPRIKKIVQKKLAGDESAD

SEQ ID NO: 10671 - protein, 216 aa, Homo Sapiens
MLRLSERNMKVLLAAALIAGSVFFLLLPGPSAADEKKKGPKVTVKVYFDLRIGDEDVGRVIFGLFGKTVPKTVDNFVALATGEKGFGYKNSKFHRVIKDFMIQGGDFTRGDGTGGKSIYGERFPDENFKLKHYGPGWVSMANAGKDTNGSQFFITTVKTAWLDGKHVVFGKVLEGMEVVRKVESTKTDSRDKPLKDVIIADCGKIEVEKPFAIAKE

SEQ ID NO: 10672 - protein, 212 aa, Homo Sapiens
MGPGPRLLLPLVLCVGLGALVFSSGAEGFRKRGPSVTAKVFFDVRIGDKDVGRIVIGLFGKVVPKTVENFVALATGEKGYGYKGSKFHRVIKDFMIQGGDITTGDGTGGVSIYGETFPDENFKLKHYGIGWVSMANAGPDTNGSQFFITLTKPTWLDGKHVVFGKVIDGMTVVHSIELQATDGHDRPLTNCSIINSGKIDVKTPFVVEIADW

SEQ ID NO: 10673 - protein, 140 aa, Homo Sapiens
MGRTVVVLGGGISGLAASYHLSRAPCPPKVMLGGSWLQTLEASGCVLSQELFQQRAQEAAATQLGLKEMPSHCLVHLHKNCIPQYTLGHWQKLESARQFLTAHRLPLTLAGASYEGVAVNDCIESGRQAAVSVLGTEPNS

SEQ ID NO: 10674 - protein, 156 aa, Homo Sapiens
MGRTVVVLGGGISGLAASYHLSRAPCPPKVMLGGSWLQTLEASGCVLSQELFQQRAQEAAATQLGLKEMPSHCLVHLHKTKNQLKWRQSHDRTVEWPKEYPGRSRKQAPSILHVPGCQLLRCRDRDHLGAVSEQPRSSAESRVGVASSTFSTFPLF

SEQ ID NO: 10675 - protein, 78 aa, Homo Sapiens
MGRTVVVLGGGISGLAASYHLSRAPCPPKVVLVESSERLGGWIRSVRGPNGAIFELGPRGIRPAGALGARTLLLFLLF

SEQ ID NO: 10676 - protein, 185 aa, Homo Sapiens
MGRTVVVLGGGISGLAASYHLSRAPCPPKVVLVESSERLGGWIRSVRGPNGAIFELGPRGIRPAGALGARTLLLVMLGGSWLQTLEASGCVLSQELFQQRAQEAAATQLGLKEMPSHCLVHLHKNCIPQYTLGHWQKLESARQFLTAHRLPLTLAGASYEGVAVNDCIESGRQAAVSVLGTEPNS

SEQ ID NO: 10677 - protein, 188 aa, Homo Sapiens
MGRTVVVLGGGISGLAASYHLSRAPCPPKVVLVESSERLGGWIRSVRGPNGAIFELGPRGIRPAGALGARTLLLVMLGGSWLQTLEASGCVLSQELFQQRAQEAAATQLGLKEMPSHCLVHLHKTKNQLKWRQSHDRTVEWPKEYPGRSRKQAPSILHVPGCQLLRCRDRDHLGAVSEQPRSSAESRV

SEQ ID NO: 10678 - protein, 184 aa, Homo Sapiens
MGRTVVVLGGGISGLAASYHLSRAPCPPKVVLVESSERLGGWIRSVRGPNGAIFELGPRGIRPAGALGARTLLLVSELGLDSEVLPVRGDHPAAQNRFLYVGGALHALPTGLRGLLRPSPPFSKPLFWAGLRELTKPRGKEPDETVHSFAQRRLGPEGGPHSQTQHSFARPWLSAGASGHFVEV

SEQ ID NO: 10679 - protein, 477 aa, Homo Sapiens
MGRTVVVLGGGISGLAASYHLSRAPCPPKVVLVESSERLGGWIRSVRGPNGAIFELGPRGIRPAGALGARTLLLVSELGLDSEVLPVRGDHPAAQNRFLYVGGALHALPTGLRGLLRPSPPFSKPLFWAGLRELTKPRGKEPDETVHSFAQRRLGPEVASLAMDSLCRGVFAGNSRELSIRSCFPSLFQAEQTHRSILLGLLLGAGRTPQPDSALIRQALAERWSQWSLRGGLEMLPQALETHLTSRGVSVLRGQPVCGLSLQAEGRWKVSLRDSSLEADHVISAIPASVLSELLPAEAAPLARALSAITAVSVAVVNLQYQGAHLPVQGFGHLVPSSEDPGVLGIVYDSVAFPEQDGSPPGLRVTVMLGGSWLQTLEASGCVLSQELFQQRAQEAAATQLGLKEMPSHCLVHLHKNCIPQYTLGHWQKLESARQFLTAHRLPLTLAGASYEGVAVNDCIESGRQAAVSVLGTEPNS

SEQ ID NO: 10680 - protein, 477 aa, Homo Sapiens; identical to SEQ ID NO: 10679

SEQ ID NO: 10681 - protein, 113 aa, Homo Sapiens
MGRTVVVLGGGISGLAASYHLSRAPCPPKVVLVESSERLGGWIRSVRGPNGAIFELGPRGIRPAGALGARTLLLVSLRDSSLEADHVISAIPASGIWTFGAIFRRSRSPGNRV

SEQ ID NO: 10682 - protein, 161 aa, Homo Sapiens
  misc_feature (1)..(1): Xaa can be any naturally occurring amino acid
XADHVISAIPASVLSELLPAEAAPLARALSAITAVSVAVVNLQYQGAHLPVQGFGHLVPSSEDPGVLGIVYDSVAFPEQDGSPPGLRVTVMLGGSWLQTLEASGCVLSQELFQQRAQEAAATQLGLKEMPSHCLVHLHKNCIPQYTLGHWQKLGKLGKQLG

SEQ ID NO: 10683 - protein, 230 aa, Homo Sapiens
  misc_feature (1)..(1): Xaa can be any naturally occurring amino acid
XQAEQTHRSILLGLLLGAGRTPQPDSALIRQALAERWSQWSLRGGLEMLPQALETHLTSRGVSVLRGQPVCGLSLQAEGRWKGFGHLVPSSEDPGVLGIVYDSVAFPEQDGSPPGLRVTVMLGGSWLQTLEASGCVLSQELFQQRAQEAAATQLGLKEMPSHCLVHLHKNCIPQYTLGHWQKLESARQFLTAHRLPLTLAGASYEGVAVNDCIESGRQAAVSVLGTEPNS

SEQ ID NO: 10684 - protein, 180 aa, Homo Sapiens [sequence omitted]

SEQ ID NO: 10685 - protein, 169 aa, Homo Sapiens
MRQRADRRSMVSTSGAATASSAAGPSRGAAHSPSSAPHASRHRPPFSSRATGLLQQRQHCVHHCTQLCPRVQTPCLPPPPAPATELHSYLQQGGERGLLDTTPVQGSRPGKNVQLTENEIRGLCLKSREIFLSQPILLELEAPLKICGDIHGQYYDLLRLFEYGGFPPE

SEQ ID NO: 10686 - protein, 286 aa, Homo Sapiens
MSDSEKLNLDSIIGRLLEGDIHGQYYDLLRLFEYGGFPPESNYLFLGDYVDRGKQSLETICLLLAYKIKYPENFFLLRGNHECASINRIYGFYDECKRRYNIKLWKTFTDCFNCLPIAAIVDEKIFCCHGGLSPDLQSMEQIRRIMRPTDVPDQGLLCDLLWSDPDKDVQGWGENDRGVSFTFGAEVVAKFLHKHDLDLICRAHQVVEDGYEFFAKRQLVTLFSAPNYCGEFDNAGAMMSVDETLMCSFQILKPADKNKGKYGQFSGLNPGGRPITPPRNSAKAKK

SEQ ID NO: 10687 - protein, 341 aa, Homo Sapiens
MSDSEKLNLDSIIGRLLEGSRVLTPHCAPVQGSRPGKNVQLTENEIRGLCLKSREIFLSQPILLELEAPLKICGDIHGQYYDLLRLFEYGGFPPESNYLFLGDYVDRGKQSLETICLLLAYKIKYPENFFLLRGNHECASINRIYGFYDECKRRYNIKLWKTFTDCFNCLPIAAIVDEKIFCCHGGLSPDLQSMEQIRRIMRPTDVPDQGLLCDLLWSDPDKDVQGWGENDRGVSFTFGAEVVAKFLHKHDLDLICRAHQVVEDGYEFFAKRQLVTLFSAPNYCGEFDNAGAMMSVDETLMCSFQILKPADKNKGKYGQFSGLNPGGRPITPPRNSAKAKK

SEQ ID NO: 10688 - protein, 330 aa, Homo Sapiens
MSDSEKLNLDSIIGRLLEVQGSRPGKNVQLTENEIRGLCLKSREIFLSQPILLELEAPLKICGDIHGQYYDLLRLFEYGGFPPESNYLFLGDYVDRGKQSLETICLLLAYKIKYPENFFLLRGNHECASINRIYGFYDECKRRYNIKLWKTFTDCFNCLPIAAIVDEKIFCCHGGLSPDLQSMEQIRRIMRPTDVPDQGLLCDLLWSDPDKDVQGWGENDRGVSFTFGAEVVAKFLHKHDLDLICRAHQVVEDGYEFFAKRQLVTLFSAPNYCGEFDNAGAMMSVDETLMCSFQILKPADKNKGKYGQFSGLNPGGRPITPPRNSAKAKK

SEQ ID NO: 10689 - protein, 253 aa, Homo Sapiens
MSDSEKLNLDSIIGRLLEVQGSRPGKNVQLTENEIRGLCLKSREIFLSQPILLELEAPLKICGDIHGQYYDLLRLFEYGGFPPESNYLFLGDYVDRGKQSLETICLLLAYKIKYPENFFLLRGNHECASINRIYGFYDECLSPDLQSMEQIRRIMRPTDVPDQGLLCDLLWSDPDKDVQGWGENDRGVSFTFGAEVVAKFLHKHDLDLICRAHQVVEDGYEFFAKRQLVTLFSAPNYCGEFDNAGAMMSVDET

SEQ ID NO: 10690 - protein, 87 aa, Homo Sapiens
MALKKFVMVKFLNDSIVDPVDSEWFGFYRSGQAKETIPLQETSLYTQDRLGLKEMDNAGQLVFLATEGDHLQLSEEWFYAHIIPFLG

SEQ ID NO: 10691 - protein, 52 aa, Homo Sapiens
MASPGCLWLLAVALLPWTCASRALQHLDPPAPLPLVIWHGMASCKPNTGMTP

SEQ ID NO: 10692 - protein, 46 aa, Homo Sapiens
MASPGCLWLLAVALLPWTCASRALQHLDPPAPLPLVIWHGMAVAIP

SEQ ID NO: 10693 - protein, 46 aa, Homo Sapiens; identical to SEQ ID NO: 10692

SEQ ID NO: 10694 - protein, 305 aa, Homo Sapiens
MASPGCLWLLAVALLPWTCASRALQHLDPPAPLPLVIWHGMDSCCNPLSMGAIKKMVEKKIPGIYVLSLEIGKTLMEDVENSFFLNVNSQVTTVCQALAKDPKLQQGYNAMGFSQGGQFLRAVAQRCPSPPMINLISVGGQHQGVFGLPRCPGESSHICDFIRKTLNAGAYSKVVQERLVQAEYWHDPIKEDVYRNHSIFLADINQERGINESYKKNLMALKKFVMVKFLNDSIVDPVDSEWFGFYRSGQAKETIPLQETSLYTQDRLGLKEMDNAGQLVFLATEGDHLQLSEEWFYAHIIPFLG

SEQ ID NO: 10695 - protein, 282 aa, Homo Sapiens
MASPGCLWLLAVALLPWTCASRALQHLDPPAPLPLVIWHGMGDSCCNPLSMGAIKKMVEKKIPGIYVLSLEIGKTLMEDVENSFFLNVNSQVTTVCQALAKDPKLQQGYNAMGFSQGGQFLRAVAQRCPSPPMINLISVGGQHQGVFGLPRCPGESSHICDFIRKTLNAGAYSKVVQERLVQAEYWHDPIKEDVYRNHSIFLADINQERGINESYKKNLMALKKFVMVKFLNDSIVDPVDSEDRLGLKEMDNAGQLVFLATEGDHLQLSEEWFYAHIIPFLG

SEQ ID NO: 10696 - protein, 306 aa, Homo Sapiens
MASPGCLWLLAVALLPWTCASRALQHLDPPAPLPLVIWHGMGDSCCNPLSMGAIKKMVEKKIPGIYVLSLEIGKTLMEDVENSFFLNVNSQVTTVCQALAKDPKLQQGYNAMGFSQGGQFLRAVAQRCPSPPMINLISVGGQHQGVFGLPRCPGESSHICDFIRKTLNAGAYSKVVQERLVQAEYWHDPIKEDVYRNHSIFLADINQERGINESYKKNLMALKKFVMVKFLNDSIVDPVDSEWFGFYRSGQAKETIPLQETSLYTQDRLGLKEMDNAGQLVFLATEGDHLQLSEEWFYAHIIPFLG

SEQ ID NO: 10697 - protein, 301 aa, Homo Sapiens
MASPGCLWLLAVALLPWTCASRALQHLDPPAPLPLVIWHGMGDSCCNPLSMGAIKKMVEKKIPGIYVLSLEIGKTLMEDVENSFFLNVNSQVTTVCQALAKDPKLQQGYNAMGFSQGGQFLRAVAQRCPSPPMINLISVGGQHQGVFGLPRCPGESSHICDFIRKTLNAGAYSKVVQERLVQAEYWHDPIKEDVYRNHSIFLADINQERGINESYKKNLMALKKFVMVKFLNDSIVDPVDSEWFGFYRSGQAKETIPLQETSLYTQFCSLPRLECNGMISAHCNLRLPGSSEFSCLSLPSS

SEQ ID NO: 10698 - protein, 306 aa, Homo Sapiens; identical to SEQ ID NO: 10696

SEQ ID NO: 10699 - protein, 148 aa, Homo Sapiens
MASPGCLWLLAVALLPWTCASRALQHLDPPAPLPLVIWHGMGDSCCNPLSMGAIKKMVEKKIPGIYVLSLEIGKTLMEDVENSFFLNVNSQVTTVCQALAKDPKLQQGYNAMGFSQGGQFLRAVAQRCPSPPMINLISVGGQHQVPCA

SEQ ID NO: 10700 - protein, 208 aa, Homo Sapiens
MASPGCLWLLAVALLPWTCASRALQHLDPPAPLPLVIWHGMGDSCCNPLSMGAIKKMVEKKIPGIYVLSLEIGKTLMEEGSGSEMPFTSHDQSDLGWGTTSSLVQAEYWHDPIKEDVYRNHSIFLADINQERGINESYKKNLMALKKFVMVKFLNDSIVDPVDSEWFGFYRSGQAKETIPLQETSLYTQDRLGLKEMDNAGQLVFLAT

SEQ ID NO: 10701 - protein, 55 aa, Homo Sapiens
MASPGCLWLLAVALLPWTCASRALQHLDPPAPLPLVIWHGMGERQLLQSLKHGCY

SEQ ID NO: 10702 - protein, 335 aa, Homo Sapiens
MASPGCLWLLAVALLPWTCASRALQHLDPPAPLPLVIWHGMGSRYVAQTGLELLASSNPPASSYQSAGMIGDSCCNPLSMGAIKKMVEKKIPGIYVLSLEIGKTLMEDVENSFFLNVNSQVTTVCQALAKDPKLQQGYNAMGFSQGGQFLRAVAQRCPSPPMINLISVGGQHQGVFGLPRCPGESSHICDFIRKTLNAGAYSKVVQERLVQAEYWHDPIKEDVYRNHSIFLADINQERGINESYKKNLMALKKFVMVKFLNDSIVDPVDSEWFGFYRSGQAKETIPLQETSLYTQDRLGLKEMDNAGQLVFLATEGDHLQLSEEWFYAHIIPFLG

SEQ ID NO: 10703 - protein, 203 aa, Homo Sapiens
MASPGCLWLLAVALLPWTCASRALQHLDPPAPLPLVIWHGMGVFGLPRCPGESSHICDFIRKTLNAGAYSKVVQERLVQAEYWHDPIKEDVYRNHSIFLADINQERGINESYKKNLMALKKFVMVKFLNDSIVDPVDSEWFGFYRSGQAKETIPLQETSLYTQDRLGLKEMDNAGQLVFLATEGDHLQLSEEWFYAHIIPFLG

SEQ ID NO: 10704 - protein, 35 aa, Homo Sapiens
  misc_feature (1)..(1): Xaa can be any naturally occurring amino acid
XLAVALLPWTCASRALQHLDPPAPLPLVIWHGMGE

SEQ ID NO: 10705 - protein, 323 aa, Homo Sapiens
  misc_feature (1)..(1): Xaa can be any naturally occurring amino acid
XLLAVALLPWTCASRALQHLDPPAPLPLVIWHGMGDSCCNPLSMGAIKKMVEKKIPGIYVLSLEIGKTLMEDVENSFFLNVNSQVTTVCQALAKDPKLQQGYNAMGFSQGGQFLRAVAQRCPSPPMINLISVGGQHQGVFGLPRCPGESSHICDFIRKTLNAGAYSKVVQERLVQAEYWHDPIKEDVYRNHSIFLADINQERGINESYKKNLMALKKFVMVKFLNDSIVDPVDSEWFGFYRSGQAKETIPLQETSLYTQVTGRESILGGWCFFSSQFLKLLCSLVLEPFPLHLRALGPPGAKGNGQCRTASVSGYRRGPSSVV

SEQ ID NO: 10706 - protein, 78 aa, Homo Sapiens
  misc_feature (1)..(1): Xaa can be any naturally occurring amino acid
XPPMINLISVGGQHQGVFGLPRCPGESSHICDFIRKTLNAGAYSKVVQERGLDFTEVAKPRKPFPYRRPPCTHRTAWG

SEQ ID NO: 10707 - protein, 308 aa, Homo Sapiens
MKSCGSMLGLCGQRLPAAWVLLLLPFLPLLLLAAPAPHRASYKPVIVVHGLFDSSYSFRHLLEYINETHPGTVVTVLDLFDGRESLRPLWEQVQGFREAVVPIMAKAPQGVHLICYSQGGLVCRALLSVMDDHNVDSFISLSSPQMGQYGDTDYLKWLFPTSMRSNLYRICYSPWGQEFSICNYWHDPHHDDLYLNASSFLALINGERDHPNATVWRKNFLRVGHLVLIGGPDDGVITPWQSSFFGFYDANETVLEMEEQLVYLRDSFGLKTLLARGAIVRCPMAGISHTAWHSNRTLYETCIEPWLS

SEQ ID NO: 10708 - protein, 97 aa, Homo Sapiens
MLGLCGQRLPAAWVLLLLPFLPLLLLAAPAPHRASYKPVIVVHGLFDSSYSFRHLLEYINEGALCAGLCFLSWMITTWILSSPSPLHRWDSMETRTT

SEQ ID NO: 10709 - protein, 158 aa, Homo Sapiens
MLGLCGQRLPAAWVLLLLPFLPLLLLAAPAPHRASYKPVIVVHGLFDSSYSFRHLLEYINEMGQYGDTDYLKWLFPTSMRSNLYRICYSPWGQEFSICNYWHDPHHDDLYLNASSFLALINGERDHPNATVWRKNFLRVGHLVLIGGPDDGVITPWQS

SEQ ID NO: 10710 - protein, 180 aa, Homo Sapiens
MLGLCGQRLPAAWVLLLLPFLPLLLLAAPAPHRASYKPVIVVHGLFDSSYSFRHLLEYINETHPGTVVTVLDLFDGRESLRPLWEQVQGFREAVVPIMAKAPQGVHLICYSQGGLVCRALLSVMDDHNVDSFISLSSPQMGQYGDTDYLKWLFPTSMRSNLYRICYSPWGQEFSICNYWH

SEQ ID NO: 10711 - protein, 302 aa, Homo Sapiens
MLGLCGQRLPAAWVLLLLPFLPLLLLAAPAPHRASYKPVIVVHGLFDSSYSFRHLLEYINETHPGTVVTVLDLFDGRESLRPLWEQVQGFREAVVPIMAKAPQGVHLICYSQGGLVCRALLSVMDDHNVDSFISLSSPQMGQYGDTDYLKWLFPTSMRSNLYRICYSPWGQEFSICNYWHDPHHDDLYLNASSFLALINGERDHPNATVWRKNFLRVGHLVLIGGPDDGVITPWQSSFFGFYDANETVLEMEEQLVYLRDSFGLKTLLARGAIVRCPMAGISHTAWHSNRTLYETCIEPWLS

SEQ ID NO: 10712 - protein, 302 aa, Homo Sapiens; identical to SEQ ID NO: 10711

SEQ ID NO: 10713 - protein, 302 aa, Homo Sapiens; identical to SEQ ID NO: 10711

SEQ ID NO: 10714 - protein, 302 aa, Homo Sapiens; identical to SEQ ID NO: 10711

SEQ ID NO: 10715 - protein, 79 aa, Homo Sapiens
MAAARLCLSLLLLSTCVALLLQPLLGAQGAPLEPVYPGDNATPEQMAQYAADLRRYINMLTRPRPRPMCPGQDGAYRQI

SEQ ID NO: 10716 - protein, 95 aa, Homo Sapiens
MAAARLCLSLLLLSTCVALLLQPLLGAQGAPLEPVYPGDNATPEQMAQYAADLRRYINMLTRPRYGKRHKEDTLAFSEWGSPHAAVPRELSPLDL

SEQ ID NO: 10717 - protein, 95 aa, Homo Sapiens; identical to SEQ ID NO: 10716

SEQ ID NO: 10718 - protein, 105 aa, Homo Sapiens
MAAARLCLSLLLLSTCVALLLQPLLGAQGAPLEPVYPGDNATPEQMAQYAADLRRYINMLTRPSACPCCLFPPRYGKRHKEDTLAFSEWGSPHAAVPRELSPLDL

SEQ ID NO: 10719 - protein, 132 aa, Homo Sapiens
  misc_feature (1)..(1): Xaa can be any naturally occurring amino acid
XQYAADLRRYINMLTRPRCVPQLGREIPAPGTLGPLHIPGHTLSPAPAPAPSRPALGKTGHLCSTGLDQCALGKMVPTGRYETGGLAPGHSACPCCLFPPRYGKRHKEDTLAFSEWGSPHAAVPRELSPLDL

SEQ ID NO: 10720 - protein, 90 aa, Homo Sapiens
MDRRRMALRPGSRRPTAFFFHSRWLVPNLLAFFLGLSGAGPIHLPMPWPNGRRHRVLDPHTQLSTHEAPGRWKPVAPRTMKACPQVLLEW

SEQ ID NO: 10721 - protein, 140 aa, Homo Sapiens
MEPQVRALRCGCWNRDSKRASGGSIQVNPKKSVCGGVHTTNYYGEEDKEDMDRRRMALRPGSRRPTAFFFHSRWLVPNLLAFFLGLSGAGPIHLPMPWPNGRRHRVLDPHTQLSTHEAPGRWKPVAPRTMKACPQVLLEW

SEQ ID NO: 10722 - protein, 188 aa, Homo Sapiens
MVPGAAGWCCLVLWLPACVAAHGFRIHDYLYFQVLSPGDIRYIFTATPAKDFGGIFHTRYEQIHLVPAEPPEACGELSNGFFIQDQIALVERGGCSFLSKTRVVQEHGGRAVIISDNAVDNDSFYVEMIQDSTQRTADIPALFLLGRDGYMIRRSLEQHGLPWAIISIPVNVTSIPTFELLQPPWTFW

SEQ ID NO: 10723 - protein, 151 aa, Homo Sapiens
MRRLLLVTSLVVVLLWEAGAVPAPKVPIKMQVKHWPSEQDPEKAWGARVVEPPEKDDQLVVLFPVQKPKLLTTEEKPRGQGRGPILPGTKAWMETEDTLGHVLSPEPDHDSLYHPPPEEDQGEERPRLWVMPNHQVLLGPEEDQDHIYHPQ

SEQ ID NO: 10724 - protein, 142 aa, Homo Sapiens
MRRLLLVTSLVVVLLWEAGAVPAPKVPIKMQVKHWPSEQDPEKAWGARVVEPPEKDDQLVVLFPVQKPKLLTTEEKPRGTKAWMETEDTLGHVLSPEPDHDSLYHPPPEEDQGEERPRLWVMPNHQVLLGPEEDQDHIYHPQ

SEQ ID NO: 10725 - protein, 178 aa, Homo Sapiens
MLLILLSVALLALSSAQNLNEDVSQEESPSLIAGNPQGPSPQGGNKPQGPPPPPGKPQGPPPQGGNKPQGPPPPGKPQGPPPQGDKSRSPRSPPGKPQGPPPQGGKPQGPPAQGGSKSQSARSPPGKPQGPPQQEGNNPQGPPPPAGGNPQQPQAPPAGQPQGPPRPPQGGRPSRPPQ

SEQ ID NO: 10726 - protein, 198 aa, Homo Sapiens
MLLILLSVALLALSSAQNLNEDVSQEESPSLIAGNPQGPSPQGGNKPQGPPPPPGKPQGPPPQGGNKPQGPPPPGKPQGPPPQGDKSRSPRSPPGKPQGPPPQGGKPQGPPPQGGNKPQGPPPPGKPQGPPAQGGSKSQSARSPPGKPQGPPQQEGNNPQGPPPPAGGNPQQPQAPPAGQPQGPPRPPQGGRPSRPPQ

SEQ ID NO: 10727 - protein, 151 aa, Homo Sapiens
MLLILLSVALLALSSAQNLNEDVSQEESPSLIAGNPQGPSPQGGNKPQGPPPPPGKPQGPPPQGGNKPQGPPPPGKPQGPPPQGDKSRSPRSPPGKPQGPPPQGGNQPQGPPPPPGKPQGPPPQGGNRPQGPPPPGKPQGPPPQGDKSRSP

SEQ ID NO: 10728 - protein, 330 aa, Homo Sapiens
MLLILLSVALLALSSAQNLNEDVSQEESPSLIAGNPQGPSPQGGNKPQGPPPPPGKPQGPPPQGGNKPQGPPPPGKPQGPPPQGDKSRSPRSPPGKPQGPPPQGGNQPQGPPPPPGKPQGPPPQGGNRPQGPPPPGKPQGPPPQGDKSRSPSPPGKPQGPPPQGGNQPQGPPPPPGKPQGPPPQGGKKPQGPPPPGKPQGPPPQGDKSRSSQSPPGKPQGPPPQGGNQPQGPPPPPGKPQGPPPQGGNKPQGPPPPGKPQGPPAQGGSKSQSARSPPGKPQGPPQQEGNNPQGPPPPAGGNPQQPQAPPAGQPQGPPRPPQGGRPSRPPQ

SEQ ID NO: 10729 - protein, 21 aa, Homo Sapiens
MLLILLSVALLALSSAQNLNE

SEQ ID NO: 10730 - protein, 416 aa, Homo Sapiens
MLLILLSVALLALSSAQNLNEDVSQEESPSLIAGNPQGAPPQGGNKPQGPPSPPGKPQGPPPQGGNQPQGPPPPPGKPQGPPPQGGNKPQGPPPPGKPQGPPPQGDKSRSPRSPPGKPQGPPPQGGNQPQGPPPPPGKPQGPPPQGGNKPQGPPPPGKPQGPPPQGDNKSRSSRSPPGKPQGPPPQGGNQPQGPPPPPGKPQGPPPQGGNKPQGPPPPGKPQGPPPQGDNKSQSARSPPGKPQGPPPQGGNQPQGPPPPPGKPQGPPPQGGNKPQGPPPPGKPQGPPPQGGSKSRSSRSPPGKPQGPPPQGGNQPQGPPPPPGKPQGPPPQGGNKPQGPPPPGKPQGPPPQGGSKSRSARSPPGKPQGPPQQEGNNPQGPPPPAGGNPQQPQAPPAGQPQGPPRPPQGGRPSRPPQ

SEQ ID NO: 10731 - protein, 351 aa, Homo Sapiens
MLLILLSVALLALSSAQSLNEDVSQEESPSVISGKPEGRRPQGGNQPQRTPPPPGKPEGRPPQGGNQSQGPPPRPGKPEGPPPQGGNQSQGPPPRPGKPEGQPPQGGNQSQGPPPRPGKPEGPPPQGGNQSQGPPPRPGKPEGPPPQGGNQSQGPPPRPGKPEGPPPQGGNQSQGPPPHPGKPEGPPPQGGNQSQGPPPRPGKPEGPPPQGGNQSQGPPPRPGKPEGPPPQGGNKPQGPPPRPGKPEGPPPQGGNQSQGPPPRPGKPEGPPSQGGNKPQGPPPHPGKPQGPPPQEGNKPQRPPPPGRPQGPPPPGGNPQQPLPPPAGKPQGPPPPPQGGRPHRPPQGQPPQ

SEQ ID NO: 10732 - protein, 309 aa, Homo Sapiens
MLLILLSVALLALSSAQSLNEDVSQEESPSVISGKPEGRRPQGGNQPQRTPPPPGKPEGRPPQGGNQSQGPPPRPGKPEGPPPQGGNQSQGPPPRPGKPEGQPPQGGNQSQGPPPRPGKPEGPPPQGGNQSQGPPPRPGKPEGPPPQGGNQSQGPPPRPGKPEGPPPQGGNQSQGPPPHPGKPEGPPPQGGNQSQGPPPRPGKPEGPPPQGGNQSQGPPPRPGKPEGPPSQGGNKPQGPPPHPGKPQGPPPQEGNKPQRPPPPGRPQGPPPPGGNPQQPLPPPAGKPQGPPPPPQGGRPHRPPQGQPPQ

SEQ ID NO: 10733 - protein, 178 aa, Homo Sapiens
MLLILLSVALLALSSAESSSEDVSQEESLFLISGKPEGRRPQGGNQPQRPPPPPGKPQGPPPQGGNQSQGPPPPPGKPEGRPPQGGNQSQGPPPHPGKPERPPPQGGNQSQGKPQGPPQQEGNKPQGPPPPGKPQGPPPAGGNPQQPQAPPAGKPQGPPPPPQGGRPPRPAQGQQPPQ

SEQ ID NO: 10734 - protein, 178 aa, Homo Sapiens; identical to SEQ ID NO: 10733

SEQ ID NO: 10735 - protein, 247 aa, Homo Sapiens
MLLILLSVALLALSSAESSSEDVSQEESLFLISGKPEGRRPQGGNQPQRPPPPPGKPQGPPPQGGNQSQGPPPPPGKPEGRPPQGGNQSQGPPPHPGKPERPPPQGGNQSQGTPPPPGKPERPPPQGGNQSHRPPPPPGKPERPPPQGGNQSQGPPPHPGKPEGPPPQEGNKSRSARSPPGKPQGPPQQEGNKPQGPPPPGKPQGPPPAGGNPQQPQAPPAGKPQGPPPPPQGGRPPRPAQGQQPPQ

SEQ ID NO: 10736 - protein, 247 aa, Homo Sapiens; identical to SEQ ID NO: 10735

SEQ ID NO: 10737 - protein, 54 aa, Homo Sapiens
MCTTLFLLSTLAMLWRRRFANRVQPEPSDVDGAARGSSLDADPQSSGREKEPLK

SEQ ID NO: 10738 - protein, 54 aa, Homo Sapiens; identical to SEQ ID NO: 10737

SEQ ID NO: 10739 - protein, 164 aa, Homo Sapiens [sequence omitted]

SEQ ID NO: 10740 - protein, 517 aa, Homo Sapiens
MGRRALLLLLLSFLAPWATIALRPALRALGSLHLPTNPTSLPAVAKNYSVLYFQQKALAAGQLHICIIQLNHYKTPLVDHFGFNTVKTFNQRYLVADKYWKKNGGSILFYTGNEGDIIWFCNNTGFMWDVAEELKAMLVFAEHRYYGESLPFGDNSFKDSRHLNFLTSEQALADFAELIKHLKRTIPGAENQPVIAIGGSYGGMLAAWFRMKYPHMVVGALAASAPIWQFEDLVPCGVFMKIVTTDFRKSGPHCSESIHRSWDAINRLSNTGSGLQWLTGALHLCSPLTSQDIQHLKDWISETWVNLAMVDYPYASNFLQPLPAWPIKVVCQYLKNPNVSDSLLLQNIFQALNVYYNYSGQVKCLNISETATSSLGTLGWSYQACTEVVMPFCTNGVDDMFEPHSWNLKELSDDCFQQWGVRPRPSWITTMYGGKNISSHTNIVFSNGELDPWSGGGVTKDITDTLVAVTISEGAHHLDLRTKNALDPMSVLLARSLEVRHMKNWIRDFYDSAGKQH

SEQ ID NO: 10741 - protein, 496 aa, Homo Sapiens
MGRRALLLLLLSFLAPWATIALRPALRALGSLHLPTNPTSLPAVAKNYSVLYFQQKVDHFGFNTVKTFNQRYLVADKYWKKNGGSILFYTGNEGDIIWFCNNTGFMWDVAEELKAMLVFAEHRYYGESLPFGDNSFKDSRHLNFLTSEQALADFAELIKHLKRTIPGAENQPVIAIGGSYGGMLAAWFRMKYPHMVVGALAASAPIWQFEDLVPCGVFMKIVTTDFRKSGPHCSESIHRSWDAINRLSNTGSGLQWLTGALHLCSPLTSQDIQHLKDWISETWVNLAMVDYPYASNFLQPLPAWPIKVVCQYLKNPNVSDSLLLQNIFQALNVYYNYSGQVKCLNISETATSSLGTLGWSYQACTEVVMPFCTNGVDDMFEPHSWNLKELSDDCFQQWGVRPRPSWITTMYGGKNISSHTNIVFSNGELDPWSGGGVTKDITDTLVAVTISEGAHHLDLRTKNALDPMSVLLARSLEVRHMKNWIRDFYDSAGKQH

SEQ ID NO: 10742 - protein, 116 aa, Homo Sapiens
MKVDHFGFNTVKTFNQRYLVADKYWKKNGGSILFYTGNEGDIIWFCNNTGFMWDVAEELKAMLVFAEHRYYGESLPFGDNSFKDSRHLNFLTSEQALADFAELIKHLKRTIPGAEN

SEQ ID NO: 10743 - protein, 26 aa, Homo Sapiens
MWDVAEELKAMLVFAEHRYYGESLPF

SEQ ID NO: 10744 - protein, 43 aa, Homo Sapiens
MWDVAEELKAMLVFAEHRYYGESLPFGDNSFKDSRHLNFLTSE

SEQ ID NO: 10745 - protein, 100 aa, Homo Sapiens
MWDVAEELKAMLVFAEHRYYGESLPFGDNSFKDSRHLNFLTSEQALADFAELIKHLKRTIPGAENQPVIAIGGSYGGMLAAWFRMKYPHMVVGALAASAP

SEQ ID NO: 10746 - protein, 145 aa, Homo Sapiens
MWDVAEELKAMLVFAEHRYYGESLPFGDNSFKDSRHLNFLTSEQALADFAELIKHLKRTIPGAENQPVIAIGGSYGGMLAAWFRMKYPHMVVGALAASAPIWQFEDLVPCGVFMKIVTTDFRKSGPHCSESIHRSWDAINRLSNT

SEQ ID NO: 10747 - protein, 148 aa, Homo Sapiens
MWDVAEELKAMLVFAEHRYYGESLPFGDNSFKDSRHLNFLTSEQALADFAELIKHLKRTIPGAENQPVIAIGGSYGGMLAAWFRMKYPHMVVGALAASAPIWQFEDLVPCGVFMKIVTTDFRKSGPHCSESIHRSWDAINRLSNTGSG

SEQ ID NO: 10748 - protein, 183 aa, Homo Sapiens
MWDVAEELKAMLVFAEHRYYGESLPFGDNSFKDSRHLNFLTSEQALADFAELIKHLKRTIPGAENQPVIAIGGSYGGMLAAWFRMKYPHMVVGALAASAPIWQFEDLVPCGVFMKIVTTDFRKSGPHCSESIHRSWDAINRLSNTGSGLQWLTGALHLCSPLTSQDIQHLKDWISETWVNLAM

SEQ ID NO: 10749 - protein, 192 aa, Homo Sapiens
MWDVAEELKAMLVFAEHRYYGESLPFGDNSFKDSRHLNFLTSEQALADFAELIKHLKRTIPGAENQPVIAIGGSYGGMLAAWFRMKYPHMVVGALAASAPIWQFEDLVPCGVFMKIVTTDFRKSGPHCSESIHRSWDAINRLSNTGSGLQWLTGALHLCSPLTSQDIQHLKDWISETWVNLAMVDYPYASNF

SEQ ID NO: 10750 - protein, 234 aa, Homo Sapiens
MWDVAEELKAMLVFAEHRYYGESLPFGDNSFKDSRHLNFLTSEQALADFAELIKHLKRTIPGAENQPVIAIGGSYGGMLAAWFRMKYPHMVVGALAASAPIWQFEDLVPCGVFMKIVTTDFRKSGPHCSESIHRSWDAINRLSNTGSGLQWLTGALHLCSPLTSQDIQHLKDWISETWVNLAMVDYPYASNFLQPLPAWPIKVVCQYLKNPNVSDSLLLQNIFQALNVYYNYSG

SEQ ID NO: 10751 - protein, 367 aa, Homo Sapiens
MMGSVLPAEALVLKTGLKAPGLALAEVITSDILHSFLYGRWRNVLGEQLFEDKSHHASPKTAFTAEVLAQSFSGEVQKLSSLVLPAEVIIAQSSIPGEGLGIFSKTWIKAGTEMGPFTGRVIAPEHVDICKNNNLMWEVFNEDGTVRYFIDASQEDHRSWMTYIKCARNEQEQNLEVVQIGTSIFYKAIEMIPPDQELLVWYGNSHNTFLGIPGVPGLEEDQKKNKHEDFHPADSAAGPAGRMRCVICHRGFNSRSNLRSHMRIHTLDKPFVCRFCNRRFSQSSTLRNHVRLHTGERPYKCQVCQSAYSQLAGLRAHQKSARHRPPSTALQAHSPALPAPHAHAPALAAAAAAAAAAAAHHLPAMVL

SEQ ID NO: 10752 - protein, 185 aa, Homo Sapiens
MDHRSRLRGTGLNRIPGTQSRAPRVPLPFHVQQEAREGEDWEREPPRQRPPIYEPPESEELPDNVMVSKPAPYWEGTAVIDGEFKELKLTDYRGKYLVFFFYPLDFTFVCPTEIIAFGDRLEEFRSINTEVVACSVDSQFTHLAWINTPRRQGGLGPIRIPLLSDLTHQISKDYGVYLEDSGHTL

SEQ ID NO: 10753 - protein, 271 aa, Homo Sapiens
MEALPLLAATTPDHGRHRRLLLLPLLLFLLPAGAVQGWETEERPRTREEECHFYAGGQVYPGEASRVSVADHSLHLSKAKISKPAPYWEGTAVIDGEFKELKLTDYRGKYLVFFFYPLDFTFVCPTEIIAFGDRLEEFRSINTEVVACSVDSQFTHLAWINTPRRQGGLGPIRIPLLSDLTHQISKDYGVYLEDSGHTLRGLFIIDDKGILRQITLNDLPVGRSVDETLRLVQAFQYTDKHGEVCPAGWKPGSETIIPDPAGKLKYFDKLN

SEQ ID NO: 10754 - protein, 186 aa, Homo Sapiens
MEALPLLAATTPDHGRHRRLLLLPLLLFLLPAGAVQGWETEERPRTREEECHFYAGGQVYPGEASRVSVADHSLHLSKAKISKPAPYWEGTAVIDGEFKELKLTDYRGKYLVFFFYPLDFTFVCPTEIIAFGDRLEEFRSINTEVVACSVDSQFTHLAWSVSYTYIRRKKRMDLLLKHGQITLDMI

SEQ ID NO: 10755 - protein, 161 aa, Homo Sapiens
  misc_feature (1)..(1): Xaa can be any naturally occurring amino acid
XCPTEIIAFGDRLEEFRSINTEVVACSVDSQFTHLAWINTPRRQGGLGPIRIPLLSDLTHQISKDYGVYLEDSGHTLRGLFIIDDKGILRQITLNDLPVGRSVDETLRLVQAFQYTDKHGEVCPAGWKPGSETIKPEDTMKAWWPRESYNPRSSWKAEVFR

SEQ ID NO: 10756 - protein, 382 aa, Homo Sapiens
MRSPLCWLLPLLILASVAQGQPTRRPRPGTGPGRRPRPRPRPTPSFPQPDEPAEPTDLPPPLPPGPPSIFPDCPRECYCPPDFPSALYCDSRNLRKVPVIPPRIHYLYLQNNFITELPVESFQNATGLRWINLDNNRIRKIDQRVLEKLPGLVFLYMEKNQLEEVPSALPRNLEQLRLSQNHISRIPPGVFSKLENLLLLDLQHNRLSDGVFKPDTFHGLKNLMQLNLAHNILRKMPPRVPTAIHQLYLDSNKIETIPNGYFKSFPNLAFIRLNYNKLTDRGLPKNSFNISNLLVLHLSHNRISSVPAINNRLEHLYLNNNSIEKINGTQICPNDLVAFHDFSSDLENVPHLRYLRLDGNYLKPPIPLDLMMCFRLLQSVVI

SEQ ID NO: 10757 - protein, 555 aa, Homo Sapiens
MAARLLLLGILLLLLPLPVPAPCHTAARSECKRSHKFVPGAWLAGEGVDVTSLRRSGSFPVDTQRFLRPDGTCTLCENALQEGTLQRLPLALTNWRAQGSGCQRHVTRAKVSSTEAVARDAARSIRNDWKVGLDVTPKPTSNVHVSVAGSHSQAANFAAQKTHQDQYSFSTDTVECRFYSFHVVHTPPLHPDFKRALGDLPHHFNASTQPAYLRLISNYGTHFIRAVELGGRISALTALRTCELALEGLTDNEVEDCLTVEAQVNIGIHGSISAEAKACEEKKKKHKMTASFHQTYRERHSEVVGGHHTSINDLLFGIQAGPEQYSAWVNSLPGSPGLVDYTLEPLHVLLDSQDPRREALRRALSQYLTDRARWRDCSRPCPPGRQKSPRDPCQCVCHGSAVTTQDCCPRQRGLAQLEVTFIQAWGLWGDWFTATDAYVKLFFGGQELRTSTVWDNNNPIWSVRLDFGDVLLATGGPLRLQVWDQDSGRDDDLLGTCDQAPKSGSHEVRCNLNHGHLKFRYHARCLPHLGGGTCLDYVPQMLLGEPPGNRSGAVW

SEQ ID NO: 10758 - protein, 555 aa, Homo Sapiens; identical to SEQ ID NO: 10757

SEQ ID NO: 10759 - protein, 232 aa, Homo Sapiens
MAARLLLLGILLLLLPLPVPAPCHTAARSECKRSHKFVPGAWLAGEGVDVTSLRRSGSFPVDTQRFLRPDGTCTLCENALQEGTLQRLPLALTNWRAQGSGCQRHVTRAKVSSTEAVARDAARSIRNDWKVGLDVTPKPTSNVHVSVAGSHSQAANFAAQKTHQDQYSFSTDTVECRFYSSSAIVSASGFYMWPNTILLPTWPREAKRLDTHQTDGKGRFRLFFREVAGFTR

SEQ ID NO: 10760 - protein, 211 aa, Homo Sapiens
MKLPLLLALLFGAVSALHLRSETSTFETPLGAKTLPEDEETPEQEMEETPCRELEEEEEWGSGSEDASKKDGAVESISVPDMVDKNLTCPEEEDTVKVVGIPGCQTCRYLLFTCRRCYRGNLVSIHNFNINYRIQCSVSALNQGQVWIGGRITGSGRCRRFQWVDGSRWNFAYWAAHQPWSRGGHCVALCTRGGHWRRAHCLRRLPFICSY

SEQ ID NO: 10761 - protein, 222 aa, Homo Sapiens
MKLPLLLALLFGAVSALHLRSETSTFETPLGAKTLPEDEETPEQEMEETPCRELEEEEEWGSGSEDASKKDGAVESISVPDMVDKNLTCPEEEDTVKVVGIPGCQTCRYLLVRSLQTFSQAWFTCRRCYRGNLVSIHNFNINYRIQCSVSALNQGQVWIGGRITGSGRCRRFQWVDGSRWNFAYWAAHQPWSRGGHCVALCTRGGHWRRAHCLRRLPFICSY

SEQ ID NO: 10762 - protein, 222 aa, Homo Sapiens; identical to SEQ ID NO: 10761

SEQ ID NO: 10763 - protein, 225 aa, Homo Sapiens
MQCLLLLPFLLLGTVSALHLENDAPHLESLETQADLGQDLDSSKEQERDLALTEEVIQAEGEEVKASACQDNFEDEEAMESDPAALDKDFQCPREEDIVEVQGSPRCKICRYLLVRTPKTFAEAQNVCSRCYGGNLVSIHDFNFNYRIQCCTSTVNQAQVWIGGNLRGWFLWKRFCWTDGSHWNFAYWSPGQPGNGQGSCVALCTKGGYWRRAQCDKQLPFVCSF

SEQ ID NO: 10764 - protein, 1404 aa, Homo Sapiens
MAWKTLPIYLLLLLSVFVIQQVSSQDLSSCAGRCGEGYSRDATCNCDYNCQHYMECCPDFKRVCTAELSCKGRCFESFERGRECDCDAQCKKYDKCCPDYESFCAEVHNPTSPPSSKKAPPPSGASQTIKSTTKRSPKPPNKKKTKKVIESEEITEEHSVSENQESSSSSSSSSSSSTIRKIKSSKNSAANRELQKKLKVKDNKKNRTKKKPTPKPPVVDEAGSGLDNGDFKVTTPDTSTTQHNKVSTSPKITTAKPINPRPSLPPNSDTSKETSLTVNKETTVETKETTTTNKQTSTDGKEKTTSAKETQSIEKTSAKDLAPTSKVLAKPTPKAETTTKGPALTTPKEPTPTTPKEPASTTPKEPTPTTIKSAPTTPKEPAPTTTKSAPTTPKEPAPTTTKEPAPTTPKEPAPTTTKEPAPTTTKSAPTTPKEPAPTTPKKPAPTTPKEPAPTTPKEPTPTTPKEPAPTTKEPAPTTPKEPAPTAPKKPAPTTPKEPAPTTPKEPAPTTTKEPSPTTPKEPAPTTTKSAPTTTKEPAPTTTKSAPTTPKEPSPTTTKEPAPTTPKEPAPTTPKKPAPTTPKEPAPTTPKEPAPTTTKKPAPTTPKEPAPTTPKETAPTTPKKLTPTTPEKLAPTTPEKPAPTTPEELAPTTPEEPTPTTPEEPAPTTPKAAAPNTPKEPAPTTPKEPAPTTPKEPAPTTPKETAPTTPKGTAPTTLKEPAPTTPKKPAPKELAPTTTKEPTSTTSDKPAPTTPKGTAPTTPKEPAPTTPKEPAPTTPKGTAPTTLKEPAPTTPKKPAPKELAPTTTKGPTSTTSDKPAPTTPKETAPTTPKEPAPTTPKKPAPTTPETPPPTTSEVSTPTTTKEPTTIHKSPDESTPELSAEPTPKALENSPKEPGVPTTKTPAATKPEMTTTAKDKTTERDLRTTPETTTAAPKMTKETATTTEKTTESKITATTTQVTSTTTQDTTPFKITTLKTTTLAPKVTTTKKTITTTEIMNKPEETAKPKDRATNSKATTPKPQKPTKAPKKPTSTKKPKTMPRVRKPKTTPTPRKMTSTMPELNPTSRIAEAMLQTTTRPNQTPNSKLVEVNPKSEDAGGAEGETPHMLLRPHVFMPEVTPDMDYLPRVPNQGIIINPMLSDETNICNGKPVDGLTTLRNGTLVAFRGHYFWMLSPFSPPSPARRITEVWGIPSPIDTVFTRCNCEGKTFFFKDSQYWRFTNDIKDAGYPKPIFKGFGGLTGQIVAALSTAKYKNWPESVYFFKRGGSIQQYIYKQEPVQKCPGRRPALNYPVYGETTQVRRRRFERAIGPSQTHTIRIQYSPARLAYQDKGVLHNEVKVSILWRGLPNVVTSAISLPNIRKPDGYDYYAFSKDQYYNIDVPSRTARAITTRSGQTLSKVWYNCP

SEQ ID NO: 10765 - protein, 1361 aa, Homo Sapiens
MAWKTLPIYLLLLLSVFVIQQVSSQDLSSCAGRCGEGYSRDATCNCDYNCQHYMECCPDFKRVCTAELSCKGRCFESFERGRECDCDAQCKKYDKCCPDYESFCAEVHNPTSPPSSKKAPPPSGASQTIKSTTKRSPKPPNKKKTKKVIESEEITEVKDNKKNRTKKKPTPKPPVVDEAGSGLDNGDFKVTTPDTSTTQHNKVSTSPKITTAKPINPRPSLPPNSDTSKETSLTVNKETTVETKETTTTNKQTSTDGKEKTTSAKETQSIEKTSAKDLAPTSKVLAKPTPKAETTTKGPALTTPKEPTPTTPKEPASTTPKEPTPTTIKSAPTTPKEPAPTTTKSAPTTPKEPAPTTTKEPAPTTPKEPAPTTTKEPAPTTTKSAPTTPKEPAPTTPKKPAPTTPKEPAPTTPKEPTPTTPKEPAPTTKEPAPTTPKEPAPTAPKKPAPTTPKEPAPTTPKEPAPTTTKEPSPTTPKEPAPTTTKSAPTTTKEPAPTTTKSAPTTPKEPSPTTTKEPAPTTPKEPAPTTPKKPAPTTPKEPAPTTPKEPAPTTTKKPAPTTPKEPAPTTPKETAPTTPKKLTPTTPEKLAPTTPEKPAPTTPEELAPTTPEEPTPTTPEEPAPTTPKAAAPNTPKEPAPTTPKEPAPTTPKEPAPTTPKETAPTTPKGTAPTTLKEPAPTTPKKPAPKELAPTTTKEPTSTTSDKPAPTTPKGTAPTTPKEPAPTTPKEPAPTTPKGTAPTTLKEPAPTTPKKPAPKELAPTTTKGPTSTTSDKPAPTTPKETAPTTPKEPAPTTPKKPAPTTPETPPPTTSEVSTPTTTKEPTTIHKSPDESTPELSAEPTPKALENSPKEPGVPTTKTPAATKPEMTTTAKDKTTERDLRTTPETTTAAPKMTKETATTTEKTTESKITATTTQVTSTTTQDTTPFKITTLKTTTLAPKVTTTKKTITTTEIMNKPEETAKPKDRATNSKATTPKPQKPTKAPKKPTSTKKPKTMPRVRKPKTTPTPRKMTSTMPELNPTSRIAEAMLQTTTRPNQTPNSKLVEVNPKSEDAGGAEGETPHMLLRPHVFMPEVTPDMDYLPRVPNQGIIINPMLSDETNICNGKPVDGLTTLRNGTLVAFRGHYFWMLSPFSPPSPARRITEVWGIPSPIDTVFTRCNCEGKTFFFKDSQYWRFTNDIKDAGYPKPIFKGFGGLTGQIVAALSTAKYKNWPESVYFFKRGGSIQQYIYKQEPVQKCPGRRPALNYPVYGETTQVRRRRFERAIGPSQTHTIRIQYSPARLAYQDKGVLHNEVKVSILWRGLPNVVTSAISLPNIRKPDGYDYYAFSKDQYYNIDVPSRTARAITTRSGQTLSKVWYNCP

SEQ ID NO: 10766 - protein, 1311 aa, Homo Sapiens
MAWKTLPIYLLLLLSVFVIQQVSSQDLSSCAGRCGEGYSRDATCNCDYNCQHYMECCPDFKRVCTAELSCKGRCFESFERGRECDCDAQCKKYDKCCPDYESFCAEVKDNKKNRTKKKPTPKPPVVDEAGSGLDNGDFKVTTPDTSTTQHNKVSTSPKITTAKPINPRPSLPPNSDTSKETSLTVNKETTVETKETTTTNKQTSTDGKEKTTSAKETQSIEKTSAKDLAPTSKVLAKPTPKAETTTKGPALTTPKEPTPTTPKEPASTTPKEPTPTTIKSAPTTPKEPAPTTTKSAPTTPKEPAPTTTKEPAPTTPKEPAPTTTKEPAPTTTKSAPTTPKEPAPTTPKKPAPTTPKEPAPTTPKEPTPTTPKEPAPTTKEPAPTTPKEPAPTAPKKPAPTTPKEPAPTTPKEPAPTTTKEPSPTTPKEPAPTTTKSAPTTTKEPAPTTTKSAPTTPKEPSPTTTKEPAPTTPKEPAPTTPKKPAPTTPKEPAPTTPKEPAPTTTKKPAPTTPKEPAPTTPKETAPTTPKKLTPTTPEKLAPTTPEKPAPTTPEELAPTTPEEPTPTTPEEPAPTTPKAAAPNTPKEPAPTTPKEPAPTTPKEPAPTTPKETAPTTPKGTAPTTLKEPAPTTPKKPAPKELAPTTTKEPTSTTSDKPAPTTPKGTAPTTPKEPAPTTPKEPAPTTPKGTAPTTLKEPAPTTPKKPAPKELAPTTTKGPTSTTSDKPAPTTPKETAPTTPKEPAPTTPKKPAPTTPETPPPTTSEVSTPTTTKEPTTIHKSPDESTPELSAEPTPKALENSPKEPGVPTTKTPAATKPEMTTTAKDKTTERDLRTTPETTTAAPKMTKETATTTEKTTESKITATTTQVTSTTTQDTTPFKITTLKTTTLAPKVTTTKKTITTTEIMNKPEETAKPKDRATNSKATTPKPQKPTKAPKKPTSTKKPKTMPRVRKPKTTPTPRKMTSTMPELNPTSRIAEAMLQTTTRPNQTPNSKLVEVNPKSEDAGGAEGETPHMLLRPHVFMPEVTPDMDYLPRVPNQGIIINPMLSDETNICNGKPVDGLTTLRNGTLVAFRGHYFWMLSPFSPPSPARRITEVWGIPSPIDTVFTRCNCEGKTFFFKDSQYWRFTNDIKDAGYPKPIFKGFGGLTGQIVAALSTAKYKNWPESVYFFKRGGSIQQYIYKQEPVQKCPGRRPALNYPVYGETTQVRRRRFERAIGPSQTHTIRIQYSPARLAYQDKGVLHNEVKVSILWRGLPNVVTSAISLPNIRKPDGYDYYAFSKDQYYNIDVPSRTARAITTRSGQTLSKVWYNCP

SEQ ID NO: 10767 - protein, 162 aa, Homo Sapiens
MAWKTLPIYLLLLLSVFVIQQVSSQELSCKGRCFESFERGRECDCDAQCKKYDKCCPDYESFCAEEHSVSENQESSSSSSSSSSSSTIRKIKSSKNSAANRELQKKLKVKDNKKNRTKKKPTPKPPVVDEAGSGLDNGDFKVTTPDTSTTQHNKVSTSPKIT

SEQ ID NO: 10768 - protein, 1363 aa, Homo Sapiens
MAWKTLPIYLLLLLSVFVIQQVSSQELSCKGRCFESFERGRECDCDAQCKKYDKCCPDYESFCAEVHNPTSPPSSKKAPPPSGASQTIKSTTKRSPKPPNKKKTKKVIESEEITEEHSVSENQESSSSSSSSSSSSTIRKIKSSKNSAANRELQKKLKVKDNKKNRTKKKPTPKPPVVDEAGSGLDNGDFKVTTPDTSTTQHNKVSTSPKITTAKPINPRPSLPPNSDTSKETSLTVNKETTVETKETTTTNKQTSTDGKEKTTSAKETQSIEKTSAKDLAPTSKVLAKPTPKAETTTKGPALTTPKEPTPTTPKEPASTTPKEPTPTTIKSAPTTPKEPAPTTTKSAPTTPKEPAPTTTKEPAPTTPKEPAPTTTKEPAPTTTKSAPTTPKEPAPTTPKKPAPTTPKEPAPTTPKEPTPTTPKEPAPTTKEPAPTTPKEPAPTAPKKPAPTTPKEPAPTTPKEPAPTTTKEPSPTTPKEPAPTTTKSAPTTTKEPAPTTTKSAPTTPKEPSPTTTKEPAPTTPKEPAPTTPKKPAPTTPKEPAPTTPKEPAPTTTKKPAPTTPKEPAPTTPKETAPTTPKKLTPTTPEKLAPTTPEKPAPTTPEELAPTTPEEPTPTTPEEPAPTTPKAAAPNTPKEPAPTTPKEPAPTTPKEPAPTTPKETAPTTPKGTAPTTLKEPAPTTPKKPAPKELAPTTTKEPTSTTSDKPAPTTPKGTAPTTPKEPAPTTPKEPAPTTPKGTAPTTLKEPAPTTPKKPAPKELAPTTTKGPTSTTSDKPAPTTPKETAPTTPKEPAPTTPKKPAPTTPETPPPTTSEVSTPTTTKEPTTIHKSPDESTPELSAEPTPKALENSPKEPGVPTTKTPAATKPEMTTTAKDKTTERDLRTTPETTTAAPKMTKETATTTEKTTESKITATTTQVTSTTTQDTTPFKITTLKTTTLAPKVTTTKKTITTTEIMNKPEETAKPKDRATNSKATTPKPQKPTKAPKKPTSTKKPKTMPRVRKPKTTPTPRKMTSTMPELNPTSRIAEAMLQTTTRPNQTPNSKLVEVNPKSEDAGGAEGETPHMLLRPHVFMPEVTPDMDYLPRVPNQGIIINPMLSDETNICNGKPVDGLTTLRNGTLVAFRGHYFWMLSPFSPPSPARRITEVWGIPSPIDTVFTRCNCEGKTFFFKDSQYWRFTNDIKDAGYPKPIFKGFGGLTGQIVAALSTAKYKNWPESVYFFKRGGSIQQYIYKQEPVQKCPGRRPALNYPVYGETTQVRRRRFERAIGPSQTHTIRIQYSPARLAYQDKGVLHNEVKVSILWRGLPNVVTSAISLPNIRKPDGYDYYAFSKDQYYNIDVPSRTARAITTRSGQTLSKVWYNCP

SEQ ID NO: 10769 - protein, 854 aa, Homo Sapiens [sequence omitted]

SEQ ID NO: 10770 - protein, 140 aa, Homo Sapiens
GPPLGGQQSQPSAGDGNQDDGPQQGPPQQGGQQQQGPPPPQGKPQGPPQQGGQQQQGPPPPQGKPQGPPQQGGHPPPPQGRPQGPPQQGGHPRPPRGRPQGPPQQGGHQQGPPPPPPGKPQGPPPQGGRPQGPPQGQSPQ

SEQ ID NO: 10771 - protein, 175 aa, Homo Sapiens
MLLILLSVALLAFSSAQDLNEDGGDSEQFLDEERQGPPLGGQQSQPSAGDGNQDDGPQQGPPQQGGQQQQGPPPPQGKPQGPPQQGGQQQQGPPPPQGKPQGPPQQGGHPPPPQGRPQGPPQQGGHPRPPRGRPQGPPQQGGHQQGPPPPPPGKPQGPPPQGGRPQGPPQGQSPQ

SEQ ID NO: 10772 - protein, 187 aa, Homo Sapiens
MLLILLSVALLAFSSAQDLNEDVSQEDVPLVISDGGDSEQFLDEERQGPPLGGQQSQPSAGDGNQDDGPQQGPPQQGGQQQQGPPPPQGKPQGPPQQGGQQQQGPPPPQGKPQGPPQQGGHPPPPQGRPQGPPQQGGHPRPPRGRPQGPPQQGGHQQGPPPPPPGKPQGPPPQGGRPQGPPQGQSPQ

SEQ ID NO: 10773 - protein, 166 aa, Homo Sapiens
MLLILLSVALLAFSSAQDLDEDVSQEDVPLVISDGGDSEQFIDEERQGPPLGGQQSQPSAGDGNQNDGPQQGPPQQGGQQQQGPPPPQGKPQGPPQQGGHPPPPQGRPQGPPQQGGHPRPPRGRPQGPPQQGGHQQGPPPPPPGKPQGPPPQGGRPQGPPQGQSPQ

SEQ ID NO: 10774 - protein, 166 aa, Homo Sapiens; identical to SEQ ID NO: 10773

SEQ ID NO: 10775 - protein, 82 aa, Homo Sapiens
METVISSDSSPAVENEHPQETPESNNSVYTSFMKSHRCYDLIPTSSKLVVFDTSLQSCPCGFAFMIITVLATGEESFFCFGD

SEQ ID NO: 10776 - protein, 331 aa, Homo Sapiens
METVISSDSSPAVENEHPQETPESNNSVYTSFMKSHRCYDLIPTSSKLVVFDTSLQVKKAFFALVTNGVRAAPLWDSKKQSFVGMLTITDFINILHRYYKSALVQIYELEEHKIETWREVYLQDSFKPLVCISPNASLFDAVSSLIRNKIHRLPVIDPESGNTLYILTHKRILKFLKLFITEFPKPEFMSKSLEELQIGTYANIAMVRTTTPVYVALGIFVQHRVSALPVVDEKGRVVDIYSKFDVINLAAEKTYNNLDVSVTKALQHRSHYFEGVLKCYLHETLETIINRLVEAEVHRLVVVDENDVVKGIVSLSDILQALVLTGGEKKP

SEQ ID NO: 10777 - protein, 340 aa, Homo Sapiens
METVISSDSSPAVENEHPQETPESNNSVYTSFMKSHRCYDLIPTSSKLVVFDTSLQVKKAFFALVTNGVRAAPLWDSKKQSFVVLRALSCPLGMLTITDFINILHRYYKSALVQIYELEEHKIETWREVYLQDSFKPLVCISPNASLFDAVSSLIRNKIHRLPVIDPESGNTLYILTHKRILKFLKLFITEFPKPEFMSKSLEELQIGTYANIAMVRTTTPVYVALGIFVQHRVSALPVVDEKGRVVDIYSKFDVINLAAEKTYNNLDVSVTKALQHRSHYFEGVLKCYLHETLETIINRLVEAEVHRLVVVDENDVVKGIVSLSDILQALVLTGGEKKP

SEQ ID NO: 10778 - protein, 43 aa, Homo Sapiens
MFSLTGVMVISSDSSPAVENEHPQETPESNNSVYTSFMKSHRC

SEQ ID NO: 10779 - protein, 69 aa, Homo Sapiens
MKSHRCYDLIPTSSKLVVFDTSLQVKKAFFALVTNGVRAAPLWDSKKQSFVGMLTITDFINILHRYYKS

SEQ ID NO: 10780 - protein, 82 aa, Homo Sapiens
MKSHRCYDLIPTSSKLVVFDTSLQVKKAFFALVTNGVRAAPLWDSKKQSFVGMLTITDFINILHRYYKSALVQIYELEEHKI

SEQ ID NO: 10781 - protein, 125 aa, Homo Sapiens
MKSHRCYDLIPTSSKLVVFDTSLQVKKAFFALVTNGVRAAPLWDSKKQSFVGMLTITDFINILHRYYKSALVQIYELEEHKIETWREVYLQDSFKPLVCISPNASLFDAVSSLIRNKIHRLPVID

SEQ ID NO: 10782 - protein, 161 aa, Homo Sapiens
MKSHRCYDLIPTSSKLVVFDTSLQVKKAFFALVTNGVRAAPLWDSKKQSFVGMLTITDFINILHRYYKSALVQIYELEEHKIETWREVYLQDSFKPLVCISPNASLFDAVSSLIRNKIHRLPVIDPESGNTLYILTHKRILKFLKLFITEFPKPEFMSKSL

SEQ ID NO: 10783 - protein, 299 aa, Homo Sapiens
MKSHRCYDLIPTSSKLVVFDTSLQVKKAFFALVTNGVRAAPLWDSKKQSFVGMLTITDFINILHRYYKSALVQIYELEEHKIETWREVYLQDSFKPLVCISPNASLFDAVSSLIRNKIHRLPVIDPESGNTLYILTHKRILKFLKLFITEFPKPEFMSKSLEELQIGTYANIAMVRTTTPVYVALGIFVQHRVSALPVVDEKGRVVDIYSKFDVINLAAEKTYNNLDVSVTKALQHRSHYFEGVLKCYLHETLETIINRLVEAEVHRLVVVDENDVVKGIVSLSDILQALVLTGGEKKP

SEQ ID NO: 10784 - protein, 28 aa, Homo Sapiens
MLTITDFINILHRYYKSALVQIYELEEH

SEQ ID NO: 10785 - protein, 145 aa, Homo Sapiens
MLTITDFINILHRYYKSALVQIYELEEHKIETWREVYLQDSFKPLVCISPNASLFDAVSSLIRNKIHRLPVIDPESGNTLYILTHKRILKFLKLFITEFPKPEFMSKSLEELQIGTYANIAMVRTTTPVYVALGIFVQHRVSALP

SEQ ID NO: 10786 - protein, 203 aa, Homo Sapiens [sequence omitted]

SEQ ID NO: 10787 - protein, 280 aa, Homo Sapiens
MSILKVKKAFFALVTNGVRAAPLWDSKKQSFVGMLTITDFINILHRYYKSALVQIYELEEHKIETWREVYLQDSFKPLVCISPNASLFDAVSSLIRNKIHRLPVIDPESGNTLYILTHKRILKFLKLFITEFPKPEFMSKSLEELQIGTYANIAMVRTTTPVYVALGIFVQHRVSALPVVDEKGRVVDIYSKFDVINLAAEKTYNNLDVSVTKALQHRSHYFEGVLKCYLHETLETIINRLVEAEVHRLVVVDENDVVKGIVSLSDILQALVLTGGEKKP

SEQ ID NO: 10788 - protein, 251 aa, Homo Sapiens
NSVYTSFMKSHRCYDLIPTSSKLVVFDTSLQVKKAFFALVTNGVRAAPLWDSKKQSFVGMLTITDFINILHRYYKSALVQIYELEEHKIETWREVYLQDSFKPLVCISPNARSLSSPSQSSCPSLWKSYRLAPMPILLWFALPPPSMWLWGFLYSIESQPCQWWMRRNLAAEKTYNNLDVSVTKALQHRSHYFEGVLKCYLHETLETIINRLVEAEVHRLVVVDENDVVKGIVSLSDILQALVLTGGEKKP

SEQ ID NO: 10789 - protein, 93 aa, Homo Sapiens
RVVDIYSKFDVINLAAEKTYNNLDVSVTKALQHRSHYFEGVLKCYLHETLETIINRLVEAEVHRLVVVDENDVVKGICPTHCLLEALWESDET

SEQ ID NO: 10790 - protein, 200 aa, Homo Sapiens
AEEEEEEEDSEVQGEQPKPASPAEEDKMPPYDEQTQAFIDAAQEARNKFEEAERSLKDMEESIRNLEQEISFDFGPNGEFAYLYSQCYELTTNEYVYRLCPFKLVSQKPKLGGSPTSLGTWGSWIGPDHDKFSAMKYEQGTGCWQGPNRSTTVRLLCGKETMVTSTTEPSRCEYLMELMTPAACPEPPPEAPTEDDHDEL

SEQ ID NO: 10791 - protein, 62 aa, Homo Sapiens
MLLPLLLLLPMCWAVEVKRPRGVSLTNHHFYDESKPFTCLDGSATIPFDQVNDDYCDCKDGS

SEQ ID NO: 10792 - protein, 140 aa, Homo Sapiens
MLLPLLLLLPMCWAVEVKRPRGVSLTNHHFYDESKPFTCLDGSATIPFDQVNDDYCDCKDGSDEPGTAACPNGSFHCTNTGYKPLYIPSNRVNDGVCDCCDGTDEYNSGVICENTCKEKGRKERESLQQMAEVTREGFRL

SEQ ID NO: 10793 - protein, 144 aa, Homo Sapiens
MLLPLLLLLPMCWAVEVKRPRGVSLTNHHFYDESKPFTCLDGSATIPFDQVNDDYCDCKDGSDEPGTAACPNGSFHCTNTGYKPLYIPSNRVNDGVCDCCDGTDEYNSGVICENTCKEKGRKERESLQQMAEVTREGFRLKKIL

SEQ ID NO: 10794 - protein, 168 aa, Homo Sapiens
MLLPLLLLLPMCWAVEVKRPRGVSLTNHHFYDESKPFTCLDGSATIPFDQVNDDYCDCKDGSDEPGTAACPNGSFHCTNTGYKPLYIPSNRVNDGVCDCCDGTDEYNSGVICENTCKEKGRKERESLQQMAEVTREGFRLKKILIEDWKKAREEKQKKLIELQAGKKS

SEQ ID NO: 10795 - protein, 535 aa, Homo Sapiens
MLLPLLLLLPMCWAVEVKRPRGVSLTNHHFYDESKPFTCLDGSATIPFDQVNDDYCDCKDGSDEPGTAACPNGSFHCTNTGYKPLYIPSNRVNDGVCDCCDGTDEYNSGVICENTCKEKGRKERESLQQMAEVTREGFRLKKILIEDWKKAREEKQKKLIELQAGKKSLEDQVEMLRTVKEEAEKPEREAKEQHQKLWEEQLAAAKAQQEQELAADAFKELDDDMDGTVSVTELQTHPELDTDGDGALSEAEAQALLSGDTQTDATSFYDRVWAAIRDKYRSEALPTDLPAPSAPDLTEPKEEQPPVPSSPTEEEEEEEEEEEEEAEEEEEEEDSEVQGEQPKEAPPPLSPPQPASPAEEDKMPPYDEQTQAFIDAAQEARNKFEEAERSLKDMEESIRNLEQEISFDFGPNGEFAYLYSQCYELTTNEYVYRLCPFKLVSQKPKLGGSPTSLGTWGSWIGPDHDKFSAMKYEQGTGCWQGPNRSTTVRLLCGKETMVTSTTEPSRCEYLMELMTPAACPEPPPEAPTEDDHDEL

SEQ ID NO: 10796 - protein, 528 aa, Homo Sapiens
MLLPLLLLLPMCWAVEVKRPRGVSLTNHHFYDESKPFTCLDGSATIPFDQVNDDYCDCKDGSDEPGTAACPNGSFHCTNTGYKPLYIPSNRVNDGVCDCCDGTDEYNSGVICENTCKEKGRKERESLQQMAEVTREGFRLKKILIEDWKKAREEKQKKLIELQAGKKSLEDQVEMLRTVKEEAEKPEREAKEQHQKLWEEQLAAAKAQQEQELAADAFKELDDDMDGTVSVTELQTHPELDTDGDGALSEAEAQALLSGDTQTDATSFYDRVWAAIRDKYRSEALPTDLPAPSAPDLTEPKEEQPPVPSSPTEEEEEEEEEEEEEAEEEEEEEDSEEAPPPLSPPQPASPAEEDKMPPYDEQTQAFIDAAQEARNKFEEAERSLKDMEESIRNLEQEISFDFGPNGEFAYLYSQCYELTTNEYVYRLCPFKLVSQKPKLGGSPTSLGTWGSWIGPDHDKFSAMKYEQGTGCWQGPNRSTTVRLLCGKETMVTSTTEPSRCEYLMELMTPAACPEPPPEAPTEDDHDEL

SEQ ID NO: 10797 - protein, 525 aa, Homo Sapiens
MLLPLLLLLPMCWAVEVKRPRGVSLTNHHFYDESKPFTCLDGSATIPFDQVNDDYCDCKDGSDEPGTAACPNGSFHCTNTGYKPLYIPSNRVNDGVCDCCDGTDEYNSGVICENTCKEKGRKERESLQQMAEVTREGFRLKKILIEDWKKAREEKQKKLIELQAGKKSLEDQVEMLRTVKEEAEKPEREAKEQHQKLWEEQLAAAKAQQEQELAADAFKELDDDMDGTVSVTELQTHPELDTDGDGALSEAEAQALLSGDTQTDATSFYDRVWAAIRDKYRSEALPTDLPAPSAPDLTEPKEEQPPVPSSPTEEEEEEEEEEEEEAEEEEEEEDSEVQGEQPKPASPAEEDKMPPYDEQTQAFIDAAQEARNKFEEAERSLKDMEESIRNLEQEISFDFGPNGEFAYLYSQCYELTTNEYVYRLCPFKLVSQKPKLGGSPTSLGTWGSWIGPDHDKFSAMKYEQGTGCWQGPNRSTTVRLLCGKETMVTSTTEPSRCEYLMELMTPAACPEPPPEAPTEDDHDEL

SEQ ID NO: 10798 - protein, 525 aa, Homo Sapiens; identical to SEQ ID NO: 10797

SEQ ID NO: 10799 - protein, 132 aa, Homo Sapiens
MLLPLLLLLPMCWAVEVKRPRGVSLTSESSCSPSRQAGGGRGQHWALGIGIYSLLTQFPGSAPLVGMGGQRWYLVEKALTCPGLSFLYPADHHFYDESKPFTCLDGSATIPFDQVNDDYCDCKDGSDEPGTA

SEQ ID NO: 10800 - protein, 80 aa, Homo Sapiens
EVLRNKGYNRSLDMWSVGVIIYVSLSGTFPFNEDEDIHDQIQNAAFMYPPNPWKEISHEDVDLIQYNTYILGCLSSHCTA

SEQ ID NO: 10801 - protein, 117 aa, Homo Sapiens
MILSPPQPCGTFPECGFYGMYDKILLFRHDPTSENILQLVKAASDIQEGDLIEVVLSASATFEDFQIRPHALFVHSYRAPAFCDHCGEMLWGLVRQGLKCEGCGLNYHKRCAFKIPN

SEQ ID NO: 10802 - protein, 912 aa, Homo Sapiens
MSAPPVLRPPSPLLPVAAAAAAAAAALVPGSGPGPAPFLAPVAAPVGGISFHLQIGLSREPVLLLQDSSGDYSLAHVREMACSIVDQKFPECGFYGMYDKILLFRHDPTSENILQLVKAASDIQEGDLIEVVLSASATFEDFQIRPHALFVHSYRAPAFCDHCGEMLWGLVRQGLKCEGCGLNYHKRCAFKIPNNCSGVRRRRLSNVSLTGVSTIRTSSAELSTSAPDEPLLQKSPSESFIGREKRSNSQSYIGRPIHLDKILMSKVKVPHTFVIHSYTRPTVCQYCKKLLKGLFRQGLQCKDCRFNCHKRCAPKVPNNCLGEVTINGDLLSPGAESDVVMEEGSDDNDSERNSGLMDDMEEAMVQDAEMAMAECQNDSGEMQDPDPDHEDANRTISPSTSNNIPLMRVVQSVKHTKRKSSTVMKEGWMVHYTSKDTLRKRHYWRLDSKCITLFQNDTGSRYYKEIPLSEILSLEPVKTSALIPNGANPHCFEITTANVVYYVGENVVNPSSPSPNNSVLTSGVGADVARMWEIAIQHALMPVIPKGSSVGTGTNLHRDISVSISVSNCQIQENVDISTVYQIFPDEVLGSGQFGIVYGGKHRKTGRDVAIKIIDKLRFPTKQESQLRNEVAILQNLHHPGVVNLECMFETPERVFVVMEKLHGDMLEMILSSEKGRLPEHITKFLITQILVALRHLHFKNIVHCDLKPENVLLASADPFPQVKLCDFGFARIIGEKSFRRSVVGTPAYLAPEVLRNKGYNRSLDMWSVGVIIYVSLSGTFPFNEDEDIHDQIQNAAFMYPPNPWKEISHEAIDLINNLLQVKMRKRYSVDKTLSHPWLQDYQTWLDLRELECKIGERYITHESDDLRWEKYAGEQGLQYPTHLINPSASHSDTPETEETEMKALGERVSIL

SEQ ID NO: 10803 - protein, 912 aa, Homo Sapiens; identical to SEQ ID NO: 10802

SEQ ID NO: 10804 - protein, 920 aa, Homo Sapiens
MSAPPVLRPPSPLLPVAAAAAAAAAALVPGSGPGPAPFLAPVAAPVGGISFHLQIGLSREPVLLLQDSSGDYSLAHVREMACSIVDQKFPECGFYGMYDKILLFRHDPTSENILQLVKAASDIQEGDLIEVVLSASATFEDFQIRPHALFVHSYRAPAFCDHCGEMLWGLVRQGLKCEGCGLNYHKRCAFKIPNNCSGVRRRRLSNVSLTGVSTIRTSSAELSTSAPDEPLLSPVSPGFEQKSPSESFIGREKRSNSQSYIGRPIHLDKILMSKVKVPHTFVIHSYTRPTVCQYCKKLLKGLFRQGLQCKDCRFNCHKRCAPKVPNNCLGEVTINGDLLSPGAESDVVMEEGSDDNDSERNSGLMDDMEEAMVQDAEMAMAECQNDSGEMQDPDPDHEDANRTISPSTSNNIPLMRVVQSVKHTKRKSSTVMKEGWMVHYTSKDTLRKRHYWRLDSKCITLFQNDTGSRYYKEIPLSEILSLEPVKTSALIPNGANPHCFEITTANVVYYVGENVVNPSSPSPNNSVLTSGVGADVARMWEIAIQHALMPVIPKGSSVGTGTNLHRDISVSISVSNCQIQENVDISTVYQIFPDEVLGSGQFGIVYGGKHRKTGRDVAIKIIDKLRFPTKQESQLRNEVAILQNLHHPGVVNLECMFETPERVFVVMEKLHGDMLEMILSSEKGRLPEHITKFLITQILVALRHLHFKNIVHCDLKPENVLLASADPFPQVKLCDFGFARIIGEKSFRRSVVGTPAYLAPEVLRNKGYNRSLDMWSVGVIIYVSLSGTFPFNEDEDIHDQIQNAAFMYPPNPWKEISHEAIDLINNLLQVKMRKRYSVDKTLSHPWLQDYQTWLDLRELECKIGERYITHESDDLRWEKYAGEQGLQYPTHLINPSASHSDTPETEETEMKALGERVSIL

SEQ ID NO: 10805 - protein, 157 aa, Homo Sapiens
SSTVMKEGWMVHYTSKDTLRKRHYWRLDSKCITLFQNDTGSRYYKEIPLSEILSLEPVKTSALIPNGANPHCFEITTANVVYYVGENVVNPSSPSPNNSVLTSGVGADVARMWEIAIQHALMPVIPKGSSVGTGTNLHSESASFLTSPKLIMCLPLA

SEQ ID NO: 10806 - protein, 228 aa, Homo Sapiens
MNIKGSPWKAGSLLLLLVSNLLLCQSVAPLPICPGGAARCQVTLRDLFDRAVVLSHYIHNLSSEMFSEFDKRYTHGRGFITKAINSCHTSSLATPEDKEQAQQMNQKDFLSLIVSILRSWNEPLYHLVTEVRGMQEAPEAILSKAVEIEEQTKRLLEGMELIVSQVHPETKENEIYPVWSGLPSLQMADEESRLSAYYNLLHCLRRDSHKIDNYLKLLKCRIIHNNNC

SEQ ID NO: 10807 - protein, 227 aa, Homo Sapiens
MNIKGSPWKGSLLLLLVSNLLLCQSVAPLPICPGGAARCQVTLRDLFDRAVVLSHYIHNLSSEMFSEFDKRYTHGRGFITKAINSCHTSSLATPEDKEQAQQMNQKDFLSLIVSILRSWNEPLYHLVTEVRGMQEAPEAILSKAVEIEEQTKRLLEGMELIVSQVHPETKENEIYPVWSGLPSLQMADEESRLSAYYNLLHCLRRDSHKIDNYLKLLKCRIIHNNNC

SEQ ID NO: 10808 - protein, 196 aa, Homo Sapiens
MNIKGSPWKGSLLLLLVSNLLLSHYIHNLSSEMFSEFDKRYTHGRGFITKAINSCHTSSLATPEDKEQAQQMNQKDFLSLIVSILRSWNEPLYHLVTEVRGMQEAPEAILSKAVEIEEQTKRLLEGMELIVSQVHPETKENEIYPVWSGLPSLQMADEESRLSAYYNLLHCLRRDSHKIDNYLKLLKCRIIHNNNC

SEQ ID NO: 10809 - protein, 87 aa, Homo Sapiens
MKVLRAWLLCLLMLGLALRGAASRTHRHSMEIRTPDINPAWYASRGIRPVGRFGRRRATLGDVPKPGLRPRLTCFPLEGGAMSSQDG

SEQ ID NO: 10810 - protein, 33 aa, Homo Sapiens
MKENVASATVFTLLLFLNTCLLNDPFCWAANRV

SEQ ID NO: 10811 - protein, 34 aa, Homo Sapiens
MKENVASATVFTLLLFLNTCLLNERHSCMNVQTT

SEQ ID NO: 10812 - protein, 34 aa, Homo Sapiens; identical to SEQ ID NO: 10811

SEQ ID NO: 10813 - protein, 34 aa, Homo Sapiens
MKENVASATVFTLLLFLNTCLLNGQLPPGKPEIF

SEQ ID NO: 10814 - protein, 62 aa, Homo Sapiens
MKENVASATVFTLLLFLNTCLLNGQLPPGKPEIFKCRSPNKETFTCWWRPGTDGGLPTNYSL

SEQ ID NO: 10815 - protein, 103 aa, Homo Sapiens
MKENVASATVFTLLLFLNTCLLNGQLPPGKPEIFKCRSPNKETFTCWWRPGTDGGLPTNYSLTYHREGETLMHECPDYITGGPNSCHFGKQYTSMWRTYIMMV

SEQ ID NO: 10816 - protein, 111 aa, Homo Sapiens
MKENVASATVFTLLLFLNTCLLNGQLPPGKPEIFKCRSPNKETFTCWWRPGTDGGLPTNYSLTYHREGETLMHECPDYITGGPNSCHFGKQYTSMWRTYIMMVNATNQMGS

SEQ ID NO: 10817 - protein, 120 aa, Homo Sapiens
MKENVASATVFTLLLFLNTCLLNGQLPPGKPEIFKCRSPNKETFTCWWRPGTDGGLPTNYSLTYHREGETLMHECPDYITGGPNSCHFGKQYTSMWRTYIMMVNATNQMGSSFSDELYVD

SEQ ID NO: 10818 - protein, 376 aa, Homo Sapiens
MKENVASATVFTLLLFLNTCLLNGQLPPGKPEIFKCRSPNKETFTCWWRPGTDGGLPTNYSLTYHREGETLMHECPDYITGGPNSCHFGKQYTSMWRTYIMMVNATNQMGSSFSDELYVDVTYIVQPDPPLELAVEVKQPEDRKPYLWIKWSPPTLIDLKTGWFTLLYEIRLKPEKAAEWEIHFAGQQTEFKILSLHPGQKYLVQVRCKPDHGYWSAWSPATFIQIPSDFTMNDTTVWISVAVLSAVICLIIVWAVALKGYSMVTCIFPPVPGPKIKGFDAHLLEKGKSEELLSALGCQDFPPTSDYEDLLVEYLEVDDSEDQHLMSVHSKEHPSQGDPLMLGASHYKNLKSYRPRKISSQGRLAVFTKATLTTVQ

SEQ ID NO: 10819 - protein, 349 aa, Homo Sapiens
MKENVASATVFTLLLFLNTCLLNGQLPPGKPEIFKCRSPNKETFTCWWRPGTDGGLPTNYSLTYHREGETLMHECPDYITGGPNSCHFGKQYTSMWRTYIMMVNATNQMGSSFSDELYVDVTYIVQPDPPLELAVEVKQPEDRKPYLWIKWSPPTLIDLKTGWFTLLYEIRLKPEKAAEWEIHFAGQQTEFKILSLHPGQKYLVQVRCKPDHGYWSAWSPATFIQIPSDFTMNDTTVWISVAVLSAVICLIIVWAVALKGYSMVTCIFPPVPGPKIKGFDAHLLEKGKSEELLSALGCQDFPPTSDYEDLLVEYLEVDDSEDQHLMSVHSKEHPSQEREQRQAQEARDS

SEQ ID NO: 10820 - protein, 288 aa, Homo Sapiens
MKENVASATVFTLLLFLNTCLLNGQLPPGKPEIFKCRSPNKETFTCWWRPGTDGGLPTNYSLTYHREGETLMHECPDYITGGPNSCHFGKQYTSMWRTYIMMVNATNQMGSSFSDELYVDVTYIVQPDPPLELAVEVKQPEDRKPYLWIKWSPPTLIDLKTGWFTLLYEIRLKPEKAAEWEIHFAGQQTEFKILSLHPGQKYLVQVRCKPDHGYWSAWSPATFIQIPSDFTMNDTTVWISVAVLSAVICLIIVWAVALKGYSMVTCIFPPVPGPKIKGFDAHLLEVTP

SEQ ID NO: 10821 - protein, 622 aa, Homo Sapiens
MKENVASATVFTLLLFLNTCLLNGQLPPGKPEIFKCRSPNKETFTCWWRPGTDGGLPTNYSLTYHREGETLMHECPDYITGGPNSCHFGKQYTSMWRTYIMMVNATNQMGSSFSDELYVDVTYIVQPDPPLELAVEVKQPEDRKPYLWIKWSPPTLIDLKTGWFTLLYEIRLKPEKAAEWEIHFAGQQTEFKILSLHPGQKYLVQVRCKPDHGYWSAWSPATFIQIPSDFTMNDTTVWISVAVLSAVICLIIVWAVALKGYSMVTCIFPPVPGPKIKGFDAHLLEKGKSEELLSALGCQDFPPTSDYEDLLVEYLEVDDSEDQHLMSVHSKEHPSQGMKPTYLDPDTDSGRGSCDSPSLLSEKCEEPQANPSTFYDPEVIEKPENPETTHTWDPQCISMEGKIPYFHAGGSKCSTWPLPQPSQHNPRSSYHNITDVCELAVGPAGAPATLLNEAGKDALKSSQTIKSREEGKATQQREVESFHSETDQDTPWLLPQEKTPFGSAKPLDYVEIHKVNKDGALSLLPKQRENSGKPKKPGTPENNKEYAKVSGVMDNNILVLVPDPHAKNVACFEESAKEAPPSLEQNQAEKALANFTATSSKCRLQLGGLDYLDPACFTHSFH

SEQ ID NO: 10822 - protein, 288 aa, Homo Sapiens; identical to SEQ ID NO: 10820

SEQ ID NO: 10823 - protein, 376 aa, Homo Sapiens; identical to SEQ ID NO: 10818

SEQ ID NO: 10824 - protein, 349 aa, Homo Sapiens; identical to SEQ ID NO: 10819

SEQ ID NO: 10825 - protein, 268 aa, Homo Sapiens
MKENVASATVFTLLLFLNTCLLNGQLPPGKPEIFKCRSPNKETFTCWWRPGTDGGLPTNYSLTYHREGETLMHECPDYITGGPNSCHFGKQYTSMWRTYIMMVNATNQMGSSFSDELYVDVTYIVQPDPPLELAVEVKQPEDRKPYLWIKWSPPTLIDLKTGWFTLLYEIRLKPEKAAEWEIHFAGQQTEFKILSLHPGQKYLVQVRCKPDHGYWSAWSPATFIQIPSGDPLMLGASHYKNLKSYRPRKISSQGRLAVFTKATLTTVQ

SEQ ID NO: 10826 - protein, 268 aa, Homo Sapiens; identical to SEQ ID NO: 10825

SEQ ID NO: 10827 - protein, 521 aa, Homo Sapiens
MKENVASATVFTLLLFLNTCLLNVQPDPPLELAVEVKQPEDRKPYLWIKWSPPTLIDLKTGWFTLLYEIRLKPEKAAEWEIHFAGQQTEFKILSLHPGQKYLVQVRCKPDHGYWSAWSPATFIQIPSDFTMNDTTVWISVAVLSAVICLIIVWAVALKGYSMVTCIFPPVPGPKIKGFDAHLLEKGKSEELLSALGCQDFPPTSDYEDLLVEYLEVDDSEDQHLMSVHSKEHPSQGMKPTYLDPDTDSGRGSCDSPSLLSEKCEEPQANPSTFYDPEVIEKPENPETTHTWDPQCISMEGKIPYFHAGGSKCSTWPLPQPSQHNPRSSYHNITDVCELAVGPAGAPATLLNEAGKDALKSSQTIKSREEGKATQQREVESFHSETDQDTPWLLPQEKTPFGSAKPLDYVEIHKVNKDGALSLLPKQRENSGKPKKPGTPENNKEYAKVSGVMDNNILVLVPDPHAKNVACFEESAKEAPPSLEQNQAEKALANFTATSSKCRLQLGGLDYLDPACFTHSFH

SEQ ID NO: 10828 - protein, 521 aa, Homo Sapiens; identical to SEQ ID NO: 10827

SEQ ID NO: 10829 - protein, 217 aa, Homo Sapiens
MANLGCWMLVLFVATWSDLGLCKKRPKPGGWNTGGSRYPGQGSPGGNRYPPQGGGGWGQPHGGGWGQPHGGGWGQPHGGGWGQPHGGGWGQGGGTHSQWNKPSKPKTNMKHMAGAAAAGAVVGGLGGYMLGSAMSRPIIHFGSDYEDRYYRENMHRYPNQVYYRPMDEYSNQNNFVHDCVNITIKQHTVTTTTKGENFTETDVKMMERVVEQMCITQ

SEQ ID NO: 10830 - protein, 249 aa, Homo Sapiens
MANLGCWMLVLFVATWSDLGLCKKRPKPGGWNTGGSRYPGQGSPGGNRYPPQGGGGWGQPHGGGWGQPHGGGWGQPHGGGWGQPHGGGWGQGGGTHSQWNKPSKPKTNMKHMAGAAAAGAVVGGLGGYMLGSAMSRPIIHFGSDYEDRYYRENMHRYPNQVYYRPMDEYSNQNNFVHDCVNITIKQHTVTTTTKGENFTETDVKMMERVVEQMCITQYERESQAYYQRGSSMVLFSSPPVILLISFLIF

SEQ ID NO: 10831 - protein, 253 aa, Homo Sapiens
MANLGCWMLVLFVATWSDLGLCKKRPKPGGWNTGGSRYPGQGSPGGNRYPPQGGGGWGQPHGGGWGQPHGGGWGQPHGGGWGQPHGGGWGQGGGTHSQWNKPSKPKTNMKHMAGAAAAGAVVGGLGGYMLGSAMSRPIIHFGSDYEDRYYRENMHRYPNQVYYRPMDEYSNQNNFVHDCVNITIKQHTVTTTTKGENFTETDVKMMERVVEQMCITQYERESQAYYQRGSSMVLFSSPPVILLISFLIFLIVG

SEQ ID NO: 10832 - protein, 253 aa, Homo Sapiens; identical to SEQ ID NO: 10831

SEQ ID NO: 10833 - protein, 94 aa, Homo Sapiens
MQHSLVFFFAVILHLSHLLHLDASIHPFRLPFSSKPFLLIPMSNTTLPHTAWPLSFLHQTVSTLKAVAVTHSLWHLQIPVDCQACNRKSKKIYC

SEQ ID NO: 10834 - protein, 116 aa, Homo Sapiens
MWQLTSLLLFVATWGISGTPAPLDSVFSSSERAHQVLRIRKRANSFLEELRHSSLERECIEEICDFEEAKEIFQNVDDTLAFWSKHVDGDQCLVLPLEHPCASLCCGHGTCIDGIG

SEQ ID NO: 10835 - protein, 126 aa, Homo Sapiens
MWQLTSLLLFVATWGISGTPAPLDSVFSSSERAHQVLRIRKRANSFLEELRHSSLERECIEEICDFEEAKEIFQNVDDTLAFWSKHVDGDQCLVLPLEHPCASLCCGHGTCIDGIGSFSCDCRSGW

SEQ ID NO: 10836 - protein, 175 aa, Homo Sapiens
MWQLTSLLLFVATWGISGTPAPLDSVFSSSERAHQVLRIRKRANSFLEELRHSSLERECIEEICDFEEAKEIFQNVDDTLAFWSKHVDGDQCLVLPLEHPCASLCCGHGTCIDGIGSFSCDCRSGWEGRFCQREEVGWRRCSCAPGYKLGDDLLQCHPAVKFPCGRPWKRMEKKR

SEQ ID NO: 10837 - protein, 461 aa, Homo Sapiens
MWQLTSLLLFVATWGISGTPAPLDSVFSSSERAHQVLRIRKRANSFLEELRHSSLERECIEEICDFEEAKEIFQNVDDTLAFWSKHVDGDQCLVLPLEHPCASLCCGHGTCIDGIGSFSCDCRSGWEGRFCQREVSFLNCSLDNGGCTHYCLEEVGWRRCSCAPGYKLGDDLLQCHPAVKFPCGRPWKRMEKKRSHLKRDTEDQEDQVDPRLIDGKMTRRGDSPWQVVLLDSKKKLACGAVLIHPSWVLTAAHCMDESKKLLVRLGEYDLRRWEKWELDLDIKEVFVHPNYSKSTTDNDIALLHLAQPATLSQTIVPICLPDSGLAERELNQAGQETLVTGWGYHSSREKEAKRNRTFVLNFIKIPVVPHNECSEVMSNMVSENMLCAGILGDRQDACEGDSGGPMVASFHGTWFLVGLVSWGEGCGLLHNYGVYTKVSRYLDWIHGHIRDKEAPQKSWAP

SEQ ID NO: 10838 - protein, 495 aa, Homo Sapiens
MWQLTSLLLFVATWGISGTPAPLDSVFSSSERAHQVLRIRKRANSFLEELRHSSLERECIEEICDFEEAKEIFQNVDDTLAFWSKHVDGDQCLVLPLEHPCASLCCGHGTCIDGIGSFSCDCRSGWEGRFCQRGEGERWMLAGGGAGLGPGWGRGTSTSCPRPPLPAEVSFLNCSLDNGGCTHYCLEEVGWRRCSCAPGYKLGDDLLQCHPAVKFPCGRPWKRMEKKRSHLKRDTEDQEDQVDPRLIDGKMTRRGDSPWQVVLLDSKKKLACGAVLIHPSWVLTAAHCMDESKKLLVRLGEYDLRRWEKWELDLDIKEVFVHPNYSKSTTDNDIALLHLAQPATLSQTIVPICLPDSGLAERELNQAGQETLVTGWGYHSSREKEAKRNRTFVLNFIKIPVVPHNECSEVMSNMVSENMLCAGILGDRQDACEGDSGGPMVASFHGTWFLVGLVSWGEGCGLLHNYGVYTKVSRYLDWIHGHIRDKEAPQKSWAP

SEQ ID NO: 10839 - protein, 52 aa, Homo Sapiens
MWQLTSLLLFVATWGISGTPAPLGAADPQTCQLLPGGAPSQQPGAGVHRGDL

SEQ ID NO: 10840 - protein, 52 aa, Homo Sapiens; identical to SEQ ID NO: 10839

SEQ ID NO: 10841 - protein, 236 aa, Homo Sapiens
  misc_feature (1)..(1): Xaa can be any naturally occurring amino acid
XCSLDNGGCTHYCLEEVGWRRCSCAPGYKLGDDLLQCHPAGEYDLRRWEKWELDLDIKEVFVHPNYSKSTTDNDIALLHLAQPATLSQTIVPICLPDSGLAERELNQAGQETLVTGWGYHSSREKEAKRNRTFVLNFIKIPVVPHNECSEVMSNMVSENMLCAGILGDRQDACEGDSGGPMVASFHGTWFLVGLVSWGEGCGLLHNYGVYTKVSRYLDWIHGHIRDKEAPQKSWAP

SEQ ID NO: 10842 - protein, 105 aa, Homo Sapiens
MRGATRVSIMLLLVTVSDCAVITGACERDVQCGAGTCCAISLWLRGLRMCTPLGREGEECHPGSHKVPFFRKRKHHTCPCLPNLLCSRFPDGRYRCSMDLKNINF

SEQ ID NO: 10843 - protein, 129 aa, Homo Sapiens
MRSLCCAPLLLLLLLPPLLLTPRAGDAAVITGACDKDSQCGGGMCCAVSIWVKSIRICTPMGKLGDSCHPLTRKNNFGNGRQERRKRKRSKRKKEVPFFGRRMHHTCPCLPGLACLRTSFNRFICLAQK

SEQ ID NO: 10844 - protein, 108 aa, Homo Sapiens
MRSLCCAPLLLLLLLPPLLLTPRAGDAAVITGACDKDSQCGGGMCCAVSIWVKSIRICTPMGKLGDSCHPLTRKVPFFGRRMHHTCPCLPGLACLRTSFNRFICLAQK

SEQ ID NO: 10845 - protein, 14 aa, Homo Sapiens
MALVLGSLLLLGLC

SEQ ID NO: 10846 - protein, 40 aa, Homo Sapiens
MALVLGSLLLLGLCGNSFSGGQPSSTDAPKAWNYELPATN

SEQ ID NO: 10847 - protein, 58 aa, Homo Sapiens
MALVLGSLLLLGLCGNSFSGGQPSSTDAPKAWNYELPATNYETQDSHKAGPIGILFEL

SEQ ID NO: 10848 - protein, 856 aa, Homo Sapiens
MALVLGSLLLLGLCGNSFSGGQPSSTDAPKAWNYELPATNYETQDSHKAGPIGILFELVHIFLYVVQPRDFPEDTLRKFLQKAYESKIDYDKIVYYEAGIILCCVLGLLFIILMPLVGYFFCMCRCCNKCGGEMHQRQKENGPFLRKCFAISLLVICIIISIGIFYGFVANHQVRTRIKRSRKLADSNFKDLRTLLNETPEQIKYILAQYNTTKDKAFTDLNSINSVLGGGILDRLRPNIIPVLDEIKSMATAIKETKEALENMNSTLKSLHQQSTQLSSSLTSVKTSLRSSLNDPLCLVHPSSETCNSIRLSLSQLNSNPELRQLPPVDAELDNVNNVLRTDLDGLVQQGYQSLNDIPDRVQRQTTTVVAGIKRVLNSIGSDIDNVTQRLPIQDILSAFSVYVNNTESYIHRNLPTLEEYDSYWWLGGLVICSLLTLIVIFYYLGLLCGVCGYDRHATPTTRGCVSNTGGVFLMVGVGLSFLFCWILMIIVVLTFVFGANVEKLICEPYTSKELFRVLDTPYLLNEDWEYYLSGKLFNKSKMKLTFEQVYSDCKKNRGTYGTLHLQNSFNISEHLNINEHTGSISSELESLKVNLNIFLLGAAGRKNLQDFAACGIDRMNYDSYLAQTGKSPAGVNLLSFAYDLEAKANSLPPGNLRNSLKRDAQTIKTIHQQRVLPIEQSLSTLYQSVKILQRTGNGLLERVTRILASLDFAQNFITNNTSSVIIEETKKYGRTIIGYFEHYLQWIEFSISEKVASCKPVATALDTAVDVFLCSYIIDPLNLFWFGIGKATVFLLPALIFAVKLAKYYRRMDSEDVYDDVETIPMKNMENGNNGYHKDHVYGIHNPVMTSPSQH

SEQ ID NO: 10849 - protein, 856 aa, Homo Sapiens; identical to SEQ ID NO: 10848

SEQ ID NO: 10850 - protein, 865 aa, Homo Sapiens
MALVLGSLLLLGLCGNSFSGGQPSSTDAPKAWNYELPATNYETQDSHKAGPIGILFELVHIFLYVVQPRDFPEDTLRKFLQKAYESKIDYDKPETVILGLKIVYYEAGIILCCVLGLLFIILMPLVGYFFCMCRCCNKCGGEMHQRQKENGPFLRKCFAISLLVICIIISIGIFYGFVANHQVRTRIKRSRKLADSNFKDLRTLLNETPEQIKYILAQYNTTKDKAFTDLNSINSVLGGGILDRLRPNIIPVLDEIKSMATAIKETKEALENMNSTLKSLHQQSTQLSSSLTSVKTSLRSSLNDPLCLVHPSSETCNSIRLSLSQLNSNPELRQLPPVDAELDNVNNVLRTDLDGLVQQGYQSLNDIPDRVQRQTTTVVAGIKRVLNSIGSDIDNVTQRLPIQDILSAFSVYVNNTESYIHRNLPTLEEYDSYWWLGGLVICSLLTLIVIFYYLGLLCGVCGYDRHATPTTRGCVSNTGGVFLMVGVGLSFLFCWILMIIVVLTFVFGANVEKLICEPYTSKELFRVLDTPYLLNEDWEYYLSGKLFNKSKMKLTFEQVYSDCKKNRGTYGTLHLQNSFNISEHLNINEHTGSISSELESLKVNLNIFLLGAAGRKNLQDFAACGIDRMNYDSYLAQTGKSPAGVNLLSFAYDLEAKANSLPPGNLRNSLKRDAQTIKTIHQQRVLPIEQSLSTLYQSVKILQRTGNGLLERVTRILASLDFAQNFITNNTSSVIIEETKKYGRTIIGYFEHYLQWIEFSISEKVASCKPVATALDTAVDVFLCSYIIDPLNLFWFGIGKATVFLLPALIFAVKLAKYYRRMDSEDVYDDVETIPMKNMENGNNGYHKDHVYGIHNPVMTSPSQH

SEQ ID NO: 10851 - protein, 865 aa, Homo Sapiens; identical to SEQ ID NO: 10850

SEQ ID NO: 10852 - protein, 834 aa, Homo Sapiens
MALVLGSLLLLGLCGNSFSGGQPSSTDAPKAWNYELPATNYETQDSHKAGPIGILFELVHIFLYVVQPRDFPEDTLRKFLQKAYESKIDYDKPETVILGLKIVYYEAGIILCCVLGLLFIILMPLVGYFFCMCRCCNKCGGEMHQRQKENGPFLRKCFAISLLVICIIISIGIFYGFVANHQVRTRIKRSRKLADSNFKDLRTLLNETPEQIKYILAQYNTTKDKAFTDLNSINSVLGGGILDRLRPNIIPVLDEIKSMATAIKETKEALENMNSTLKSLHQQSTQLSSSLTSVKTSLRSSLNDPLCLVHPSSETCNSIRLSLSQLNSNPELRQLPPVDAELDNVNNVLRTDLDGLVQQGYQSLNDIPDRVQRQTTTVVAGIKRVLNSIGSDIDNVTQRLPIQDILSAFSVYVNNTESYIHRNLPTLEEYDSYWWLGGLVICSLLTLIVIFYYLGLLCGVCGYDRHATPTTRGCVSNTGGVFLMVGVGLSFLFCWILMIIVVLTFVFGANVEKLICEPYTSKELFRVLDTPYLLNEDWEYYLSGKLFNKSKMKLTFEQVYSDCKKNRGTYGTLHLQNSFNISEHLNINEHTGSISSELESLKVNLNIFLLGAAGRKNLQDFAACGIDRMNYDSYLAQTGKSPAGVNLLSFAYDLEAKANSLPPGNLRNSLKRDAQTIKTIHQQRVLPIEQSLSTLYQSVKILQRTGNGLLERVTRILASLDFAQNFITNNTSSVIIEETKKYGRTIIGYFEHYLQWIEFSISEKVASCKPVATALDTAVDVFLCSYIIDPLNLFWFGIGKATVFLLPALIFAVKLAKYYRRMDSEDVYDDPSQH

SEQ ID NO: 10853 - protein, 842 aa, Homo Sapiens
MALVLGSLLLLGLCGNSFSGGQPSSTDAPKAWNYELPATNYETQDSHKAGPIGILFELVHIFLYVVQPRDFPEDTLRKFLQKAYESKIDYDKPETVILGLKIVYYEAGIILCCVLGLLFIILMPLVGYFFCMCRCCNKCGGEMHQRQKENGPFLRKCFAISLLVICIIISIGIFYGFVANHQVRTRIKRSRKLADSNFKDLRTLLNETPEQIKYILAQYNTTKDKAFTDLNSINSVLGGGILDRLRPNIIPVLDEIKSMATAIKETKEALENMNSTLKSLHQQSTQLSSSLTSVKTSLRSSLNDPLCLVHPSSETCNSIRLSLSQLNSNPELRQLPPVDAELDNVNNVLRTDLDGLVQQGYQSLNDIPDRVQRQTTTVVAGIKRVLNSIGSDIDNVTQRLPIQDILSAFSVYVNNTESYIHRNLPTLEEYDSYWWLGGLVICSLLTLIVIFYYLGLLCGVCGYDRHATPTTRGCVSNTGGVFLMVGVGLSFLFCWILMIIVVLTFVFGANVEKLICEPYTSKELFRVLDTPYLLNEDWEYYLSGKLFNKSKMKLTFEQVYSDCKKNRGTYGTLHLQNSFNISEHLNINEHTGSISSELESLKVNLNIFLLGAAGRKNLQDFAACGIDRMNYDSYLAQTGKSPAGVNLLSFAYDLEAKANSLPPGNLRNSLKRDAQTIKTIHQQRVLPIEQSLSTLYQSVKILQRTGNGLLERVTRILASLDFAQNFITNNTSSVIIEETKKYGRTIIGYFEHYLQWIEFSISEKVASCKPVATALDTAVDVFLCSYIIDPLNLFWFGIGKATVFLLPALIFAVKLAKYYRRMDSEDVYDDVETIPMKNPSQH

SEQ ID NO: 10854 - protein, 93 aa, Homo Sapiens
  misc_feature (1)..(1): Xaa can be any naturally occurring amino acid
XEHYLQWIEFSISEKVASCKPVATALDTAVDVFLCSYIIDPLNLFWFGIGKATVFLLPALIFAVKLAKYYRRMDSEDVYDDVETIPMKNPSQH

SEQ ID NO: 10855 - protein, 54 aa, Homo Sapiens
  misc_feature (1)..(1): Xaa can be any naturally occurring amino acid
XQDSHKAGPIGILFELVHIFLYVVQPRDFPEDENTKAQIGEACSFKTLQPNESW

SEQ ID NO: 10856 - protein, 65 aa, Homo Sapiens
  misc_feature (1)..(1): Xaa can be any naturally occurring amino acid
XVDVFLCSYIIDPLNLFWFGIGKATVFLLPALIFAVKLAKYYRRMDSEDVYDDVETIPMKNPSQH

SEQ ID NO: 10857 - protein, 231 aa, Homo Sapiens
MRVLGGRCGALLACLLLVLPVSEANFCLYFRNDFIYNRACISVLVGLSGCNFFYSICFLSKQQASQVLVRKRRANSLLEETKQGNLERECIEELCNKEEAREVFENDPETDYFYPKYLVCLRSFQTGLFTAARQSTNAYPDLRSCVNAIPDQCSPLPCNEDGYMSCKDGKASFTCTCKPGWQGEKCEFDINECKDPSNINGGCSQICDNTPGSYHCSCKNGFVMLSNKKDC

SEQ ID NO: 10858 - protein, 676 aa, Homo Sapiens
MRVLGGRCGALLACLLLVLPVSEANFLSKQQASQVLVRKRRANSLLEETKQGNLERECIEELCNKEEAREVFENDPETDYFYPKYLVCLRSFQTGLFTAARQSTNAYPDLRSCVNAIPDQCSPLPCNEDGYMSCKDGKASFTCTCKPGWQGEKCEFDINECKDPSNINGGCSQICDNTPGSYHCSCKNGFVMLSNKKDCKDVDECSLKPSICGTAVCKNIPGDFECECPEGYRYNLKSKSCEDIDECSENMCAQLCVNYPGGYTCYCDGKKGFKLAQDQKSCEVVSVCLPLNLDTKYELLYLAEQFAGVVLYLKFRLPEISRFSAEFDFRTYDSEGVILYAESIDHSAWLLIALRGGKIEVQLKNEHTSKITTGGDVINNGLWNMVSVEELEHSISIKIAKEAVMDINKPGPLFKPENGLLETKVYFAGFPRKVESELIKPINPRLDGCIRSWNLMKQGASGIKEIIQEKQNKHCLVTVEKGSYYPGSGIAQFHIDYNNVSSAEGWHVNVTLNIRPSTGTGVMLALVSGNNTVPFAVSLVDSTSEKSQDILLSVENTVIYRIQALSLCSDQQSHLEFRVNRNNLELSTPLKIETISHEDLQRQLAVLDKAMKAKVATYLGGLPDVPFSATPVNAFYNGCMEVNINGVQLDLDEAISKHNDIRAHSCPSVWKKTKNS

SEQ ID NO: 10859 - protein, 56 aa, Homo Sapiens
MSCKDGKASFTCTCKPGWQGEKCEFDINECKDPSNINGGCSQICDNTPGSYHCSCK

SEQ ID NO: 10860 - protein, 545 aa, Homo Sapiens
MSCKDGKASFTCTCKPGWQGEKCEFDINECKDPSNINGGCSQICDNTPGSYHCSCKNGFVMLSNKKDCKDVDECSLKPSICGTAVCKNIPGDFECECPEGYRYNLKSKSCEDIDECSENMCAQLCVNYPGGYTCYCDGKKGFKLAQDQKSCEVVSVCLPLNLDTKYELLYLAEQFAGVVLYLKFRLPEISRFSAEFDFRTYDSEGVILYAESIDHSAWLLIALRGGKIEVQLKNEHTSKITTGGDVINNGLWNMVSVEELEHSISIKIAKEAVMDINKPGPLFKPENGLLETKVYFAGFPRKVESELIKPINPRLDGCIRSWNLMKQGASGIKEIIQEKQNKHCLVTVEKGSYYPGSGIAQFHIDYNNVSSAEGWHVNVTLNIRPSTGTGVMLALVSGNNTVPFAVSLVDSTSEKSQDILLSVENTVIYRIQALSLCSDQQSHLEFRVNRNNLELSTPLKIETISHEDLQRQLAVLDKAMKAKVATYLGGLPDVPFSATPVNAFYNGCMEVNINGVQLDLDEAISKHNDIRAHSCPSVWKKTKNS

SEQ ID NO: 10861 - protein, 422 aa, Homo Sapiens
MAGCVPLLQGLVLVLALHRVEPSATSLKERHGLHSDSACTGVQESLFLPASKANDVLVRWKRAGSYLLEELFEGNLEKECYEEICVYEEAREVFENEVVTDEFWRRYKGGSPCISQPCLHNGSCQDSIWGYTCTCSPGYEGSNCELAKNECHPERTDGCQHFCLPGQESYTCSCAQGYRLGEDHKQCVPHDQCACGVLTSEKRAPDLQDLPWQVKLTNSEGKDFCGGVIIRENFVLTTAKCSLLHRNITVKTYFNRTSQDPLMIKITHVHVHMRYDADAGENDLSLLELEWPIQCPGAGLPVCTPEKDFAEHLLIPRTRGLLSGWARNGTDLGNSLTTRPVTLVEGEECGQVLNVTVTTRTYCERSSVAAMHWMDGSVVTREHRGSWFLTGVLGSQPVGGQAHMVLVTKVSRYSLWFKQIMN

SEQ ID NO: 10862 - protein, 400 aa, Homo Sapiens
MAGCVPLLQGLVLVLALHRVEPSVFLPASKANDVLVRWKRAGSYLLEELFEGNLEKECYEEICVYEEAREVFENEVVTDEFWRRYKGGSPCISQPCLHNGSCQDSIWGYTCTCSPGYEGSNCELAKNECHPERTDGCQHFCLPGQESYTCSCAQGYRLGEDHKQCVPHDQCACGVLTSEKRAPDLQDLPWQVKLTNSEGKDFCGGVIIRENFVLTTAKCSLLHRNITVKTYFNRTSQDPLMIKITHVHVHMRYDADAGENDLSLLELEWPIQCPGAGLPVCTPEKDFAEHLLIPRTRGLLSGWARNGTDLGNSLTTRPVTLVEGEECGQVLNVTVTTRTYCERSSVAAMHWMDGSVVTREHRGSWFLTGVLGSQPVGGQAHMVLVTKVSRYSLWFKQIMN

SEQ ID NO: 10863 - protein, 26 aa, Homo Sapiens
MKLLLWACIVCVAFARKNAGLGFLWL

SEQ ID NO: 10864 - protein, 219 aa, Homo Sapiens
MKLLLWACIVCVAFARKRRFPFIGEDDNDDGHPLHPSLNIPYGIRNLPPPLYYRPVNTVPSYPGNTYTDTGLPSYPWILTSPGFPYVYHIRGFPLATQLNVPPLPPRGFPFVPPSRFFSAAAAPAAPPIAAEPAAAAPLTATPVAAEPAAGAPVAAEPAAEAPVGAEPAAEAPVAAEPAAEAPVGVEPAAEEPSPAEPATAKPAAPEPHPSPSLEQANQ

SEQ ID NO: 10865 - protein, 219 aa, Homo Sapiens; identical to SEQ ID NO: 10864

SEQ ID NO: 10866 - protein, 61 aa, Homo Sapiens
  misc_feature (1)..(1): Xaa can be any naturally occurring amino acid
XAEAPVGAEPAAEAPVAAEPAAEAPVGVEPAAEEPSPAEPATAKPAAPEPHPSPSLEQANQ

SEQ ID NO: 10867 - protein, 65 aa, Homo Sapiens
MLLVLLSVVLLALSSAQSTDNDVNYEDFTFTIPACRKHHHSSRGTDQQDIPRSNHSGNLEFSGRK

SEQ ID NO: 10868 - protein, 78 aa, Homo Sapiens
MLLVLLSVVLLALSSAQSTDNDVNYEDFTFTIPATTTPTRTPSTLSTPISFCQPAGSIIILPEGQTSKTSPGATTLVI

SEQ ID NO: 10869 - protein, 134 aa, Homo Sapiens
MLLVLLSVVLLALSSAQSTDNDVNYEDFTFTIPDVEDSSQRPDQGPQRPPPEGLLPRPPGDSGNQDDGPQQRPPKPGGHHRHPPPPPFQNQQRPPRRGHRQLSLPRFPSVSLQEASSFFQRDRPARHPQEQPLW

SEQ ID NO: 10870 - protein, 98 aa, Homo Sapiens
MRGHPSLLLLYMALTTCLDTSPSEETDQEVFLGPPEAQSFLSSHTRIPRANHWDLELLTPGNLERECLEERCSWEEAREYFEDNTLTERFWESYIYNG

SEQ ID NO: 10871 - protein, 202 aa, Homo Sapiens
MRGHPSLLLLYMALTTCLDTSPSEETDQEVFLGPPEAQSFLSSHTRIPRANHWDLELLTPGNLERECLEERCSWEEAREYFEDNTLTERFWESYIYNGKGGRGRVDVASLAVGLTGGILLIVLAGLGAFWYLRWRQHRGQQPCPQEAGLISPLSPLNPLGPPTPLPPPPPPPPGLPTYEQALAASGVHDAPPPPYTSLRRPH

SEQ ID NO: 10872 - protein, 96 aa, Homo Sapiens
MRGHPSLLLLYMALTTCLDTSPSEETDQVLPLPGVQDPAPSSFRPRNLDSQPLLLPPGPHCFPSPYDSSPRDPPFFCPSCLWVQKSSWVPQRPRAS

SEQ ID NO: 10873 - protein, 981 aa, Homo Sapiens
MASSPWGCVCGLLLLLLPLLGTGPALGRGFPRPLENSEIPMIPGAHPKGSVGSEPQAFDVFPENPRADSHRNSDVRHAPAEEMPEKPVASPLGPALYGPKAAQGAQRERLPVTDDLQMAQGPSSHGWTGPLDSQELLQQEAVAPHPVGHPHLTFIPTTPRRQLRVATVPPSLQHEGQEGQWPPRDEGLKAKTKSRVPPTSPSDHQGPPHTLVSHSGTVKRPVLEGQGGFEEHLQEAAQGPHFTQQDPAAPDVGSVPPVEVVYSQEPGAQPDLALARSLPPAEELPVETPKRAGAEVSWEVSSPGPPPKQADLPDAKDSPGPQPTDPPASEAPDRPSKPERAAMNGADPISPQRVRGAVEAPGTPKSLIPGPSDPGPAVNRTESPMGALQPDEAEEWPGRPQSHPPAPPVQAPSTSRRGLIRVTTQRALGQPPPPEPTASSMASAPASSPPANATAPPLRWGPLRRVLSFSWELHVYGVGVLFLLPALLALAALAAAPAGPRLALVAAVLVLVASALRSAYMLTDPYGSQARLGVRGGLVLYNLPFPLLLTALAALTLLGLGAGLPPPLQNPLLLGAVALVHGVGLLATDLLSTWSVLNLLTQGLSCAWGAAVALGTLCLCRRRLLDGPRGWDASPGPRLLAVAGALGLLASGLQLAAALWLYPGPGRVGRFSWAWWGVHFWLRLLELTWALALALAAVAAARPRPPTEHACWAKLMRLACPAPSGKSEVPERPNNCYAGPSNVGAGSLDISKSLIRNPAESGQLATPSSGAWGSAASLGRGPQGGPGLSRNGVGPAPSLSELDLRPPSPINLSRSIDAALFREHLVRDSVFQRCGLRGLASPPPGGALRPRRGSHPKAELDDAGSSLLRGRCRSLSDVRVRGPVPQHVVEAPDGAAAAASGSSLDSFSRGSLKISWNPWRHGLSSVDSLPLDELPSTVQLLPAPTPAPDSTAARQGDGQGEVQPRGKPGESRSASSDTIEL

SEQ ID NO: 10874 - protein, 981 aa, Homo Sapiens; identical to SEQ ID NO: 10873

SEQ ID NO: 10875 - protein, 421 aa, Homo Sapiens
MASSPWGCVCGLLLLLLPLLGTGPALGRGFPRPLENSEIPMIPGAHPKGSVGSEPQAFDVFPENPRADSHRNSDVRHAPAEEMPEKPVASPLGPALYGPKAAQGAQRERLPVTDDLQMAQGPSSHGWTGPLDSQELLQQEAVAPHPVGHPHLTFIPTTPRRQLRVATVPPSLQHEGQEGQWPPRDEGLKAKTKSRVPPTSPSDHQGPPHTLVSHSGTVKRPVLEGQGGFEEHLQEAAQGPHFTQQDPAAPDVGSVPPVEVVYSQEPGAQPDLALARSLPPAEELPVETPKRAGAEVSWEVSSPGPPPKQADLPDAKDSPGPQPTDPPASEAPDRPSKPERAAMNGADPISPQRVRGAVEAPGTPKSLIPGPSDPGPAVNRTESPMGALQPGESMAGVWGEGVLCLVTENLCWGCMGAEGGE

SEQ ID NO: 10876 - protein, 205 aa, Homo Sapiens
MARHGCLGLGLFCCVLFAATVGPQPTPSIPGAPATTLTPVPQSEASMLSLNLGLNFKFHLRGPAAVWGSPVTETQPLSLGPGQEPGEEVASGLRTDPLWELLVGSSGNSLTEWGSTEGGSKPRASSLLPESTSRRSGPSDGPTAPYQPRRSTVTWDTALMVTALPSSAPRPHQSELELKFDMALRAGAAPTLGHRTLPLLPSLRA

SEQ ID NO: 10877 - protein, 208 aa, Homo Sapiens
MARHGCLGLGLFCCVLFAATVGPQPTPSIPGAPATTLTPVPQSEASMLSLNLGLNFKFHLRGPAAVWGSPVTETQPLSLGPGQEPGEEVASGLRTDPLWELLVGSSGNSLTEWGSTEGGSKPRASSLLPESTSRRSGPSDGPTAPYQPRRSTVTWDTALMVTALPSSAPRPHQSELELKFDMALRAGAAPTLGHRTLPLLPSLRASLA

SEQ ID NO: 10878 - protein, 899 aa, Homo Sapiens
MARHGCLGLGLFCCVLFAATVGPQPTPSIPGAPATTLTPVPQSEASMLSLNLGLNFKFHLRGPAAVWGSPVTETQPLSLGPGQEPGEEVASGLRTDPLWELLVGSSGNSLTEWGSTEGGSKPRASSLLPESTSRRSGPSDGPTAPYQPRRSTVTWDTALMVTALPSSAPRPHQSELELKFDMALRAGAAPTLGHRTLPLLPSLRASLAEIAGRLGPFGFFGTTLSPLRNFSGLSPPGETTSTSSASGVSGSLGFLGTTLSLPPYSLERKLSSPSPLDPAASLSFASIATTSLDPTVPISGPDDLSPPASLGNPSGQPECGPGSCSVGELPEREGQPPEAPRPLFFLTLEADWAEARARWGLAWEAHVYGVGALFGLVALLALLALALLPWRCPPGAPCLALLDLLLLSAGTTRAFPLFYDAYGHRDRLPALAWLLLQDLPLPCLAAGLGLACLLLARPRPPRCPTGLAALLLLGLGLAAAAALGSAAHRPLRPLRLASRGLHAFLAAFLSGLLLALSCWGGRRRRAGAPLGGSGFKGATPLPQGRSPFAPRESWRRAARTAPVAGTFGLLSGALQGYEVLHALGYGGQSGLEGPWPWWAFQLGLRLGEVGVALPLALLGLYPALCSPRVPPRCWAKLFRLSPGHAAPLLPGGWVTGPPDKEPLGSAIARGDAELLQLCALAGPGPDLLLQGGGCRGFEGAAANPAPSPASSPCSDYTVDFRPPSPINLRRSIEEALCSEALLAPGLFQGPAFEDALPGLGLYRTASLGTGGRASERSGEASGPAAPPELPSPGAWPAGSSVSSGSFCGLSRDSSSMLLCSSPDRPPRCPLVCVLSPPRPSGSSPSLPASGSYQALSPPSRDSPEPASELQAEEALLQEQFLDACRQIDELSVGSDTIDL

SEQ ID NO: 10879 - protein, 899 aa, Homo Sapiens; identical to SEQ ID NO: 10878

SEQ ID NO: 10880 - protein, 480 aa, Homo Sapiens
MARHGCLGLGLFCCVLFAATVGPQPTPSIPGAPATTLTPVPQSEASMLSLNLGLNFKFHLRGPAAVWGSPVTETQPLSLGPGQEPGEEVASGLRTDPLWELLVGSSGNSLTEWGSTEGGSKPRASSLLPESTSRRSGPSDGPTAPYQPRRSTVTWDTALMVTALPSSAPRPHQSELELKFDMALRAGAAPTLGHRTLPLLPSLRASLAEIAGRLGPFGFFGTTLSPLRNFSGLSPPGETTSTSSASGVSGSLGFLGTTLSLPPYSLERKLSSPSPLDPAASLSFASIATTSLDPTVPISGPDDLSPPASLGNPSGQPECGPGSCSVGELPEREGQPPEAPRPLFFLTLEADWAEARARWGLAWEAHVYGVGALFGLVALLALLALALLPWRCPPGAPCLALLDLLLLSAGTTRAFPLFYDAYGHRDRLPALAWLLLQDLPLPCLAAGLGLACLLLARPRPPRCPTGLAALLLLGLGLAAA

SEQ ID NO: 10881 - protein, 429 aa, Homo Sapiens
MARHGCLGLGLFCCVLFAATVGPQPTPSIPGAPATTLTPVPQSEASMLSLNLGLNFKFHLRGPAAVWGSPVTETQPLSLGPGQEPGEEVASGLRTDPLWELLVGSSGNSLTEWGSTEGGSKPRASSLLPESTSRRSGPSDGPTAPYQPRRSTVTWDTALMVTALPSSAPRPHQSELELKFDMALRAGAAPTLGHRTLPLLPSLRASLAEIAGRLGPFGFFGTTLSPLRNFSGLSPPGETTSTSSASGVSGSLGFLGTTLSLPPYSLERKLSSPSPLDPAASLSFASIATTSLDPTVPISGPDDLSPPASLGNPSGQPECGPGSCSVGELPEREGQPPEAPRPLFFLTLEADWAEARARWGLAWEAHVYGRLHRGLPPALPNQPATQHRGGPLQRGPACAWPLPGPCLRGRSAWARTLPHRLAGDRGQGQ

SEQ ID NO: 10882 - protein, 419 aa, Homo Sapiens
  misc_feature (1)..(1): Xaa can be any naturally occurring amino acid
XSKPRASSLLPESTSRRSGPSDGPTAPYQPRRSTVTWDTALMVTALPSSAPRPHQSELELKFDMALRAGAAPTLGHRTLPLLPSLRASLAEIAGRLGPFGFFGTTLSPLRNFSGLSPPGETTSTSSASGVSGSLGFLGTTLSLPPYSLERKLSSPILACRRAAGPSSSACPRATRLRCCREAGSLGPQTRSPWGAPSLAGTRSCCSCARWQGQAQTSYSRAEVAGASKARRPTRPRPRLPLPAAITPWTSARPPQSTCDAASRRPSAARPCLRLASSRALPSRTLCLGSDSTAPPRWGPGAGPVRDQGRPLAPLRPRSSPPLGLGPQAAASHLARSADSRGTARPCCCVPAPTGPRAALWSASSVPRGPQEAAPASRPQDPTRPCPHPLATPQSLLLSCRPRRPCCRSSSWTPADRSTS

SEQ ID NO: 10883 - protein, 261 aa, Homo Sapiens
MNPLLILTFVAAALAAPFDDDDKIVGGYNCEENSVPYQVSLNSGYHFCGGSLINEQWVVSAGHCYKSAIKSKFSGRGCEYHRIQVRLGEHNIEVLEGNEQFINAAKIIRHPQYDRKTLNNDIMLIKLSSRAVINARVSTISLPTAPPATGTKCLISGWGNTASSGADYPDELQCLDAPVLSQAKCEASYPGKITSNMFCVGFLEGGKDSCQGDSGGPVVCNGQLQGVVSWGDGCAQKNKPGVYTKVYNYVKWIKNTIAANS

SEQ ID NO: 10884 - protein, 247 aa, Homo Sapiens
MNPLLILTFVAAALAAPFDDDDKIVGGYNCEENSVPYQVSLNSGYHFCGGSLINEQWVVSAGHCYKSRIQVRLGEHNIEVLEGNEQFINAAKIIRHPQYDRKTLNNDIMLIKLSSRAVINARVSTISLPTAPPATGTKCLISGWGNTASSGADYPDELQCLDAPVLSQAKCEASYPGKITSNMFCVGFLEGGKDSCQGDSGGPVVCNGQLQGVVSWGDGCAQKNKPGVYTKVYNYVKWIKNTIAANS

SEQ ID NO: 10885 - protein, 237 aa, Homo Sapiens
MNPLLILTFVAAALAAPFDDDDKIVGGYNCEENSVPYQVSLNSGYHFCGGSLINEQWVVSAGHCYKSRIQVRLGEHNINAAKIIRHPQYDRKTLNNDIMLIKLSSRAVINARVSTISLPTAPPATGTKCLISGWGNTASSGADYPDELQCLDAPVLSQAKCEASYPGKITSNMFCVGFLEGGKDSCQGDSGGPVVCNGQLQGVVSWGDGCAQKNKPGVYTKVYNYVKWIKNTIAANS

SEQ ID NO: 10886 - protein, 142 aa, Homo Sapiens
SLINEQWVVSAGHCYKSRIQVRLGEHNIEVLEGNEQFINAAKIIRHPQYDRKTLNNDIMLIKLSSRAVINARVSTISLPTAPPATGTKCLISGWGNTASSGADYPDELQCLDAPVLSQAKCEASYPGKITSNMFCVGFLEGG

SEQ ID NO: 10887 - protein, 875 aa, Homo Sapiens
MTLARFVLALMLGALPEVVGFDSVLNDSLHHSHRHSPPAGPHYPYYLPTQQRPPRTRPPPPLPRFPRPPRALPAQRPHALQAGHTPRPHPWGCPAGEPWVSVTDFGAPCLRWAEVPPFLERSPPASWAQLRGQRHNFCRSPDGAGRPWCFYGDARGKVDWGYCDCRHGSVRLRGGKNEFEGTVEVYASGVWGTVCSSHWDDSDASVICHQLQLGGKGIAKQTPFSGLGLIPIYWSNVRCRGDEENILLCEKDIWQGGVCPQKMAAAVTCSFSHGPTFPIIRLAGGSSVHEGRVELYHAGQWGTVCDDQWDDADAEVICRQLGLSGIAKAWHQAYFGEGSGPVMLDEVRCTGNELSIEQCPKSSWGEHNCGHKEDAGVSCTPLTDGVIRLAGGKGSHEGRLEVYYRGQWGTVCDDGWTELNTYVVCRQLGFKYGKQASANHFEESTGPIWLDDVSCSGKETRFLQCSRRQWGRHDCSHREDVSIACYPGGEGHRLSLGFPVRLMDGENKKEGRVEVFINGQWGTICDDGWTDKDAAVICRQLGYKGPARARTMAYFGEGKGPIHVDNVKCTGNERSLADCIKQDIGRHNCRHSEDAGVICDYFGKKASGNSNKESLSSVCGLRLLHRRQKRIIGGKNSLRGGWPWQVSLRLKSSHGDGRLLCGATLLSSCWVLTAAHCFKRYGNSTRSYAVRVGDYHTLVPEEFEEEIGVQQIVIHREYRPDRSDYDIALVRLQGPEEQCARFSSHVLPACLPLWRERPQKTASNCYITGWGDTGRAYSRTLQQAAIPLLPKRFCEERYKGRFTGRMLCAGNLHEHKRVDSCQGDSGGPLMCERPGESWVVYGVTSWGYGCGVKDSPGVYTKVSAFVPWIKSVTKL

SEQ ID NO: 10888 - protein, 92 aa, Homo Sapiens
MAVWLAQWLGPLLLVSLWGLLAPASLLRRLGEHIQQFQESSAQGLGLSLGPGAAALPKVGWLEQLLDPFNVSDRRSFLQAIPQPWPQPGAPW

SEQ ID NO: 10889 - protein, 257 aa, Homo Sapiens
MAVWLAQWLGPLLLVSLWGLLAPASLLRRLGEHIQQFQESSAQGLGLSLGPGAAALPKVGWLEQLLDPFNVSDRRSFLQIVLHSLGQKCLSFSRAETVAQLRSTEPQLSGVGDRQWLYQTCTEFGFYVTCENPRCPFSQLPALPSQLDLCEQVFGLSALSVAQAVAQTNSYYGGQTPGANKVLFVNGDTDPWHVLSVTQALGSSESTLLIRTGSHCLDMAPERPSDSPSLRLGRQNIFQQLQTWLKLAKESQIKGEV

SEQ ID NO: 10890 - protein, 99 aa, Homo Sapiens
MAVWLAQWLGPLLLVSLWGLLAPASLLRRLGEHIQQFQESSAQGLGLSLGPGAAALPKVGWLEQLLDPFNVSDRRSFLQMSPVRIPDVLSPSSQHCPPS

SEQ ID NO: 10891 - protein, 145 aa, Homo Sapiens
MAVWLAQWLGPLLLVSLWGLLAPASLLRRLGEHIQQFQESSAQGLGLSLGPGAAALPKVGWLEQLLDPFNVSDRRSFLQRYWVNDQHWVGQDGPIFLHLGGEGSLGPGSVMRDCLAQPGPEVFKLFPSRDSGTAEEHRTSTVWCG

SEQ ID NO: 10892 - protein, 514 aa, Homo Sapiens
MAVWLAQWLGPLLLVSLWGLLAPASLLRRLGEHIQQFQESSAQGLGLSLGPGAAALPKVGWLEQLLDPFNVSDRRSFLQRYWVNDQHWVGQDGPIFLHLGGEGSLGPGSVMRGHPAALAPAWGALVISLEHRFYGLSIPAGGLEMAQLRFLSSRLALADVVSARLALSRLFNISSSSPWICFGGSYAGSLAAWARLKFPHLIFASVASSAPVRAVLDFSEYNDVVSRSLMSTAIGGSLECRAAVSVAFAEVERRLRSGGAAQAALRTELSACGPLGRAENQAELLGALQALVGGVVQYDGQTGAPLSVRQLCGLLLGGGGNRSHSTPYCGLRRAVQIVLHSLGQKCLSFSRAETVAQLRSTEPQLSGVGDRQWLYQTCTEFGFYVTCENPRCPFSQLPALPSQLDLCEQVFGLSALSVAQAVAQTNSYYGGQTPGANKVLFVNGDTDPWHVLSVTQALGSSESTLLIRTGSHCLDMAPERPSDSPSLRLGRQNIFQQLQTWLKLAKESQIKGEV

SEQ ID NO: 10893 - protein, 166 aa, Homo Sapiens
MAVWLAQWLGPLLLVSLWGLLAPASLLRRLGEHIQQFQESSAQGLGLSLGPGAAALPKVGWLEQLLDPFNVSDRRSFLQRYWVNDQHWVGQDGPIFLHLGGEGSLGPGSVMRGHPAALAPAWGALVISLEHRFYGLSIPAGGLEMAQLRFLSSRLALSCTAWARSV

SEQ ID NO: 10894 - protein, 165 aa, Homo Sapiens
  misc_feature (1)..(1): Xaa can be any naturally occurring amino acid
XVMRGHPAALAPAWGALVISLEHRFYGLSIPAGGLEMAQLRFLSSRLALADVVSARLALSRLFNISSSSPWICFGGSYAGSLAAWARLKFPHLIFASVASSAPVRAVLDFSEYNDIVLHSLGQKCLSFSRAETVAQLRSTEPQLSGVGDRQWLYQTCTEFGFYVT

SEQ ID NO: 10895 - protein, 139 aa, Homo Sapiens
  misc_feature (1)..(1): Xaa can be any naturally occurring amino acid
XVMRGHPAALAPAWGALVISLEHRFYGLSIPAGGLEMAQLRFLSSRLALADVVSARLALSRLFNISSSSPWICFGGSYAGSLAAWARLKIVLHSLGQKCLSFSRAETVAQLRSTEPQLSGVGDRQWLYQTCTEFGFYVT

SEQ ID NO: 10896 - protein, 246 aa, Homo Sapiens
MNLLLILTFVAAAVAAPFDDDDKIVGGYICEENSVPYQVSLNSGYHFCGGSLISEQWVVSAGHCYKSAINSKLSGRGCEYHRIQVRLGEHNIEVLEGNEQFINAAKIIRHPKYNSRTLDNDILLIKLSSPAVINSRESLISGWGNTLSSGADYPDELQCLDAPVLSQAECEASYPGKITNNMFCVGFLEGGKDSCQGDSGGPVVSNGELQGIVSWGYGCAQKNRPGVYTKVYNYVDWIKDTIAANS

SEQ ID NO: 10897 - protein, 261 aa, Homo Sapiens
MNLLLILTFVAAAVAAPFDDDDKIVGGYICEENSVPYQVSLNSGYHFCGGSLISEQWVVSAGHCYKSAINSKLSGRGCEYHRIQVRLGEHNIEVLEGNEQFINAAKIIRHPKYNSRTLDNDILLIKLSSPAVINSRVSAISLPTAPPAAGTESLISGWGNTLSSGADYPDELQCLDAPVLSQAECEASYPGKITNNMFCVGFLEGGKDSCQGDSGGPVVSNGELQGIVSWGYGCAQKNRPGVYTKVYNYVDWIKDTIAANS

SEQ ID NO: 10898 - protein, 247 aa, Homo Sapiens
MNLLLILTFVAAAVAAPFDDDDKIVGGYICEENSVPYQVSLNSGYHFCGGSLISEQWVVSAGHCYKSRIQVRLGEHNIEVLEGNEQFINAAKIIRHPKYNSRTLDNDILLIKLSSPAVINSRVSAISLPTAPPAAGTESLISGWGNTLSSGADYPDELQCLDAPVLSQAECEASYPGKITNNMFCVGFLEGGKDSCQGDSGGPVVSNGELQGIVSWGYGCAQKNRPGVYTKVYNYVDWIKDTIAANS

SEQ ID NO: 10899 - protein, 247 aa, Homo Sapiens
MNPLLILAFVGAAVAAPFDDDDKIVGGYICEENSVPYQVSLNSGYHFCGGSLISEQWVVSAGHCYKSRIQVRLGEHNIEVLEGNEQFINAAKIIRHPKYNSRTLDNDILLIKLSSPAVINSRVSAISLPTAPPAAGTESLISGWGNTLSSGADYPDELQCLDAPVLSQAECEASYPGKITNNMFCVGFLEGGKDSCQGDSGGPVVSNGELQGIVSWGYGCAQKNRPGVYTKVYNYVDWIKDTIAANS

SEQ ID NO: 10900 - protein, 81 aa, Homo Sapiens
ARGAAAGAAAGSGWTQEAGVAGGGAVIRTMRPTGHHVAHRGWRGRRTRALAVAGEPAPVGFPRMRSEPAQPPLGTHGGALL

SEQ ID NO: 10901 - protein, 300 aa, Homo Sapiens
MGARGALLLALLLARAGLRKPESQEAAPLSGPCGRRVITSRIVGGEDAELGRWPWQGSLRLWDSHVCGVSLLSHRWALTAAHCFETYSDLSDPSGWMVQFGQLTSMPSFWSLQAYYTRYFVSNIYLSPRYLGNSPYDIALVKLSAPVTYTKHIQPICLQASTFEFENRTDCWVTGWGYIKEDEALPSPHTLQEVQVAIINNSMCNHLFLKYSFRKDIFGDMGDSGGPLACNKNGLWYQIGVVSWGVGCGRPNRPGVYTNISHHFEWIQKLMAQSGMSQPDPSWPLLFFPLLWALPLLGPV

SEQ ID NO: 10902 - protein, 314 aa, Homo Sapiens
MGARGALLLALLLARAGLRKPESQEAAPLSGPCGRRVITSRIVGGEDAELGRWPWQGSLRLWDSHVCGVSLLSHRWALTAAHCFETYSDLSDPSGWMVQFGQLTSMPSFWSLQAYYTRYFVSNIYLSPRYLGNSPYDIALVKLSAPVTYTKHIQPICLQASTFEFENRTDCWVTGWGYIKEDEALPSPHTLQEVQVAIINNSMCNHLFLKYSFRKDIFGDMVCAGNAQGGKDACFGDSGGPLACNKNGLWYQIGVVSWGVGCGRPNRPGVYTNISHHFEWIQKLMAQSGMSQPDPSWPLLFFPLLWALPLLGPV

SEQ ID NO: 10903 - protein, 218 aa, Homo Sapiens
  misc_feature (1)..(1): Xaa can be any naturally occurring amino acid
XLALLLARAGLRKPESQEAAPLSGPCGRRVITSRIVGGEDAELGRWPWQGSLRLWDSHVCGVSLLSHRWALTAAHCFETDLSDPSGWMVQFGQLTSMPSFWSLQAYYTRYFVSNIYLSPRYLGNSPYDIALVKLSAPVTYTKHIQPICLQASTFEFENRTDCWVTGWGYIKEDEGSSGRHHKQLYVQPPLPQVQFPQGHLWRHGLCWQCPRREGCLLR

SEQ ID NO: 10904 - protein, 81 aa, Homo Sapiens
  misc_feature (1)..(1): Xaa can be any naturally occurring amino acid
XRGAAAGAAAGSGWTQEAGVAGGGAVIRTMRPTGHHVAHRGWRGRRTRALAVAGEPAPVGFPRMRSEPAQPPLGTHGGALL

SEQ ID NO: 10905 - protein, 256 aa, Homo Sapiens
  misc_feature (1)..(1): Xaa can be any naturally occurring amino acid
XSLRLWDSHVCGVSLLSHRWALTAAHCFETDLSDPSGWMVQFGQLTSMPSFWSLQAYYTRYFVSNIYLSPRYLGNSPYDIALVKLSAPVTYTKHIQPICLQASTFEFENRTDCWVTGWGYIKEDEALPSPHTLQEVQVAIINNSMCNHLFLKYSFRKDIFGDMVCAGNAQGGKDACFGDSGGPLACNKNGLWYQIGVVSWGVGCGRPNRPGVYTNISHHFEWIQKLMAQSGMSQPDPSWPLLFFPLLWALPLLGPV

SEQ ID NO: 10906 - protein, 317 aa, Homo Sapiens
MVVSGAPPALGGGCLGTFTSLLLLASTAILNAARIPVPPACGKPQQLNRVVGGEDSTDSEWPWIVSIQKNGTHHCAGSLLTSRWVITAAHCFKDNLNKPYLFSVLLGAWQLGNPGSRSQKVGVAWVEPHPVYSWKEGACADIALVRLERSIQFSERVLPICLPDASIHLPPNTHCWISGWGSIQDGVPLPHPQTLQKLKVPIIDSEVCSHLYWRGAGQGPITEDMLCAGYLEGERDACLGDSGGPLMCQVDGAWLLAGIISWGEGCAERNRPGVYISLSAHRSWVEKIVQGVQLRGRAQGGGALRAPSQGSGAAARS

SEQ ID NO: 10907 - protein, 207 aa, Homo Sapiens
MVVSGAPPALGGGCLGTFTSLLLLASTAILNAARIPVPPACGKPQQLNRVVGGEDSTDSEWPWIVSIQKNGTHHCAVPLPHPQTLQKLKVPIIDSEVCSHLYWRGAGQGPITEDMLCAGYLEGERDACLGDSGGPLMCQVDGAWLLAGIISWGEGCAERNRPGVYISLSAHRSWVEKIVQGVQLRGRAQGGGALRAPSQGSGAAARS

SEQ ID NO: 10908 - protein, 116 aa, Homo Sapiens
  misc_feature (1)..(1): Xaa can be any naturally occurring amino acid
XLLSASALFISCSLTALCLGFFYGCEDETENAASTQRASVSSYRRRRHRLLPLASVFSHLLVLRCLPLGKHRFVLFLPQEVRGGHTSGSSVQSRGAQPSSMRPGYLFPQPVGSPSS

SEQ ID NO: 10909 - protein, 154 aa, Homo Sapiens
MAGIPGLLFLLFFLLCAVGQVSPYSAPWKPTWPAYRLPVVLPQSTLNLAKPDFGAEAKLEVSSSCGPQCHKGTPLPTYEEAKQYLSYETLYANGSRTETQVGIYILSSSGDGAQHRDSGSSGKSRRKRQIYGYDSRFSIFGKDFLLNYPFSTSV

SEQ ID NO: 10910 - protein, 383 aa, Homo Sapiens
MAGIPGLLFLLFFLLCAVGQVSPYSAPWKPTWPAYRLPVVLPQSTLNLAKPDFGAEAKLEVSSSCGPQCHKGTPLPTYEEAKQYLSYETLYANGSRTETQVGIYILSSSGDGAQHRDSGSSGKSRRKRQIYGYDSRFSIFGKDFLLNYPFSTSVKLSTGCTGTLVAEKHVLTAAHCIHDGKTYVKGTQKLRVGFLKPKFKDGGRGANDSTSAMPEQMKFQWIRVKRTHVPKGWIKGNANDIGMDYDYALLELKKPHKRKFMKIGVSPPAKQLPGGRIHFSGYDNDRPGNLVYRFCDVKDETYDLLYQQCDAQPGASGSGVYVRMWKRQQQKWERKIIGIFSGHQWVDMNGSPQDFNVAVRITPLKYAQICYWIKGNYLDCREG

SEQ ID NO: 10911 - protein, 82 aa, Homo Sapiens
MSRMRPVCQPWPSPHAPTTVKREGSTVSNSIQPPPPEYQLGSRTWLEAETPGQKRQCSAFMEFTEESRRASHFSSILKIEPV

SEQ ID NO: 10912 - protein, 91 aa, Homo Sapiens
MSRMRPVCQPWPSPHAPTTVKREGSTVSNSIQPPPPEYQLGSRTWLEAETPGQKRQCSAFMEFTEESRRIHQSVGTLLPRVKSFGRPNPHA

SEQ ID NO: 10913 - protein, 290 aa, Homo Sapiens
MRRPAAVPLLLLLCFGSQRAKAATACGRPRMLNRMVGGQDTQEGEWPWQVSIQRNGSHFCGGSLIAEQWVLTAAHCFRNTSETSLYQVLLGARQLVQPGPHAMYARVRQVESNPLYQGTASSADVALVELEAPVPFTNYILPVCLPDPSVIFETGMNCWVTGWGSPSEEDLLPEPRILQKLAVPIIDTPKCNLLYSKDTEFGYQPKTIKNDMLCAGFEEGKKDACKGDSGGPLVCLVGQSWLQAGVISWGEGCARQNRPGVYIRVTAHHNWIHRIIPKLQFQPARLGGQK

SEQ ID NO: 10914 - protein, 40 aa, Homo Sapiens
MRRPAAVPLLLLLCFGSQRAKAATAPLRRPCTRSCWGQGS

SEQ ID NO: 10915 - protein, 40 aa, Homo Sapiens; identical to SEQ ID NO: 10914

SEQ ID NO: 10916 - protein, 304 aa, Homo Sapiens
MCGPDDRCPARWPGPGRAVKCGKGLAAARPGRVERGGAQRGGAGLELHPLLGGRTWRAARDADGCEALGTVAVPFDDDDKIVGGYTCEENSLPYQVSLNSGSHFCGGSLISEQWVVSAAHCYKTRIQVRLGEHNIKVLEGNEQFINAAKIIRHPKYNRDTLDNDIMLIKLSSPAVINARVSTISLPTTPPAAGTECLISGWGNTLSFGADYPDELKCLDAPVLTQAECKASYPGKITNSMFCVGFLEGGKDSCQRDSGGPVVCNGQLQGVVSWGHGCAWKNRPGVYTKVYNYVDWIKDTIAANS

SEQ ID NO: 10917 - protein, 240 aa, Homo Sapiens
MGPAGEVAVPFDDDDKIVGGYTCEENSLPYQVSLNSGSHFCGGSLISEQWVVSAAHCYKTRIQVRLGEHNIKVLEGNEQFINAAKIIRHPKYNRDTLDNDIMLIKLSSPAVINARVSTISLPTTPPAAGTECLISGWGNTLSFGADYPDELKCLDAPVLTQAECKASYPGKITNSMFCVGFLEGGKDSCQRDSGGPVVCNGQLQGVVSWGHGCAWKNRPGVYTKVYNYVDWIKDTIAANS

SEQ ID NO: 10918 - protein, 261 aa, Homo Sapiens
MHMRETSGFTLKKGRSAPLVFHPPDALIAVPFDDDDKIVGGYTCEENSLPYQVSLNSGSHFCGGSLISEQWVVSAAHCYKTRIQVRLGEHNIKVLEGNEQFINAAKIIRHPKYNRDTLDNDIMLIKLSSPAVINARVSTISLPTTPPAAGTECLISGWGNTLSFGADYPDELKCLDAPVLTQAECKASYPGKITNSMFCVGFLEGGKDSCQRDSGGPVVCNGQLQGVVSWGHGCAWKNRPGVYTKVYNYVDWIKDTIAANS

SEQ ID NO: 10919 - protein, 247 aa, Homo Sapiens
MNPFLILAFVGAAVAVPFDDDDKIVGGYTCEENSLPYQVSLNSGSHFCGGSLISEQWVVSAAHCYKTRIQVRLGEHNIKVLEGNEQFINAAKIIRHPKYNRDTLDNDIMLIKLSSPAVINARVSTISLPTTPPAAGTECLISGWGNTLSFGADYPDELKCLDAPVLTQAECKASYPGKITNSMFCVGFLEGGKDSCQRDSGGPVVCNGQLQGVVSWGHGCAWKNRPGVYTKVYNYVDWIKDTIAANS

SEQ ID NO: 10920 - protein, 178 aa, Homo Sapiens
MRETSGFTLKKGRSAPLVFHPPDALIAVPFDDDDKIVGGYTCEENSLPYQVSLNSGSHFCGGSLISEQWVVSAAHCYKTRIQVRLGEHNIKVLEGNEQFINAAKIIRHPKYNRDTLDNDIMLIKLSSPAVINARVSTISLPTTPPAAGTECLISGWGNTLSFGADYPDELKCLDAPVL

SEQ ID NO: 10921 - protein, 236 aa, Homo Sapiens
MRGVSCLQVLLLLVLACGQPRMSSRIVGGRDGRDGEWPWQASIQHRGAHVCGGSLIAPQWVLTAAHCFPRRALPAEYRVRLGALRLGSTSPRTLSVPVRRVLLPPDYSEDGARGDLALLQLRRPVPLSARVQPVCLPVPGARPPPGTPCRVTGWGSLRPGVPLPEWRPLQGVRVPLLDSRTCDGLYHVGADVPQAERIVLPGSLCAGYPQGHKDACQVCTQPPQPPESPPCAQHPP

SEQ ID NO: 10922 - protein, 280 aa, Homo Sapiens
MRGVSCLQVLLLLVLGAAGTQGRKSAACGQPRMSSRIVGGRDGRDGEWPWQASIQHRGAHVCGGSLIAPQWVLTAAHCFPRRALPAEYRVRLGALRLGSTSPRTLSVPVRRVLLPPDYSEDGARGDLALLQLRRPVPLSARVQPVCLPVPGARPPPGTPCRVTGWGSLRPGVPLPEWRPLQGVRVPLLDSRTCDGLYHVGADVPQAERIVLPGSLCAGYPQGHKDACQGDSGGPLTCLQSGSWVLVGVVSWGKGCALPNRPGVYTSVATYSPWIQARVSF

SEQ ID NO: 10923 - protein, 280 aa, Homo Sapiens; identical to SEQ ID NO: 10922

SEQ ID NO: 10924 - protein, 115 aa, Homo Sapiens
MRGVSCLQVLLLLVLGAAGTQGRKSAACGQPRMSSRIVGGRDGRDGEWPWQASIQHRGAHVCGGSLIAPQWVLTAAHCFPSAPPRVATATRSKGAAAGLAHLRRPLPRGRGRAPG

SEQ ID NO: 10925 - protein, 413 aa, Homo Sapiens
MENMLLWLIFFTPGWTLIDGSEMEWDFMWHLRKVPRIVSERTFHLTSPAFEADAKMMVNTVCGIECQKELPTPSLSELEDYLSYETVFENGTRTLTRVKVQDLVLEPTQNITTKGVSVRRKRQVYGTDSRFSILDKRFLTNFPFSTAVKLSTGCSGILISPQHVLTAAHCVHDGKDYVKGSKKLRVGLLKMRNKSGGKKRRGSKRSRREASGGDQREGTREHLRERAKGGRRRKKSGRGQRIAEGRPSFQWTRVKNTHIPKGWARGGMGDATLDYDYALLELKRAHKKKYMELGISPTIKKMPGGMIHFSGFDNDRADQLVYRFCSVSDESNDLLYQYCDAESGSTGSGVYLRLKDPDKKNWKRKIIAVYSGHQWVDVHGVQKDYNVAVRITPLKYAQICLWIHGNDANCAYG

SEQ ID NO: 10926 - protein, 855 aa, Homo Sapiens
MARHLLLPLVMLVISPIPGAFQDSALSPTQEEPEDLDCGRPEPSARIVGGSNAQPGTWPWQVSLHHGGGHICGGSLIAPSWVLSAAHCFMTNGTLEPAAEWSVLLGVHSQDGPLDGAHTRAVAAIVVPANYSQVELGADLALLRLASPASLGPAVWPVCLPRASHRFVHGTACWATGWGDVQEADPLPLPWVLQEVELRLLGEATCQCLYSQPGPFNLTLQILPGMLCAGYPEGRRDTCQGDSGGPLVCEEGGRWFQAGITSFGFGCGRRNRPGVFTAVATYEAWIREQVMGSEPGPAFPTQPQKTQSDPQEPREENCTIALPECGKAPRPGAWPWEAQVMVPGSRPCHGALVSESWVLAPASCFLDPNSSDSPPRDLDAWRVLLPSRPRAERVARLVQHENASWDNASDLALLQLRTPVNLSAASRPVCLPHPEHYFLPGSRCRLARWGRGEPALGPGALLEAELLGGWWCHCLYGRQGAAVPLPGDPPHALCPAYQEKEEVGSCWNDSRWSLLCQEEGTWFLAGIRDFPSGCLRPRAFFPLQTHGPWISHVTRGAYLEDQLAWDWGPDGEETETQTCPPHTEHGACGLRLEAAPVGVLWPWLAEVHVAGDRVCTGILLAPGWVLAATHCVLRPGSTTVPYIEVYLGRAGASSLPQGHQVSRLVISIRLPQHLGLRPPLALLELSSRVEPSPSALPICLHPAGIPPGASCWVLGWKEPQDRVPVAAAVSILTQRICDCLYQGILPPGTLCVLYAEGQENRCEMTSAPPLLCQMTEGSWILVGMAVQGSRELFAAIGPEEAWISQTVGEANFLPPSGSPHWPTGGSNLCPPELAKASGSPHAVYFLLLLTLLIQS

SEQ ID NO: 10927 - protein, 752 aa, Homo Sapiens
MARHLLLPLVMLVISPIPGAFQDSALSPTQEEPEDLDCGRPEPSARIVGGSNAQPGTWPWQVSLHHGGGHICGGSLIAPSWVLSAAHCFMTNGTLEPAAEWSVLLGVHSQDGPLDGAHTRAVAAIVVPANYSQVELGADLALLRLASPASLGPAVWPVCLPRASHRFVHGTACWATGWGDVQEADPLPLPWVLQEVELRLLGEATCQCLYSQPGPFNLTLQILPGMLCAGYPEGRRDTCQGDSGGPLVCEEGGRWFQAGITSFGFGCGRRNRPGVFTAVATYEAWIREQVMGSEPGPAFPTQPQKTQSDPQEPREENCTIALPECGKAPRPGAWPWEAQVMVPGSRPCHGALVSESWVLAPASCFLDPNSSDSPPRDLDAWRVLLPSRPRAERVARLVQHENASWDNASDLALLQLRTPVNLSAASRPVCLPHPEHYFLPGSRCRLARWGRGEPALGPGALLEAELLGGWWCHCLYGRQGAAVPLPGDPPHALCPAYQEKEEVGSCWNDSRWSLLCQEEGTWFLAGIRDFPSGCLRPRAFFPLQTHGPWISHVTRGAYLEDQLAWDWGPDGEETETQTCPPHTEHGACGLRLEAAPVGVLWPWLAEVHVAGDRVCTGILLAPGWVLAATHCVLRPGSTTVPYIEVYLGRAGASSLPQGHQMTSAPPLLCQMTEGSWILVGMAVQGSRELFAAIGPEEAWISQTVGEANFLPPSGSPHWPTGGSNLCPPELAKASGSPHAVYFLLLLTLLIQS

SEQ ID NO: 10928 - protein, 850 aa, Homo Sapiens
MARHLLLPLVMLVISPIPGAFQDSALSPTQEEPEDLDCGRPEPSARIVGGSNAQPGTWPWQVSLHHGGGHICGGSLIAPSWVLSAAHCFMTNGTLEPAAEWSVLLGVHSQDGPLDGAHTRAVAAIVVPANYSQVELGADLALLRLASPASLGPAVWPVCLPRASHRFVHGTACWATGWGDVQEADPLPLPWVLQEVELRLLGEATCQCLYSQPGPFNLTLQILPGMLCAGYPEGRRDTCQGDSGGPLVCEEGGRWFQAGITSFGFGCGRRNRPGVFTAVATYEAWIREQVMGSEPGPAFPTQPQKTQSDPQEPREENCTIALPECGKAPRPGAWPWEAQVMVPGSRPCHGALVSESWVLAPASCFLDPNSSDSPPRDLDAWRVLLPSRPRAERVARLVQHENASWDNASDLALLQLRTPVNLSAASRPVCLPHPEHYFLPGSRCRLARWGRGEPALGPGALLEAELLGGWWCHCLYGRQGAAVPLPGDPPHALCPAYQEKEENDSRWSLLCQEEGTWFLAGIRDFPSGCLRPRAFFPLQTHGPWISHVTRGAYLEDQLAWDWGPDGEETETQTCPPHTEHGACGLRLEAAPVGVLWPWLAEVHVAGDRVCTGILLAPGWVLAATHCVLRPGSTTVPYIEVYLGRAGASSLPQGHQVSRLVISIRLPQHLGLRPPLALLELSSRVEPSPSALPICLHPAGIPPGASCWVLGWKEPQDRVPVAAAVSILTQRICDCLYQGILPPGTLCVLYAEGQENRCEMTSAPPLLCQMTEGSWILVGMAVQGSRELFAAIGPEEAWISQTVGEANFLPPSGSPHWPTGGSNLCPPELAKASGSPHAVYFLLLLTLLIQS

SEQ ID NO: 10929 - protein, 28 aa, Homo Sapiens
  misc_feature (1)..(1): Xaa can be any naturally occurring amino acid
XIEVYLGRAGASSLPQGHQSLWLLLSPS

SEQ ID NO: 10930 - protein, 65 aa, Homo Sapiens
MKYVFYLGVLAERRPCSLFGVPQVSLQPLCGRPHQTQLGAGPSSLLFTKSESDAGKFQEQSQRRY

SEQ ID NO: 10931 - protein, 68 aa, Homo Sapiens
MKYVFYLGVLAGTFFFADSSVQKEDPAPYLVYLKSHFNPCVGVLIKPSWVLAPAHCYLPMNAFYHLKI

SEQ ID NO: 10932 - protein, 235 aa, Homo Sapiens
MKYVFYLGVLAGTFFFADSSVQKEDPAPYLVYLKSHFNPCVGVLIKPSWVLAPAHCYLPNLKVMLGNFKSRVRDGTEQTINPIQIVRYWNYSHSAPQDDLMLIKLAKPAMLNPKVQPLTLATTNVRPGTVCLLSGLDWSQENSGRHPDLRQNLEAPVMSDRECQKTEQGKSHRNSLCVKFVKVFSRIFGEVAVATVICKDKLQGIEVGHFMGGDVGIYTNVYKYVSWIENTAKDK

SEQ ID NO: 10933 - protein, 235 aa, Homo Sapiens; identical to SEQ ID NO: 10932

SEQ ID NO: 10934 - protein, 326 aa, Homo Sapiens
MAAPASVMGPLGPSALGLLLLLLVVAPPRVAALVHRQPENQGISLTGSVACGRPSMEGKILGGVPAPERKWPWQVSVHYAGLHVCGGSILNEYWVLSAAHCFHRDKNIKIYDMYVGLVNLRVAGNHTQWYEVNRVILHPTYEMYHPIGGDVALVQLKTRIVFSESVLPVCLATPEVNLTSANCWATGWGLVSKQGETSDELQEMQLPLILEPWCHLLYGHMSYIMPDMLCAGDILNAKTVCEGDSGGPLVCEFNRSWLQIGIVSWGRGCSNPLYPGVYASVSYFSKWICDNIEITPTPAQPAPALSPALGPTLSVLMAMLAGWSVL

SEQ ID NO: 10935 - protein, 100 aa, Homo Sapiens
MASFLAVVGAPGGVNSCVFDRFHYSVKMGDRSVYNENTSVVVSVQRAFVHPKFSTVTTIRNDLALLQLQHPVNFTSNIQPICIPQENFQVEGRFWGPLGL

SEQ ID NO: 10936 - protein, 293 aa, Homo Sapiens
MSSGGGSRGLLAWLLLLQPWPGQNWAGMAAPRLPSPLLSEEGGENPEASPAPGPEAGPPLNLFTSFPGDSLLCGRTPLRIVGGVDAEEGRWPWQVSVRTKGRHICGGTLVTATWVLTAGHCISSRFHYSVKMGDRSVYNENTSVVVSVQRAFVHPKFSTVTTIRNDLALLQLQHPVNFTSNIQPICIPQENFQVEGRTRCWVTGWGKTPEREKLASEILQDVDQYIMCYEECNKIIQKALSSTKDVIIKGMVCGYKEQGKDSCQGDSGGRLACEYNDTWVQVGIVSWGIGCGR

SEQ ID NO: 10937 - protein, 185 aa, Homo Sapiens
MGPAGCAFTLLLLLGISDRDYHSALQEAEVPIIDRQACEQLYNPIGIFLPALEPVIKEDKICAGDTQNMKDSCKGDSGGPLSCHIDGVWIQTGVVSWGLECGKSLPGVYTNVIYYQKWINATISRANNLDFSDFLFPIVLLSLALLRPSCAFGPNTIHRVGTVAEAVACIQGWEENAWRFSPRGR

SEQ ID NO: 10938 - protein, 328 aa, Homo Sapiens
MGPAGCAFTLLLLLGISVCGQPVYSSRVVGGQDAAAGRWPWQVSLHFDHNFICGGSLVSERLILTAAHCIQPTWTTFSYTVWLGSITVGDSRKRVKYYVSKIVIHPKYQDTTADVALLKLSSQVTFTSAILPICLPSVTKQLAIPPFCWVTGWGKVKESSDRDYHSALQEAEVPIIDRQACEQLYNPIGIFLPALEPVIKEDKICAGDTQNMKDSCKGDSGGPLSCHIDGVWIQTGVVSWGLECGKSLPGVYTNVIYYQKWINATISRANNLDFSDFLFPIVLLSLALLRPSCAFGPNTIHRVGTVAEAVACIQGWEENAWRFSPRGR

SEQ ID NO: 10939 - protein, 385 aa, Homo Sapiens
MGRWCQTVARGQRPRTSAPSRAGALLLLLLLLRSAGCWGAGEAPGALSTADPADQSVQCVPKATCPSSRPRLLWQTPTTQTLPSTTMETQFPVSEGKVDPYRSCGFSYEQDPTLRDPEAVARRWPWMVSVRANGTHICAGTIIASQWVLTVAHCLIWRDVIYSVRVGSPWIDQMTQTASDVPVLQVIMHSRYRAQRFWSWVGQANDIGLLKLKQELKYSNYVRPICLPGTDYVLKDHSRCTVTGWGLSKADGMWPQFRTIQEKEVIILNNKECDNFYHNFTKIPTLVQIIKSQMMCAEDTHREKFCYELTGEPLVCSMEGTWYLVGLVSWGAGCQKSEAPPIYLQVSSYQHWIWDCLNGQALALPAPSRTLLLALPLPLSLLAAL

SEQ ID NO: 10940 - protein, 553 aa, Homo Sapiens
MKWCWGPVLLIAGATVLMEGLQAAQRACGQRGPGPPKPQEGNTVPGEWPWQASVRRQGAHICSGSLVADTWVLTAAHCFEKAAATELNSWSVVLGSLQREGLSPGAEEVGVAALQLPRAYNHYSQGSDLALLQLAHPTTHTPLCLPQPAHRFPFGASCWATGWDQDTSDAPGTLRNLRLRLISRPTCNCIYNQLHQRHLSNPARPGMLCGGPQPGVQGPCQGDSGGPVLCLEPDGHWVQAGIISFASSCAQEDAPVLLTNTAAHSSWLQARVQGAAFLAQSPETPEMSDEDSCVACGSLRTAGPQAGAPSPWPWEARLMHQGQLACGGALVSEEAVLTAAHCFIGRQAPEEWSVGLGTRPEEWGLKQLILHGAYTHPEGGYDMALLLLAQPVTLGASLRPLCLPYPDHHLPDGERGWVLGRARPGAGISSLQTVPVTLLGPRACSRLHAAPGGDGSPILPGMVCTSAVGELPSCEGLSGAPLVHEVRGTWFLAGLHSFGDACQGPARPAVFTALPAYEDWVSSLDWQVYFAEEPEPEAEPGSCLANISQPTSC

SEQ ID NO: 10941 - protein, 203 aa, Homo Sapiens
MDPSKIAHTEYPVNTIIIHEDFDNNSMSNNIALLKTDTAMHFGNLVQSICFLGRMLHTPPVLQNCWVSGWNPTSATGNHMTMSVLRKIFVKDLDMCPLYKLQKTECGSHTKEETKTACLGDPGSPMMCQLQQFDLWVLRGVLNFGGETCPGLFLYTKVEDYSKWITSKAERAGPPLSSLHHWEKLISFSHHGPNATMTQKTYS

SEQ ID NO: 10942 - protein, 296 aa, Homo Sapiens
MDPSKIAHTEYPVNTIIIHEDFDNNSMSNNIALLKTDTAMHFGNLVQSICFLGRMLHTPPVLQNCWVSGWNPTSATGNHMTMSVLRKIFVKDLDMCPLYKLQKTECGSHTKEETKTACLGDPGSPMMCQLQQFDLWVLRGVLNFGGETCPGLFLYTKVEDYSKWITSKAERAGPPLSSLHHWEKLISFSHHGPNATMTQKTYSDSELGHVGSYLQGQRRTITHSRLGNSSRDSLDVREKDVKESGRSPEASVQPLYYDYYGGEVGEGRIFAGQNRLYQPEEIILVSFVLVFFCSSI

SEQ ID NO: 10943 - protein, 186 aa, Homo Sapiens
MVSAAGLSGDGKMRGVLLVLLGLLYSSTSCGVQKASVFYGPDPKEGLVSSMEFPWVVSLQDSQYTHLAFGCILSEFWVLSIASAIQNRKDIVVIVGISNMDPSKIAHTEYPVNTIIIHEDFDNNSMSNNIALLKTDTAMHFGNLVQSICFLGRMLHTPPVLQNCWVSGWNPTSATGNHMTMSVLRK

SEQ ID NO: 10944 - protein, 395 aa, Homo Sapiens
MVSAAGLSGDGKMRGVLLVLLGLLYSSTSCGVQKASVFYGPDPKEGLVSSMEFPWVVSLQDSQYTHLAFGCILSEFWVLSIASAIQNRKDIVVIVGISNMDPSKIAHTEYPVNTIIIHEDFDNNSMSNNIALLKTDTAMHFGNLVQSICFLGRMLHTPPVLQNCWVSGWNPTSATGNHMTMSVLRKIFVKDLDMCPLYKLQKTECGSHTKEETKTACLGDPGSPMMCQLQQFDLWVLRGVLNFGGETCPGLFLYTKVEDYSKWITSKAERAGPPLSSLHHWEKLISFSHHGPNATMTQKTYSDSELGHVGSYLQGQRRTITHSRLGNSSRDSLDVREKDVKESGRSPEASVQPLYYDYYGGEVGEGRIFAGQNRLYQPEEIILVSFVLVFFCSSI

SEQ ID NO: 10945 - protein, 395 aa, Homo Sapiens; identical to SEQ ID NO: 10944

SEQ ID NO: 10946 - protein, 352 aa, Homo Sapiens
MLLFSVLLLLSLVTGTQLGPRTPLPEAGVAILGRARGAHRPQPPHPPSPVSECGDRSIFEGRTRYSRITGGMEAEVGEFPWQVSIQARSEPFCGGSILNKWWILTAAHCLYSEELFPEELSVVLGTNDLTSPSMEIKEVASIILHKDFKRANMDNDIALLLLASPIKLDDLKVPICLPTQPGPATWRECWVAGWGQTNAADKNSVKTDLMKAPMVIMDWEECSKMFPKLTKNMLCAGYKNESYDACKGDSGGPLVCTPEPGEKWYQVGIISWGKSCGEKNTPGIYTSLVNYNLWIEKVTQLEGRPFNAEKRRTSVKQKPMGSPVSGVPEPGSPRSWLLLCPLSHVLFRAILY

SEQ ID NO: 10947 - protein, 276 aa, Homo Sapiens
MLLFSVLLLLSLVTGTQLGPRTPLPEAGVAILGRARGAHRPQPPHPPSPVSECGDRSIFEGRTRYSRITGGMEAEVGEFPWQVSIQARSEPFCGGSILNKWWILTAAHCLYSEELFPEELSVVLGTNDLTSPSMEIKEVASIILHKDFKRANMDNDIALLLLASPIKLDDLKVPICLPTQPGPATWRECWVAGWGQTNAADKNSVKTDLMKAPMVIMDWEECSKMFPKLTKNMLCAGYKNESYDACKQSYFPTLQRMNTGSSQTKPPGSHTFHLQN

SEQ ID NO: 10948 - protein, 182 aa, Homo Sapiens
  misc_feature (1)..(1): Xaa can be any naturally occurring amino acid
XWKPAPPSPVPSSHWMLTKCFPFSFPLSFFPPECGDRSIFEGRTRYSRITGGMEAEVGEFPWQVSIQARSEPFCGGSILNKWWILTAAHCLYSEELFPEELSVVLGTNDLTSPSMEIKEVASIILHKDFKRANMDNDIALLLLASPIKLDDLKVPICLPTQPGPATWRECWVAGWGQTNAGM

SEQ ID NO: 10949 - protein, 604 aa, Homo Sapiens
MLLAVLLLLPLPSSWFAHGHPLYTRLPPSALQVLSAQGTQALQAAQRSAQWAINRVAMEIQHRSHECRGSGRPRPQALLQDPPEPGPCGERRPSTANVTRAHGRIVGGSAAPPGAWPWLVRLQLGGQPLCGGVLVAASWVLTAAHCFVGAPNELLWTVTLAEGSRGEQAEEVPVNRILPHPKFDPRTFHNDLALVQLWTPVSPGGSARPVCLPQEPQEPPAGTACAIAGWGALFEDGPEAEAVREARVPLLSTDTCRRALGPGLRPSTMLCAGYLAGGVDSCQGDSGGPLTCSEPGPRPREVLFGVTSWGDGCGEPGKPGVYTRVAVFKDWLQEQMSAASSSREPSCRELLAWDPPQELQADAARLCAFYARLCPGSQGACARLAHQQCLQRRRRCELRSLAHTLLGLLRNAQELLGPRPGLRRLAPALALPAPALRESPLHPARELRLHSGSRAAGTRFPKRRPEPRGEANGCPGLEPLRQKLAALQGAHAWILQVPSEHLAMNFHEVLADLGSKTLTGLFRAWVRAGLGGRHVAFSGLVGLEPATLARSLPRLLVQALQAFRVAALAEGEPEGPWMDVGQGPGLERKGHHPLNPQVPPARQP

SEQ ID NO: 10950 - protein, 603 aa, Homo Sapiens
MLLAVLLLLPLPSSWFAHGHPLYTRLPPSALQVLSAQGTQALQAAQRSAQWAINRVAMEIQHRSHECRGSGRPRPQALLQDPPEPGPCGERRPSTANVTRAHGRIVGGSAAPPGAWPWLVRLQLGGQPLCGGVLVAASWVLTAAHCFVGAPNELLWTVTLAEGSRGEQAEEVPVNRILPHPKFDPRTFHNDLALVQLWTPVSPGGSARPVCLPQEPQEPPAGTACAIAGWGALFEDGPEAEAVREARVPLLSTDTCRRALGPGLRPSTMLCAGYLAGGVDSCQGDSGGPLTCSEPGPRPREVLFGVTSWGDGCGEPGKPGVYTRVAVFKDWLQEQMSASSSREPSCRELLAWDPPQELQADAARLCAFYARLCPGSQGACARLAHQQCLQRRRRCELRSLAHTLLGLLRNAQELLGPRPGLRRLAPALALPAPALRESPLHPARELRLHSGSRAAGTRFPKRRPEPRGEANGCPGLEPLRQKLAALQGAHAWILQVPSEHLAMNFHEVLADLGSKTLTGLFRAWVRAGLGGRHVAFSGLVGLEPATLARSLPRLLVQALQAFRVAALAEGEPEGPWMDVGQGPGLERKGHHPLNPQVPPARQP

SEQ ID NO: 10951 - protein, 283 aa, Homo Sapiens
MGLGLRGWGRPLLTVATALMLPVKPPAGSWGAQIIGGHEVTPHSRPYMASVRFGGQHHCGGFLLRARWVVSAAHCFSHRDLRTGLVVLGAHVLSTAEPTQQVFGIDALTTHPDYHPMTHANDICLLRLNGSAVLGPAVGLLRPPGRRARPPTAGTRCRVAGWGFVSDFEELPPGLMEAKVRVLDPDVCNSSWKGHLTLTMLCTRSGDSHRRGFCSADSGGPLVCRNRAHGLVSFSGLWCGDPKTPDVYTQVSAFVAWIWDVVRRSSPQPGPLPGTTRPPGEAA

SEQ ID NO: 10952 - protein, 282 aa, Homo Sapiens
MGLGLRGWGRPLLTVATALMLPVKPPGSWGAQIIGGHEVTPHSRPYMASVRFGGQHHCGGFLLRARWVVSAAHCFSHRDLRTGLVVLGAHVLSTAEPTQQVFGIDALTTHPDYHPMTHANDICLLRLNGSAVLGPAVGLLRPPGRRARPPTAGTRCRVAGWGFVSDFEELPPGLMEAKVRVLDPDVCNSSWKGHLTLTMLCTRSGDSHRRGFCSADSGGPLVCRNRAHGLVSFSGLWCGDPKTPDVYTQVSAFVAWIWDVVRRSSPQPGPLPGTTRPPGEAA

SEQ ID NO: 10953 - protein, 241 aa, Homo Sapiens
MKFILLWALLNLTVALAFNPDYTVSSTPPYLVYLKSDYLPCAGVLIHPLWVITAAHCNLPKLRVILGVTIPADSNEKHLQVIGYEKMIHHPHFSVTSIDHDIMLIKLKTEAELNDYVKLANLPYQTISENTMCSVSTWSYNVCDIYKEPDSLQTVNISVISKPQCRDAYKTYNITENMLCVGIVPGRRQPCKEVSAAPAICNGMLQGILSFADGCVLRADVGIYAKIFYYIPWIENVIQNN

SEQ ID NO: 10954 - protein, 241 aa, Homo Sapiens; identical to SEQ ID NO: 10953

SEQ ID NO: 10955 - protein, 108 aa, Homo Sapiens [sequence omitted]

SEQ ID NO: 10956 - protein, 343 aa, Homo Sapiens
MAQKGVLGPGQLGAVAILLYLGLLRSGTGAEGAEAPCGVAPQARITGGSSAVAGQWPWQVSITYEGVHVCGGSLVSEQWVLSAAHCFPSEHHKEAYEVKLGAHQLDSYSEDAKVSTLKDIIPHPSYLQEGSQGDIALLQLSRPITFSRYIRPICLPAANASFPNGLHCTVTGWGHVAPSVSLLTPKPLQQLEVPLISRETCNCLYNIDAKPEEPHFVQEDMVCAGYVEGGKDACQGDSGGPLSCPVEGLWYLTGIVSWGDACGARNRPGVYTLASSYASWIQSKVTELQPRVVPQTQESQPDSNLCGSHLAFSSAPAQGLLRPILFLPLGLALGLLSPWLSEH

SEQ ID NO: 10957 - protein, 195 aa, Homo Sapiens
MAQKGVLGPGQLGAVAILLYLGLLRSGTGAEGAEAPCGVAPQARITGGSSAVAGQWPWQVSITYEGVHVCGGSLVSEQWVLSAAHCFPSYLQEGSQGDIALLQLSRPITFSRYIRPICLPAANASFPNGLHCTVTGWGHVAPSVSLLTPKPLQQLEVPLISRETCNCLYNIDAKPEEPHFVQEDMVCAGYVEGGK

SEQ ID NO: 10958 - protein, 289 aa, Homo Sapiens
MAQKGVLGPGQLGAVAILLYLGLLRSGTGAEGAEAPCGVAPQARITGGSSAVAGQWPWQVSTLKDIIPHPSYLQEGSQGDIALLQLSRPITFSRYIRPICLPAANASFPNGLHCTVTGWGHVAPSVSLLTPKPLQQLEVPLISRETCNCLYNIDAKPEEPHFVQEDMVCAGYVEGGKDACQGDSGGPLSCPVEGLWYLTGIVSWGDACGARNRPGVYTLASSYASWIQSKVTELQPRVVPQTQESQPDSNLCGSHLAFSSAPAQGLLRPILFLPLGLALGLLSPWLSEH

SEQ ID NO: 10959 - protein, 218 aa, Homo Sapiens
EYQVVIGNDTTHYIIDDLEPASNYTFYIVAYMPMGASQMSDHVTQNTLEDVPLRPPEISLTSRSPTDILISWLPIPAKYRRGQVVLYRLSFRLSTENSIQVLELPGTTHEYLLEGLKPDSVYLVRITAATRVGLGESSVWTSHRTPKATSVKAPKSPELHLEPLNCTTISVRWQQDVEDTAAIQGYKLYYKEEGQQENGPIFLDTKDLLYTLSGLARI

SEQ ID NO: 10960 - protein, 137 aa, Homo Sapiens
MAPPLRPLARLRPPGMLLRALLLLLLLSPLPGVWCFSELSFVKEPQDVTVTRKDPVVLDCQAHGEVPIKVTWLKNGAKMSENKRIEVLSNGSLYISEVEGRRGEQSDEGFYQCLAMNKYGAILSQKAHLALSRIGST

SEQ ID NO: 10961 - protein, 1150 aa, Homo Sapiens
MAPPLRPLARLRPPGMLLRALLLLLLLSPLPGVWCFSELSFVKEPQDVTVTRKDPVVLDCQAHGEVPIKVTWLKNGAKMSENKRIEVLSNGSLYISEVEGRRGEQSDEGFYQCLAMNKYGAILSQKAHLALSTISAFEVQPISTEVHEGGVARFACKISSHPPAVITWEFNRTTLPMTMDRITALPTGVLQIYDVSQRDSGNYRCIAATVAHRRKSMEASLTVIPAKESKSFHTPTIIAGPQNITTSLHQTVVLECMATGNPKPIISWSRLDHKSIDVFNTRVLGNGNLMISDVRLQHAGVYVCRATTPGTRNFTVAMATLTVLAPPSFVEWPESLTRPRAGTARFVCQAEGIPSPKMSWLKNGRKIHSNGRIKMYNSKLVINQIIPEDDAIYQCMAENSQGSILSRARLTVVMSEDRPSAPYNVHAETMSSSAILLAWERPLYNSDKVIAYSVHYMKAEGLNNEEYQVVIGNDTTHYIIDDLEPASNYTFYIVAYMPMGASQMSDHVTQNTLEDVPLRPPEISLTSRSPTDILISWLPIPAKYRRGQVVLYRLSFRLSTENSIQVLELPGTTHEYLLEGLKPDSVYLVRITAATRVGLGESSVWTSHRTPKATSVKAPKSPELHLEPLNCTTISVRWQQDVEDTAAIQGYKLYYKEEGQQENGPIFLDTKDLLYTLSGLDPRRKYHVRLLAYNNIDDGYQADQTVSTPGCVSVRDRMVPPPPPPHHLYAKANTSSSIFLHWRRPAFTAAQIINYTIRCNPVGLQNASLVLYLQTSETHMLVQGLEPNTKYEFAVRLHVDQLSSPWSPVVYHSTLPEAPAGPPVGVKVTLIEDDTALVSWKPPDGPETVVTRYTILYASRKAWIAGEWQVLHREGAITMALLENLVAGNVYIVKISASNEVGEGPFSNSVELAVLPKETSESNQRPKRLDSADAKVYSGYYHLDQKSMTGIAVGVGIALTCILICVLILIYRSKARKSSASKTAQNGTQQLPRTSASLASGNEVGKNLEGAVGNEESLMPMIMPNSFIDAKGGTDLIINSYGPIIKNNSKKKWFFFQDSKKIQVEQPQRRFTPAVCFYQPGTTVLISDEDSPSSPGQTTSFSRPFGVAADTEHSANSEGSHETGDSGRFSHESNDEIHLSSVISTTPPNL

SEQ ID NO: 10962 - protein, 22 aa, Homo Sapiens
MSENKRIEVLSNGSLYISEVEG

SEQ ID NO: 10963 - protein, 256 aa, Homo Sapiens
MAHRPPSPALASVLLALLLSGAARAAEIVGGHEAQPHSRPYMASLQMRGNPGSHFCGGTLIHPSFVLTAAHCLRDIPQRLVNVVLGAHNVRTQEPTQQHFSVAQVFLNNYDAENKLNDVLLIQLSSPANLSASVATVQLPQQDQPVPHGTQCLAMGWGRVGAHDPPAQVLQELNVTVVTFFCRPHNICTFVPRRKAGICFGDSGGPLICDGIIQGIDSFVIWGCATRLFPDFFTRVALYVDWIRSTLRRVEAKGRP

SEQ ID NO: 10964 - protein, 215 aa, Homo Sapiens
MASLQMRGNPGSHFCGGTLIHPSFVLTAAHCLRDIPQRLVNVVLGAHNVRTQEPTQQHFSVAQVFLNNYDAENKLNDVLLIQLSSPANLSASVATVQLPQQDQPVPHGTQCLAMGWGRVGAHDPPAQVLQELNVTVVTFFCRPHNICTFVPRRKAGICFGDSGGPLICDGIIQGIDSFVIWGCATRLFPDFFTRVALYVDWIRSTLRRVEAKGRP

SEQ ID NO: 10965 - protein, 527 aa, Homo Sapiens [sequence omitted]

SEQ ID NO: 10966 - protein, 524 aa, Homo Sapiens
MYALFLLASLLGAALAGPVLGLKECTRGSAVWCQNVKTASDCGAVKHCLQTVWNKPTVKSLPCDICKDVVTAAGDMLKDNATEEEILVYLEKTCDWLPKPNMSASCKEIVDSYLPVILDIIKGEMSRPGEVCSALNLCESLQKHLAELNHQKQLESNKIPELDMTEVVAPFMANIPLLLYPQDGPRSKPQPKDNGDVCQDCIQMVTDIQTAVRTNSTFVQALVEHVKEECDRLGPGMADICKNYISQYSEIAIQMMMHMQPKEICALVGFCDEVKEMPMQTLVPAKVASKNVIPALELVEPIKKHEVPAKSDVYCEVCEFLVKEVTKLIDNNKTEKEILDAFDKMCSKLPKSLSEECQEVVDTYGSSILSILLEEVSPELVCSMLHLCSGTRLPALTVHVTQPKDGGFCEVCKKLVGYLDRNLEKNSTKQEILAALEKGCSFLPDPYQKQCDQFVAEYEPVLIEILVEVMDPSFVCLKIGACPSAHKPLLGTEKCIWGPSYWCQNTETAAQCNAVEHCKRHVWN

SEQ ID NO: 10967 - protein, 240 aa, Homo Sapiens
MYALFLLASLLGAALAGPVLGLKECTRGSAVWCQNVKTASDCGAVKHCLQTVWNKPTVKSLPCDICKDVVTAAGDMLKDNATEEEILVYLEVSPELVCSMLHLCSGTRLPALTVHVTQPKDGGFCEVCKKLVGYLDRNLEKNSTKQEILAALEKGCSFLPDPYQKQCDQFVAEYEPVLIEILVEVMDPSFVCLKIGACPSAHKPLLGTEKCIWGPSYWCQNTETAAQCNAVEHCKRHVWN

SEQ ID NO: 10968 - protein, 167 aa, Homo Sapiens
  misc_feature (1)..(1): Xaa can be any naturally occurring amino acid
XCIQMVTDIQTAVRTNSTFVQALVEHVKEECDRLGPGMADICKNYISQYSEIAIQMMMHMQDQQPKEICALVGFCDEVKEMPMQTLVPAKVASKNVIPALELVEPIKKHEVPAKSDVYCEVCEFLVKEVTKLIDNNKTEKEILDAFDKMCSKLPKSLSEECQEVVDT

SEQ ID NO: 10969 - protein, 521 aa, Homo Sapiens
MLCALLLLPSLLGATRASPTSGPQECAKGSTVWCQDLQTAARCGAVGYCQGAVWNKPTAKSLPCDVCQDIAAAAGNGLNPDATESDILALVMKTCEWLPSQESSAGCKWMVDAHSSAILSMLRGAPDSAPAQVCTALSLCEPLQRHLATLRPLSKEDTFEAVAPFMANGPLTFHPRQAPEGALCQDCVRQVSRLQEAVRSNLTLADLNIQEQCESLGPGLAVLCKNYLFQFFVPADQALRLLPPQELCRKGGFCEELGAPARLTQVVAMDGVPSLELGLPRKQSEMQMKAGVTCEVCMNVVQKLDHWLMSNSSELMITHALERVCSVMPASITKECIILVDTYSPSLVQLVAKITPEKVCKFIRLCGNRRRARAVHDAYAIVPSPEWDAENQGSFCNGCKRLLTVSSHNLESKSTKRDILVAFKGGCSILPLPYMIQCKHFVTQYEPVLIESLKDMMDPVAVCKKVGACHGPRTPLLGTDQCALGPSFWCRSQEAAKLCNAVQHCQKHVWKEMHLHAGEHA

SEQ ID NO: 10970 - protein, 426 aa, Homo Sapiens
MGTLSAPPCTQRIKWKGLLLTASLLNFWNLPTTAQVTIEAEPTKVSEGKDVLLLVHNLPQNLTGYIWYKGQMRDLYHYITSYVVDGEIIIYGPAYSGRETAYSNASLLIQNVTREDAGSYTLHIIKGDDGTRGVTGRFTFTLHLETPKPSISSSNLNPRETMEAVSLTCDPETPDASYLWWMNGQSLPMTHSLKLSETNRTLFLLGVTKYTAGPYECEIRNPVSASRSDPVTLNLLPKLPKPYITINNLNPRENKDVLNFTCEPKSENYTYIWWLNGQSLPVSPRVKRPIENRILILPSVTRNETGPYQCEIRDRYGGIRSDPVTLNVLYGPDLPRIYPSFTYYRSGEVLYLSCSADSNPPAQYSWTINEKFQLPGQKLFIRHITTKHSGLYVCSVRNSATGKESSKSMTVEVSGKWIPASLAIGF

SEQ ID NO: 10971 - protein, 428 aa, Homo Sapiens
MGTLSAPPCTQRIKWKGLLLTASLLNFWNLPTTAQVTIEAEPTKVSEGKDVLLLVHNLPQNLTGYIWYKGQMRDLYHYITSYVVDGEIIIYGPAYSGRETAYSNASLLIQNVTREDAGSYTLHIIKGDDGTRGVTGRFTFTLHLETPKPSISSSNLNPRETMEAVSLTCDPETPDASYLWWMNGQSLPMTHSLKLSETNRTLFLLGVTKYTAGPYECEIRNPVSASRSDPVTLNLLPKLPKPYITINNLNPRENKDVLNFTCEPKSENYTYIWWLNGQSLPVSPRVKRPIENRILILPSVTRNETGPYQCEIRDRYGGIRSDPVTLNVLYGPDLPRIYPSFTYYRSGEVLYLSCSADSNPPAQYSWTINEKFQLPGQKLFIRHITTKHSGLYVCSVRNSATGKESSKSMTVEVSAYSSSINYTSGNRN

SEQ ID NO: 10972 - protein, 419 aa, Homo Sapiens
MGTLSAPPCTQRIKWKGLLLTASLLNFWNLPTTAQVTIEAEPTKVSEGKDVLLLVHNLPQNLTGYIWYKGQMRDLYHYITSYVVDGEIIIYGPAYSGRETAYSNASLLIQNVTREDAGSYTLHIIKGDDGTRGVTGRFTFTLHLETPKPSISSSNLNPRETMEAVSLTCDPETPDASYLWWMNGQSLPMTHSLKLSETNRTLFLLGVTKYTAGPYECEIRNPVSASRSDPVTLNLLPKLPKPYITINNLNPRENKDVLNFTCEPKSENYTYIWWLNGQSLPVSPRVKRPIENRILILPSVTRNETGPYQCEIRDRYGGIRSDPVTLNVLYGPDLPRIYPSFTYYRSGEVLYLSCSADSNPPAQYSWTINEKFQLPGQKLFIRHITTKHSGLYVCSVRNSATGKESSKSMTVEVSDWTVP

SEQ ID NO: 10973 - protein, 417 aa, Homo Sapiens
MGTLSAPPCTQRIKWKGLLLTASLLNFWNLPTTAQVTIEAEPTKVSEGKDVLLLVHNLPQNLTGYIWYKGQMRDLYHYITSYVVDGEIIIYGPAYSGRETAYSNASLLIQNVTREDAGSYTLHIIKGDDGTRGVTGRFTFTLHLETPKPSISSSNLNPRETMEAVSLTCDPETPDASYLWWMNGQSLPMTHSLKLSETNRTLFLLGVTKYTAGPYECEIRNPVSASRSDPVTLNLLPKLPKPYITINNLNPRENKDVLNFTCEPKSENYTYIWWLNGQSLPVSPRVKRPIENRILILPSVTRNETGPYQCEIRDRYGGIRSDPVTLNVLYGPDLPRIYPSFTYYRSGEVLYLSCSADSNPPAQYSWTINEKFQLPGQKLFIRHITTKHSGLYVCSVRNSATGKESSKSMTVEVSEAL

SEQ ID NO: 10974 - protein, 326 aa, Homo Sapiens
MGTLSAPPCTQRIKWKGLLLTASLLNFWNLPTTAQVTIEAEPTKVSEGKDVLLLVHNLPQNLTGYIWYKGQMRDLYHYITSYVVDGEIIIYGPAYSGRETAYSNASLLIQNVTREDAGSYTLHIIKGDDGTRGVTGRFTFTLHPKLPKPYITINNLNPRENKDVLNFTCEPKSENYTYIWWLNGQSLPVSPRVKRPIENRILILPSVTRNETGPYQCEIRDRYGGIRSDPVTLNVLYGPDLPRIYPSFTYYRSGEVLYLSCSADSNPPAQYSWTINEKFQLPGQKLFIRHITTKHSGLYVCSVRNSATGKESSKSMTVEVSDWTVP

SEQ ID NO: 10975 - protein, 324 aa, Homo Sapiens
MGTLSAPPCTQRIKWKGLLLTASLLNFWNLPTTAQVTIEAEPTKVSEGKDVLLLVHNLPQNLTGYIWYKGQMRDLYHYITSYVVDGEIIIYGPAYSGRETAYSNASLLIQNVTREDAGSYTLHIIKGDDGTRGVTGRFTFTLHPKLPKPYITINNLNPRENKDVLNFTCEPKSENYTYIWWLNGQSLPVSPRVKRPIENRILILPSVTRNETGPYQCEIRDRYGGIRSDPVTLNVLYGPDLPRIYPSFTYYRSGEVLYLSCSADSNPPAQYSWTINEKFQLPGQKLFIRHITTKHSGLYVCSVRNSATGKESSKSMTVEVSEAL

SEQ ID NO: 10976 - protein, 154 aa, Homo Sapiens
MRDLYHYITSYVVDGEIIIYGPAYSGRETAYSNASLLIQNVTREDAGSYTLHIIKGDDGTRGVTGRFTFTLHLETPKPSISSSNLNPRETMEAVSLTCDPETPDASYLWWMNGQSLPMTHSLKLSETNRTLFLLGVTKYTAGPYECEIRNPVSA

SEQ ID NO: 10977 - protein, 242 aa, Homo Sapiens
  misc_feature (1)..(1): Xaa can be any naturally occurring amino acid
XSYVVDGEIIIYGPAYSGRETAYSNASLLIQNVTREDAGSYTLHIIKGDDGTRGVTGRFTFTLHLETPKPSISSSNLNPRETMEAVSLTCDPETPDASYLWWMNGQSLPMTHSLKLSETNRTLFLLGVTKYTAGPYECEIRNPVSASRSDPVTLNLLHGPDLPRIYPSFTYYRSGEVLYLSCSADSNPPAQYSWTINEKFQLPGQKLFIRHITTKHSGLYVCSVRNSATGKESSKSMTVEVS

SEQ ID NO: 10978 - protein, 335 aa, Homo Sapiens
MGPLSAPPCTEHIKWKGLLLTALLLNFWNLPTTAQVMIEAQPPKVSEGKDVLLLVHNLPQNLTGYIWYKGQIRDLYHYITSYVVDGQIIIYGPAYSGRETVYSNASLLIQNVTREDAGSYTLHIIKRGDGTRGVTGYFTFTLYLETPKPSISSSNLNPREAMETVILTCNPETPDASYLWWMNGQSLPMTHRMQLSETNRTLFLFGVTKYTAGPYECEIWNSGSASRSDPVTLNLLHGPDLPRIFPSVTSYYSGENLDLSCFANSNPPAQYSWTINGKFQLSGQKLFIPQITPKHNGLYACSARNSATGEESSTSLTIRVIAPPGLGTFAFNNPT

SEQ ID NO: 10979 - protein, 320 aa, Homo Sapiens
MGPLSAPPCTEHIKWKGLLLTALLLNFWNLPTTAQVMIEAQPPKVSEGKDVLLLVHNLPQNLTGYIWYKGQIRDLYHYITSYVVDGQIIIYGPAYSGRETVYSNASLLIQNVTREDAGSYTLHIIKRGDGTRGVTGYFTFTLYPKLPMPYITINNLNPRENKDVLTFTCEPKSENYAYIWWLNCQSLPVSPRVKRPIENRILILPSVTRNETGPYQCEIRDRYGGIRSDSVTLNVLYGPDLPRIFPSVTSYYSGENLDLSCFANSNPPAQYSWTINGKFQLSGQKLFIPQITPKHNGLYACSARNSATGEESSTSLTIRV

SEQ ID NO: 10980 - protein, 213 aa, Homo Sapiens
MGPLSAPPCTEHIKWKGLLLTVETPKPSISSSNLNPREAMETVILTCNPETPDASYLWWMNGQSLPMTHRMQLSETNRTLFLFGVTKYTAGPYECEIWNSGSASRSDPVTLNLLHGPDLPRIFPSVTSYYSGENLDLSCFANSNPPAQYSWTINGKFQLSGQKLFIPQITPKHNGLYACSARNSATGEESSTSLTIRVIAPPGLGTFAFNNPT

SEQ ID NO: 10981 - protein, 213 aa, Homo Sapiens; identical to SEQ ID NO: 10980

SEQ ID NO: 10982 - protein, 126 aa, Homo Sapiens
MIEAQPPKVSEGKDVLLLVHNLPQNLTGYIWYKGQIRDLYHYITSYVVDGQIIIYGPAYSGRETVYSNASLLIQNVTREDAGSYTLHIIKRGDGTRGVTGYFTFTLYRHSLDSALSLEVTGSSQSL

SEQ ID NO: 10983 - protein, 335 aa, Homo Sapiens
MGPLSAPPCTEHIKWKGLLVTASLLNFWNLPTTAQVTIEAQPPKVSEGKDVLLLVHNLPQNLTGYIWYKGQIRDLYHYITSYVVDGQIIIYGPAYSGRETAYSNASLLIQNVTREDAGSYTLHIIKRGDGTRGVTGYFTFTLYLETPKPSISSSNLNPREAMETVILTCDPETPDTSYQWWMNGQSLPMTHRFQLSETNRTLFLFGVTKYTAGPYECEIRNSGSASRSDPVTLNLLHGPDLPRIHPSYTNYRSGDNLYLSCFANSNPPAQYSWTINGKFQQSGQNLFIPQITTKHSGLYVCSVRNSATGEESSTSLTVKVSASTRIGLLPLLNPT

SEQ ID NO: 10984 - protein, 117 aa, Homo Sapiens
  misc_feature (1)..(1): Xaa can be any naturally occurring amino acid
XRNSGSASRSDPVTLNLLHGPDLPRIHPSYTNYRSGDNLYLSCFANSNPPAQYSWTINGKFQQSGQNLFIPQITTKHSGLYVCSVRNSATGEESSTSLTVKVSASTRIGLLPLLNPT

SEQ ID NO: 10985 - protein, 428 aa, Homo Sapiens
MGPLSAPPCTQRITWKGLLLTALLLNFWNLPTTAQVTIEAEPTKVSKGKDVLLLVHNLPQNLAGYIWYKGQMKDLYHYITSYVVDGQIIIYGPAYSGRETVYSNASLLIQNVTREDAGSYTLHIVKRGDGTRGETGHFTFTLYLETPKPSISSSNLYPREDMEAVSLTCDPETPDASYLWWMNGQSLPMTHSLQLSKNKRTLFLFGVTKYTAGPYECEIRNPVSASRSDPVTLNLLPKLPKPYITINNLNPRENKDVLAFTCEPKSENYTYIWWLNGQSLPVSPRVKRPIENRILILPSVTRNETGPYQCEIQDRYGGIRSYPVTLNVLYGPDLPRIYPSFTYYHSGENLYLSCFADSNPPAEYSWTINGKFQLSGQKLFIPQITTKHSGLYACSVRNSATGMESSKSMTVKVSAPSGTGHLPGLNPL

SEQ ID NO: 10986 - protein, 475 aa, Homo Sapiens
MGPLSAPPCTQRITWKGLLLTALLLNFWNLPTTAQVTIEAEPTKVSKGKDVLLLVHNLPQNLAGYIWYKGQMKDLYHYITSYVVDGQIIIYGPAYSGRETVYSNASLLIQNVTREDAGSYTLHIVKRGDGTRGETGHFTFTLYLETPKPSISSSNLYPREDMEAVSLTCDPETPDASYLWWMNGQSLPMTHSLQLSKNKRTLFLFGVTKYTAGPYECEIRNPVSASRSDPVTLNLLPKLPKPYITINNLNPRENKDVLAFTCEPKSENYTYIWWLNGQSLPVSPRVKRPIENRILILPSVTRNETGPYQCEIQDRYGGIRSYPVTLNVLYGPDLPRIYPSFTYYHSGENLYLSCFADSNPPAEYSWTINGKFQLSGQKLFIPQITTKHSGLYACSVRNSATGMESSKSMTVKVSDSCFHSSSKYLPSATVQNCFLFKEIYEKTLTRTLEYKFLITSRSYHWTKNFQNFNEQADTS

SEQ ID NO: 10987 - protein, 428 aa, Homo Sapiens; identical to SEQ ID NO: 10985

SEQ ID NO: 10988 - protein, 91 aa, Homo Sapiens
MKDLYHYITSYVVDGQIIIYGPAYSGRETVYSNASLLIQNVTREDAGSYTLHIVKRGDGTRGETGHFTFTLYRHSLDSALSLEVTGSSQPL

SEQ ID NO: 10989 - protein, 326 aa, Homo Sapiens
MGPLSAPPCTQRITWKGVLLTASLLNFWNPPTTAQVTIEAQPPKVSEGKDVLLLVHNLPQNLAGYIWYKGQMTYLYHYITSYVVDGQRIIYGPAYSGRERVYSNASLLIQNVTQEDAGSYTLHIIKRRDGTGGVTGHFTFTLHLETPKPSISSSNLNPREAMEAVILTCDPATPAASYQWWMNGQSLPMTHRLQLSKTNRTLFIFGVTKYIAGPYECEIRNPVSASRSDPVTLNLLHGPDLPSIYPSFTYYRSGENLYLSCFAESNPRAQYSWTINGKFQLSGQKLSIPQITTKHSGLYACSVRNSATGKESSKSITVKVSDWILP

SEQ ID NO: 10990 - protein, 419 aa, Homo Sapiens
MGPLSAPPCTQRITWKGVLLTASLLNFWNPPTTAQVTIEAQPPKVSEGKDVLLLVHNLPQNLAGYIWYKGQMTYLYHYITSYVVDGQRIIYGPAYSGRERVYSNASLLIQNVTQEDAGSYTLHIIKRRDGTGGVTGHFTFTLHLETPKPSISSSNLNPREAMEAVILTCDPATPAASYQWWMNGQSLPMTHRLQLSKTNRTLFIFGVTKYIAGPYECEIRNPVSASRSDPVTLNLLPKLSKPYITINNLNPRENKDVLTFTCEPKSKNYTYIWWLNGQSLPVSPRVKRPIENRILILPNVTRNETGPYQCEIRDRYGGIRSDPVTLNVLYGPDLPSIYPSFTYYRSGENLYLSCFAESNPRAQYSWTINGKFQLSGQKLSIPQITTKHSGLYACSVRNSATGKESSKSITVKVSDWILP

SEQ ID NO: 10991 - protein, 326 aa, Homo Sapiens
MGPLSAPPCTQRITWKGVLLTASLLNFWNPPTTAQVTIEAQPPKVSEGKDVLLLVHNLPQNLAGYIWYKGQMTYLYHYITSYVVDGQRIIYGPAYSGRERVYSNASLLIQNVTQEDAGSYTLHIIKRRDGTGGVTGHFTFTLHPKLSKPYITINNLNPRENKDVLTFTCEPKSKNYTYIWWLNGQSLPVSPRVKRPIENRILILPNVTRNETGPYQCEIRDRYGGIRSDPVTLNVLYGPDLPSIYPSFTYYRSGENLYLSCFAESNPRAQYSWTINGKFQLSGQKLSIPQITTKHSGLYACSVRNSATGKESSKSITVKVSDWILP

SEQ ID NO: 10992 - protein, 52 aa, Homo Sapiens
MGPLSAPPCTQRITWKGVLLTGCSCPKPTGPSLYLVSQSILQDPMNVKYGTQ

SEQ ID NO: 10993 - protein, 40 aa, Homo Sapiens
MGPLSAPPCTQRITWKGVLLTGHSLDSALSLEVTGSSQSP

SEQ ID NO: 10994 - protein, 180 aa, Homo Sapiens
MGPLSAPPCTQRITWKGVLLTVETPKPSISSSNLNPREAMEAVILTCDPATPAASYQWWMNGQSLPMTHRLQLSKTNRTLFIFGVTKYIAGPYECEIRNPVSASRSDPVTLNLLHGPDLPSIYPSFTYYRSGENLYLSCFAESNPRAQYSWTINGKFQLSGQKLSIPQITTKHSGLYACS

SEQ ID NO: 10995 - protein, 292 aa, Homo Sapiens
MGPLSAPPCTQRITWKGVLLTVETPKPSISSSNLNPREAMEAVILTCDPATPAASYQWWMNGQSLPMTHRLQLSKTNRTLFIFGVTKYIAGPYECEIRNPVSASRSDPVTLNLLPKLSKPYITINNLNPRENKDVLTFTCEPKSKNYTYIWWLNGQSLPVSPRVKRPIENRILILPNVTRNETGPYQCEIRDRYGGIRSDPVTLNVLYGPDLPSIYPSFTYYRSGENLYLSCFAESNPRAQYSWTINGKFQLSGQKLSIPQITTKHSGLYACSVRNSATGKESSKSITVKVS

SEQ ID NO: 10996 - protein, 252 aa, Homo Sapiens
MKHCPQQETSTIGGKKKHPEGGDPENSHIYRSLPPVPASLLNFWNPPTTAQVTIEAQPPKVSEGKDVLLLVHNLPQNLAGYIWYKGQMTYLYHYITSYVVDGQRIIYGPAYSGRERVYSNASLLIQNVTQEDAGSYTLHIIKRRDGTGGVTGHFTFTLHLETPKPSISSSNLNPREAMEAVILTCDPATPAASYQWWMNGQSLPMTHRLQLSKTNRTLFIFGVTKYIAGPYECEIRNPVSASRSDPVTLNLL

SEQ ID NO: 10997 - protein, 78 aa, Homo Sapiens
MTYLYHYITSYVVDGQRIIYGPAYSGRERVYSNASLLIQNVTQEDAGSYTLHIIKRRDGTGGVTGHFTFTLHLETPKP

SEQ ID NO: 10998 - protein, 96 aa, Homo Sapiens
  misc_feature (1)..(1): Xaa can be any naturally occurring amino acid
XETPKPSISSSNLNPREAMEAVILTCDPATPAASYQWWMNGQSLPMTHRLQLSKTNRTLFIFGVTKYIAGPYECEIRNPVSASRSDPVTLNLLRSY

SEQ ID NO: 10999 - protein, 244 aa, Homo Sapiens
  misc_feature (1)..(1): Xaa can be any naturally occurring amino acid
XSLLNFWNPPTTAQVTIEAQPPKVSEGKDVLLLVHNLPQNLAGYIWYKGQMTYLYHYITSYVVDGQRIIYGPAYSGRERVYSNASLLIQNVTQEDAGSYTLHIIKRRDGTGGVTGHFTFTLHPKLSKPYITINNLNPRENKDVLTFTCEPKSKNYTYIWWLNGQSLPVSPRVKRPIENRILILPNVTRNETGPYQCEIRDRYGGIRSDPVTLNVLYGPDLPSIYPSFTYYRSGENLYLSCFAES

SEQ ID NO: 11000 - protein, 258 aa, Homo Sapiens
  misc_feature (1)..(1): Xaa can be any naturally occurring amino acid
XYIAGPYECEIRNPVSASRSDPVTLNLLPKLSKPYITINNLNPRENKDVLTFTCEPKSKNYTYIWWLNGQSLPVSPRVKRPIENRILILPNVTRNETGPYQCEIRDRYGGIRSDPVTLNVLYGPDLPSIYPSFTYYRSGENLYLSCFAESNPRAQYSWTINGKFQLSGQKLSIPQITTKHSGLYACSVRNSATGKESSKSITVKVSGHISNHWLYYQGFDWDVIFKNIDRMNQYELQAKSEVSLGLASYSQGFCKSLI

SEQ ID NO: 11001 - protein, 428 aa, Homo Sapiens
MGPLSAPPCTQHITWKGLLLTASLLNFWNLPITAQVTIEALPPKVSEGKDVLLLVHNLPQNLAGYIWYKGQLMDLYHYITSYVVDGQINIYGPAYTGRETVYSNASLLIQNVTREDAGSYTLHIIKRGDRTRGVTGYFTFNLYLETPKPSISSSNLNPREAMEAVILTCDPAASDTSYLWWMNGQSLPMTHRLQLSKTNRTLFIFGVTKYIAGPYECEIRNPVSASHSDPVTLNLLLKLPKPYITINNSKPRENKDVLAFTCEPKSENYTYIWWLNGQSLPVSPRVKRPIENRILILPSVTRNETGPYECEIRDRDGGMRSDPVTLNVLYGPDLPSIYPSFTYYRSGENLYLSCFAESNPPAEYFWTINGKFQQSGQKLSIPQITTKHRGLYTCSVRNSATGKESSKSMTVEVSAPSGIGRLPLLNPI

SEQ ID NO: 11002 - protein, 335 aa, Homo Sapiens
MGPLSAPPCTQHITWKGLLLTASLLNFWNLPITAQVTIEALPPKVSEGKDVLLLVHNLPQNLAGYIWYKGQLMDLYHYITSYVVDGQINIYGPAYTGRETVYSNASLLIQNVTREDAGSYTLHIIKRGDRTRGVTGYFTFNLYLKLPKPYITINNSKPRENKDVLAFTCEPKSENYTYIWWLNGQSLPVSPRVKRPIENRILILPSVTRNETGPYECEIRDRDGGMRSDPVTLNVLYGPDLPSIYPSFTYYRSGENLYLSCFAESNPPAEYFWTINGKFQQSGQKLSIPQITTKHRGLYTCSVRNSATGKESSKSMTVEVSAPSGIGRLPLLNPI

SEQ ID NO: 11003 - protein, 335 aa, Homo Sapiens; identical to SEQ ID NO: 11002

SEQ ID NO: 11004 - protein, 333 aa, Homo Sapiens
MGPLSAPPCTQHITWKGLLLTASLLNFWNLPITAQVTIEALPPKVSEGKDVLLLVHNLPQNLAGYIWYKGQLMDLYHYITSYVVDGQINIYGPAYTGRETVYSNASLLIQNVTREDAGSYTLHIIKRGDRTRGVTGYFTFNLYLKLPKPYITINNSKPRENKDVLAFTCEPKSENYTYIWWLNGQSLPVSPRVKRPIENRILILPSVTRNETGPYECEIRDRDGGMRSDPVTLNVLYGPDLPSIYPSFTYYRSGENLYLSCFAESNPPAEYFWTINGKFQQSGQKLSIPQITTKHRGLYTCSVRNSATGKESSKSMTVEVSGKWIPASLAIGF

SEQ ID NO: 11005 - protein, 335 aa, Homo Sapiens; identical to SEQ ID NO: 11002

SEQ ID NO: 11006 - protein, 157 aa, Homo Sapiens
MGPLSAPPCTQHITWKGLLLTASLLNFWNLPITAQVTIEALPPKVSEGKDVLLLVHNLPQNLAGYIWYKGQLMDLYHYITSYVVDGQINIYGPAYTGRETVYSNASLLIQNVTREDAGSYTLHIIKRGDRTRGVTGYFTFNLYPPSGIGRLPLLNPI

SEQ ID NO: 11007 - protein, 158 aa, Homo Sapiens [sequence omitted]

SEQ ID NO: 11008 - protein, 331 aa, Homo Sapiens
MGPLSAPPCTQHITWKGLLLTASLLNFWNLPTTAQVIIEAKPPKVSEGKDVLLLVHNLPQNLTGYIWYKGQMTDLYHYITSYVVHGQIIYGPAYSGRETVYSNASLLIQNVTQEDAGSYTLHIIKRGDGTGGVTGYFTVTLYSETPKPSISSSNLNPREVMEAVRLICDPETPDASYLWLLNGQNLPMTHRLQLSKTNRTLYLFGVTKYIAGPYECEIRNPVSASRSDPVTLNLLHGPDLPRIYPSFTYYRSGENLDLSCFADSNPPAEYSWTINGKFQLSGQKLFIPQITTNHSGLYACSVRNSATGKEISKSMIVKVSGPCHGNQTESH

SEQ ID NO: 11009 - protein, 424 aa, Homo Sapiens
MGPLSAPPCTQHITWKGLLLTASLLNFWNLPTTAQVIIEAKPPKVSEGKDVLLLVHNLPQNLTGYIWYKGQMTDLYHYITSYVVHGQIIYGPAYSGRETVYSNASLLIQNVTQEDAGSYTLHIIKRGDGTGGVTGYFTVTLYSETPKPSISSSNLNPREVMEAVRLICDPETPDASYLWLLNGQNLPMTHRLQLSKTNRTLYLFGVTKYIAGPYECEIRNPVSASRSDPVTLNLLPKLPMPYITINNLNPREKKDVLAFTCEPKSRNYTYIWWLNGQSLPVSPRVKRPIENRILILPSVTRNETGPYQCEIRDRYGGIRSNPVTLNVLYGPDLPRIYPSFTYYRSGENLDLSCFADSNPPAEYSWTINGKFQLSGQKLFIPQITTNHSGLYACSVRNSATGKEISKSMIVKVSGPCHGNQTESH

SEQ ID NO: 11010 - protein, 435 aa, Homo Sapiens
MGPLSAPPCTQHITWKGLLLTASLLNFWNLPTTAQVIIEAKPPKVSEGKDVLLLVHNLPQNLTGYIWYKGQMTDLYHYITSYVVHGQIIYGPAYSGRETVYSNASLLIQNVTQEDAGSYTLHIIKRGDGTGGVTGYFTVTLYSETPKPSISSSNLNPREVMEAVRLICDPETPDASYLWLLNGQNLPMTHRLQLSKTNRTLYLFGVTKYIAGPYECEIRNPVSASRSDPVTLNLLPKLPMPYITINNLNPREKKDVLAFTCEPKSRNYTYIWWLNGQSLPVSPRVKRPIENRILILPSVTRNETGPYQCEIRDRYGGIRSNPVTLNVLYGPDLPRIYPSFTYYRSGENLDLSCFADSNPPAEYSWTINGKFQLSGQKLFIPQITTNHSGLYACSVRNSATGKEISKSMIVKVSETASPQVTYAGPNTWFQEILLL

SEQ ID NO: 11011 - protein, 73 aa, Homo Sapiens
MTDLYHYITSYVVHGQIIYGPAYSGRETVYSNASLLIQNVTQEDAGSYTLHIIKRGDGTGGVTGYFTVTLYCE

SEQ ID NO: 11012 - protein, 81 aa, Homo Sapiens
  misc_feature (1)..(1): Xaa can be any naturally occurring amino acid
XEAVRLICDPETPDASYLWLLNGQNLPMTHRLQLSKTNRTLYLFGVTKYIAGPYECEIRNPVSASRSDPVTLNLLRGRCQL

SEQ ID NO: 11013 - protein, 419 aa, Homo Sapiens
MGPLSAPPCTQHITWKGLLLTASLLNFWNPPTTAQVTIEAQPPKVSEGKDVLLLVHNLPQNLTGYIWYKGQIRDLYHYVTSYIVDGQIIKYGPAYSGRETVYSNASLLIQNVTQEDTGSYTLHIIKRGDGTGGVTGRFTFTLYLETPKPSISSSNFNPREATEAVILTCDPETPDASYLWWMNGQSLPMTHSLQLSETNRTLYLFGVTNYTAGPYECEIRNPVSASRSDPVTLNLLPKLPKPYITINNLNPRENKDVSTFTCEPKSENYTYIWWLNGQSLPVSPRVKRRIENRILILPSVTRNETGPYQCEIRDRYGGIRSDPVTLNVLYGPDLPRIYPSFTYYHSGQNLYLSCFADSNPPAQYSWTINGKFQLSGQKLSIPQITTKHSGLYACSVRNSATGKESSKSVTVRVSDWTLP

SEQ ID NO: 11014 - protein, 426 aa, Homo Sapiens
MGPLSAPPCTQHITWKGLLLTASLLNFWNPPTTAQVTIEAQPPKVSEGKDVLLLVHNLPQNLTGYIWYKGQIRDLYHYVTSYIVDGQIIKYGPAYSGRETVYSNASLLIQNVTQEDTGSYTLHIIKRGDGTGGVTGRFTFTLYLETPKPSISSSNFNPREATEAVILTCDPETPDASYLWWMNGQSLPMTHSLQLSETNRTLYLFGVTNYTAGPYECEIRNPVSASRSDPVTLNLLPKLPKPYITINNLNPRENKDVSTFTCEPKSENYTYIWWLNGQSLPVSPRVKRRIENRILILPSVTRNETGPYQCEIRDRYGGIRSDPVTLNVLYGPDLPRIYPSFTYYHSGQNLYLSCFADSNPPAQYSWTINGKFQLSGQKLSIPQITTKHSGLYACSVRNSATGKESSKSVTVRVSGKWIPASLAIGF

SEQ ID NO: 11015 - protein, 297 aa, Homo Sapiens
MGPLSAPPCTQHITWKGLLLTVETPKPSISSSNFNPREATEAVILTCDPETPDASYLWWMNGQSLPMTHSLQLSETNRTLYLFGVTNYTAGPYECEIRNPVSASRSDPVTLNLLPKLPKPYITINNLNPRENKDVSTFTCEPKSENYTYIWWLNGQSLPVSPRVKRRIENRILILPSVTRNETGPYQCEIRDRYGGIRSDPVTLNVLYGPDLPRIYPSFTYYHSGQNLYLSCFADSNPPAQYSWTINGKFQLSGQKLSIPQITTKHSGLYACSVRNSATGKESSKSVTVRVSDWTLP

SEQ ID NO: 11016 - protein, 426 aa, Homo Sapiens
MGLLSAPPCTQRITWKGLLLTASLLNFWNPPTTAQVTIEAQPTKVSEGKDVLLLVHNLPQNLTGYIWYKGQIRDLYHYITSYVVDGQIIIYGPAYSGRETIYSNASLLIQNVTQEDAGSYTLHIIMGGDENRGVTGHFTFTLYLETPKPSISSSKLNPREAMEAVSLTCDPETPDASYLWWMNGQSLPMSHRLQLSETNRTLFLLGVTKYTAGPYECEIRNPVSASRSDPFTLNLLPKLPKPYITINNLKPRENKDVLNFTCEPKSENYTYIWWLNGQSLPVSPRVKRPIENRILILPSVTRNETGPYQCEIRDQYGGIRSYPVTLNVLYGPDLPRIYPSFTYYRSGEVLYLSCSADSNPPAQYSWTINGKFQLSGQKLFIPQITTKHSGLYACSVRNSATGKESSKSMTVKVSGKRIPVSLAIGI

SEQ ID NO: 11017 - protein, 419 aa, Homo Sapiens
MGLLSAPPCTQRITWKGLLLTASLLNFWNPPTTAQVTIEAQPTKVSEGKDVLLLVHNLPQNLTGYIWYKGQIRDLYHYITSYVVDGQIIIYGPAYSGRETIYSNASLLIQNVTQEDAGSYTLHIIMGGDENRGVTGHFTFTLYLETPKPSISSSKLNPREAMEAVSLTCDPETPDASYLWWMNGQSLPMSHRLQLSETNRTLFLLGVTKYTAGPYECEIRNPVSASRSDPFTLNLLPKLPKPYITINNLKPRENKDVLNFTCEPKSENYTYIWWLNGQSLPVSPRVKRPIENRILILPSVTRNETGPYQCEIRDQYGGIRSYPVTLNVLYGPDLPRIYPSFTYYRSGEVLYLSCSADSNPPAQYSWTINGKFQLSGQKLFIPQITTKHSGLYACSVRNSATGKESSKSMTVKVSDWTLP

SEQ ID NO: 11018 - protein, 40 aa, Homo Sapiens
MGLLSAPPCTQRITWKGLLLTGHSLDSALSLEVTGSSQPL

SEQ ID NO: 11019 - protein, 297 aa, Homo Sapiens
MGLLSAPPCTQRITWKGLLLTVETPKPSISSSKLNPREAMEAVSLTCDPETPDASYLWWMNGQSLPMSHRLQLSETNRTLFLLGVTKYTAGPYECEIRNPVSASRSDPFTLNLLPKLPKPYITINNLKPRENKDVLNFTCEPKSENYTYIWWLNGQSLPVSPRVKRPIENRILILPSVTRNETGPYQCEIRDQYGGIRSYPVTLNVLYGPDLPRIYPSFTYYRSGEVLYLSCSADSNPPAQYSWTINGKFQLSGQKLFIPQITTKHSGLYACSVRNSATGKESSKSMTVKVSDWTLP

SEQ ID NO: 11020 - protein, 326 aa, Homo Sapiens
MGPLSAPPCTQHIKWKGVLLTASLLNFWNPPTTAQVTIEAQPTKVSEGKDVLLLVHNLPQNLTGYIWYKGQIRDLYHYITSYVVDGQIIIYGPAYSGRETIYSNASLLIQNVTQEDAGSYTLHIIMGGDENRGVTGHFTFTLYPKLPKPYITINNLKPRENKDVLNFTCEPKSENYTYIWWLNGQSLPVSPRVKRPIENRILILPSVTRNETGPYQCEIRDQYGGIRSYPVTLNVLYGPDLPRIYPSFTYYRSGEVLYLSCSADSNPPAQYSWTINGKFQLSGQKLFIPQITTKHSGLYACSVRNSATGKESSKSMTVKVSDWTLP

SEQ ID NO: 11021 - protein, 402 aa, Homo Sapiens
MGPLPAPSCTQRITWKGLLLTASLLNFWNPPTTAEVTIEAQPPKVSEGKDVLLLVHNLPQNLPGYFWYKGEMTDLYHYIISYIVDGKIIIYGPAYSGRETVYSNASLLIQNVTRKDAGTYTLHIIKRGDETREEIRHFTFTLYLETPKPYISSSNLNPREAMEAVRLICDPETLDASYLWWMNGQSLPVTHRLQLSKTNRTLYLFGVTKYIAGPYECEIRNPVSASRSDPVTLNLLHGPDLPRIYPSFTYYRSGENLDLSCFTESNPPAEYFWTINGKFQQSGQKLFIPQITRNHSGLYACSVHNSATGKEISKSMTVKVSGKWIPASLAVGFYVESIWLSEKSQENIFIPSLCPMGTSKSQILLLNPPNLSLQTLFSLFFCFLMADLVSGLKKVGRGLYQP

SEQ ID NO: 11022 - protein, 333 aa, Homo Sapiens
MGPLPAPSCTQRITWKGLLLTASLLNFWNPPTTAEVTIEAQPPKVSEGKDVLLLVHNLPQNLPGYFWYKGEMTDLYHYIISYIVDGKIIIYGPAYSGRETVYSNASLLIQNVTRKDAGTYTLHIIKRGDETREEIRHFTFTLYLETPKPYISSSNLNPREAMEAVRLICDPETLDASYLWWMNGQSLPVTHRLQLSKTNRTLYLFGVTKYIAGPYECEIRNPVSASRSDPVTLNLLHGPDLPRIYPSFTYYRSGENLDLSCFTESNPPAEYFWTINGKFQQSGQKLFIPQITRNHSGLYACSVHNSATGKEISKSMTVKVSGPCHGDLTESQS

SEQ ID NO: 11023 - protein, 426 aa, Homo Sapiens
MGPLPAPSCTQRITWKGLLLTASLLNFWNPPTTAEVTIEAQPPKVSEGKDVLLLVHNLPQNLPGYFWYKGEMTDLYHYIISYIVDGKIIIYGPAYSGRETVYSNASLLIQNVTRKDAGTYTLHIIKRGDETREEIRHFTFTLYLETPKPYISSSNLNPREAMEAVRLICDPETLDASYLWWMNGQSLPVTHRLQLSKTNRTLYLFGVTKYIAGPYECEIRNPVSASRSDPVTLNLLPKLPIPYITINNLNPRENKDVLAFTCEPKSENYTYIWWLNGQSLPVSPGVKRPIENRILILPSVTRNETGPYQCEIRDRYGGLRSNPVILNVLYGPDLPRIYPSFTYYRSGENLDLSCFTESNPPAEYFWTINGKFQQSGQKLFIPQITRNHSGLYACSVHNSATGKEISKSMTVKVSGPCHGDLTESQS

SEQ ID NO: 11024 - protein, 419 aa, Homo Sapiens
MGPLPAPSCTQRITWKGLLLTASLLNFWNPPTTAEVTIEAQPPKVSEGKDVLLLVHNLPQNLPGYFWYKGEMTDLYHYIISYIVDGKIIIYGPAYSGRETVYSNASLLIQNVTRKDAGTYTLHIIKRGDETREEIRHFTFTLYLETPKPYISSSNLNPREAMEAVRLICDPETLDASYLWWMNGQSLPVTHRLQLSKTNRTLYLFGVTKYIAGPYECEIRNPVSASRSDPVTLNLLPKLPIPYITINNLNPRENKDVLAFTCEPKSENYTYIWWLNGQSLPVSPGVKRPIENRILILPSVTRNETGPYQCEIRDRYGGLRSNPVILNVLYGPDLPRIYPSFTYYRSGENLDLSCFTESNPPAEYFWTINGKFQQSGQKLFIPQITRNHSGLYACSVHNSATGKEISKSMTVKVSDWILP

SEQ ID NO: 11025 - protein, 326 aa, Homo Sapiens
MGPLPAPSCTQRITWKGLLLTASLLNFWNPPTTAEVTIEAQPPKVSEGKDVLLLVHNLPQNLPGYFWYKGEMTDLYHYIISYIVDGKIIIYGPAYSGRETVYSNASLLIQNVTRKDAGTYTLHIIKRGDETREEIRHFTFTLYSKLPIPYITINNLNPRENKDVLAFTCEPKSENYTYIWWLNGQSLPVSPGVKRPIENRILILPSVTRNETGPYQCEIRDRYGGLRSNPVILNVLYGPDLPRIYPSFTYYRSGENLDLSCFTESNPPAEYFWTINGKFQQSGQKLFIPQITRNHSGLYACSVHNSATGKEISKSMTVKVSDWILP

SEQ ID NO: 11026 - protein, 333 aa, Homo Sapiens
MGPLPAPSCTQRITWKGLLLTASLLNFWNPPTTAEVTIEAQPPKVSEGKDVLLLVHNLPQNLPGYFWYKGEMTDLYHYIISYIVDGKIIIYGPAYSGRETVYSNASLLIQNVTRKDAGTYTLHIIKRGDETREEIRHFTFTLYSKLPIPYITINNLNPRENKDVLAFTCEPKSENYTYIWWLNGQSLPVSPGVKRPIENRILILPSVTRNETGPYQCEIRDRYGGLRSNPVILNVLYGPDLPRIYPSFTYYRSGENLDLSCFTESNPPAEYFWTINGKFQQSGQKLFIPQITRNHSGLYACSVHNSATGKEISKSMTVKVSGPCHGDLTESQS

SEQ ID NO: 11027 - protein, 309 aa, Homo Sapiens
MGPLPAPSCTQRITWKGLLLTASLLNFWNPPTTAEVTIEAQPPKVSEGKDVLLLVHNLPQNLPGYFWYKGEMTDLYHYIISYIVDGKIIIYGPAYSGRETVYSNASLLIQNVTRKDAGTYTLHIIKRGDETREEIRHFTFTLYYGPDLPRIYPSFTYYRSGENLDLSCFTESNPPAEYFWTINGKFQQSGQKLFIPQITRNHSGLYACSVHNSATGKEISKSMTVKVSGKWIPASLAVGFYVESIWLSEKSQENIFIPSLCPMGTSKSQILLLNPPNLSLQTLFSLFFCFLMADLVSGLKKVGRGLYQP

SEQ ID NO: 11028 - protein, 240 aa, Homo Sapiens
MGPLPAPSCTQRITWKGLLLTASLLNFWNPPTTAEVTIEAQPPKVSEGKDVLLLVHNLPQNLPGYFWYKGEMTDLYHYIISYIVDGKIIIYGPAYSGRETVYSNASLLIQNVTRKDAGTYTLHIIKRGDETREEIRHFTFTLYYGPDLPRIYPSFTYYRSGENLDLSCFTESNPPAEYFWTINGKFQQSGQKLFIPQITRNHSGLYACSVHNSATGKEISKSMTVKVSGPCHGDLTESQS

SEQ ID NO: 11029 - protein, 953 aa, Homo Sapiens [sequence omitted]

SEQ ID NO: 11030 - protein, 953 aa, Homo Sapiens
MITSAAGIISLLDEDEPQLKEFALHKLNAVVNDFWAEISESVDKIEVLYEDEGFRSRQFAALVASKVFYHLGAFEESLNYALGAGDLFNVNDNSEYVETIIAKCIDHYTKQCVENADLPEGEKKPIDQRLEGIVNKMFQRCLDDHKYKQAIGIALETRRLDVFEKTILESNDVPGMLAYSLKLCMSLMQNKQFRNKVLRVLVKIYMNLEKPDFINVCQCLIFLDDPQAVSDILEKLVKEDNLLMAYQICFDLYESASQQFLSSVIQNLRTVGTPIASVPGSTNTGTVPGSEKDSDSMETEEKTSSAFVGKTPEASPEPKDQTLKMIKILSGEMAIELHLQFLIRNNNTDLMILKNTKDAVRNSVCHTATVIANSFMHCGTTSDQFLRDNLEWLARATNWAKFTATASLGVIHKGHEKEALQLMATYLPKDTSPGSAYQEGGGLYALGLIHANHGGDIIDYLLNQLKNASNDIVRHGGSLGLGLAAMGTARQDVYDLLKTNLYQDDAVTGEAAGLALGLVMLGSKNAQAIEDMVGYAQETQHEKILRGLAVGIALVMYGRMEEADALIESLCRDKDPILRRSGMYTVAMAYCGSGNNKAIRRLLHVAVSDVNDDVRRAAVESLGFILFRTPEQCPSVVSLLSESYNPHVRYGAAMALGICCAGTGNKEAINLLEPMTNDPVNYVRQGALIASALIMIQQTEITCPKVNQFRQLYSKVINDKHDDVMAKFGAILAQGILDAGGHNVTISLQSRTGHTHMPSVVGVLVFTQFWFWFPLSHFLSLAYTPTCVIGLNKDLKMPKVQYKSNCKPSTFAYPAPLEVPKEKEKEKVSTAVLSITAKAKKKEKEKEKKEEEKMEVDEAEKKEEKEKKKEPEPNFQLLDNPARVMPAQLKVLTMPETCRYQPFKPLSIGGIIILKDTSEDIEELVEPVAAHGPKIEEEEQEPEPPEPFEYIDD

SEQ ID NO: 11031 - protein, 922 aa, Homo Sapiens
MITSAAGIISLLDEDEPQLKEFALHKLNAVVNDFWAEISESVDKIEVLYEDEGFRSRQFAALVASKVFYHLGAFEESLNYALGAGDLFNVNDNSEYVETIIAKCIDHYTKQCVENADLPEGEKKPIDQRLEGIVNKMFQRCLDDHKYKQAIGIALETRRLDVFEKTILESNDVPGMLAYSLKLCMSLMQNKQFRNKVLRVLVKIYMNLEKPDFINVCQCLIFLDDPQAVSDILEKLVKEDNLLMAYQICFDLYESASQQFLSSVIQNLRTVGTPIASVPGSTNTGTVPGSEKDSDSMETEEKTSSAFVGKTPEASPEPKDQTLKMIKILSGEMAIELHLQFLIRNNNTDLMILKNTKDAVRNSVCHTATVIANSFMHCGTTSDQFLRDNLEWLARATNWAKFTATASLGVIHKGHEKEALQLMATYLPKDTSPGSAYQEGGGLYALGLIHANHGGDIIDYLLNQLKNASNDIVRHGGSLGLGLAAMGTARQDVYDLLKTNLYQDDAVTGEAAGLALGLVMLGSKNAQAIEDMVGYAQETQHEKILRGLAVGIALVMYGRMEEADALIESLCRDKDPILRRSGMYTVAMAYCGSGNNKAIRRLLHVAVSDVNDDVRRAAVESLGFILFRTPEQCPSVVSLLSESYNPHVRYGAAMALGICCAGTGNKEAINLLEPMTNDPVNYVRQGALIASALIMIQQTEITCPKVNQFRQLYSKVINDKHDDVMAKFGAILAQGILDAGGHNVTISLQSRTGHTHMPSVVGVLVFTQFWFWFPLSHFLSLAYTPTCVIGLNKDLKVSTAVLSITAKAKKKEKEKEKKEEEKMEVDEAEKKEEKEKKKEPEPNFQLLDNPARVMPAQLKVLTMPETCRYQPFKPLSIGGIIILKDTSEDIEELVEPVAAHGPKIEEEEQEPEPPEPFEYIDD

SEQ ID NO: 11032 - protein, 922 aa, Homo Sapiens; identical to SEQ ID NO: 11031

SEQ ID NO: 11033 - protein, 203 aa, Homo Sapiens
MITSAAGIISLLDEDEPQLKEFALHKLNAVVNDFWAEISESVDKIEVLYEDEGFRSRQFAALVASKVFYHLGAFEESLNYALGAGDLFNVNDNSEYVETIIGNYRLSAKCIDHYTKQCVENADLPEGEKKPIDQRLEGIVNKMFQRCLDDHKYKQAIGIALETRRLDVFEKTILESNDVPGMLAYSLKLCMSLMQNKQFRNKV

SEQ ID NO: 11034 - protein, 48 aa, Homo Sapiens
MITSAAGIISLLDEDEPQLKEFALHKLNAVVNDFWAEISESVDKIKMH

SEQ ID NO: 11035 - protein, 164 aa, Homo Sapiens
  misc_feature (1)..(1): Xaa can be any naturally occurring amino acid
XAKCIDHYTKQCVENADLPEGEKKPIDQRLEGIVNKMFQRCLDDHKYKQAIGIALETRRLDVFEKTILESNDVPGMLAYSLKLCMSLMQNKQFRNKVLRVLVKIYMNLEKPDFINVCQNLRTVGTPIASVPGSTNTGTVPGSEKDSDSMETEEKTSSAFVGKTP

SEQ ID NO: 11036 - protein, 192 aa, Homo Sapiens
  misc_feature (1)..(1): Xaa can be any naturally occurring amino acid
XGEAAGLALGLVMLGSKNAQAIEDMVGYAQETQHEKILRGLAVGIALVMYGRMEEADALIESLCRDKDPILRRSGMYTVAMAYCGSGNNKAIRRLLHVAVSDVNDDVRRAAVESLGFILFRTPEQCPSVVSLLSESYNPHVRYGAAMALGICCAGTGNKVKPTANGVSSFLAPDCFPSPQNLCNSCKNTSAM

SEQ ID NO: 11037 - protein, 136 aa, Homo Sapiens
MILNWKLLGILVLCLHTRGISGSEGHPSHPPAEDREEAGSPTLPQGPPVPGDPWPGAPPLFEDPPPTRPSRPWRDLPETGVWLPEPPRTDPPQPPRPDDPWPAGPQPPENPWPPAPEVDNRPQEEPDLDPPREEYR

SEQ ID NO: 11038 - protein, 164 aa, Homo Sapiens
MAVGKFLLGSLLLLSLQLGQGWGPDARGVPVADGEFSSEQVAKAGGTWLGKDFQGPSVTSQLSPALTLLTVSALPSHRHPPPPCPPAPSPVWSMPAVEPDPVRGRARPGLRLRGEGHLPLLRRQLPPWCPHPAWPGAGPAAGPGPSPRRALLPAHSLHRRGLPR

SEQ ID NO: 11039 - protein, 156 aa, Homo Sapiens
MAVGKFLLGSLLLLSLQLGQGWGPDARGVPVADGEFSSEQVAKAGGTWLGTHRPLARLRRALSGPCQLWSLTLSVAELGLGYASEEKVIFRYCAGSCPRGARTQHGLALARLQGQGRAHGGPCCRPTRYTDVAFLDDRHRWQRLPQLSAAACGCGG

SEQ ID NO: 11040 - protein, 48 aa, Homo Sapiens
MATHHTLWMGLALLGVLGDLQAAPEAQVSVQPNFQQDKFLGRWFSAGL

SEQ ID NO: 11041 - protein, 190 aa, Homo Sapiens
MATHHTLWMGLALLGVLGDLQAAPEAQVSVQPNFQQDKFLGRWFSAGLASNSSWLREKKAALSMCKSVVAPATDGGLNLTSTFLRKNQCETRTMLLQPAGSLGSYSYRSPHWGSTYSVSVVETDYDQYALLYSQGSKGPGEDFRMATLYSRTQTPRAELKEKFTAFCKAQGFTEDTIVFLPQTDKCMTEQ

SEQ ID NO: 11042 - protein, 195 aa, Homo Sapiens
MATHHTLWMGLALLGVLGDLQAAPEAQVSVQPNFQQDKFLGRWFSAGLASNSSWLREKKAALSMCKSVVAPATDGGLNLTSTFLRKNQCETRTMLLQPAGSLGSYSYRSPREWGLHRPPGPSLGATLAGTTLGQPPAAEIHGVGDWGSTYSVSVVETDYDQYALLYSQGSKGPGEDFRMATLYSRTQTPRAELKE

SEQ ID NO: 11043 - protein, 124 aa, Homo Sapiens
VVAPATDGGLNLTSTFLRKNQCETRTMLLQPAGSLGSYSYRSPHWGSTYSVSVVETDYDQYALLYSQGSKGPGEDFRMATLYSRTQTPRAELKEKFTAFCKAQGFTEDTIVFLPQTAPGFFLGR

SEQ ID NO: 11044 - protein, 62 aa, Homo Sapiens
  misc_feature (1)..(1): Xaa can be any naturally occurring amino acid
XGYHCLPAPNRAQGEVGGDGGSVQFGGSVKTSSALREEQEAQWENWPKSGVLTTAPGFFLGR

SEQ ID NO: 11045 - protein, 386 aa, Homo Sapiens [sequence omitted]

SEQ ID NO: 11046 - protein, 296 aa, Homo Sapiens
MADSCRNLTYVRGSVGPATSTLMFVAGVVGNGLALGILSARRPARPSAFAVLVTGLAATDLLGTSFLSPAVFVAYARNSSLLGLARGGPALCDAFAFAMTFFGLASMLILFAMAVERCLALSHPYLYAQLDGPRCARLALPAIYAFCVLFCALPLLGLGQHQQYCPGSWCFLRMRWAQPGGAAFSLAYAGLVALLVAAIFLCNGSVTLSLCRMYRQQKRHQGSLGPRPRTGEDEVDHLILLALMTVVMAVCSLPLTHVERPRQDRMRWLTPVIPALWEAEAGGSFEVRSSRPVWPT

SEQ ID NO: 11047 - protein, 115 aa, Homo Sapiens
MGDLLAFRFYAFNPILDPWVFILFRKAVFQRLKLWVCCLCLGPAHGDSQTPLSQLASGRRDPRAPSAPVGKEGSCVPLSAWGEGQVEPLPPTQQSSGSAVGTSSKAEASVACSLC

SEQ ID NO: 11048 - protein, 143 aa, Homo Sapiens
MTVVMAVCSLPLTIRCFTQAVAPDSSSEMGDLLAFRFYAFNPILDPWVFILFRKAVFQRLKLWVCCLCLGPAHGDSQTPLSQLASGRRDPRAPSAPVGKEGSCVPLSAWGEGQVEPLPPTQQSSGSAVGTSSKAEASVACSLC

SEQ ID NO: 11049 - protein, 174 aa, Homo Sapiens
MYRQQKRHQGSLGPRPRTGEDEVDHLILLALMTVVMAVCSLPLTIRCFTQAVAPDSSSEMGDLLAFRFYAFNPILDPWVFILFRKAVFQRLKLWVCCLCLGPAHGDSQTPLSQLASGRRDPRAPSAPVGKEGSCVPLSAWGEGQVEPLPPTQQSSGSAVGTSSKAEASVACSLC

SEQ ID NO: 11050 - protein, 490 aa, Homo Sapiens
MLMRLVLTVRSNLIPSPPTYNSAHDYISWESFSNVSYYTRILPSVPKDCPTPMGTKGKKQLPDAQLLARRFLLRRKFIPDPQGTNLMFAFFAQHFTHQFFKTSGKMGPGFTKALGHGVDLGHIYGDNLERQYQLRLFKDGKLKYQVLDGEMYPPSVEEAPVLMHYPRGIPPQSQMAVGQEVFGLLPGLMLYATLWLREHNRVCDLLKAEHPTWGDEQLFQTTRLILIGETIKIVIEEYVQQLSGYFLQLKFDPELLFGVQFQYRNRIAMEFNHLYHWHPLMPDSFKVGSQEYSYEQFLFNTSMLVDYGVEALVDAFSRQIAGRIGGGRNMDHHILHVAVDVIRESREMRLQPFNEYRKRFGMKPYTSFQELVGEKEMAAELEELYGDIDALEFYPGLLLEKCHPNSIFGESMIEIGAPFSLKGLLGNPICSPEYWKPSTFGGEVGFNIVKTATLKKLVCLNTKTCPYVSFRVPDASQDDGPAVERPSTEL

SEQ ID NO: 11051 - protein, 402 aa, Homo Sapiens
MLMRLVLTVRSNLIPSPPTYNSAHDYISWESFSNVSYYTRILPSVPKDCPTPMGTKGKKQLPDAQLLARRFLLRRKFIPDPQGTNLMFAFFAQHFTHQFFKTSGKMGPGFTKALGHGVDLGHIYGDNLERQYQLRLFKDGKLKYQVLDGEMYPPSVEEAPVLMHYPRGIPPQSQMAVGQEVFGLLPGLMLYATLWLREHNRVCDLLKAEHPTWGDEQLFQTTRLILIGETIKIVIEEYVQQLSGYFLQLKFDPELLFGVQFQYRNRIAMEFNHLYHWHPLMPDSFKIGGGRNMDHHILHVAVDVIRESREMRLQPFNEYRKRFGMKPYTSFQELVGEKEMAAELEELYGDIDALEFYPGLLLEKCHPNSIFGESMIEIGAPFSLKGLLGNPICSPEYWKPST

SEQ ID NO: 11052 - protein, 537 aa, Homo Sapiens
MRKPRLMNPCCYYPCQHQGICVRFGLDRYQCDCTRTGYSGPNCTIPGLWTWLRNSLRPSPSFTHFLLTHGRWFWEFVNATFIREMLMRLVLTVRSNLIPSPPTYNSAHDYISWESFSNVSYYTRILPSVPKDCPTPMGTKGKKQLPDAQLLARRFLLRRKFIPDPQGTNLMFAFFAQHFTHQFFKTSGKMGPGFTKALGHGVDLGHIYGDNLERQYQLRLFKDGKLKYQVLDGEMYPPSVEEAPVLMHYPRGIPPQSQMAVGQEVFGLLPGLMLYATLWLREHNRVCDLLKAEHPTWGDEQLFQTTRLILIGETIKIVIEEYVQQLSGYFLQLKFDPELLFGVQFQYRNRIAMEFNHLYHWHPLMPDSFKIGGGRNMDHHILHVAVDVIRESREMRLQPFNEYRKRFGMKPYTSFQELVGEKEMAAELEELYGDIDALEFYPGLLLEKCHPNSIFGESMIEIGAPFSLKGLLGNPICSPEYWKPSTFGGEVGFNIVKTATLKKLVCLNTKTCPYVSFRVPDASQDDGPAVERPSTEL

SEQ ID NO: 11053 - protein, 172 aa, Homo Sapiens
MSRSLLLWFLLFLLLLPPLPVLLADPGAPTPAGLWTWLRNSLRPSPSFTHFLLTHGRWFWEFVNATFIREMLMRLVLTVRSNLIPSPPTYNSAHDYISWESFSNFFKTSGKMGPGFTKALGHGVDLGHIYGDNLERQYQLRLFKDGKLKYQVLDGEMYPPSVEEAPVLMHYP

SEQ ID NO: 11054 - protein, 41 aa, Homo Sapiens
MSRSLLLWFLLFLLLLPPLPVLLADPGAPTPAPGHLCPLRP

SEQ ID NO: 11055 - protein, 551 aa, Homo Sapiens
MSRSLLLWFLLFLLLLPPLPVLLADPGAPTPVNPCCYYPCQHQGICVRFGLDRYQCDCTRTGYSGPNCTIPGLWTWLRNSLRPSPSFTHFLLTHGRWFWEFVNATFIREMLMRLVLTGKKQLPDAQLLARRFLLRRKFIPDPQGTNLMFAFFAQHFTHQFFKTSGKMGPGFTKALGHGVDLGHIYGDNLERQYQLRLFKDGKLKYQVLDGEMYPPSVEEAPVLMHYPRGIPPQSQMAVGQEVFGLLPGLMLYATLWLREHNRVCDLLKAEHPTWGDEQLFQTTRLILIGETIKIVIEEYVQQLSGYFLQLKFDPELLFGVQFQYRNRIAMEFNHLYHWHPLMPDSFKVGSQEYSYEQFLFNTSMLVDYGVEALVDAFSRQIAGRIGGGRNMDHHILHVAVDVIRESREMRLQPFNEYRKRFGMKPYTSFQELVGEKEMAAELEELYGDIDALEFYPGLLLEKCHPNSIFGESMIEIGAPFSLKGLLGNPICSPEYWKPSTFGGEVGFNIVKTATLKKLVCLNTKTCPYVSFRVPDASQDDGPAVERPSTEL

SEQ ID NO: 11056 - protein, 562 aa, Homo Sapiens
MSRSLLLWFLLFLLLLPPLPVLLADPGAPTPVNPCCYYPCQHQGICVRFGLDRYQCDCTRTGYSGPNCTIPGLWTWLRNSLRPSPSFTHFLLTHGRWFWEFVNATFIREMLMRLVLTVRSNLIPSPPTYNSAHDYISWESFSNVSYYTRILPSVPKDCPTPMGTKGKKQLPDAQLLARRFLLRRKFIPDPQGTNLMFAFFAQHFTHQFFKTSGKMGPGFTKALGHGVDLGHIYGDNLERQYQLRLFKDGKLKYQVLDGEMYPPSVEEAPVLMHYPRGIPPQSQMAVGQEVFGLLPGLMLYATLWLREHNRVCDLLKAEHPTWGDEQLFQTTRLILIGETIKIVIEEYVQQLSGYFLQLKFDPELLFGVQFQYRNRIAMEFNHLYHWHPLMPDSFKIGGGRNMDHHILHVAVDVIRESREMRLQPFNEYRKRFGMKPYTSFQELVGEKEMAAELEELYGDIDALEFYPGLLLEKCHPNSIFGESMIEIGAPFSLKGLLGNPICSPEYWKPSTFGGEVGFNIVKTATLKKLVCLNTKTCPYVSFRVPDASQDDGPAVERPSTEL

SEQ ID NO: 11057 - protein, 599 aa, Homo Sapiens
MSRSLLLWFLLFLLLLPPLPVLLADPGAPTPVNPCCYYPCQHQGICVRFGLDRYQCDCTRTGYSGPNCTIPGLWTWLRNSLRPSPSFTHFLLTHGRWFWEFVNATFIREMLMRLVLTVRSNLIPSPPTYNSAHDYISWESFSNVSYYTRILPSVPKDCPTPMGTKGKKQLPDAQLLARRFLLRRKFIPDPQGTNLMFAFFAQHFTHQFFKTSGKMGPGFTKALGHGVDLGHIYGDNLERQYQLRLFKDGKLKYQVLDGEMYPPSVEEAPVLMHYPRGIPPQSQMAVGQEVFGLLPGLMLYATLWLREHNRVCDLLKAEHPTWGDEQLFQTTRLILIGETIKIVIEEYVQQLSGYFLQLKFDPELLFGVQFQYRNRIAMEFNHLYHWHPLMPDSFKVGSQEYSYEQFLFNTSMLVDYGVEALVDAFSRQIAGRIGGGRNMDHHILHVAVDVIRESREMRLQPFNEYRKRFGMKPYTSFQELVGEKEMAAELEELYGDIDALEFYPGLLLEKCHPNSIFGESMIEIGAPFSLKGLLGNPICSPEYWKPSTFGGEVGFNIVKTATLKKLVCLNTKTCPYVSFRVPDASQDDGPAVERPSTEL

SEQ ID NO: 11058 - protein, 599 aa, Homo Sapiens; identical to SEQ ID NO: 11057

SEQ ID NO: 11059 - protein, 163 aa, Homo Sapiens
MLARALLLCAVLALSHTANPCCSHPCQNRGVCMSVGFDQYKCDCTRTGFYGENCSTPEFLTRIKLFLKPTPNTVHYILTHFKGFWNVVNNIPFLRNAIMSYVLTSRSHLIDSPPTYNADYGYKSWEAFSNLSYYTRALPPVPDDCPTPLGVKALHASVFQDRS

SEQ ID NO: 11060 - protein, 604 aa, Homo Sapiens
MLARALLLCAVLALSHTANPCCSHPCQNRGVCMSVGFDQYKCDCTRTGFYGENCSTPEFLTRIKLFLKPTPNTVHYILTHFKGFWNVVNNIPFLRNAIMSYVLTSRSHLIDSPPTYNADYGYKSWEAFSNLSYYTRALPPVPDDCPTPLGVKGKKQLPDSNEIVEKLLLRRKFIPDPQGSNMMFAFFAQHFTHQFFKTDHKRGPAFTNGLGHGVDLNHIYGETLARQRKLRLFKDGKMKYQIIDGEMYPPTVKDTQAEMIYPPQVPEHLRFAVGQEVFGLVPGLMMYATIWLREHNRVCDVLKQEHPEWGDEQLFQTSRLILIGETIKIVIEDYVQHLSGYHFKLKFDPELLFNKQFQYQNRIAAEFNTLYHWHPLLPDTFQIHDQKYNYQQFIYNNSILLEHGITQFVESFTRQIAGRVAGGRNVPPAVQKVSQASIDQSRQMKYQSFNEYRKRFMLKPYESFEELTGEKEMSAELEALYGDIDAVELYPALLVEKPRPDAIFGETMVEVGAPFSLKGLMGNVICSPAYWKPSTFGGEVGFQIINTASIQSLICNNVKGCPFTSFSVPDPELIKTVTINASSSRSGLDDINPTVLLKERSTEL

SEQ ID NO: 11061 - protein, 115 aa, Homo Sapiens
MIPAKDMAKVMIVMLAICFLTKSDGKSVKKRSVSEIQLMHNLGKHLNSMERVEWLRKKLQDVHNFVALGAPLAPRDAGSQRPRKKEDNVLVESHEKSLGEADKADVNVLTKAKSQ

SEQ ID NO: 11062 - protein, 115 aa, Homo Sapiens; identical to SEQ ID NO: 11061

SEQ ID NO: 11063 - protein, 100 aa, Homo Sapiens
METRQVSRSPRVRLLLLLLLLLVVPWGVRTASGVALPPVGVLSLRPPGRAWADPATPRPRRSLALADDAAFRERARLLAALERRHWLNSYMHKLLVLDAP

SEQ ID NO: 11064 - protein, 172 aa, Homo Sapiens
MQRRLVQQWSVAVFLLSYAVPSCGRSVEGLSRRLKRAVSEHQLLHDKGKSIQDLRRRFFLHHLIAEIHTAEIRATSEVSPNSKPSPNTKNHPVRFGSDDEGRYLTQETNKVETYKEQPLKTPGKKKKGKPGKRKEQEKKKRRTRSAWLDSGVTGSGLEGDHLSDTSTTSLEL

SEQ ID NO: 11065 - protein, 175 aa, Homo Sapiens
MQRRLVQQWSVAVFLLSYAVPSCGRSVEGLSRRLKRAVSEHQLLHDKGKSIQDLRRRFFLHHLIAEIHTAEIRATSEVSPNSKPSPNTKNHPVRFGSDDEGRYLTQETNKVETYKEQPLKTPGKKKKGKPGKRKEQEKKKRRTRSAWLDSGVTGSGLEGDHLSDTSTTSLELDSR

SEQ ID NO: 11066 - protein, 175 aa, Homo Sapiens; identical to SEQ ID NO: 11065

SEQ ID NO: 11067 - protein, 175 aa, Homo Sapiens; identical to SEQ ID NO: 11065

SEQ ID NO: 11068 - protein, 177 aa, Homo Sapiens
MQRRLVQQWSVAVFLLSYAVPSCGRSVEGLSRRLKRAVSEHQLLHDKGKSIQDLRRRFFLHHLIAEIHTAEIRATSEVSPNSKPSPNTKNHPVRFGSDDEGRYLTQETNKVETYKEQPLKTPGKKKKGKPGKRKEQEKKKRRTRSAWLDSGVTGSGLEGDHLSDTSTTSLELDSRRH

SEQ ID NO: 11069 - protein, 177 aa, Homo Sapiens; identical to SEQ ID NO: 11068

SEQ ID NO: 11070 - protein, 177 aa, Homo Sapiens; identical to SEQ ID NO: 11068

SEQ ID NO: 11071 - protein, 209 aa, Homo Sapiens
MQRRLVQQWSVAVFLLSYAVPSCGRSVEGLSRRLKRAVSEHQLLHDKGKSIQDLRRRFFLHHLIAEIHTAEIRATSEVSPNSKPSPNTKNHPVRFGSDDEGRYLTQETNKVETYKEQPLKTPGKKKKGKPGKRKEQEKKKRRTRSAWLDSGVTGSGLEGDHLSDTSTTSLELDSRTALLWGLKKKKENNRRTHHMQLMISLFKSPLLLL

SEQ ID NO: 11072 - protein, 111 aa, Homo Sapiens
MSRARAETMQRRLVQQWSVAVFLLSYAVPSCGRSVEGLSRRLKRAVSEHQLLHDKGKSIQDLRRRFFLHHLIAEIHTAEIRATSEVSPNSKPSPNTKNHPVRFGSDDEGRY

SEQ ID NO: 11073 - protein, 269 aa, Homo Sapiens
FSAQPPPSLQWLFEDETPITNRSRPPHLRRATVFANGSLLLTQVRPRNAGIYRCIGQGQRGPPIILEATLHLAEIEDMPLFEPRVFTAGSEERVTCLPPKGLPEPSVWWEHAGVRLPTHGRVYQKGHELVLANIAESDAGVYTCHAANLAGQRRQDVNITVASEHLCPEGQGEVEGNTGLGVMDRGFPAVPSWLKKPQDSQLEEGKPGYLDCLTQATPKPTVVWYRNQMLISEDSRFEVFKNGTLRINSVEVYDGTWYRCMSSTPAGSI

SEQ ID NO: 11074 - protein, 139 aa, Homo Sapiens
MGAARGSPARPRRLPLLSVLLLPLLGGTQTAIVFIKQPSSQDALQGRRALLRCEVEAPGPVHVYWLLDGAPVQDTERRFAQGSSLSFAAVDRLQDSGTFQCVARDDVTGEEARSANASFNIKCESQGGCAQSPCQTLND

SEQ ID NO: 11075 - protein, 157 aa, Homo Sapiens
MGAARGSPARPRRLPLLSVLLLPLLGGTQTAIVFIKQPSSQDALQGRRALLRCEVEAPGPVHVYWLLDGAPVQDTERRFAQGSSLSFAAVDRLQDSGTFQCVARDDVTGEEARSANASFNIKWIEAGPVVLKHPASEAEIQPQTQVTLRCHIDGHPR

SEQ ID NO: 11076 - protein, 1070 aa, Homo Sapiens
MGAARGSPARPRRLPLLSVLLLPLLGGTQTAIVFIKQPSSQDALQGRRALLRCEVEAPGPVHVYWLLDGAPVQDTERRFAQGSSLSFAAVDRLQDSGTFQCVARDDVTGEEARSANASFNIKWIEAGPVVLKHPASEAEIQPQTQVTLRCHIDGHPRPTYQWFRDGTPLSDGQSNHTVSSKERNLTLRPAGPEHSGLYSCCAHSAFGQACSSQNFTLSIADESFARVVLAPQDVVVARYEEAMFHCQFSAQPPPSLQWLFEDETPITNRSRPPHLRRATVFANGSLLLTQVRPRNAGIYRCIGQGQRGPPIILEATLHLAEIEDMPLFEPRVFTAGSEERVTCLPPKGLPEPSVWWEHAGVRLPTHGRVYQKGHELVLANIAESDAGVYTCHAANLAGQRRQDVNITVATVPSWLKKPQDSQLEEGKPGYLDCLTQATPKPTVVWYRNQMLISEDSRFEVFKNGTLRINSVEVYDGTWYRCMSSTPAGSIEAQARVQVLEKLKFTPPPQPQQCMEFDKEATVPCSATGREKPTIKWERADGSSLPEWVTDNAGTLHFARVTRDDAGNYTCIASNGPQGQIRAHVQLTVAVFITFKVEPERTTVYQGHTALLQCEAQGDPKPLIQWKGKDRILDPTKLGPRMHIFQNGSLVIHDVAPEDSGRYTCIAGNSCNIKHTEAPLYVVDKPVPEESEGPGSPPPYKMIQTIGLSVGAAVAYIIAVLGLMFYCKKRCKAKRLQKQPEGEEPEMECLNGGPLQNGQPSAEIQEEVALTSLGSGPAATNKRHSTSDKMHFPRSSLQPITTLGKSEFGEVFLAKAQGLEEGVAETLVLVKSLQSKDEQQQLDFRRELEMFGKLNHANVVRLLGLCREAEPHYMVLEYVDLGDLKQFLRISKSKDEKLKSQPLSTKQKVALCTQVALGMEHLSNNRFVHKDLAARNCLVSAQRQVKVSALGLSKDVYNSEYYHFRQAWVPLRWMSPEAILEGDFSTKSDVWAFGVLMWEVFTHGEMPHGGQADDEVLADLQAGKARLPQPEGCPSKLYRLMQRCWALSPKDRPSFSEIASALGDSTVDSKP

SEQ ID NO: 11077 - protein, 816 aa, Homo Sapiens
MGAARGSPARPRRLPLLSVLLLPLLGGTQTAIVFIKQPSSQDALQGRRALLRCEVEAPGPVHVYWLLDGAPVQDTERRFAQGSSLSFAAVDRLQDSGTFQCVARDDVTGEEARSANASFNIKWIEAGPVVLKHPASEAEIQPQTQVTLRCHIDGHPRPTYQWFRDGTPLSDGQSNHTVSSKERNLTLRPAGPEHSGLYSCCAHSAFGQACSSQNFTLSIADESFARVVLAPQDVVVARYEEAMFHCQFSAQPPPSLQWLFEDETPITNRSRPPHLRRATVFANGSLLLTQVRPRNAGIYRCIGQGQRGPPIILEATLHLAEIEDMPLFEPRVFTAGSEERVTCLPPKGLPEPSVWWEHAGVRLPTHGRVYQKGHELVLANIAESDAGVYTCHAANLAGQRRQDVNITVATVPSWLKKPQDSQLEEGKPGYLDCLTQATPKPTVVWYRNQMLISEDSRFEVFKNGTLRINSVEVYDGTWYRCMSSTPAGSIEAQARVQVLEKLKFTPPPQPQQCMEFDKEATVPCSATGREKPTIKWERADGSSLPEWVTDNAGTLHFARVTRDDAGNYTCIASNGPQGQIRAHVQLTVAVFITFKVEPERTTVYQGHTALLQCEAQGDPKPLIQWKGKDRILDPTKLGPRMHIFQNGSLVIHDVAPEDSGRYTCIAGNSCNIKHTEAPLYVVDKPVPEESEGPGSPPPYKMIQTIGLSVGAAVAYIIAVLGLMFYCKKRCKAKRLQKQPEGEEPEMECLNGGPLQNGQPSAEIQEEVALTSLGSGPAATNKRHSTSDKMHFPRSSLQPITTLGRPQAVPEDFQEQG

SEQ ID NO: 11078 - protein, 940 aa, Homo Sapiens
MGAARGSPARPRRLPLLSVLLLPLLGGTQTAIVFIKQPSSQDALQGRRALLRCEVEAPGPVHVYWLLDGAPVQDTERRFAQGSSLSFAAVDRLQDSGTFQCVARDDVTGEEARSANASFNIKWIEAGPVVLKHPASEAEIQPQTQVTLRCHIDGHPRPTYQWFRDGTPLSDGQSNHTVSSKERNLTLRPAGPEHSGLYSCCAHSAFGQACSSQNFTLSIADESFARVVLAPQDVVVARYEEAMFHCQFSAQPPPSLQWLFEDETPITNRSRPPHLRRATVFANGSLLLTQVRPRNAGIYRCIGQGQRGPPIILEATLHLAEIEDMPLFEPRVFTAGSEERVTCLPPKGLPEPSVWWEHAGVRLPTHGRVYQKGHELVLANIAESDAGVYTCHAANLAGQRRQDVNITVANGSSLPEWVTDNAGTLHFARVTRDDAGNYTCIASNGPQGQIRAHVQLTVAVFITFKVEPERTTVYQGHTALLQCEAQGDPKPLIQWKGKDRILDPTKLGPRMHIFQNGSLVIHDVAPEDSGRYTCIAGNSCNIKHTEAPLYVVDKPVPEESEGPGSPPPYKMIQTIGLSVGAAVAYIIAVLGLMFYCKKRCKAKRLQKQPEGEEPEMECLNGGPLQNGQPSAEIQEEVALTSLGSGPAATNKRHSTSDKMHFPRSSLQPITTLGKSEFGEVFLAKAQGLEEGVAETLVLVKSLQSKDEQQQLDFRRELEMFGKLNHANVVRLLGLCREAEPHYMVLEYVDLGDLKQFLRISKSKDEKLKSQPLSTKQKVALCTQVALGMEHLSNNRFVHKDLAARNCLVSAQRQVKVSALGLSKDVYNSEYYHFRQAWVPLRWMSPEAILEGDFSTKSDVWAFGVLMWEVFTHGEMPHGGQADDEVLADLQAGKARLPQPEGCPSKLYRLMQRCWALSPKDRPSFSEIASALGDSTVDSKP

SEQ ID NO: 11079 - protein, 1030 aa, Homo Sapiens
MGAARGSPARPRRLPLLSVLLLPLLGGTQTAIVFIKQPSSQDALQGRRALLRCEVEAPGPVHVYWLLDGAPVQDTERRFAQGSSLSFAAVDRLQDSGTFQCVARDDVTGEEARSANASFNIKWIEAGPVVLKHPASEAEIQPQTQVTLRCHIDGHPRPTYQWFRDGTPLSDGQSNHTVSSKERNLTLRPAGPEHSGLYSCCAHSAFGQACSSQNFTLSIADESFARVVLAPQDVVVARYEEAMFHCQFSAQPPPSLQWLFEDETPITNRSRPPHLRRATVFANGSLLLTQVRPRNAGIYRCIGQGQRGPPIILEATLHLAEIEDMPLFEPRVFTAGSEERVTCLPPKGLPEPSVWWEHAGVRLPTHGRVYQKGHELVLANIAESDAGVYTCHAANLAGQRRQDVNITVATVPSWLKKPQDSQLEEGKPGYLDCLTQATPKPTVVWYRNQMLISEDSRFEVFKNGTLRINSVEVYDGTWYRCMSSTPAGSIEAQARVQVLDGSSLPEWVTDNAGTLHFARVTRDDAGNYTCIASNGPQGQIRAHVQLTVAVFITFKVEPERTTVYQGHTALLQCEAQGDPKPLIQWKGKDRILDPTKLGPRMHIFQNGSLVIHDVAPEDSGRYTCIAGNSCNIKHTEAPLYVVDKPVPEESEGPGSPPPYKMIQTIGLSVGAAVAYIIAVLGLMFYCKKRCKAKRLQKQPEGEEPEMECLNGGPLQNGQPSAEIQEEVALTSLGSGPAATNKRHSTSDKMHFPRSSLQPITTLGKSEFGEVFLAKAQGLEEGVAETLVLVKSLQSKDEQQQLDFRRELEMFGKLNHANVVRLLGLCREAEPHYMVLEYVDLGDLKQFLRISKSKDEKLKSQPLSTKQKVALCTQVALGMEHLSNNRFVHKDLAARNCLVSAQRQVKVSALGLSKDVYNSEYYHFRQAWVPLRWMSPEAILEGDFSTKSDVWAFGVLMWEVFTHGEMPHGGQADDEVLADLQAGKARLPQPEGCPSKLYRLMQRCWALSPKDRPSFSEIASALGDSTVDSKP

SEQ ID NO: 11080 - protein, 1014 aa, Homo Sapiens
MGAARGSPARPRRLPLLSVLLLPLLGGTQTAIVFIKQPSSQDALQGRRALLRCEVEAPGPVHVYWLLDGAPVQDTERRFAQGSSLSFAAVDRLQDSGTFQCVARDDVTGEEARSANASFNIKWIEAGPVVLKHPASEAEIQPQTQVTLRCHIDGHPRPTYQWFRDGTPLSDGQSNHTVSSKERNLTLRPAGPEHSGLYSCCAHSAFGQACSSQNFTLSIADESFARVVLAPQDVVVARYEEAMFHCQFSAQPPPSLQWLFEDETPITNRSRPPHLRRATVFANGSLLLTQVRPRNAGIYRCIGQGQRGPPIILEATLHLAEIEDMPLFEPRVFTAGSEERVTCLPPKGLPEPSVWWEHAGVRLPTHGRVYQKGHELVLANIAESDAGVYTCHAANLAGQRRQDVNITVATVPSWLKKPQDSQLEEGKPGYLDCLTQATPKPTVVWYRNQMLISEDSRFEVFKNGTLRINSVEVYDGTWYRCMSSTPAGSIEAQARVQVLEKLKFTPPPQPQQCMEFDKEATVPCSATGREKPTIKWERADGSSLPEWVTDNAGTLHFARVTRDDAGNYTCIASNGPQGQIRAHVQLTVAVFITFKVEPERTTVYQGHTALLQCEAQGDPKPLIQWKDKPVPEESEGPGSPPPYKMIQTIGLSVGAAVAYIIAVLGLMFYCKKRCKAKRLQKQPEGEEPEMECLNGGPLQNGQPSAEIQEEVALTSLGSGPAATNKRHSTSDKMHFPRSSLQPITTLGKSEFGEVFLAKAQGLEEGVAETLVLVKSLQSKDEQQQLDFRRELEMFGKLNHANVVRLLGLCREAEPHYMVLEYVDLGDLKQFLRISKSKDEKLKSQPLSTKQKVALCTQVALGMEHLSNNRFVHKDLAARNCLVSAQRQVKVSALGLSKDVYNSEYYHFRQAWVPLRWMSPEAILEGDFSTKSDVWAFGVLMWEVFTHGEMPHGGQADDEVLADLQAGKARLPQPEGCPSKLYRLMQRCWALSPKDRPSFSEIASALGDSTVDSKP

SEQ ID NO: 11081 - protein, 459 aa, Homo Sapiens
MGAARGSPARPRRLPLLSVLLLPLLGGTQTAIVFIKQPSSQDALQGRRALLRCEVEAPGPVHVYWLLDGAPVQDTERRFAQGSSLSFAAVDRLQDSGTFQCVARDDVTGEEARSANASFNIKWIEAGPVVLKHPASEAEIQPQTQVTLRCHIDGHPRPTYQWFRDGTPLSDGQSNHTVSSKERNLTLRPAGPEHSGLYSCCAHSAFGQACSSQNFTLSIADESFARVVLAPQDVVVARYEEAMFHCQFSAQPPPSLQWLFEDETPITNRSRPPHLRRATVFANGSLLLTQVRPRNAGIYRCIGQGQRGPPIILEATLHLAEIEDMPLFEPRVFTAGSEERVTCLPPKGLPEPSVWWEHAGVRLPTHGRVYQKGHELVLANIAESDAGVYTCHAANLAGQRRQDVNITVASEHLCPEGQGEVEGNTGLGVMDRGFPGTHLRSSQFWALQAWESVHYWESV

SEQ ID NO: 11082 - protein, 1078 aa, Homo Sapiens
MGSFLSGEKRPSAPTVGSAMEKKEFPTPPGRVGPGTQTAIVFIKQPSSQDALQGRRALLRCEVEAPGPVHVYWLLDGAPVQDTERRFAQGSSLSFAAVDRLQDSGTFQCVARDDVTGEEARSANASFNIKWIEAGPVVLKHPASEAEIQPQTQVTLRCHIDGHPRPTYQWFRDGTPLSDGQSNHTVSSKERNLTLRPAGPEHSGLYSCCAHSAFGQACSSQNFTLSIADESFARVVLAPQDVVVARYEEAMFHCQFSAQPPPSLQWLFEDETPITNRSRPPHLRRATVFANGSLLLTQVRPRNAGIYRCIGQGQRGPPIILEATLHLAEIEDMPLFEPRVFTAGSEERVTCLPPKGLPEPSVWWEHAGVRLPTHGRVYQKGHELVLANIAESDAGVYTCHAANLAGQRRQDVNITVATVPSWLKKPQDSQLEEGKPGYLDCLTQATPKPTVVWYRNQMLISEDSRFEVFKNGTLRINSVEVYDGTWYRCMSSTPAGSIEAQARVQVLEKLKFTPPPQPQQCMEFDKEATVPCSATGREKPTIKWERADGSSLPEWVTDNAGTLHFARVTRDDAGNYTCIASNGPQGQIRAHVQLTVAVFITFKVEPERTTVYQGHTALLQCEAQGDPKPLIQWKGKDRILDPTKLGPRMHIFQNGSLVIHDVAPEDSGRYTCIAGNSCNIKHTEAPLYVVDKPVPEESEGPGSPPPYKMIQTIGLSVGAAVAYIIAVLGLMFYCKKRCKAKRLQKQPEGEEPEMECLNGGPLQNGQPSAEIQEEVALTSLGSGPAATNKRHSTSDKMHFPRSSLQPITTLGKSEFGEVFLAKAQGLEEGVAETLVLVKSLQSKDEQQQLDFRRELEMFGKLNHANVVRLLGLCREAEPHYMVLEYVDLGDLKQFLRISKSKDEKLKSQPLSTKQKVALCTQVALGMEHLSNNRFVHKDLAARNCLVSAQRQVKVSALGLSKDVYNSEYYHFRQAWVPLRWMSPEAILEGDFSTKSDVWAFGVLMWEVFTHGEMPHGGQADDEVLADLQAGKARLPQPEGCPSKLYRLMQRCWALSPKDRPSFSEIASALGDSTVDSKP

SEQ ID NO: 11083 - protein, 257 aa, Homo Sapiens
MVARVSGLIVTLLSSSFPGGPLQNGQPSAEIQEEVALTSLGSGPAATNKRHSTSDKMHFPRSSLQPITTLGKSEFGEVFLAKAQGLEEGVAETLVLVKSLQSKDEQQQLDFRRELEMFGKLNHANVVRLLGLCREAEPHYMVLEYVDLGDLKQFLRISKSKDEKLKSQPLSTKQKVALCTQVALGMEHLSNNRFVHKDLAARNCLVSAQRQVKVSALGLSKDVYNSEYYHFRQAWVPLRWMSPEAILEGDFSTKSDV

SEQ ID NO: 11084 - protein, 84 aa, Homo Sapiens
MVARVSGLIVTLLSSSFPGGPLQNGQPSAEIQEEVALTSLGSGPAATNKRHSTSDKMHFPRSSLQPITTLGRPQAVPEDFQEQG

SEQ ID NO: 11085 - protein, 25 aa, Homo Sapiens
TEHGTEAIFVAAVGIRPSHHAAAQS

SEQ ID NO: 11086 - protein, 25 aa, Homo Sapiens
TEHGTEAIFVAAVGIRPSHHAAAQS

SEQ ID NO: 11087 - protein, 365 aa, Homo Sapiens
  misc_feature (1)..(1): Xaa can be any naturally occurring amino acid
XEHAGVRLPTHGRVYQKGHELVLANIAESDAGVYTCHAANLAGQRRQDVNITVATVPSWLKKPQDSQLEEGKPGYLDCLTQATPKPTVVWYRNQMLISEDSRFEVFLAKAQGLEEGVAETLVLVKSLQSKDEQQQLDFRRELEMFGKLNHANVVRLLGLCREAEPHYMVLEYVDLGDLKQFLRISKSKDEKLKSQPLSTKQKVALCTQVALGMEHLSNNRFVHKDLAARNCLVSAQRQVKVSALGLSKDVYNSEYYHFRQAWVPLRWMSPEAILEGDFSTKSDVWAFGVLMWEVFTHGEMPHGGQADDEVLADLQAGKARLPQPEGCPSKLYRLMQRCWALSPKDRPSFSEIASALGDSTVDSKP

SEQ ID NO: 11088 - protein, 25 aa, Homo Sapiens
  misc_feature (1)..(1): Xaa can be any naturally occurring amino acid
XEHGTEAIFVAAVGIRPSHHAAAQS

SEQ ID NO: 11089 - protein, 168 aa, Homo Sapiens
MQAQQYQQQRRKFAAAFLAFIFILAAVDTAEAGKKEKPEKKVKKSDCGEWQWSVCVPTSGDCGLGTREGTRTGAECKQTMKTQRCKIPCNWKKQFGAECKYQFQAWGECDLNTALKTRTGSLKRALHNAECQKTVTISKPCGKLTKPKPQAESKKKKKEGKKQEKMLD

SEQ ID NO: 11090 - protein, 166 aa, Homo Sapiens
MQAQQYQQQRRKFAAAFLAFIFILAAVDTAEAGKKEKPEKKVKKSDCGEWQWSVCVPTSGDCGLGTREGTRTGAECKQTMKTQRCKIPCNWKKQFGAECKYQFQAWGECDLNTALKTRTGSLKRALHNAECQKTVTISKPCGKLTKPKPQEKGKWRHRSGESLRRW

SEQ ID NO: 11091 - protein, 138 aa, Homo Sapiens
MDSWFILVLLGSGLICVSANNATTVAPSVGITRLINSSTAEPVKEEAKTSNPTSSLTSLSVAPTFSPNITLGPTYLTTVNSSDSDNGTTRTASTNSIGITISPNGTWLPDNQFTDARTEPWEGNSSTAATTPETFPPS

SEQ ID NO: 11092 - protein, 253 aa, Homo Sapiens
MDSWFILVLLGSGLICVSANNATTVAPSVGITRLINSSTAEPVKEEAKTSNPTSSLTSLSVAPTFSPNITLGPTYLTTVNSSDSDNGTTRTASTNSIGITISPNGTWLPDNQFTDARTEPWEGNSSTAATTPETFPPSDETPIIAVMVALSSLLVIVFIIIVLYMLRFKKYKQAGSHSNSFRLSNGRTEDVEPQSVPLLARSPSTNRKYPPLPVDKLEEEINRRMADDNKLFREEFNALPACPIQATCEAASK

SEQ ID NO: 11093 - protein, 793 aa, Homo Sapiens
MDSWFILVLLGSGLICVSANNATTVAPSVGITRLINSSTAEPVKEEAKTSNPTSSLTSLSVAPTFSPNITLGPTYLTTVNSSDSDNGTTRTASTNSIGITISPNGTWLPDNQFTDARTEPWEGNSSTAATTPETFPPSDETPIIAVMVALSSLLVIVFIIIVLYMLRFKKYKQAGSHSNSFRLSNGRTEDVEPQSVPLLARSPSTNRKYPPLPVDKLEEEINRRMADDNKLFREEFNALPACPIQATCEAASKEENKEKNRYVNILPYDHSRVHLTPVEGVPDSDYINASFINGYQEKNKFIAAQGPKEETVNDFWRMIWEQNTATIVMVTNLKERKECKCAQYWPDQGCWTYGNIRVSVEDVTVLVDYTVRKFCIQQVGDMTNRKPQRLITQFHFTSWPDFGVPFTPIGMLKFLKKVKACNPQYAGAIVVHCSAGVGRTGTFVVIDAMLDMMHTERKVDVYGFVSRIRAQRCQMVQTDMQYVFIYQALLEHYLYGDTELEVTSLETHLQKIYNKIPGTSNNGLEEEFKKLTSIKIQNDKMRTGNLPANMKKNRVLQIIPYEFNRVIIPVKRGEENTDYVNASFIDGYRQKDSYIASQGPLLHTIEDFWRMIWEWKSCSIVMLTELEERGQEKCAQYWPSDGLVSYGDITVELKKEEECESYTVRDLLVTNTRENKSRQIRQFHFHGWPEVGIPSDGKGMISIIAAVQKQQQQSGNHPITVHCSAGAGRTGTFCALSTVLERVKAEGILDVFQTVKSLRLQRPHMVQTLEQYEFCYKVVQEYIDAFSDYANFK

SEQ ID NO: 11094 - protein, 793 aa, Homo Sapiens; identical to SEQ ID NO: 11093

SEQ ID NO: 11095 - protein, 793 aa, Homo Sapiens; identical to SEQ ID NO: 11093

SEQ ID NO: 11096 - protein, 175 aa, Homo Sapiens
MDSWFILVLLGSGLICVSANNATTVAPSVGITRLINSSTAEPVKEEAKTSNPTSSLTSLSVAPTFSPNITLGPTYLTTVNSSDSDNGTTRTASTNSIGITISPNGTWLPDNQFTDARTEPWEGNSSTAATTPETFPPSGNSDSKDRRDETPIIAVMVALSSLLVIVFIIIVLYML

SEQ ID NO: 11097 - protein, 802 aa, Homo Sapiens
MDSWFILVLLGSGLICVSANNATTVAPSVGITRLINSSTAEPVKEEAKTSNPTSSLTSLSVAPTFSPNITLGPTYLTTVNSSDSDNGTTRTASTNSIGITISPNGTWLPDNQFTDARTEPWEGNSSTAATTPETFPPSGNSDSKDRRDETPIIAVMVALSSLLVIVFIIIVLYMLRFKKYKQAGSHSNSFRLSNGRTEDVEPQSVPLLARSPSTNRKYPPLPVDKLEEEINRRMADDNKLFREEFNALPACPIQATCEAASKEENKEKNRYVNILPYDHSRVHLTPVEGVPDSDYINASFINGYQEKNKFIAAQGPKEETVNDFWRMIWEQNTATIVMVTNLKERKECKCAQYWPDQGCWTYGNIRVSVEDVTVLVDYTVRKFCIQQVGDMTNRKPQRLITQFHFTSWPDFGVPFTPIGMLKFLKKVKACNPQYAGAIVVHCSAGVGRTGTFVVIDAMLDMMHTERKVDVYGFVSRIRAQRCQMVQTDMQYVFIYQALLEHYLYGDTELEVTSLETHLQKIYNKIPGTSNNGLEEEFKKLTSIKIQNDKMRTGNLPANMKKNRVLQIIPYEFNRVIIPVKRGEENTDYVNASFIDGYRQKDSYIASQGPLLHTIEDFWRMIWEWKSCSIVMLTELEERGQEKCAQYWPSDGLVSYGDITVELKKEEECESYTVRDLLVTNTRENKSRQIRQFHFHGWPEVGIPSDGKGMISIIAAVQKQQQQSGNHPITVHCSAGAGRTGTFCALSTVLERVKAEGILDVFQTVKSLRLQRPHMVQTLEQYEFCYKVVQEYIDAFSDYANFK

SEQ ID NO: 11098 - protein, 802 aa, Homo Sapiens; identical to SEQ ID NO: 11097

SEQ ID NO: 11099 - protein, 1407 aa, Homo Sapiens
MEAEFYMVILTCLIFRNSEGFQIVHVQKQQCLFKNEKVVVGSCNRTIQNQQWMWTEDEKLLHVKSALCLAFIRNAAENYSQNSSERQHPNLHMTGITDTSWVLSTTQPFSSTTEETGLAEPERCNFTLAESKASSHSVSIQWRILGSPCNFSLIYSSDTLGAALCPTFRIDNTTYGCNLQDLQAGTIYNFRIISLDEERTVVLQTDPLPPARFGVSKEKTTSTSLHVWWTPSSGKVTSYEVQLFDENNQKIQGVQIQESTSWNEYTFFNLTAGSKYNIAITAVSGGKRSFSVYTNGSTVPSPVKDIGISTKANSLLISWSHGSGNVERYRLMLMDKGILVHGGVVDKHATSYAFHGLTPGYLYNLTVMTEAAGLQNYRWKLVRTAPMEVSNLKVTNDGSLTSLKVKWQRPPGNVDSYNITLSHKGTIKESRVLAPWITETHFKELVPGRLYQVTVSCVSGELSAQKMAVGRTFPDKVANLEANNNGRMRSLVVSWSPPAGDWEQYRILLFNDSVVLLNITVGKEETQYVMDDTGLVPGRQYEVEVIVESGNLKNSERCQGRTVPLAVLQLRVKHANETSLSIMWQTPVAEWEKYIISLADRDLLLIHKSLSKDAKEFTFTDLVPGRKYMATVTSISGDLKNSSSVKGRTVPAQVTDLHVANQGMTSSLFTNWTQAQGDVEFYQVLLIHENVVIKNESISSETSRYSFHSLKSGSLYSVVVTTVSGGISSRQVVVEGRTVPSSVSGVTVNNSGRNDYLSVSWLLAPGDVDNYEVTLSHDGKVVQSLVIAKSVRECSFSSLTPGRLYTVTITTRSGKYENHSFSQERTVPDKVQGVSVSNSARSDYLRVSWVHATGDFDHYEVTIKNKNNFIQTKSIPKSENECVFVQLVPGRLYSVTVTTKSGQYEANEQGNGRTIPEPVKDLTLRNRSTEDLHVTWSGANGDVDQYEIQLLFNDMKVFPPFHLVNTATEYRFTSLTPGRQYKILVLTISGDVQQSAFIEGFTVPSAVKNIHISPNGATDSLTVNWTPGGGDVDSYTVSAFRHSQKVDSQTIPKHVFEHTFHRLEAGEQYQIMIASVSGSLKNQINVVGRTVPASVQGVIADNAYSSYSLIVSWQKAAGVAERYDILLLTENGILLRNTSEPATTKQHKFEDLTPGKKYKIQILTVSGGLFSKEAQTEGRTVPAAVTDLRITENSTRHLSFRWTASEGELSWYNIFLYNPDGNLQERAQVDPLVQSFSFQNLLQGRMYKMVIVTHSGELSNESFIFGRTVPASVSHLRGSNRNTTDSLWFNWSPASGDFDFYELILYNPNGTKKENWKDKDLTEWRFQGLVPGRKYVLWVVTHSGDLSNKVTAESRTAPSPPSLMSFADIANTSLAITWKGPPDWTDYNDFELQWLPRDALTVFNPYN

SEQ ID NO: 11100 - protein, 2215 aa, Homo Sapiens
MEAEFYMVILTCLIFRNSEGFQIVHVQKQQCLFKNEKVVVGSCNRTIQNQQWMWTEDEKLLHVKSALCLAISNSSRGPSRSAILDRCSQAPRWTCYDQEGFLEVENASLFLQKQGSRVVVKKARKYLHSWMKIDVNKEGKLVNESLCLQKAGLGAEVSVRSTRNTAPPQILTTFNAVPDGLVFLIRNTTEAFIRNAAENYSQNSSERQHPNLHMTGITDTSWVLSTTQPFSSTTEETGLAEPERCNFTLAESKASSHSVSIQWRILGSPCNFSLIYSSDTLGAALCPTFRIDNTTYGCNLQDLQAGTIYNFRIISLDEERTVVLQTDPLPPARFGVSKEKTTSTSLHVWWTPSSGKVTSYEVQLFDENNQKIQGVQIQESTSWNEYTFFNLTAGSKYNIAITAVSGGKRSFSVYTNGSTVPSPVKDIGISTKANSLLISWSHGSGNVERYRLMLMDKGILVHGGVVDKHATSYAFHGLTPGYLYNLTVMTEAAGLQNYRWKLVRTAPMEVSNLKVTNDGSLTSLKVKWQRPPGNVDSYNITLSHKGTIKESRVLAPWITETHFKELVPGRLYQVTVSCVSGELSAQKMAVGRTFPDKVANLEANNNGRMRSLVVSWSPPAGDWEQYRILLFNDSVVLLNITVGKEETQYVMDDTGLVPGRQYEVEVIVESGNLKNSERCQGRTVPLAVLQLRVKHANETSLSIMWQTPVAEWEKYIISLADRDLLLIHKSLSKDAKEFTFTDLVPGRKYMATVTSISGDLKNSSSVKGRTVPAQVTDLHVANQGMTSSLFTNWTQAQGDVEFYQVLLIHENVVIKNESISSETSRYSFHSLKSGSLYSVVVTTVSGGISSRQVVVEGRTVPSSVSGVTVNNSGRNDYLSVSWLLAPGDVDNYEVTLSHDGKVVQSLVIAKSVRECSFSSLTPGRLYTVTITTRSGKYENHSFSQERTVPDKVQGVSVSNSARSDYLRVSWVHATGDFDHYEVTIKNKNNFIQTKSIPKSENECVFVQLVPGRLYSVTVTTKSGQYEANEQGNGRTIPEPVKDLTLRNRSTEDLHVTWSGANGDVDQYEIQLLFNDMKVFPPFHLVNTATEYRFTSLTPGRQYKILVLTISGDVQQSAFIEGFTVPSAVKNIHISPNGATDSLTVNWTPGGGDVDSYTVSAFRHSQKVDSQTIPKHVFEHTFHRLEAGEQYQIMIASVSGSLKNQINVVGRTVPASVQGVIADNAYSSYSLIVSWQKAAGVAERYDILLLTENGILLRNTSEPATTKQHKFEDLTPGKKYKIQILTVSGGLFSKEAQTEGRTVPAAVTDLRITENSTRHLSFRWTASEGELSWYNIFLYNPDGNLQERAQVDPLVQSFSFQNLLQGRMYKMVIVTHSGELSNESFIFGRTVPASVSHLRGSNRNTTDSLWFNWSPASGDFDFYELILYNPNGTKKENWKDKDLTEWRFQGLVPGRKYVLWVVTHSGDLSNKVTAESRTAPSPPSLMSFADIANTSLAITWKGPPDWTDYNDFELQWLPRDALTVFNPYNNRKSEGRIVYGLRPGRSYQFNVKTVSGDSWKTYSKPIFGSVRTKPDKIQNLHCRPQNSTAIACSWIPPDSDFDGYSIECRKMDTQEVEFSRKLEKEKSLLNIMMLVPHKRYLVSIKVQSAGMTSEVVEDSTITMIDRPPPPPPHIRVNEKDVLISKSSINFTVNCSWFSDTNGAVKYFTVVVREADGSDELKPEQQHPLPSYLEYRHNASIRVYQTNYFASKCAENPNSNSKSFNIKLGAEMESLGGKCDPTQQKFCDGPLKPHTAYRISIRAFTQLFDEDLKEFTKPLYSDTFFSLPITTESEPLFGAIEGVSAGLFLIGMLVAVVALLICRQKVSHGRERPSARLSIRRDRPLSVHLNLGQKGNRKTSCPIKINQFEGHFMKLQADSNYLLSKEYEELKDVGRNQSCDIALLPENRGKNRYNNILPYDATRVKLSNVDDDPCSDYINASYIPGNNFRREYIVTQGPLPGTKDDFWKMVWEQNVHNIVMVTQCVEKGRVKCDHYWPADQDSLYYGDLILQMLSESVLPEWTIREFKICGEEQLDAHRLIRHFHYTVWPDHGVPETTQSLIQFVRTVRDYINRSPGAGPTVVHCSAGVGRTGTFIALDRILQQLDSKDSVDIYGAVHDLRLHRVHMVQTECQYVYLHQCVRDVLRARKLRSEQENPLFPIYENVNPEYHRDPVYSRH

SEQ ID NO: 11101 - protein, 2127 aa, Homo Sapiens
MEAEFYMVILTCLIFRNSEGFQIVHVQKQQCLFKNEKVVVGSCNRTIQNQQWMWTEDEKLLHVKSALCLAISNSSRGPSRSAILDRCSQAPRWTCYDQEGFLEVENASLFLQKQGSRVVVKKARKYLHSWMKIDVNKEGKLVNESLCLQKAGLGAEVSVRSTRNTAPPQILTTFNAVPDGLVFLIRNTTEAFIRNAAENYSQNSSERQHPNLHMTGITDTSWVLSTTQPFSSTTEETGLAEPERCNFTLAESKASSHSVSIQWRILGSPCNFSLIYSSDTLGAALCPTFRIDNTTYGCNLQDLQAGTIYNFRIISLDEERTVVLQTDPLPPARFGVSKEKTTSTSLHVWWTPSSGKVTSYEVQLFDENNQKIQGVQIQESTSWNEYTFFNLTAGSKYNIAITAVSGGKRSFSVYTNGSTVPSPVKDIGISTKANSLLISWSHGSGNVERYRLMLMDKGILVHGGVVDKHATSYAFHGLTPGYLYNLTVMTEAAGLQNYRWKLVRTAPMEVSNLKVTNDGSLTSLKVKWQRPPGNVDSYNITLSHKGTIKESRVLAPWITETHFKELVPGRLYQVTVSCVSGELSAQKMAVGRTFPDKVANLEANNNGRMRSLVVSWSPPAGDWEQYRILLFNDSVVLLNITVGKEETQYVMDDTGLVPGRQYEVEVIVESGNLKNSERCQGRTVPLAVLQLRVKHANETSLSIMWQTPVAEWEKYIISLADRDLLLIHKSLSKDAKEFTFTDLVPGRKYMATVTSISGDLKNSSSVKGRTVPAQVTDLHVANQGMTSSLFTNWTQAQGDVEFYQVLLIHENVVIKNESISSETSRYSFHSLKSGSLYSVVVTTVSGGISSRQVVVEGRTVPDKVQGVSVSNSARSDYLRVSWVHATGDFDHYEVTIKNKNNFIQTKSIPKSENECVFVQLVPGRLYSVTVTTKSGQYEANEQGNGRTIPEPVKDLTLRNRSTEDLHVTWSGANGDVDQYEIQLLFNDMKVFPPFHLVNTATEYRFTSLTPGRQYKILVLTISGDVQQSAFIEGFTVPSAVKNIHISPNGATDSLTVNWTPGGGDVDSYTVSAFRHSQKVDSQTIPKHVFEHTFHRLEAGEQYQIMIASVSGSLKNQINVVGRTVPASVQGVIADNAYSSYSLIVSWQKAAGVAERYDILLLTENGILLRNTSEPATTKQHKFEDLTPGKKYKIQILTVSGGLFSKEAQTEGRTVPAAVTDLRITENSTRHLSFRWTASEGELSWYNIFLYNPDGNLQERAQVDPLVQSFSFQNLLQGRMYKMVIVTHSGELSNESFIFGRTVPASVSHLRGSNRNTTDSLWFNWSPASGDFDFYELILYNPNGTKKENWKDKDLTEWRFQGLVPGRKYVLWVVTHSGDLSNKVTAESRTAPSPPSLMSFADIANTSLAITWKGPPDWTDYNDFELQWLPRDALTVFNPYNNRKSEGRIVYGLRPGRSYQFNVKTVSGDSWKTYSKPIFGSVRTKPDKIQNLHCRPQNSTAIACSWIPPDSDFDGYSIECRKMDTQEVEFSRKLEKEKSLLNIMMLVPHKRYLVSIKVQSAGMTSEVVEDSTITMIDRPPPPPPHIRVNEKDVLISKSSINFTVNCSWFSDTNGAVKYFTVVVREADGSDELKPEQQHPLPSYLEYRHNASIRVYQTNYFASKCAENPNSNSKSFNIKLGAEMESLGGKCDPTQQKFCDGPLKPHTAYRISIRAFTQLFDEDLKEFTKPLYSDTFFSLPITTESEPLFGAIEGVSAGLFLIGMLVAVVALLICRQKVSHGRERPSARLSIRRDRPLSVHLNLGQKGNRKTSCPIKINQFEGHFMKLQADSNYLLSKEYEELKDVGRNQSCDIALLPENRGKNRYNNILPYDATRVKLSNVDDDPCSDYINASYIPGNNFRREYIVTQGPLPGTKDDFWKMVWEQNVHNIVMVTQCVEKGRVKCDHYWPADQDSLYYGDLILQMLSESVLPEWTIREFKICGEEQLDAHRLIRHFHYTVWPDHGVPETTQSLIQFVRTVRDYINRSPGAGPTVVHCSAGVGRTGTFIALDRILQQLDSKDSVDIYGAVHDLRLHRVHMVQTECQYVYLHQCVRDVLRARKLRSEQENPLFPIYENVNPEYHRDPVYSRH

SEQ ID NO: 11102 - protein, 1583 aa, Homo Sapiens
MEAEFYMVILTCLIFRNSGFQIVHVQKQQCLFKNEKVVVGSCNRTIQNQQWMWTEDEKLLHVKSALCLAISNSSRGPSRSAILDRCSQAPRWTCYDQEGFLEVENASLFLQKQGSRVVVKKARKYLHSWMKIDVNKEGKLVNESLCLQKAGLGAEVSVRSTRNTAPPQILTTFNAVPDGLVFLIRNTTEAFIRNAAENYSQNSSERQHPNLHMTGITDTSWVLSTTQPFSSTTEETGLAEPERCNFTLAESKASSHSVSIQWRILGSPCNFSLIYSSDTLGAALCPTFRIDNTTYGCNLQDLQAGTIYNFRIISLDEERTVVLQTDPLPPARFGVSKEKTTSTSLHVWWTPSSGKVTSYEVQLFDENNQKIQGVQIQESTSWNEYTFFNLTAGSKYNIAITAVSGGKRSFSVYTNGSTVPSPVKDIGISTKANSLLISWSHGSGNVERYRLMLMDKGILVHGGVVDKHATSYAFHGLTPGYLYNLTVMTEAAGLQNYRWKLVRTAPMEVSNLKVTNDGSLTSLKVKWQRPPGNVDSYNITLSHKGTIKESRVLAPWITETHFKELVPGRLYQVTVSCVSGELSAQKMAVGRTFPDKVANLEANNNGRMRSLVVSWSPPAGDWEQYRILLFNDSVVLLNITVGKEETQYVMDDTGLVPGRQYEVEVIVESGNLKNSERCQGRTVPLAVLQLRVKHANETSLSIMWQTPVAEWEKYIISLADRDLLLIHKSLSKDAKEFTFTDLVPGRKYMATVTSISGDLKNSSSVKGRTVPAQVTDLHVANQGMTSSLFTNWTQAQGDVEFYQVLLIHENVVIKNESISSETSRYSFHSLKSGSLYSVVVTTVSGGISSRQVVVEGRTVPSSVSGVTVNNSGRNDYLSVSWLLAPGDVDNYEVTLSHDGKVVQSLVIAKSVRECSFSSLTPGRLYTVTITTRSGKYENHSFSQERTVPDKVQGVSVSNSARSDYLRVSWVHATGDFDHYEVTIKNKNNFIQTKSIPKSENECVFVQLVPGRLYSVTVTTKSGQYEANEQGNGRTIPEPVKDLTLRNRSTEDLHVTWSGANGDVDQYEIQLLFNDMKVFPPFHLVNTATEYRFTSLTPGRQYKILVLTISGDVQQSAFIEGFTVPSAVKNIHISPNGATDSLTVNWTPGGGDVDSYTVSAFRHSQKVDSQTIPKHVFEHTFHRLEAGEQYQIMIASVSGSLKNQINVVGRTVPASVQGVIADNAYSSYSLIVSWQKAAGVAERYDILLLTENGILLRNTSEPATTKQHKFEDLTPGKKYKIQILTVSGGLFSKEAQTEGRTVPAAVTDLRITENSTRHLSFRWTASEGELSWYNIFLYNPDGNLQERAQVDPLVQSFSFQNLLQGRMYKMVIVTHSGELSNESFIFGRTVPASVSHLRGSNRNTTDSLWFNWSPASGDFDFYELILYNPNGTKKENWKDKDLTEWRFQGLVPGRKYVLWVVTHSGDLSNKVTAESRTAPSPPSLMSFADIANTSLAITWKGPPDWTDYNDFELQWLPRDALTVFNPYNNRKSEGRIVYGLRPGRSYQFNVKTVSGDSWKTYSKPIFGSVRTSMTCFATLISQME

SEQ ID NO: 11103 - protein, 1997 aa, Homo Sapiens
MLSHGAGLALWITLSLLQTGLAEPERCNFTLAESKASSHSVSIQWRILGSPCNFSLIYSSDTLGAALCPTFRIDNTTYGCNLQDLQAGTIYNFRIISLDEERTVVLQTDPLPPARFGVSKEKTTSTSLHVWWTPSSGKVTSYEVQLFDENNQKIQGVQIQESTSWNEYTFFNLTAGSKYNIAITAVSGGKRSFSVYTNGSTVPSPVKDIGISTKANSLLISWSHGSGNVERYRLMLMDKGILVHGGVVDKHATSYAFHGLTPGYLYNLTVMTEAAGLQNYRWKLVRTAPMEVSNLKVTNDGSLTSLKVKWQRPPGNVDSYNITLSHKGTIKESRVLAPWITETHFKELVPGRLYQVTVSCVSGELSAQKMAVGRTFPDKVANLEANNNGRMRSLVVSWSPPAGDWEQYRILLFNDSVVLLNITVGKEETQYVMDDTGLVPGRQYEVEVIVESGNLKNSERCQGRTVPLAVLQLRVKHANETSLSIMWQTPVAEWEKYIISLADRDLLLIHKSLSKDAKEFTFTDLVPGRKYMATVTSISGDLKNSSSVKGRTVPAQVTDLHVANQGMTSSLFTNWTQAQGDVEFYQVLLIHENVVIKNESISSETSRYSFHSLKSGSLYSVVVTTVSGGISSRQVVVEGRTVPSSVSGVTVNNSGRNDYLSVSWLLAPGDVDNYEVTLSHDGKVVQSLVIAKSVRECSFSSLTPGRLYTVTITTRSGKYENHSFSQERTVPDKVQGVSVSNSARSDYLRVSWVHATGDFDHYEVTIKNKNNFIQTKSIPKSENECVFVQLVPGRLYSVTVTTKSGQYEANEQGNGRTIPEPVKDLTLRNRSTEDLHVTWSGANGDVDQYEIQLLFNDMKVFPPFHLVNTATEYRFTSLTPGRQYKILVLTISGDVQQSAFIEGFTVPSAVKNIHISPNGATDSLTVNWTPGGGDVDSYTVSAFRHSQKVDSQTIPKHVFEHTFHRLEAGEQYQIMIASVSGSLKNQINVVGRTVPASVQGVIADNAYSSYSLIVSWQKAAGVAERYDILLLTENGILLRNTSEPATTKQHKFEDLTPGKKYKIQILTVSGGLFSKEAQTEGRTVPAAVTDLRITENSTRHLSFRWTASEGELSWYNIFLYNPDGNLQERAQVDPLVQSFSFQNLLQGRMYKMVIVTHSGELSNESFIFGRTVPASVSHLRGSNRNTTDSLWFNWSPASGDFDFYELILYNPNGTKKENWKDKDLTEWRFQGLVPGRKYVLWVVTHSGDLSNKVTAESRTAPSPPSLMSFADIANTSLAITWKGPPDWTDYNDFELQWLPRDALTVFNPYNNRKSEGRIVYGLRPGRSYQFNVKTVSGDSWKTYSKPIFGSVRTKPDKIQNLHCRPQNSTAIACSWIPPDSDFDGYSIECRKMDTQEVEFSRKLEKEKSLLNIMMLVPHKRYLVSIKVQSAGMTSEVVEDSTITMIDRPPPPPPHIRVNEKDVLISKSSINFTVNCSWFSDTNGAVKYFTVVVREADGSDELKPEQQHPLPSYLEYRHNASIRVYQTNYFASKCAENPNSNSKSFNIKLGAEMESLGGKCDPTQQKFCDGPLKPHTAYRISIRAFTQLFDEDLKEFTKPLYSDTFFSLPITTESEPLFGAIEGVSAGLFLIGMLVAVVALLICRQKVSHGRERPSARLSIRRDRPLSVHLNLGQKGNRKTSCPIKINQFEGHFMKLQADSNYLLSKEYEELKDVGRNQSCDIALLPENRGKNRYNNILPYDATRVKLSNVDDDPCSDYINASYIPGNNFRREYIVTQGPLPGTKDDFWKMVWEQNVHNIVMVTQCVEKGRVKCDHYWPADQDSLYYGDLILQMLSESVLPEWTIREFKICGEEQLDAHRLIRHFHYTVWPDHGVPETTQSLIQFVRTVRDYINRSPGAGPTVVHCSAGVGRTGTFIALDRILQQLDSKDSVDIYGAVHDLRLHRVHMVQTECQYVYLHQCVRDVLRARKLRSEQENPLFPIYENVNPEYHRDPVYSRH

SEQ ID NO: 11104 - protein, 1907 aa, Homo Sapiens
MLSHGAGLALWITLSLLQTGLAEPERCNFTLAESKASSHSVSIQWRILGSPCNFSLIYSSDTLGAALCPTFRIDNTTYGCNLQDLQAGTIYNFRIISLDEERTVVLQTDPLPPARFGVSKEKTTSTSLHVWWTPSSGKVTSYEVQLFDENNQKIQGVQIQESTSWNEYTFFNLTAGSKYNIAITAVSGGKRSFSVYTNGSTVPSPVKDIGISTKANSLLISWSHGSGNVERYRLMLMDKGILVHGGVVDKHATSYAFHGLTPGYLYNLTVMTEAAGLQNYRWKLVRTAPMEVSNLKVTNDGSLTSLKVKWQRPPGNVDSYNITLSHKGTIKESRVLAPWITETHFKELVPGRLYQVTVSCVSGELSAQKMAVGRTFPDKVANLEANNNGRMRSLVVSWSPPAGDWEQYRILLFNDSVVLLNITVGKEETQYVMDDTGLVPGRQYEVEVIVESGNLKNSERCQGRTVPLAVLQLRVKHANETSLSIMWQTPVAEWEKYIISLADRDLLLIHKSLSKDAKEFTFTDLVPGRKYMATVTSISGDLKNSSSVKGRTVPAQVTDLHVANQGMTSSLFTNWTQAQGDVEFYQVLLIHENVVIKNESISSETSRYSFHSLKSGSLYSVVVTTVSGGISSRQVVVEGRTVPSSVSGVTVNNSGRNDYLSVSWLLAPGDVDNYEVTLSHDGKVVQSLVIAKSVRECSFSSLTPGRLYTVTITTRSGKYENHSFSQERTVPDKVQGVSVSNSARSDYLRVSWVHATGDFDHYEVTIKNKNNFIQTKSIPKSENECVFVQLVPGRLYSVTVTTKSGQYEANEQGNGRTIPEPVKDLTLRNRSTEDLHVTWSGANGDVDQYEIQLLFNDMKVFPPFHLVNTATEYRFTSLTPGRQYKILVLTISGDVQQSAFIEGFTVPSAVKNIHISPNGATDSLTVNWTPGGGDVDSYTVSAFRHSQKVDSQTIPKHVFEHTFHRLEAGEQYQIMIASVSGSLKNQINVVGRTVPAAVTDLRITENSTRHLSFRWTASEGELSWYNIFLYNPDGNLQERAQVDPLVQSFSFQNLLQGRMYKMVIVTHSGELSNESFIFGRTVPASVSHLRGSNRNTTDSLWFNWSPASGDFDFYELILYNPNGTKKENWKDKDLTEWRFQGLVPGRKYVLWVVTHSGDLSNKVTAESRTAPSPPSLMSFADIANTSLAITWKGPPDWTDYNDFELQWLPRDALTVFNPYNNRKSEGRIVYGLRPGRSYQFNVKTVSGDSWKTYSKPIFGSVRTKPDKIQNLHCRPQNSTAIACSWIPPDSDFDGYSIECRKMDTQEVEFSRKLEKEKSLLNIMMLVPHKRYLVSIKVQSAGMTSEVVEDSTITMIDRPPPPPPHIRVNEKDVLISKSSINFTVNCSWFSDTNGAVKYFTVVVREADGSDELKPEQQHPLPSYLEYRHNASIRVYQTNYFASKCAENPNSNSKSFNIKLGAEMESLGGKCDPTQQKFCDGPLKPHTAYRISIRAFTQLFDEDLKEFTKPLYSDTFFSLPITTESEPLFGAIEGVSAGLFLIGMLVAVVALLICRQKVSHGRERPSARLSIRRDRPLSVHLNLGQKGNRKTSCPIKINQFEGHFMKLQADSNYLLSKEYEELKDVGRNQSCDIALLPENRGKNRYNNILPYDATRVKLSNVDDDPCSDYINASYIPGNNFRREYIVTQGPLPGTKDDFWKMVWEQNVHNIVMVTQCVEKGRVKCDHYWPADQDSLYYGDLILQMLSESVLPEWTIREFKICGEEQLDAHRLIRHFHYTVWPDHGVPETTQSLIQFVRTVRDYINRSPGAGPTVVHCSAGVGRTGTFIALDRILQQLDSKDSVDIYGAVHDLRLHRVHMVQTECQYVYLHQCVRDVLRARKLRSEQENPLFPIYENVNPEYHRDPVYSRH

SEQ ID NO: 11105 - protein, 1907 aa, Homo Sapiens
MLSHGAGLALWITLSLLQTGLAEPERCNFTLAESKASSHSVSIQWRILGSPCNFSLIYSSDTLGAALCPTFRIDNTTYGCNLQDLQAGTIYNFRIISLDEERTVVLQTDPLPPARFGVSKEKTTSTSLHVWWTPSSGKVTSYEVQLFDENNQKIQGVQIQESTSWNEYTFFNLTAGSKYNIAITAVSGGKRSFSVYTNGSTVPSPVKDIGISTKANSLLISWSHGSGNVERYRLMLMDKGILVHGGVVDKHATSYAFHGLTPGYLYNLTVMTEAAGLQNYRWKLVRTAPMEVSNLKVTNDGSLTSLKVKWQRPPGNVDSYNITLSHKGTIKESRVLAPWITETHFKELVPGRLYQVTVSCVSGELSAQKMAVGRTFPLAVLQLRVKHANETSLSIMWQTPVAEWEKYIISLADRDLLLIHKSLSKDAKEFTFTDLVPGRKYMATVTSISGDLKNSSSVKGRTVPAQVTDLHVANQGMTSSLFTNWTQAQGDVEFYQVLLIHENVVIKNESISSETSRYSFHSLKSGSLYSVVVTTVSGGISSRQVVVEGRTVPSSVSGVTVNNSGRNDYLSVSWLLAPGDVDNYEVTLSHDGKVVQSLVIAKSVRECSFSSLTPGRLYTVTITTRSGKYENHSFSQERTVPDKVQGVSVSNSARSDYLRVSWVHATGDFDHYEVTIKNKNNFIQTKSIPKSENECVFVQLVPGRLYSVTVTTKSGQYEANEQGNGRTIPEPVKDLTLRNRSTEDLHVTWSGANGDVDQYEIQLLFNDMKVFPPFHLVNTATEYRFTSLTPGRQYKILVLTISGDVQQSAFIEGFTVPSAVKNIHISPNGATDSLTVNWTPGGGDVDSYTVSAFRHSQKVDSQTIPKHVFEHTFHRLEAGEQYQIMIASVSGSLKNQINVVGRTVPASVQGVIADNAYSSYSLIVSWQKAAGVAERYDILLLTENGILLRNTSEPATTKQHKFEDLTPGKKYKIQILTVSGGLFSKEAQTEGRTVPAAVTDLRITENSTRHLSFRWTASEGELSWYNIFLYNPDGNLQERAQVDPLVQSFSFQNLLQGRMYKMVIVTHSGELSNESFIFGRTVPASVSHLRGSNRNTTDSLWFNWSPASGDFDFYELILYNPNGTKKENWKDKDLTEWRFQGLVPGRKYVLWVVTHSGDLSNKVTAESRTAPSPPSLMSFADIANTSLAITWKGPPDWTDYNDFELQWLPRDALTVFNPYNNRKSEGRIVYGLRPGRSYQFNVKTVSGDSWKTYSKPIFGSVRTKPDKIQNLHCRPQNSTAIACSWIPPDSDFDGYSIECRKMDTQEVEFSRKLEKEKSLLNIMMLVPHKRYLVSIKVQSAGMTSEVVEDSTITMIDRPPPPPPHIRVNEKDVLISKSSINFTVNCSWFSDTNGAVKYFTVVVREADGSDELKPEQQHPLPSYLEYRHNASIRVYQTNYFASKCAENPNSNSKSFNIKLGAEMESLGGKCDPTQQKFCDGPLKPHTAYRISIRAFTQLFDEDLKEFTKPLYSDTFFSLPITTESEPLFGAIEGVSAGLFLIGMLVAVVALLICRQKVSHGRERPSARLSIRRDRPLSVHLNLGQKGNRKTSCPIKINQFEGHFMKLQADSNYLLSKEYEELKDVGRNQSCDIALLPENRGKNRYNNILPYDATRVKLSNVDDDPCSDYINASYIPGNNFRREYIVTQGPLPGTKDDFWKMVWEQNVHNIVMVTQCVEKGRVKCDHYWPADQDSLYYGDLILQMLSESVLPEWTIREFKICGEEQLDAHRLIRHFHYTVWPDHGVPETTQSLIQFVRTVRDYINRSPGAGPTVVHCSAGVGRTGTFIALDRILQQLDSKDSVDIYGAVHDLRLHRVHMVQTECQYVYLHQCVRDVLRARKLRSEQENPLFPIYENVNPEYHRDPVYSRH

SEQ ID NO: 11106 - protein, 103 aa, Homo Sapiens
  misc_feature (1)..(1): Xaa can be any naturally occurring amino acid
XLWITLSLLQTGLAEPERCNFTLAESKASSHSVSIQWRILGSPCNFSLIYSSDTLGAALCPTFRIDNTTYGCNLQDLQAGTIYNFRIISLDEERTVVLQTGKG

SEQ ID NO: 11107 - protein, 148 aa, Homo Sapiens
MTMYLWLKLLAFGFAFLDTEVFVTGQSPTPSPTDAYLNASETTTLSPSGSAVISTTTIATTPSKPTCDEKYANITVDYLYNKETKLFTAKLNVNENVECGNNTCTNNEVHNLTECKNASVSISHNSCTAPDKTLILDVPPGVEKFQLH

SEQ ID NO: 11108 - protein, 1145 aa, Homo Sapiens
MTMYLWLKLLAFGFAFLDTEVFVTGQSPTPSPTDAYLNASETTTLSPSGSAVISTTTIATTPSKPTCDEKYANITVDYLYNKETKLFTAKLNVNENVECGNNTCTNNEVHNLTECKNASVSISHNSCTAPDKTLILDVPPGVEKFQLHDCTQVEKADTTICLKWKNIETFTCDTQNITYRFQCGNMIFDNKEIKLENLEPEHEYKCDSEILYNNHKFTNASKIIKTDFGSPGEPQIIFCRSEAAHQGVITWNPPQRSFHNFTLCYIKETEKDCLNLDKNLIKYDLQNLKPYTKYVLSLHAYIIAKVQRNGSAAMCHFTTKSAPPSQVWNMTVSMTSDNSMHVKCRPPRDRNGPHERYHLEVEAGNTLVRNESHKNCDFRVKDLQYSTDYTFKAYFHNGDYPGEPFILHHSTSYNSKALIAFLAFLIIVTSIALLVVLYKIYDLHKKRSCNLDEQQELVERDDEKQLMNVEPIHADILLETYKRKIADEGRLFLAEFQSIPRVFSKFPIKEARKPFNQNKNRYVDILPYDYNRVELSEINGDAGSNYINASYIDGFKEPRKYIAAQGPRDETVDDFWRMIWEQKATVIVMVTRCEEGNRNKCAEYWPSMEEGTRAFGDVVVKINQHKRCPDYIIQKLNIVNKKEKATGREVTHIQFTSWPDHGVPEDPHLLLKLRRRVNAFSNFFSGPIVVHCSAGVGRTGTYIGIDAMLEGLEAENKVDVYGYVVKLRRQRCLMVQVEAQYILIHQALVEYNQFGETEVNLSELHPYLHNMKKRDPPSEPSPLEAEFQRLPSYRSWRTQHIGNQEENKSKNRNSNVIPYDYNRVPLKHELEMSKESEHDSDESSDDDSDSEEPSKYINASFIMSYWKPEVMIAAQGPLKETIGDFWQMIFQRKVKVIVMLTELKHGDQEICAQYWGEGKQTYGDIEVDLKDTDKSSTYTLRVFELRHSKRKDSRTVYQYQYTNWSVEQLPAEPKELISMIQVVKQKLPQKNSSEGNKHHKSTPLLIHCRDGSQQTGIFCALLNLLESAETEEVVDIFQVVKALRKARPGMVSTFEQYQFLYDVIASTYPAQNGQVKKNNHQEDKIEFDNEVDKVKQDANCVNPLGAPEKLPEAKEQAEGSEPTSGTEGPEHSVNGPASPALNQGS

SEQ ID NO: 11109 - protein, 87 aa, Homo Sapiens
MTMYLWLKLLAFGFAFLDTEVFVTGQSPTPSPTGHLQAEEQGSQSKSPNLKSREADSSAFSWWPKAREPLTNHWSKSKSPKAEELGV

SEQ ID NO: 11110 - protein, 151 aa, Homo Sapiens
MTMYLWLKLLAFGFAFLDTEVFVTGQSPTPSPTGHLQAEEQGSQSKSPNLKSREADSSAFSWWPKAREPLTNHWSVSSVQTPHLPTHADSQTPSAGTDTQTFSGSAANAKLNPTPGSNAISDAYLNASETTTLSPSGSAVISTTTIATTPS

SEQ ID NO: 11111 - protein, 36 aa, Homo Sapiens
MTMYLWLKLLAFGFAFLDTEVFVTGQSPTPSPTGKN

SEQ ID NO: 11112 - protein, 118 aa, Homo Sapiens
MTMYLWLKLLAFGFAFLDTEVFVTGQSPTPSPTGLTTAKMPSVPLSSDPLPTHTTAFSPASTFERENDFSETTTSLSPDNTSTQVSPDSLDNASAFNTTGVSSVQTPHLPTHADSQTP

SEQ ID NO: 11113 - protein, 753 aa, Homo Sapiens
MTMYLWLKLLAFGFAFLDTEVFVTGQSPTPSPTGLTTAKMPSVPLSSDPLPTHTTAFSPASTFERENDFSETTTSLSPDNTSTQVSPDSLDNASAFNTTGVSSVQTPHLPTHADSQTPSAGTDTQTFSGSAANAKLNPTPGSNAISDAYLNASETTTLSPSGSAVISTTTIATTPSKPTCDEKYANITVDYLYNKETKLFTAKLNVNENVECGNNTCTNNEVHNLTECKNASVSISHNSCTAPDKTLILDVPPGVEKFQLHDCTQVEKADTTICLKWKNIETFTCDTQNITYRFQCGNMIFDNKEIKLENLEPEHEYKCDSEILYNNHKFTNASKIIKTDFGSPGEPQIIFCRSEAAHQGVITWNPPQRSFHNFTLCYIKETEKDCLNLDKNLIKYDLQNLKPYTKYVLSLHAYIIAKVQRNGSAAMCHFTTKSAPPSQVWNMTVSMTSDNSMHVKCRPPRDRNGPHERYHLEVEAGNTLVRNESHKNCDFRVKDLQYSTDYTFKAYFHNGDYPGEPFILHHSTSYNSKALIAFLAFLIIVTSIALLVVLYKIYDLHKKRSCNLDEQQELVERDDEKQLMNVEPIHADILLETYKRKIADEGRLFLAEFQSIPRVFSKFPIKEARKPFNQNKNRYVDILPYDYNRVELSEINGDAGSNYINASYIDGFKEPRKYIAAQGPRDETVDDFWRMIWEQKATVIVMVTRCEEGNRNKCAEYWPSMEEGTRAFGDVVVKINQHKRCPDYIIQKLNIVN

SEQ ID NO: 11114 - protein, 1306 aa, Homo Sapiens
MTMYLWLKLLAFGFAFLDTEVFVTGQSPTPSPTGLTTAKMPSVPLSSDPLPTHTTAFSPASTFERENDFSETTTSLSPDNTSTQVSPDSLDNASAFNTTGVSSVQTPHLPTHADSQTPSAGTDTQTFSGSAANAKLNPTPGSNAISDVPGERSTASTFPTDPVSPLTTTLSLAHHSSAALPARTSNTTITANTSDAYLNASETTTLSPSGSAVISTTTIATTPSKPTCDEKYANITVDYLYNKETKLFTAKLNVNENVECGNNTCTNNEVHNLTECKNASVSISHNSCTAPDKTLILDVPPGVEKFQLHDCTQVEKADTTICLKWKNIETFTCDTQNITYRFQCGNMIFDNKEIKLENLEPEHEYKCDSEILYNNHKFTNASKIIKTDFGSPGEPQIIFCRSEAAHQGVITWNPPQRSFHNFTLCYIKETEKDCLNLDKNLIKYDLQNLKPYTKYVLSLHAYIIAKVQRNGSAAMCHFTTKSAPPSQVWNMTVSMTSDNSMHVKCRPPRDRNGPHERYHLEVEAGNTLVRNESHKNCDFRVKDLQYSTDYTFKAYFHNGDYPGEPFILHHSTSYNSKALIAFLAFLIIVTSIALLVVLYKIYDLHKKRSCNLDEQQELVERDDEKQLMNVEPIHADILLETYKRKIADEGRLFLAEFQSIPRVFSKFPIKEARKPFNQNKNRYVDILPYDYNRVELSEINGDAGSNYINASYIDGFKEPRKYIAAQGPRDETVDDFWRMIWEQKATVIVMVTRCEEGNRNKCAEYWPSMEEGTRAFGDVVVKINQHKRCPDYIIQKLNIVNKKEKATGREVTHIQFTSWPDHGVPEDPHLLLKLRRRVNAFSNFFSGPIVVHCSAGVGRTGTYIGIDAMLEGLEAENKVDVYGYVVKLRRQRCLMVQVEAQYILIHQALVEYNQFGETEVNLSELHPYLHNMKKRDPPSEPSPLEAEFQRLPSYRSWRTQHIGNQEENKSKNRNSNVIPYDYNRVPLKHELEMSKESEHDSDESSDDDSDSEEPSKYINASFIMSYWKPEVMIAAQGPLKETIGDFWQMIFQRKVKVIVMLTELKHGDQEICAQYWGEGKQTYGDIEVDLKDTDKSSTYTLRVFELRHSKRKDSRTVYQYQYTNWSVEQLPAEPKELISMIQVVKQKLPQKNSSEGNKHHKSTPLLIHCRDGSQQTGIFCALLNLLESAETEEVVDIFQVVKALRKARPGMVSTFEQYQFLYDVIASTYPAQNGQVKKNNHQEDKIEFDNEVDKVKQDANCVNPLGAPEKLPEAKEQAEGSEPTSGTEGPEHSVNGPASPALNQGS

SEQ ID NO: 11115 - protein, 161 aa, Homo Sapiens
MTMYLWLKLLAFGFAFLDTEVFVTGQSPTPSPTGVSSVQTPHLPTHADSQTPSAGTDTQTFSGSAANAKLNPTPGSNAISDAYLNASETTTLSPSGSAVISTTTIATTPSKPTCDEKYANITVDYLYNKETKLFTAKLNVNENVECGNNTCTNNEVHNLTE

SEQ ID NO: 11116 - protein, 600 aa, Homo Sapiens
MTMYLWLKLLAFGFAFLDTEVFVTGQSPTPSPTGVSSVQTPHLPTHADSQTPSAGTDTQTFSGSAANAKLNPTPGSNAISDAYLNASETTTLSPSGSAVISTTTIATTPSKPTCDEKYANITVDYLYNKETKLFTAKLNVNENVECGNNTCTNNEVHNLTECKNASVSISHNSCTAPDKTLILDVPPGVEKFQLHDCTQVEKADTTICLKWKNIETFTCDTQNITYRFQCGNMIFDNKEIKLENLEPEHEYKCDSEILYNNHKFTNASKIIKTDFGSPGEPQIIFCRSEAAHQGVITWNPPQRSFHNFTLCYIKETEKDCLNLDKNLIKYDLQNLKPYTKYVLSLHAYIIAKVQRNGSAAMCHFTTKSAPPSQVWNMTVSMTSDNSMHVKCRPPRDRNGPHERYHLEVEAGNTLVRNESHKNCDFRVKDLQYSTDYTFKAYFHNGDYPGEPFILHHSTSYNSKALIAFLAFLIIVTSIALLVVLYKIYDLHKKRSCNLDEQQELVERDDEKQLMNVEPIHADILLETYKRKIADEGRLFLAEFQSIPRVFSKFPIKEARKPFNQNKNRYVDILPYDYNRVELSEINGDAGSNYINASYID

SEQ ID NO: 11117 - protein, 735 aa, Homo Sapiens
MTMYLWLKLLAFGFAFLDTEVFVTGQSPTPSPTGVSSVQTPHLPTHADSQTPSAGTDTQTFSGSAANAKLNPTPGSNAISDVPGERSTASTFPTDPVSPLTTTLSLAHHSSAALPARTSNTTITANTSDAYLNASETTTLSPSGSAVISTTTIATTPSKPTCDEKYANITVDYLYNKETKLFTAKLNVNENVECGNNTCTNNEVHNLTECKNASVSISHNSCTAPDKTLILDVPPGVEKFQLHDCTQVEKADTTICLKWKNIETFTCDTQNITYRFQCGNMIFDNKEIKLENLEPEHEYKCDSEILYNNHKFTNASKIIKTDFGSPGEPQIIFCRSEAAHQGVITWNPPQRSFHNFTLCYIKETEKDCLNLDKNLIKYDLQNLKPYTKYVLSLHAYIIAKVQRNGSAAMCHFTTKSAPPSQVWNMTVSMTSDNSMHVKCRPPRDRNGPHERYHLEVEAGNTLVRNESHKNCDFRVKDLQYSTDYTFKAYFHNGDYPGEPFILHHSTSYNSKALIAFLAFLIIVTSIALLVVLYKIYDLHKKRSCNLDEQQELVERDDEKQLMNVEPIHADILLETYKRKIADEGRLFLAEFQSIPRVFSKFPIKEARKPFNQNKNRYVDILPYDYNRVELSEINGDAGSNYINASYIDGFKEPRKYIAAQGPRDETVDDFWRMIWEQKATVIVMVTRCEEGNRNKCAEYWPSMEEGTRAFGDVVVKINQHKRCPDYIIQKLNIVN

SEQ ID NO: 11118 - protein, 206 aa, Homo Sapiens
MALPCTLGLGMLLALPGALGSGGSAEDSVGSSSVTVVLLLLLLLLLATGLALAWRRLSRDSGGYYHPARLGAALWGRTRRLLWASPPGRWLQARAELGSTDNDLERQEDEQDTDYDHVADGGLQADPGEGEQQCGEASSPEQVPVRAEEARDSDTEGDLVLGSPGPASAGGSAEALLSDLHAFAGSAAWDDSARAAGGQGLHVTAL

SEQ ID NO: 11119 - protein, 93 aa, Homo Sapiens
MVHVARLLLLLLTFFLRTDAETPPRFTRTPVDQTGVSGGVASFICQATGDPRPKIVWNKKGKKVSNQRFEVIEFDDGSGSVLRIQPLRTPRDE

SEQ ID NO: 11120 - protein, 1496 aa, Homo Sapiens
MVHVARLLLLLLTFFLRTDAETPPRFTRTPVDQTGVSGGVASFICQATGDPRPKIVWNKKGKKVSNQRFEVIEFDDGSGSVLRIQPLRTPRDEAIYECVASNNVGEISVSTRLTVLREDQIPRGFPTIDMGPQLKVVERTRTATMLCAASGNPDPEITWFKDFLPVDTSNNNGRIKQLRSESIGALQIEQSEESDQGKYECVATNSAGTRYSAPANLYVRELREVRRVPPRFSIPPTNHEIMPGGSVNITCVAVGSPMPYVKWMLGAEDLTPEDDMPIGRNVLELNDVRQSANYTCVAMSTLGVIEAIAQITVKALPKPPGTPVVTESTATSITLTWDSGNPEPVSYYIIQHKPKNSEELYKEIDGVATTRYSVAGLSPYSDYEFRVVAVNNIGRGPPSEPVLTQTSEQAPSSAPRDVQARMLSSTTILVQWKEPEEPNGQIQGYRVYYTMDPTQHVNNWMKHNVADSQITTIGNLVPQKTYSVKVLAFTSIGDGPLSSDIQVITQTGVPGQPLNFKAEPESETSILLSWTPPRSDTIANYELVYKDGEHGEEQRITIEPGTSYRLQGLKPNSLYYFRLAARSPQGLGASTAEISARTMQSTVFAKNFHVKAVMKTSVLLSWEIPENYNSAMPFKILYDDGKMVEEVDGRATQKLIVNLKPEKSYSFVLTNRGNSAGGLQHRVTAKTAPDVLRTKPAFIGKTNLDGMITVQLPEVPANENIKGYYIIIVPLKKSRGKFIKPWESPDEMELDELLKEISRKRRSIRYGREVELKPYIAAHFDVLPTEFTLGDDKHYGGFTNKQLQSGQEYVFFVLAVMEHAESKMYATSPYSDPVVSMDLDPQPITDEEEGLIWVVGPVLAVVFIICIVIAILLYKRKRAESDSRKSSIPNNKEIPSHHPTDPVELRRLNFQTPGMASHPPIPILELADHIERLKANDNLKFSQEYESIDPGQQFTWEHSNLEVNKPKNRYANVIAYDHSRVLLSAIEGIPGSDYVNANYIDGYRKQNAYIATQGSLPETFGDFWRMIWEQRSATVVMMTKLEERSRVKCDQYWPSRGTETHGLVQVTLLDTVELATYCVRTFALYKNGSSEKREVRQFQFTAWPDHGVPEHPTPFLAFLRRVKTCNPPDAGPMVVHCSAGVGRTGCFIVIDAMLERIKHEKTVDIYGHVTLMRAQRNYMVQTEDQYIFIHDALLEAVTCGNTEVPARNLYAYIQKLTQIETGENVTGMELEFKRLASSKAHTSRFISANLPCNKFKNRLVNIMPYESTRVCLQPIRGVEGSDYINASFIDGYRQQKAYIATQGPLAETTEDFWRMLWEHNSTIVVMLTKLREMGREKCHQYWPAERSARYQYFVVDPMAEYNMPQYILREFKVTDARDGQSRTVRQFQFTDWPEQGVPKSGEGFIDFIGQVHKTKEQFGQDGPISVHCSAGVGRTGVFITLSIVLERMRYEGVVDIFQTVKMLRTQRPAMVQTEDQYQFSYRAALEYLGSFDHYAT

SEQ ID NO: 11121 - protein, 1505 aa, Homo Sapiens
MVHVARLLLLLLTFFLRTDAETPPRFTRTPVDQTGVSGGVASFICQATGDPRPKIVWNKKGKKVSNQRFEVIEFDDGSGSVLRIQPLRTPRDEAIYECVASNNVGEISVSTRLTVLREDQIPRGFPTIDMGPQLKVVERTRTATMLCAASGNPDPEITWFKDFLPVDTSNNNGRIKQLRSESIGALQIEQSEESDQGKYECVATNSAGTRYSAPANLYVRVRRVPPRFSIPPTNHEIMPGGSVNITCVAVGSPMPYVKWMLGAEDLTPEDDMPIGRNVLELNDVRQSANYTCVAMSTLGVIEAIAQITVKALPKPPGTPVVTESTATSITLTWDSGNPEPVSYYIIQHKPKNSEELYKEIDGVATTRYSVAGLSPYSDYEFRVVAVNNIGRGPPSEPVLTQTSEQAPSSAPRDVQARMLSSTTILVQWKEPEEPNGQIQGYRVYYTMDPTQHVNNWMKHNVADSQITTIGNLVPQKTYSVKVLAFTSIGDGPLSSDIQVITQTGVPGQPLNFKAEPESETSILLSWTPPRSDTIANYELVYKDGEHGEEQRITIEPGTSYRLQGLKPNSLYYFRLAARSPQGLGASTAEISARTMQSMFAKNFHVKAVMKTSVLLSWEIPENYNSAMPFKILYDDGKMVEEVDGRATQKLIVNLKPEKSYSFVLTNRGNSAGGLQHRVTAKTAPDVLRTKPAFIGKTNLDGMITVQLPEVPANENIKGYYIIIVPLKKSRGKFIKPWESPDEMELDELLKEISRKRRSIRYGREVELKPYIAAHFDVLPTEFTLGDDKHYGGFTNKQLQSGQEYVFFVLAVMEHAESKMYATSPYSDPVVSMDLDPQPITDEEEGLIWVVGPVLAVVFIICIVIAILLYKRKRAESDSRKSSIPNNKEIPSHHPTDPVELRRLNFQTPGSDDSGYPGNLHSSSMASHPPIPILELADHIERLKANDNLKFSQEYESIDPGQQFTWEHSNLEVNKPKNRYANVIAYDHSRVLLSAIEGIPGSDYVNANYIDGYRKQNAYIATQGSLPETFGDFWRMIWEQRSATVVMMTKLEERSRVKCDQYWPSRGTETHGLVQVTLLDTVELATYCVRTFALYKNGSSEKREVRQFQFTAWPDHGVPEHPTPFLAFLRRVKTCNPPDAGPMVVHCSAGVGRTGCFIVIDAMLERIKHEKTVDIYGHVTLMRAQRNYMVQTEDQYIFIHDALLEAVTCGNTEVPARNLYAYIQKLTQIETGENVTGMELEFKRLASSKAHTSRFISANLPCNKFKNRLVNIMPYESTRVCLQPIRGVEGSDYINASFIDGYRQQKAYIATQGPLAETTEDFWRMLWEHNSTIVVMLTKLREMGREKCHQYWPAERSARYQYFVVDPMAEYNMPQYILREFKVTDARDGQSRTVRQFQFTDWPEQGVPKSGEGFIDFIGQVHKTKEQFGQDGPISVHCSAGVGRTGVFITLSIVLERMRYEGVVDIFQTVKMLRTQRPAMVQTEDQYQFSYRAALEYLGSFDHYAT

SEQ ID NO: 11122 - protein, 1506 aa, Homo Sapiens
MVHVARLLLLLLTFFLRTDAETPPRFTRTPVDQTGVSGGVASFICQATGDPRPKIVWNKKGKKVSNQRFEVIEFDDGSGSVLRIQPLRTPRDEAIYECVASNNVGEISVSTRLTVLREDQIPRGFPTIDMGPQLKVVERTRTATMLCAASGNPDPEITWFKDFLPVDTSNNNGRIKQLRSESIGGTPIRGALQIEQSEESDQGKYECVATNSAGTRYSAPANLYVRELREVRRVPPRFSIPPTNHEIMPGGSVNITCVAVGSPMPYVKWMLGAEDLTPEDDMPIGRNVLELNDVRQSANYTCVAMSTLGVIEAIAQITVKALPKPPGTPVVTESTATSITLTWDSGNPEPVSYYIIQHKPKNSEELYKEIDGVATTRYSVAGLSPYSDYEFRVVAVNNIGRGPPSEPVLTQTSEQAPSSAPRDVQARMLSSTTILVQWKEPEEPNGQIQGYRVYYTMDPTQHVNNWMKHNVADSQITTIGNLVPQKTYSVKVLAFTSIGDGPLSSDIQVITQTGVPGQPLNFKAEPESETSILLSWTPPRSDTIANYELVYKDGEHGEEQRITIEPGTSYRLQGLKPNSLYYFRLAARSPQGLGASTAEISARTMQSMFAKNFHVKAVMKTSVLLSWEIPENYNSAMPFKILYDDGKMVEEVDGRATQKLIVNLKPEKSYSFVLTNRGNSAGGLQHRVTAKTAPDVLRTKPAFIGKTNLDGMITVQLPEVPANENIKGYYIIIVPLKKSRGKFIKPWESPDEMELDELLKEISRKRRSIRYGREVELKPYIAAHFDVLPTEFTLGDDKHYGGFTNKQLQSGQEYVFFVLAVMEHAESKMYATSPYSDPVVSMDLDPQPITDEEEGLIWVVGPVLAVVFIICIVIAILLYKSSKPDRKRAESDSRKSSIPNNKEIPSHHPTDPVELRRLNFQTPGMASHPPIPILELADHIERLKANDNLKFSQEYESIDPGQQFTWEHSNLEVNKPKNRYANVIAYDHSRVLLSAIEGIPGSDYVNANYIDGYRKQNAYIATQGSLPETFGDFWRMIWEQRSATVVMMTKLEERSRVKCDQYWPSRGTETHGLVQVTLLDTVELATYCVRTFALYKNGSSEKREVRQFQFTAWPDHGVPEHPTPFLAFLRRVKTCNPPDAGPMVVHCSAGVGRTGCFIVIDAMLERIKHEKTVDIYGHVTLMRAQRNYMVQTEDQYIFIHDALLEAVTCGNTEVPARNLYAYIQKLTQIETGENVTGMELEFKRLASSKAHTSRFISANLPCNKFKNRLVNIMPYESTRVCLQPIRGVEGSDYINASFIDGYRQQKAYIATQGPLAETTEDFWRMLWEHNSTIVVMLTKLREMGREKCHQYWPAERSARYQYFVVDPMAEYNMPQYILREFKVTDARDGQSRTVRQFQFTDWPEQGVPKSGEGFIDFIGQVHKTKEQFGQDGPISVHCSAGVGRTGVFITLSIVLERMRYEGVVDIFQTVKMLRTQRPAMVQTEDQYQFSYRAALEYLGSFDHYAT

SEQ ID NO: 11123 - protein, 1912 aa, Homo Sapiens
MVHVARLLLLLLTFFLRTDAETPPRFTRTPVDQTGVSGGVASFICQATGDPRPKIVWNKKGKKVSNQRFEVIEFDDGSGSVLRIQPLRTPRDEAIYECVASNNVGEISVSTRLTVLREDQIPRGFPTIDMGPQLKVVERTRTATMLCAASGNPDPEITWFKDFLPVDTSNNNGRIKQLRSESIGGTPIRGALQIEQSEESDQGKYECVATNSAGTRYSAPANLYVRELREVRRVPPRFSIPPTNHEIMPGGSVNITCVAVGSPMPYVKWMLGAEDLTPEDDMPIGRNVLELNDVRQSANYTCVAMSTLGVIEAIAQITVKALPKPPGTPVVTESTATSITLTWDSGNPEPVSYYIIQHKPKNSEELYKEIDGVATTRYSVAGLSPYSDYEFRVVAVNNIGRGPPSEPVLTQTSEQAPSSAPRDVQARMLSSTTILVQWKEPEEPNGQIQGYRVYYTMDPTQHVNNWMKHNVADSQITTIGNLVPQKTYSVKVLAFTSIGDGPLSSDIQVITQTGVPGQPLNFKAEPESETSILLSWTPPRSDTIANYELVYKDGEHGEEQRITIEPGTSYRLQGLKPNSLYYFRLAARSPQGLGASTAEISARTMQSKPSAPPQDISCTSPSSTSILVSWQPPPVEKQNGIITEYSIKYTAVDGEDDKPHEILGIPSDTTKYLLEQLEKWTEYRITVTAHTDVGPGPESLSVLIRTNEDVPSGPPRKVEVEAVNSTSVKVSWRSPVPNKQHGQIRGYQVHYVRMENGEPKGQPMLKDVMLADAQWEFDDTTEHDMIISGLQPETSYSLTVTAYTTKGDGARSKPKLVSTTGAVPGKPRLVINHTQMNTALIQWHPPVDTFGPLQGYRLKFGRKDMEPLTTLEFSEKEDHFTATDIHKGASYVFRLSARNKVGFGEEMVKEISIPEEVPTGFPQNLHSEGTTSTSVQLSWQPPVLAERNGIITKYTLLYRDINIPLLPMEQLIVPADTTMTLTGLKPDTTYDVKVRAHTSKGPGPYSPSVQFRTLPVDQVFAKNFHVKAVMKTSVLLSWEIPENYNSAMPFKILYDDGKMVEEVDGRATQKLIVNLKPEKSYSFVLTNRGNSAGGLQHRVTAKTAPDVLRTKPAFIGKTNLDGMITVQLPEVPANENIKGYYIIIVPLKKSRGKFIKPWESPDEMELDELLKEISRKRRSIRYGREVELKPYIAAHFDVLPTEFTLGDDKHYGGFTNKQLQSGQEYVFFVLAVMEHAESKMYATSPYSDPVVSMDLDPQPITDEEEGLIWVVGPVLAVVFIICIVIAILLYKRKRAESDSRKSSIPNNKEIPSHHPTDPVELRRLNFQTPGMASHPPIPILELADHIERLKANDNLKFSQEYESIDPGQQFTWEHSNLEVNKPKNRYANVIAYDHSRVLLSAIEGIPGSDYVNANYIDGYRKQNAYIATQGSLPETFGDFWRMIWEQRSATVVMMTKLEERSRVKCDQYWPSRGTETHGLVQVTLLDTVELATYCVRTFALYKNGSSEKREVRQFQFTAWPDHGVPEHPTPFLAFLRRVKTCNPPDAGPMVVHCSAGVGRTGCFIVIDAMLERIKHEKTVDIYGHVTLMRAQRNYMVQTEDQYIFIHDALLEAVTCGNTEVPARNLYAYIQKLTQIETGENVTGMELEFKRLASSKAHTSRFISANLPCNKFKNRLVNIMPYESTRVCLQPIRGVEGSDYINASFIDGYRQQKAYIATQGPLAETTEDFWRMLWEHNSTIVVMLTKLREMGREKCHQYWPAERSARYQYFVVDPMAEYNMPQYILREFKVTDARDGQSRTVRQFQFTDWPEQGVPKSGEGFIDFIGQVHKTKEQFGQDGPISVHCSAGVGRTGVFITLSIVLERMRYEGVVDIFQTVKMLRTQRPAMVQTEDQYQFSYRAALEYLGSFDHYAT

SEQ ID NO: 11124 - protein, 1912 aa, Homo Sapiens; identical to SEQ ID NO: 11123

SEQ ID NO: 11125 - protein, 1912 aa, Homo Sapiens; identical to SEQ ID NO: 11123

SEQ ID NO: 11126 - protein, 1505 aa, Homo Sapiens
MVHVARLLLLLLTFFLRTDAETPPRFTRTPVDQTGVSGGVASFICQATGDPRPKIVWNKKGKKVSNQRFEVIEFDDGSGSVLRIQPLRTPRDEAIYECVASNNVGEISVSTRLTVLREDQIPRGFPTIDMGPQLKVVERTRTATMLCAASGNPDPEITWFKDFLPVDTSNNNGRIKQLRSESIGGTPIRGALQIEQSEESDQGKYECVATNSAGTRYSAPANLYVRELREVRRVPPRFSIPPTNHEIMPGGSVNITCVAVGSPMPYVKWMLGAEDLTPEDDMPIGRNVLELNDVRQSANYTCVAMSTLGVIEAIAQITVKALPKPPGTPVVTESTATSITLTWDSGNPEPVSYYIIQHKPKNSEELYKEIDGVATTRYSVAGLSPYSDYEFRVVAVNNIGRGPPSEPVLTQTSEQAPSSAPRDVQARMLSSTTILVQWKEPEEPNGQIQGYRVYYTMDPTQHVNNWMKHNVADSQITTIGNLVPQKTYSVKVLAFTSIGDGPLSSDIQVITQTGVPGQPLNFKAEPESETSILLSWTPPRSDTIANYELVYKDGEHGEEQRITIEPGTSYRLQGLKPNSLYYFRLAARSPQGLGASTAEISARTMQSMFAKNFHVKAVMKTSVLLSWEIPENYNSAMPFKILYDDGKMVEEVDGRATQKLIVNLKPEKSYSFVLTNRGNSAGGLQHRVTAKTAPDVLRTKPAFIGKTNLDGMITVQLPEVPANENIKGYYIIIVPLKKSRGKFIKPWESPDEMELDELLKEISRKRRSIRYGREVELKPYIAAHFDVLPTEFTLGDDKHYGGFTNKQLQSGQEYVFFVLAVMEHAESKMYATSPYSDPVVSMDLDPQPITDEEEGLIWVVGPVLAVVFIICIVIAILLYKSKPDRKRAESDSRKSSIPNNKEIPSHHPTDPVELRRLNFQTPGMASHPPIPILELADHIERLKANDNLKFSQEYESIDPGQQFTWEHSNLEVNKPKNRYANVIAYDHSRVLLSAIEGIPGSDYVNANYIDGYRKQNAYIATQGSLPETFGDFWRMIWEQRSATVVMMTKLEERSRVKCDQYWPSRGTETHGLVQVTLLDTVELATYCVRTFALYKNGSSEKREVRQFQFTAWPDHGVPEHPTPFLAFLRRVKTCNPPDAGPMVVHCSAGVGRTGCFIVIDAMLERIKHEKTVDIYGHVTLMRAQRNYMVQTEDQYIFIHDALLEAVTCGNTEVPARNLYAYIQKLTQIETGENVTGMELEFKRLASSKAHTSRFISANLPCNKFKNRLVNIMPYESTRVCLQPIRGVEGSDYINASFIDGYRQQKAYIATQGPLAETTEDFWRMLWEHNSTIVVMLTKLREMGREKCHQYWPAERSARYQYFVVDPMAEYNMPQYILREFKVTDARDGQSRTVRQFQFTDWPEQGVPKSGEGFIDFIGQVHKTKEQFGQDGPISVHCSAGVGRTGVFITLSIVLERMRYEGVVDIFQTVKMLRTQRPAMVQTEDQYQFSYRAALEYLGSFDHYAT

SEQ ID NO: 11127 - protein, 1502 aa, Homo Sapiens
MVHVARLLLLLLTFFLRTDAETPPRFTRTPVDQTGVSGGVASFICQATGDPRPKIVWNKKGKKVSNQRFEVIEFDDGSGSVLRIQPLRTPRDEAIYECVASNNVGEISVSTRLTVLREDQIPRGFPTIDMGPQLKVVERTRTATMLCAASGNPDPEITWFKDFLPVDTSNNNGRIKQLRSGGTPIRGALQIEQSEESDQGKYECVATNSAGTRYSAPANLYVRELREVRRVPPRFSIPPTNHEIMPGGSVNITCVAVGSPMPYVKWMLGAEDLTPEDDMPIGRNVLELNDVRQSANYTCVAMSTLGVIEAIAQITVKALPKPPGTPVVTESTATSITLTWDSGNPEPVSYYIIQHKPKNSEELYKEIDGVATTRYSVAGLSPYSDYEFRVVAVNNIGRGPPSEPVLTQTSEQAPSSAPRDVQARMLSSTTILVQWKEPEEPNGQIQGYRVYYTMDPTQHVNNWMKHNVADSQITTIGNLVPQKTYSVKVLAFTSIGDGPLSSDIQVITQTGVPGQPLNFKAEPESETSILLSWTPPRSDTIANYELVYKDGEHGEEQRITIEPGTSYRLQGLKPNSLYYFRLAARSPQGLGASTAEISARTMQSMFAKNFHVKAVMKTSVLLSWEIPENYNSAMPFKILYDDGKMVEEVDGRATQKLIVNLKPEKSYSFVLTNRGNSAGGLQHRVTAKTAPDVLRTKPAFIGKTNLDGMITVQLPEVPANENIKGYYIIIVPLKKSRGKFIKPWESPDEMELDELLKEISRKRRSIRYGREVELKPYIAAHFDVLPTEFTLGDDKHYGGFTNKQLQSGQEYVFFVLAVMEHAESKMYATSPYSDPVVSMDLDPQPITDEEEGLIWVVGPVLAVVFIICIVIAILLYKSKPDRKRAESDSRKSSIPNNKEIPSHHPTDPVELRRLNFQTPGMASHPPIPILELADHIERLKANDNLKFSQEYESIDPGQQFTWEHSNLEVNKPKNRYANVIAYDHSRVLLSAIEGIPGSDYVNANYIDGYRKQNAYIATQGSLPETFGDFWRMIWEQRSATVVMMTKLEERSRVKCDQYWPSRGTETHGLVQVTLLDTVELATYCVRTFALYKNGSSEKREVRQFQFTAWPDHGVPEHPTPFLAFLRRVKTCNPPDAGPMVVHCSAGVGRTGCFIVIDAMLERIKHEKTVDIYGHVTLMRAQRNYMVQTEDQYIFIHDALLEAVTCGNTEVPARNLYAYIQKLTQIETGENVTGMELEFKRLASSKAHTSRFISANLPCNKFKNRLVNIMPYESTRVCLQPIRGVEGSDYINASFIDGYRQQKAYIATQGPLAETTEDFWRMLWEHNSTIVVMLTKLREMGREKCHQYWPAERSARYQYFVVDPMAEYNMPQYILREFKVTDARDGQSRTVRQFQFTDWPEQGVPKSGEGFIDFIGQVHKTKEQFGQDGPISVHCSAGVGRTGVFITLSIVLERMRYEGVVDIFQTVKMLRTQRPAMVQTEDQYQFSYRAALEYLGSFDHYAT

SEQ ID NO: 11128 - protein, 202 aa, Homo Sapiens
MVHVARLLLLLLTFFLRTDAETPPRFTRTPVDQTGVSGGVASFICQATGDPRPKIVWNKKGKKVSNQRFEVIEFDDGSGSVLRIQPLRTPRDEAIYECVASNNVGEISVSTRLTVLREDQIPRGFPTIDMGPQLKVVERTRTATMLCAASGNPDPEITWFKDFLPVDTSNNNGRIKQLRSGTDFSPSSLSLLLNGWSMFVMS

SEQ ID NO: 11129 - protein, 1505 aa, Homo Sapiens [sequence omitted]

SEQ ID NO: 11130 - protein, 297 aa, Homo Sapiens
  misc_feature (1)..(1): Xaa can be any naturally occurring amino acid
XAGGLQHRVTAKTAPDVLRTKPAFIGKTNLDGMITVQLPEVPANENIKGYYIIIVPLKKSRGKFIKPWESPDEMELDELLKEISRKRRSIRYGREVELKPYIAAHFDVLPTEFTLGDDKHYGGFTNKQLQSGQEYVFFVLAVMEHAESKMYATSPYSDPVVSMDLDPQPITDEEEGLIWVVGPVLAVVFIICIVIAILLYKSKPDRKRAESDSRKSSIPNNKEIPSHHPTDPVELRRLNFQTPALSSNSVPYASLIGSVSSLSSQTTTQSIYDNNSLPRSARKGMASHPPIPILELA

SEQ ID NO: 11131 - protein, 262 aa, Homo Sapiens
MAPEPAPGRTMVPLVPALVMLGLVAGAHGDSKPVFIKVPEDQTGLSGGVASFVCQATGEPKPRITWMKKGKKVSSQRFEVIEFDDGAGSVLRIQPLRVQRDEAIYECTATNSLGEINTSAKLSVLEEEQLPPGFPSIDMGPQLKVVEKARTATMLCAAGGNPDPEISWFKDFLPVDPATSNGRIKQLRSGALQIESSEESDQGKYECVATNSAGTRYSAPANLYVRGLAAWARSPMGIWSHPIRLLGVCACVCAHTGTLICV

SEQ ID NO: 11132 - protein, 262 aa, Homo Sapiens; identical to SEQ ID NO: 11131

SEQ ID NO: 11133 - protein, 1907 aa, Homo Sapiens
MAPEPAPGRTMVPLVPALVMLGLVAGAHGDSKPVFIKVPEDQTGLSGGVASFVCQATGEPKPRITWMKKGKKVSSQRFEVIEFDDGAGSVLRIQPLRVQRDEAIYECTATNSLGEINTSAKLSVLEEEQLPPGFPSIDMGPQLKVVEKARTATMLCAAGGNPDPEISWFKDFLPVDPATSNGRIKQLRSGALQIESSEESDQGKYECVATNSAGTRYSAPANLYVRVRRVAPRFSIPPSSQEVMPGGSVNLTCVAVGAPMPYVKWMMGAEELTKEDEMPVGRNVLELSNVVRSANYTCVAISSLGMIEATAQVTVKALPKPPIDLVVTETTATSVTLTWDSGNSEPVTYYGIQYRAAGTEGPFQEVDGVATTRYSIGGLSPFSEYAFRVLAVNSIGRGPPSEAVRARTGEQAPSSPPRRVQARMLSASTMLVQWEPPEEPNGLVRGYRVYYTPDSRRPPNAWHKHNTDAGLLTTVGSLLPGITYSLRVLAFTAVGDGPPSPTIQVKTQQGVPAQPADFQAEVESDTRIQLSWLLPPQERIIMYELVYWAAEDEDQQHKVTFDPTSSYTLEDLKPDTLYRFQLAARSDMGVGVFTPTIEARTAQSTPSAPPQKVMCVSMGSTTVRVSWVPPPADSRNGVITQYSVAYEAVDGEDRGRHVVDGISREHSSWDLVGLEKWTEYRVWVRAHTDVGPGPESSPVLVRTDEDVPSGPPRKVEVEPLNSTAVHVYWKLPVPSKQHGQIRGYQVTYVRLENGEPRGLPIIQDVMLAEAQWRPEESEDYETTISGLTPETTYSVTVAAYTTKGDGARSKPKIVTTTGAVPGRPTMMISTTAMNTALLQWHPPKELPGELLGYRLQYCRADEARPNTIDFGKDDQHFTVTGLHKGTTYIFRLAAKNRAGLGEEFEKEIRTPEDLPSGFPQNLHVTGLTTSTTELAWDPPVLAERNGRIISYTVVFRDINSQQELQNITTDTRFTLTGLKPDTTYDIKVRAWTSKGSGPLSPSIQSRTMPVEQVFAKNFRVAAAMKTSVLLSWEVPDSYKSAVPFKILYNGQSVEVDGHSMRKLIADLQPNTEYSFVLMNRGSSAGGLQHLVSIRTAPDLLPHKPLPASAYIEDGRFDLSMPHVQDPSLVRWFYIVVVPIDRVGGSMLTPRWSTPEELELDELLEAIEQGGEEQRRRRRQAERLKPYVAAQLDVLPETFTLGDKKNYRGFYNRPLSPDLSYQCFVLASLKEPMDQKRYASSPYSDEIVVQVTPAQQQEEPEMLWVTGPVLAVILIILIVIAILLFKRKRTHSPSSKDEQSIGLKDSLLAHSSDPVEMRRLNYQTPGMRDHPPIPITDLADNIERLKANDGLKFSQEYESIDPGQQFTWENSNLEVNKPKNRYANVIAYDHSRVILTSIDGVPGSDYINANYIDGYRKQNAYIATQGPLPETMGDFWRMVWEQRTATVVMMTRLEEKSRVKCDQYWPARGTETCGLIQVTLLDTVELATYTVRTFALHKSGSSEKRELRQFQFMAWPDHGVPEYPTPILAFLRRVKACNPLDAGPMVVHCSAGVGRTGCFIVIDAMLERMKHEKTVDIYGHVTCMRSQRNYMVQTEDQYVFIHEALLEAATCGHTEVPARNLYAHIQKLGQVPPGESVTAMELEFKLLASSKAHTSRFISANLPCNKFKNRLVNIMPYELTRVCLQPIRGVEGSDYINASFLDGYRQQKAYIATQGPLAESTEDFWRMLWEHNSTIIVMLTKLREMGREKCHQYWPAERSARYQYFVVDPMAEYNMPQYILREFKVTDARDGQSRTIRQFQFTDWPEQGVPKTGEGFIDFIGQVHKTKEQFGQDGPITVHCSAGVGRTGVFITLSIVLERMRYEGVVDMFQTVKTLRTQRPAMVQTEDQYQLCYRAALEYLGSFDHYAT

SEQ ID NO: 11134 - protein, 1898 aa, Homo Sapiens
MAPEPAPGRTMVPLVPALVMLGLVAGAHGDSKPVFIKVPEDQTGLSGGVASFVCQATGEPKPRITWMKKGKKVSSQRFEVIEFDDGAGSVLRIQPLRVQRDEAIYECTATNSLGEINTSAKLSVLEEEQLPPGFPSIDMGPQLKVVEKARTATMLCAAGGNPDPEISWFKDFLPVDPATSNGRIKQLRSGALQIESSEESDQGKYECVATNSAGTRYSAPANLYVRVRRVAPRFSIPPSSQEVMPGGSVNLTCVAVGAPMPYVKWMMGAEELTKEDEMPVGRNVLELSNVVRSANYTCVAISSLGMIEATAQVTVKALPKPPIDLVVTETTATSVTLTWDSGNSEPVTYYGIQYRAAGTEGPFQEVDGVATTRYSIGGLSPFSEYAFRVLAVNSIGRGPPSEAVRARTGEQAPSSPPRRVQARMLSASTMLVQWEPPEEPNGLVRGYRVYYTPDSRRPPNAWHKHNTDAGLLTTVGSLLPGITYSLRVLAFTAVGDGPPSPTIQVKTQQGVPAQPADFQAEVESDTRIQLSWLLPPQERIIMYELVYWAAEDEDQQHKVTFDPTSSYTLEDLKPDTLYRFQLAARSDMGVGVFTPTIEARTAQSTPSAPPQKVMCVSMGSTTVRVSWVPPPADSRNGVITQYSVAYEAVDGEDRGRHVVDGISREHSSWDLVGLEKWTEYRVWVRAHTDVGPGPESSPVLVRTDEDVPSGPPRKVEVEPLNSTAVHVYWKLPVPSKQHGQIRGYQVTYVRLENGEPRGLPIIQDVMLAEAQETTISGLTPETTYSVTVAAYTTKGDGARSKPKIVTTTGAVPGRPTMMISTTAMNTALLQWHPPKELPGELLGYRLQYCRADEARPNTIDFGKDDQHFTVTGLHKGTTYIFRLAAKNRAGLGEEFEKEIRTPEDLPSGFPQNLHVTGLTTSTTELAWDPPVLAERNGRIISYTVVFRDINSQQELQNITTDTRFTLTGLKPDTTYDIKVRAWTSKGSGPLSPSIQSRTMPVEQVFAKNFRVAAAMKTSVLLSWEVPDSYKSAVPFKILYNGQSVEVDGHSMRKLIADLQPNTEYSFVLMNRGSSAGGLQHLVSIRTAPDLLPHKPLPASAYIEDGRFDLSMPHVQDPSLVRWFYIVVVPIDRVGGSMLTPRWSTPEELELDELLEAIEQGGEEQRRRRRQAERLKPYVAAQLDVLPETFTLGDKKNYRGFYNRPLSPDLSYQCFVLASLKEPMDQKRYASSPYSDEIVVQVTPAQQQEEPEMLWVTGPVLAVILIILIVIAILLFKRKRTHSPSSKDEQSIGLKDSLLAHSSDPVEMRRLNYQTPGMRDHPPIPITDLADNIERLKANDGLKFSQEYESIDPGQQFTWENSNLEVNKPKNRYANVIAYDHSRVILTSIDGVPGSDYINANYIDGYRKQNAYIATQGPLPETMGDFWRMVWEQRTATVVMMTRLEEKSRVKCDQYWPARGTETCGLIQVTLLDTVELATYTVRTFALHKSGSSEKRELRQFQFMAWPDHGVPEYPTPILAFLRRVKACNPLDAGPMVVHCSAGVGRTGCFIVIDAMLERMKHEKTVDIYGHVTCMRSQRNYMVQTEDQYVFIHEALLEAATCGHTEVPARNLYAHIQKLGQVPPGESVTAMELEFKLLASSKAHTSRFISANLPCNKFKNRLVNIMPYELTRVCLQPIRGVEGSDYINASFLDGYRQQKAYIATQGPLAESTEDFWRMLWEHNSTIIVMLTKLREMGREKCHQYWPAERSARYQYFVVDPMAEYNMPQYILREFKVTDARDGQSRTIRQFQFTDWPEQGVPKTGEGFIDFIGQVHKTKEQFGQDGPITVHCSAGVGRTGVFITLSIVLERMRYEGVVDMFQTVKTLRTQRPAMVQTEDQYQLCYRAALEYLGSFDHYAT

SEQ ID NO: 11135 - protein, 979 aa, Homo Sapiens
TYVRLENGEPRGLPIIQDVMLAEAQWRPEESEDYETTISGLTPETTYSVTVAAYTTKGDGARSKPKIVTTTGAVFAKNFRVAAAMKTSVLLSWEVPDSYKSAVPFKILYNGQSVEVDGHSMRKLIADLQPNTEYSFVLMNRGSSAGGLQHLVSIRTAPDLLPHKPLPASAYIEDGRFDLSMPHVQDPSLVRWFYIVVVPIDRVGGSMLTPRWSTPEELELDELLEAIEQGGEEQRRRRRQAERLKPYVAAQLDVLPETFTLGDKKNYRGFYNRPLSPDLSYQCFVLASLKEPMDQKRYASSPYSDEIVVQVTPAQQQEEPEMLWVTGPVLAVILIILIVIAILLFKRKRTHSPSSKDEQSIGLKDSLLAHSSDPVEMRRLNYQTPGSSVPSCPNTSSMRDHPPIPITDLADNIERLKANDGLKFSQEYESIDPGQQFTWENSNLEVNKPKNRYANVIAYDHSRVILTSIDGVPGSDYINANYIDGYRKQNAYIATQGPLPETMGDFWRMVWEQRTATVVMMTRLEEKSRVKCDQYWPARGTETCGLIQVTLLDTVELATYTVRTFALHKSGSSEKRELRQFQFMAWPDHGVPEYPTPILAFLRRVKACNPLDAGPMVVHCSAGVGRTGCFIVIDAMLERMKHEKTVDIYGHVTCMRSQRNYMVQTEDQYVFIHEALLEAATCGHTEVPARNLYAHIQKLGQVPPGESVTAMELEFKLLASSKAHTSRFISANLPCNKFKNRLVNIMPYELTRVCLQPIRGVEGSDYINASFLDGYRQQKAYIATQGPLAESTEDFWRMLWEHNSTIIVMLTKLREMGREKCHQYWPAERSARYQYFVVDPMAEYNMPQYILREFKVTDARDGQSRTIRQFQFTDWPEQGVPKTGEGFIDFIGQVHKTKEQFGQDGPITVHCSAGVGRTGVFITLSIVLERMRYEGVVDMFQTVKTLRTQRPAMVQTEDQYQLCYRAALEYLGSFDHYAT

SEQ ID NO: 11136 - protein, 1553 aa, Homo Sapiens
  misc_feature (1)..(1): Xaa can be any naturally occurring amino acid
XEPVTYYGIQYRAAGTEGPFQEVDGVATTRYSIGGLSPFSEYAFRVLAVNSIGRGPPSEAVRARTGEQAPSSPPRRVQARMLSASTMLVQWEPPEEPNGLVRGYRVYYTPDSRRPPNAWHKHNTDAGLLTTVGSLLPGITYSLRVLAFTAVGDGPPSPTIQVKTQQGVPAQPADFQAEVESDTRIQLSWLLPPQERIIMYELVYWAAEDEDQQHKVTFDPTSSYTLEDLKPDTLYRFQLAARSDMGVGVFTPTIEARTAQSTPSAPPQKVMCVSMGSTTVRVSWVPPPADSRNGVITQYSVAYEAVDGEDRGRHVVDGISREHSSWDLVGLEKWTEYRVWVRAHTDVGPGPESSPVLVRTDEDVPSGPPRKVEVEPLNSTAVHVYWKLPVPSKQHGQIRGYQVTYVRLENGEPRGLPIIQDVMLAEAQETTISGLTPETTYSVTVAAYTTKGDGARSKPKIVTTTVPGRPTMMISTTAMNTALLQWHPPKELPGELLGYRLQYCRADEARPNTIDFGKDDQHFTVTGLHKGTTYIFRLAAKNRAGLGEEFEKEIRTPEDLPSGFPQNLHVTGLTTSTTELAWDPPVLAERNGRIISYTVVFRDINSQQELQNITTDTRFTLTGLKPDTTYDIKVRAWTSKGSGPLSPSIQSRTMPVEQVFAKNFRVAAAMKTSVLLSWEVPDSYKSAVPFKILYNGQSVEVDGHSMRKLIADLQPNTEYSFVLMNRGSSAGGLQHLVSIRTAPDLLPHKPLPASAYIEDGRFDLSMPHVQDPSLVRWFYIVVVPIDRVGGSMLTPRWSTPEELELDELLEAIEQGGEEQRRRRRQAERLKPYVAAQLDVLPETFTLGDKKNYRGFYNRPLSPDLSYQCFVLASLKEPMDQKRYASSPYSDEIVVQVTPAQQQEEPEMLWVTGPVLAVILIILIVIAILLFKRKRTHSPSSKDEQSIGLKDSLLAHSSDPVEMRRLNYQTPGMRDHPPIPITDLADNIERLKANDGLKFSQEYESIDPGQQFTWENSNLEVNKPKNRYANVIAYDHSRVILTSIDGVPGSDYINANYIDGYRKQNAYIATQGPLPETMGDFWRMVWEQRTATVVMMTRLEEKSRVKCDQYWPARGTETCGLIQVTLLDTVELATYTVRTFALHKSGSSEKRELRQFQFMAWPDHGVPEYPTPILAFLRRVKACNPLDAGPMVVHCSAGVGRTGCFIVIDAMLERMKHEKTVDIYGHVTCMRSQRNYMVQTEDQYVFIHEALLEAATCGHTEVPARNLYAHIQKLGQVPPGESVTAMELEFKLLASSKAHTSRFISANLPCNKFKNRLVNIMPYELTRVCLQPIRGVEGSDYINASFLDGYRQQKAYIATQGPLAESTEDFWRMLWEHNSTIIVMLTKLREMGREKCHQYWPAERSARYQYFVVDPMAEYNMPQYILREFKVTDARDGQSRTIRQFQFTDWPEQGVPKTGEGFIDFIGQVHKTKEQFGQDGPITVHCSAGVGRTGVFITLSIVLERMRYEGVVDMFQTVKTLRTQRPAMVQTEDQYQLCYRAALEYLGSFDHYAT

SEQ ID NO: 11137 - protein, 1332 aa, Homo Sapiens
  misc_feature (1)..(1): Xaa can be any naturally occurring amino acid
XSLLPGITYSLRVLAFTAVGDGPPSPTIQVKTQQGVPAQPADFQAEVESDTRIQLSWLLPPQERIIMYELVYWAAEDEDQQHKVTFDPTSSYTLEDLKPDTLYRFQLAARSDMGVGVFTPTIEARTAQSMPSGPPRKVEVEPLNSTAVHVYWKLPVPSKQHGQIRGYQVTYVRLENGEPRGLPIIQDVMLAEAQETTISGLTPETTYSVTVAAYTTKGDGARSKPKIVTTTGAVPGRPTMMISTTAMNTALLQWHPPKELPGELLGYRLQYCRADEARPNTIDFGKDDQHFTVTGLHKGTTYIFRLAAKNRAGLGEEFEKEIRTPEDLPSGFPQNLHVTGLTTSTTELAWDPPVLAERNGRIISYTVVFRDINSQQELQNITTDTRFTLTGLKPDTTYDIKVRAWTSKGSGPLSPSIQSRTMPVEQVFAKNFRVAAAMKTSVLLSWEVPDSYKSAVPFKILYNGQSVEVDGHSMRKLIADLQPNTEYSFVLMNRGSSAGGLQHLVSIRTAPDLLPHKPLPASAYIEDGRFDLSMPHVQDPSLVRWFYIVVVPIDRVGGSMLTPRWSTPEELELDELLEAIEQGGEEQRRRRRQAERLKPYVAAQLDVLPETFTLGDKKNYRGFYNRPLSPDLSYQCFVLASLKEPMDQKRYASSPYSDEIVVQVTPAQQQEEPEMLWVTGPVLAVILIILIVIAILLFKRKRTHSPSSKDEQSIGLKDSLLAHSSDPVEMRRLNYQTPGSSVPSCPNTSSMRDHPPIPITDLADNIERLKANDGLKFSQEYESIDPGQQFTWENSNLEVNKPKNRYANVIAYDHSRVILTSIDGVPGSDYINANYIDGYRKQNAYIATQGPLPETMGDFWRMVWEQRTATVVMMTRLEEKSRVKCDQYWPARGTETCGLIQVTLLDTVELATYTVRTFALHKSGSSEKRELRQFQFMAWPDHGVPEYPTPILAFLRRVKACNPLDAGPMVVHCSAGVGRTGCFIVIDAMLERMKHEKTVDIYGHVTCMRSQRNYMVQTEDQYVFIHEALLEAATCGHTEVPARNLYAHIQKLGQVPPGESVTAMELEFKLLASSKAHTSRFISANLPCNKFKNRLVNIMPYELTRVCLQPIRGVEGSDYINASFLDGYRQQKAYIATQGPLAESTEDFWRMLWEHNSTIIVMLTKLREMGREKCHQYWPAERSARYQYFVVDPMAEYNMPQYILREFKVTDARDGQSRTIRQFQFTDWPEQGVPKTGEGFIDFIGQVHKTKEQFGQDGPITVHCSAGVGRTGVFITLSIVLERMRYEGVVDMFQTVKTLRTQRPAMVQTEDQYQLCYRAALEYLGSFDHYAT

SEQ ID NO: 11138 - protein, 1291 aa, Homo Sapiens
  misc_feature (1)..(1): Xaa can be any naturally occurring amino acid
XSVTLTWDSGNSEPVTYYGIQYRAAGTEGPFQEVDGVATTRYSIGGLSPFSEYAFRVLAVNSIGRGPPSEAVRARTGEQAPSSPPRRVQARMLSASTMLVQWEPPEEPNGLVRGYRVYYTPDSRRPPNAWHKHNTDAGLLTTVGSLLPGITYSLRVLAFTAVGDGPPSPTIQVKTQQGVPAQPADFQAEVESDTRIQLSWLLPPQERIIMYELVYWAAEDEDQQHKVTFDPTSSYTLEDLKPDTLYRFQLAARSDMGVGVFTPTIEARTAQSMPSGPPRKVEVEPLNSTAVHVYWKLPVPSKQHGQIRGYQVTYVRLENGEPRGLPIIQDVMLAEAQWRPEESEDYETTISGLTPETTYSVTVAAYTTKGDGARSKPKIVTTTGAVFAKNFRVAAAMKTSVLLSWEVPDSYKSAVPFKILYNGQSVEVDGHSMRKLIADLQPNTEYSFVLMNRGSSAGGLQHLVSIRTAPDLLPHKPLPASAYIEDGRFDLSMPHVQDPSLVRWFYIVVVPIDRVGGSMLTPRWSTPEELELDELLEAIEQGGEEQRRRRRQAERLKPYVAAQLDVLPETFTLGDKKNYRGFYNRPLSPDLSYQCFVLASLKEPMDQKRYASSPYSDEIVVQVTPAQQQEEPEMLWVTGPVLAVILIILIVIAILLFKRKRTHSPSSKDEQSIGLKDSLLAHSSDPVEMRRLNYQTPGSSVPSCPNTSSMRDHPPIPITDLADNIERLKANDGLKFSQEYESIDPGQQFTWENSNLEVNKPKNRYANVIAYDHSRVILTSIDGVPGSDYINANYIDGYRKQNAYIATQGPLPETMGDFWRMVWEQRTATVVMMTRLEEKSRVKCDQYWPARGTETCGLIQVTLLDTVELATYTVRTFALHKSGSSEKRELRQFQFMAWPDHGVPEYPTPILAFLRRVKACNPLDAGPMVVHCSAGVGRTGCFIVIDAMLERMKHEKTVDIYGHVTCMRSQRNYMVQTEDQYVFIHEALLEAATCGHTEVPARNLYAHIQKLGQVPPGESVTAMELEFKLLASSKAHTSRFISANLPCNKFKNRLVNIMPYELTRVCLQPIRGVEGSDYINASFLDGYRQQKAYIATQGPLAESTEDFWRMLWEHNSTIIVMLTKLREMGREKCHQYWPAERSARYQYFVVDPMAEYNMPQYILREFKVTDARDGQSRTIRQFQFTDWPEQGVPKTGEGFIDFIGQVHKTKEQFGQDGPITVHCSAGVGRTGVFITLSIVLERMRYEGVVDMFQTVKTLRTQRPAMVQTEDQYQLCYRAALEYLGSFDHYAT

SEQ ID NO: 11139 - protein, 120 aa, Homo Sapiens
MKPAAREARLPPRSPGLRWALPLLLLLLRLGQILCAGGRPSPVFDIKAVSISPTNVILTWKSNDTAASEYKYVVKHKMENEKTITVVHQPWCNITGLRPATSYVFSITPGIGNETWGDPR

SEQ ID NO: 11140 - protein, 147 aa, Homo Sapiens [sequence omitted]

SEQ ID NO: 11141 - protein, 539 aa, Homo Sapiens
MKPAAREARLPPRSPGLRWALPLLLLLLRLGQILCAGGTPSPIPDPSVATVATGENGITQISSTAESFHKQNGTGTPQVETNTSEDGESSGANDSLRTPEQGSNGTDGASQKTPSSTGPSPVFDIKAVSISPTNVILTWKSNDTAASEYKYVVKHKMENEKTITVVHQPWCNITGLRPATSYVFSITPGIGNETWGDPRVIKVITEPIPVSDLRVALTGVRKAALSWSNGNGTASCRVLLESIGSHEELTQDSRLQVNISGLKPGVQYNINPYLLQSNKTKGDPLGTEGGLDASNTERSRAGSPTAPVHDESLVGPVDPSSGQQSRDTEVLLVGLEPGTRYNATVYSQAANGTEGQPQAIEFRTNAIQVFDVTAVNISATSLTLIWKVSDNESSSNYTYKIHVAGETDSSNLNVSEPRAVIPGLRSSTFYNITVCPVLGDIEGTPGFLQVHTPPVPVSDFRVTVVSTTEIGLAWSSHDAESFQMHITQEGAGNSRVEITTNQSIIIGGLFPGTKYCFEIVPKGPNGTEGASRTVCNRTG

SEQ ID NO: 11142 - protein, 1337 aa, Homo Sapiens
MKPAAREARLPPRSPGLRWALPLLLLLLRLGQILCAGGTPSPIPDPSVATVATGENGITQISSTAESFHKQNGTGTPQVETNTSEDGESSGANDSLRTPEQGSNGTDGASQKTPSSTGPSPVFDIKAVSISPTNVILTWKSNDTAASEYKYVVKHKMENEKTITVVHQPWCNITGLRPATSYVFSITPGIGNETWGDPRVIKVITEPIPVSDLRVALTGVRKAALSWSNGNGTASCRVLLESIGSHEELTQDSRLQVNISGLKPGVQYNINPYLLQSNKTKGDPLGTEGGLDASNTERSRAGSPTAPVHDESLVGPVDPSSGQQSRDTEVLLVGLEPGTRYNATVYSQAANGTEGQPQAIEFRTNAIQVFDVTAVNISATSLTLIWKVSDNESSSNYTYKIHVAGETDSSNLNVSEPRAVIPGLRSSTFYNITVCPVLGDIEGTPGFLQVHTPPVPVSDFRVTVVSTTEIGLAWSSHDAESFQMHITQEGAGNSRVEITTNQSIIIGGLFPGTKYCFEIVPKGPNGTEGASRTVCNRTVPSAVFDIHVVYVTTTEMWLDWKSPDGASEYVYHLVIESKHGSNHTSTYDKAITLQGLIPGTLYNITISPEVDHVWGDPNSTAQYTRPSNVSNIDVSTNTTAATLSWQNFDDASPTYSYCLLIEKAGNSSNATQVVTDIGITDATVTELIPGSSYTVEIFAQVGDGIKSLEPGRKSFCTDPASMASFDCEVVPKEPALVLKWTCPPGANAGFELEVSSGAWNNATHLESCSSENGTEYRTEVTYLNFSTSYNISITTVSCGKMAAPTRNTCTTGITDPPPPDGSPNITSVSHNSVKVKFSGFEASHGPIKAYAVILTTGEAGHPSADVLKYTYEDFKKGASDTYVTYLIRTEEKGRSQSLSEVLKYEIDVGNESTTLGYYNGKLEPLGSYRACVAGFTNITFHPQNKGLIDGAESYVSFSRYSDAVSLPQDPGVICGAVFGCIFGALVIVTVGGFIFWRKKRKDAKNNEVSFSQIKPKKSKLIRVENFEAYFKKQQADSNCGFAEEYEDLKLVGISQPKYAAELAENRGKNRYNNVLPYDISRVKLSVQTHSTDDYINANYMPGYHSKKDFIATQGPLPNTLKDFWRMVWEKNVYAIIMLTKCVEQGRTKCEEYWPSKQAQDYGDITVAMTSEIVLPEWTIRDFTVKNIQTSESHPLRQFHFTSWPDHGVPDTTDLLINFRYLVRDYMKQSPPESPILVHCSAGVGRTGTFIAIDRLIYQIENENTVDVYGIVYDLRMHRPLMVQTEDQYVFLNQCVLDIVRSQKDSKVDLIYQNTTAMTIYENLAPVTTFGKTNGYIA

SEQ ID NO: 11143 - protein, 1342 aa, Homo Sapiens
MKPAAREARLPPRSPGLRWALPLLLLLLRLGQILCAGGTPSPIPDPSVATVATGENGITQISSTAESFHKQNGTGTPQVETNTSEDGESSGANDSLRTPEQGSNGTDGASQKTPSSTGPSPVFDIKAVSISPTNVILTWKSNDTAASEYKYVVKHKMENEKTITVVHQPWCNITGLRPATSYVFSITPGIGNETWGDPRVIKVITEPIPVSDLRVALTGVRKAALSWSNGNGTASCRVLLESIGSHEELTQDSRLQVNISGLKPGVQYNINPYLLQSNKTKGDPLGTEGGLDASNTERSRAGSPTAPVHDESLVGPVDPSSGQQSRDTEVLLVGLEPGTRYNATVYSQAANGTEGQPQAIEFRTNAIQVFDVTAVNISATSLTLIWKVSDNESSSNYTYKIHVAGETDSSNLNVSEPRAVIPGLRSSTFYNITVCPVLGDIEGTPGFLQVHTPPVPVSDFRVTVVSTTEIGLAWSSHDAESFQMHITQEGAGNSRVEITTNQSIIIGGLFPGTKYCFEIVPKGPNGTEGASRTVCNRTVPSAVFDIHVVYVTTTEMWLDWKSPDGASEYVYHLVIESKHGSNHTSTYDKAITLQGLIPGTLYNITISPEVDHVWGDPNSTAQYTRPSNVSNIDVSTNTTAATLSWQNFDDASPTYSYCLLIEKAGNSSNATQVVTDIGITDATVTELIPGSSYTVEIFAQVGDGIKSLEPGRKSFCTDPASMASFDCEVVPKEPALVLKWTCPPGANAGFELEVSSGAWNNATHLESCSSENGTEYRTEVTYLNFSTSYNISITTVSCGKMAAPTRNTCTTGITDPPPPDGSPNITSVSHNSVKVKFSGFEASHGPIKAYAVILTTGEAGHPSADVLKYTYEDFKKGASDTYVTYLIRTEEKGRSQSLSEVLKYEIDVGNESTTLGYYNGKLEPLGSYRCLLRACVAGFTNITFHPQNKGLIDGAESYVSFSRYSDAVSLPQDPGVICGAVFGCIFGALVIVTVGGFIFWRKKRKDAKNNEVSFSQIKSLKRSKLIRVENFEAYFKKQQADSNCGFAEEYEDLKLVGISQPKYAAELAENRGKNRYNNVLPYDISRVKLSVQTHSTDDYINANYMPGYHSKKDFIATQGPLPNTLKDFWRMVWEKNVYAIIMLTKCVEQGRTKCEEYWPSKQAQDYGDITVAMTSEIVLPEWTIRDFTVKNIQTSESHPLRQFHFTSWPDHGVPDTTDLLINFRYLVRDYMKQSPPESPILVHCSAGVGRTGTFIAIDRLIYQIENENTVDVYGIVYDLRMHRPLMVQTEDQYVFLNQCVLDIVRSQKDSKVDLIYQNTTAMTIYENLAPVTTFGKTNGYIA

SEQ ID NO: 11144 - protein, 1338 aa, Homo Sapiens [sequence omitted]

SEQ ID NO: 11145 - protein, 1216 aa, Homo Sapiens
MGHLPTGIHGARRLLPLLWLFVLFKNATAFHVTVQDDNNIVVSLEASDVISPASVYVVKITGESKNYFFEFEEFNSTLPPPVIFKASYHGLYYIITLVVVNGNVVTKPSRSITVLTKPLPVTSVSIYDYKPSPETGVLFEIHYPEKYNVFTRVNISYWEGKDFRTMLYKDFFKGKTVFNHWLPGMCYSNITFQLVSEATFNKSTLVEYSGVSHEPKQHRTAPYPPQNISVRIVNLNKNNWEEQSGNFPEESFMRSQDTIGKEKLFHFTEETPEIPSGNISSGWPDFNSSDYETTSQPYWWDSASAAPESEDEFVSVLPMEYENNSTLSETEKSTSGSFSFFPVQMILTWLPPKPPTAFDGFHIHIEREENFTEYLMVDEEAHEFVAELKEPGKYKLSVTTFSSSGSCETRKSQSAKSLSFYISPSGEWIEELTEKPQHVSVHVLSSTTALMSWTSSQENYNSTIVSVVSLTCQKQKESQRLEKQYCTQVNSSKPIIENLVPGAQYQVVIYLRKGPLIGPPSDPVTFAIVPTGIKDLMLYPLGPTAVVLSWTRPYLGVFRKYVVEMFYFNPATMTSEWTTYYEIAATVSLTASVRIANLLPAWYYNFRVTMVTWGDPELSCCDSSTISFITAPVAPEITSVEYFNSLLYISWTYGDDTTDLSHSRMLHWMVVAEGKKKIKKSVTRNVMTAILSLPPGDIYNLSVTACTERGSNTSMLRLVKLEPAPPKSLFAVNKTQTSVTLLWVEEGVADFFEVFCQQVGSSQKTKLQEPVAVSSHVVTISSLLPATAYNCSVTSFSHDSPSVPTFIAVSTMVTEMNPNVVVISVLAILSTLLIGLLLVTLIILRKKHLQMARECGAGTFVNFASLERDGKLPYNWRRSIFAFLTLLPSCLWTDYLLAFYINPWSKNGLKKRKLTNPVQLDDFDAYIKDMAKDSDYKFSLQFEELKLIGLDIPHFAADLPLNRCKNRYTNILPYDFSRVRLVSMNEEEGADYINANYIPGYNSPQEYIATQGPLPETRNDFWKMVLQQKSQIIVMLTQCNEKRRVKCDHYWPFTEEPIAYGDITVEMISEEEQDDWACRHFRINYADEMQDVMHFNYTAWPDHGVPTANAAESILQFVHMVRQQATKSKGPMIIHCSAGVGRTGTFIALDRLLQHIRDHEFVDILGLVSEMRSYRMSMVQTEEQYIFIHQCVQLMWMKKKQQFCISDVIYENVSKS

SEQ ID NO: 11146 - protein, 1188 aa, Homo Sapiens
MGHLPTGIHGARRLLPLLWLFVLFKNATAFHVTVQDDNNIVVSLEASDVISPASVYVVKITGESKNYFFEFEEFNSTLPPPVIFKASYHGLYYIITLVVVNGNVVTKPSRSITVLTKPLPVTSVSIYDYKPSPETGVLFEIHYPEKYNVFTRVNISYWEGKDFRTMLYKDFFKGKTVFNHWLPGMCYSNITFQLVSEATFNKSTLVEYSGVSHEPKQHRTAPYPPQNISVRIVNLNKNNWEEQSGNFPEESFMRSQDTIGKEKLFHFTEETPEIPSGNISSGWPDFNSSDYETTSQPYWWDSASAAPESEDEFVSVLPMEYENNSTLSETEKSTSGSFSFFPVQMILTWLPPKPPTAFDGFHIHIEREENFTEYLMVDEEAHEFVAELKEPGKYKLSVTTFSSSGSCETRKSQSAKSLSFYISPSGEWIEELTEKPQHVSVHVLSSTTALMSWTSSQENYNSTIVSVVSLTCQKQKESQRLEKQYCTQVNSSKPIIENLVPGAQYQVVIYLRKGPLIGPPSDPVTFAIVPTGIKDLMLYPLGPTAVVLSWTRPYLGVFRKYVVEMFYFNPATMTSEWTTYYEIAATVSLTASVRIANLLPAWYYNFRVTMVTWGDPELSCCDSSTISFITAPVAPEITSVEYFNSLLYISWTYGDDTTDLSHSRMLHWMVVAEGKKKIKKSVTRNVMTAILSLPPGDIYNLSVTACTERGSNTSMLRLVKLEPAPPKSLFAVNKTQTSVTLLWVEEGVADFFEVFCQQVGSSQKTKLQEPVAVSSHVVTISSLLPATAYNCSVTSFSHDSPSVPTFIAVSTMVTEMNPNVVVISVLAILSTLLIGLLLVTLIILRKKHLQMARECGAGTFVNFASLERDGKLPYNWSKNGLKKRKLTNPVQLDDFDAYIKDMAKDSDYKFSLQFEELKLIGLDIPHFAADLPLNRCKNRYTNILPYDFSRVRLVSMNEEEGADYINANYIPGYNSPQEYIATQGPLPETRNDFWKMVLQQKSQIIVMLTQCNEKRRVKCDHYWPFTEEPIAYGDITVEMISEEEQDDWACRHFRINYADEMQDVMHFNYTAWPDHGVPTANAAESILQFVHMVRQQATKSKGPMIIHCSAGVGRTGTFIALDRLLQHIRDHEFVDILGLVSEMRSYRMSMVQTEEQYIFIHQCVQLMWMKKKQQFCISDVIYENVSKS

SEQ ID NO: 11147 - protein, 597 aa, Homo Sapiens
MGHLPTGIHGARRLLPLLWLFVLFKNATAFHVTVQDDNNIVVSLEASDVISPASVYVVKITGESKNYFFEFEEFNSTLPPPVIFKASYHGLYYIITLVVVNGNVVTKPSRSITVLTKPLPVTSVSIYDYKPSPETGVLFEIHYPEKYNVFTRVNISYWEGKDFRTMLYKDFFKGKTVFNHWLPGMCYSNITFQLVSEATFNKSTLVEYSGVSHEPKQHRTAPYPPQNISVRIVNLNKNNWEEQSGNFPEESFMRSQDTIGKEKLFHFTEETPEIPSGNISSGWPDFNSSDYETTSQPYWWDSASAAPESEDEFVSVLPMEYENNSTLSETEKSTSGSFSFFPVQMILTWLPPKPPTAFDGFHIHIEREENFTEYLMVDEEAHEFVAELKEPGKYKLSVTTFSSSGSCETRKSQSAKSLSFYISPSGEWIEELTEKPQHVSVHVLSSTTALMSWTSSQENYNSTIVSVVSLTCQKQKESQRLEKQYCTQVNSSKPIIENLVPGAQYQVVIYLRKGPLIGPPSDPVTFAIVPTGIKDLMLYPLGPTAVVLSWTRPYLGVFRKYVVEMFYFNPATMTSEWTTYYEIAATVSLTASVVIFP

SEQ ID NO: 11148 - protein, 405 aa, Homo Sapiens
MVTEMNPNVVVISVLAILSTLLIGLLLVTLIILRKKHLQMARECGAGTFVNFASLERDGKLPYNWRRSIFAFLTLLPSCLWTDYLLAFYINPWSKNGLKKRKLTNPVQLDDFDAYIKDMAKDSDYKFSLQFEELKLIGLDIPHFAADLPLNRCKNRYTNILPYDFSRVRLVSMNEEEGADYINANYIPGYNSPQEYIATQGPLPETRNDFWKMVLQQKSQIIVMLTQCNEKRRVKCDHYWPFTEEPIAYGDITVEMISEEEQDDWACRHFRINYADEMQDVMHFNYTAWPDHGVPTANAAESILQFVHMVRQQATKSKGPMIIHCSAGVGRTGTFIALDRLLQHIRDHEFVDILGLVSEMRSYRMSMVQTEEQYIFIHQCVQLMWMKKKQQFCISDVIYENVSKS

SEQ ID NO: 11149 - protein, 405 aa, Homo Sapiens; identical to SEQ ID NO: 11148

SEQ ID NO: 11150 - protein, 377 aa, Homo Sapiens
MVTEMNPNVVVISVLAILSTLLIGLLLVTLIILRKKHLQMARECGAGTFVNFASLERDGKLPYNWSKNGLKKRKLTNPVQLDDFDAYIKDMAKDSDYKFSLQFEELKLIGLDIPHFAADLPLNRCKNRYTNILPYDFSRVRLVSMNEEEGADYINANYIPGYNSPQEYIATQGPLPETRNDFWKMVLQQKSQIIVMLTQCNEKRRVKCDHYWPFTEEPIAYGDITVEMISEEEQDDWACRHFRINYADEMQDVMHFNYTAWPDHGVPTANAAESILQFVHMVRQQATKSKGPMIIHCSAGVGRTGTFIALDRLLQHIRDHEFVDILGLVSEMRSYRMSMVQTEEQYIFIHQCVQLMWMKKKQQFCISDVIYENVSKS

SEQ ID NO: 11151 - protein, 377 aa, Homo Sapiens; identical to SEQ ID NO: 11150

SEQ ID NO: 11152 - protein, 116 aa, Homo Sapiens
WKMVLQQKSQIIVMLTQCNEKRRVKCDHYWPFTEEPIAYGDITVEMISEEEQDDWACRHFRINYADEMQDVMHFNYTAWPDHGVPTANAAESILQFVHMVRQQATKSKGPMIIHCR

SEQ ID NO: 11153 - protein, 88 aa, Homo Sapiens
  misc_feature (1)..(1): Xaa can be any naturally occurring amino acid
XVTLLWVEEGVADFFEVFCQQVGSSQKTKLQEPVAVSSHVVTISSLLPATAYNCSVTSFSHDSPSVPTFIAVSTMGSVELVHLSILHP

SEQ ID NO: 11154 - protein, 79 aa, Homo Sapiens
MAPTWGPGMVSVVGPMGLLVVLLVGGCAAEEPPRFIKEPKDQIGVSGGVASFVCQATGDPKPRVTWNKKGKKVNSQRFE

SEQ ID NO: 11155 - protein, 91 aa, Homo Sapiens
MAPTWGPGMVSVVGPMGLLVVLLVGGCAAEEPPRFIKEPKDQIGVSGGVASFVCQATGDPKPRVTWNKKGKKVNSQRFETIEFDESAGAVL

SEQ ID NO: 11156 - protein, 1948 aa, Homo Sapiens
MAPTWGPGMVSVVGPMGLLVVLLVGGCAAEEPPRFIKEPKDQIGVSGGVASFVCQATGDPKPRVTWNKKGKKVNSQRFETIEFDESAGAVLRIQPLRTPRDENVYECVAQNSVGEITVHAKLTVLREDQLPSGFPNIDMGPQLKVVERTRTATMLCAASGNPDPEITWFKDFLPVDPSASNGRIKQLRSETFESTPIRGALQIESSEETDQGKYECVATNSAGVRYSSPANLYVRELREVRRVAPRFSILPMSHEIMPGGNVNITCVAVGSPMPYVKWMQGAEDLTPEDDMPVGRNVLELTDVKDSANYTCVAMSSLGVIEAVAQITVKSLPKAPGTPMVTENTATSITITWDSGNPDPVSYYVIEYKSKSQDGPYQIKEDITTTRYSIGGLSPNSEYEIWVSAVNSIGQGPPSESVVTRTGEQAPASAPRNVQARMLSATTMIVQWEEPVEPNGLIRGYRVYYTMEPEHPVGNWQKHNVDDSLLTTVGSLLEDETYTVRVLAFTSVGDGPLSDPIQVKTQQGVPGQPMNLRAEARSETSITLSWSPPRQESIIKYELLFREGDHGREVGRTFDPTTSYVVEDLKPNTEYAFRLAARSPQGLGAFTPVVRQRTLQSKPSAPPQDVKCVSVRSTAILVSWRPPPPETHNGALVGYSVRYRPLGSEDPEPKEVNGIPPTTTQILLEALEKWTQYRITTVAHTEVGPGPESSPVVVRTDEDVPSAPPRKVEAEALNATAIRVLWRSPAPGRQHGQIRGYQVHYVRMEGAEARGPPRIKDVMLADAQWETDDTAEYEMVITNLQPETAYSITVAAYTMKGDGARSKPKVVVTKGAVLGRPTLSVQQTPEGSLLARWEPPAGTAEDQVLGYRLQFGREDSTPLATLEFPPSEDRYTASGVHKGATYVFRLAARSRGGLGEEAAEVLSIPEDTPRGHPQILEAAGNASAGTVLLRWLPPVPAERNGAIVKYTVAVREAGALGPARETELPAAAEPGAENALTLQGLKPDTAYDLQVRAHTRRGPGPFSPPVRYRTFLRDQVSPKNFKVKMIMKTSVLLSWEFPDNYNSPTPYKIQYNGLTLDVDGRTTKKLITHLKPHTFYNFVLTNRGSSLGGLQQTVTAWTAFNLLNGKPSVAPKPDADGFIMVYLPDGQSPVPVQSYFIVMVPLRKSRGGQFLTPLGSPEDMDLEELIQDISRLQRRSLRHSRQLEVPRPYIAARFSVLPPTFHPGDQKQYGGFDNRGLEPGHRYVLFVLAVLQKSEPTFAASPFSDPFQLDNPDPQPIVDGEEGLIWVIGPVLAVVFIICIVIAILLYKNKPDSKRKDSEPRTKCLLNNADLAPHHPKDPVEMRRINFQTPDSGLRSPLREPGFHFESMLSHPPIPIADMAEHTERLKANDSLKLSQEYESIDPGQQFTWEHSNLEVNKPKNRYANVIAYDHSRVILQPIEGIMGSDYINANYVDGYRCQNAYIATQGPLPETFGDFWRMVWEQRSATIVMMTRLEEKSRIKCDQYWPNRGTETYGFIQVTLLDTIELATFCVRTFSLHKNGSSEKREVRQFQFTAWPDHGVPEYPTPFLAFLRRVKTCNPPDAGPIVVHCSAGVGRTGCFIVIDAMLERIKPEKTVDVYGHVTLMRSQRNYMVQTEDQYSFIHEALLEAVGCGNTEVPARSLYAYIQKLAQVEPGEHVTGMELEFKRLANSKAHTSRFISANLPCNKFKNRLVNIMPYESTRVCLQPIRGVEGSDYINASFIDGYRQQKAYIATQGPLAETTEDFWRMLWENNSTIVVMLTKLREMGREKCHQYWPAERSARYQYFVVDPMAEYNMPQYILREFKVTDARDGQSRTVRQFQFTDWPEQGVPKSGEGFIDFIGQVHKTKEQFGQDGPISVHCSAGVGRTGVFITLSIVLERMRYEGVVDIFQTVKMLRTQRPAMVQTEDEYQFCYQAALEYLGSFDHYAT

SEQ ID NO: 11157 - protein, 1505 aa, Homo Sapiens
MAPTWGPGMVSVVGPMGLLVVLLVGGCAAEEPPRFIKEPKDQIGVSGGVASFVCQATGDPKPRVTWNKKGKKVNSQRFETIEFDESAGAVLRIQPLRTPRDENVYECVAQNSVGEITVHAKLTVLREDQLPSGFPNIDMGPQLKVVERTRTATMLCAASGNPDPEITWFKDFLPVDPSASNGRIKQLRSGALQIESSEETDQGKYECVATNSAGVRYSSPANLYVRELREVRRVAPRFSILPMSHEIMPGGNVNITCVAVGSPMPYVKWMQGAEDLTPEDDMPVGRNVLELTDVKDSANYTCVAMSSLGVIEAVAQITVKSLPKAPGTPMVTENTATSITITWDSGNPDPVSYYVIEYKSKSQDGPYQIKEDITTTRYSIGGLSPNSEYEIWVSAVNSIGQGPPSESVVTRTGEQAPASAPRNVQARMLSATTMIVQWEEPVEPNGLIRGYRVYYTMEPEHPVGNWQKHNVDDSLLTTVGSLLEDETYTVRVLAFTSVGDGPLSDPIQVKTQQGVPGQPMNLRAEARSETSITLSWSPPRQESIIKYELLFREGDHGREVGRTFDPTTSYVVEDLKPNTEYAFRLAARSPQGLGAFTPVVRQRTLQSISPKNFKVKMIMKTSVLLSWEFPDNYNSPTPYKIQYNGLTLDVDGRTTKKLITHLKPHTFYNFVLTNRGSSLGGLQQTVTAWTAFNLLNGKPSVAPKPDADGFIMVYLPDGQSPVPVQSYFIVMVPLRKSRGGQFLTPLGSPEDMDLEELIQDISRLQRRSLRHSRQLEVPRPYIAARFSVLPPTFHPGDQKQYGGFDNRGLEPGHRYVLFVLAVLQKSEPTFAASPFSDPFQLDNPDPQPIVDGEEGLIWVIGPVLAVVFIICIVIAILLYKNKPDSKRKDSEPRTKCLLNNADLAPHHPKDPVEMRRINFQTPGMLSHPPIPIADMAEHTERLKANDSLKLSQEYESIDPGQQFTWEHSNLEVNKPKNRYANVIAYDHSRVILQPIEGIMGSDYINANYVDGYRCQNAYIATQGPLPETFGDFWRMVWEQRSATIVMMTRLEEKSRIKCDQYWPNRGTETYGFIQVTLLDTIELATFCVRTFSLHKNGSSEKREVRQFQFTAWPDHGVPEYPTPFLAFLRRVKTCNPPDAGPIVVHCSAGVGRTGCFIVIDAMLERIKPEKTVDVYGHVTLMRSQRNYMVQTEDQYSFIHEALLEAVGCGNTEVPARSLYAYIQKLAQVEPGEHVTGMELEFKRLANSKAHTSRFISANLPCNKFKNRLVNIMPYESTRVCLQPIRGVEGSDYINASFIDGYRQQKAYIATQGPLAETTEDFWRMLWENNSTIVVMLTKLREMGREKCHQYWPAERSARYQYFVVDPMAEYNMPQYILREFKVTDARDGQSRTVRQFQFTDWPEQGVPKSGEGFIDFIGQVHKTKEQFGQDGPISVHCSAGVGRTGVFITLSIVLERMRYEGVVDIFQTVKMLRTQRPAMVQTEDEYQFCYQAALEYLGSFDHYAT

SEQ ID NO: 11158 - protein, 1501 aa, Homo Sapiens
MAPTWGPGMVSVVGPMGLLVVLLVGGCAAEEPPRFIKEPKDQIGVSGGVASFVCQATGDPKPRVTWNKKGKKVNSQRFETIEFDESAGAVLRIQPLRTPRDENVYECVAQNSVGEITVHAKLTVLREDQLPSGFPNIDMGPQLKVVERTRTATMLCAASGNPDPEITWFKDFLPVDPSASNGRIKQLRSGALQIESSEETDQGKYECVATNSAGVRYSSPANLYVRVRRVAPRFSILPMSHEIMPGGNVNITCVAVGSPMPYVKWMQGAEDLTPEDDMPVGRNVLELTDVKDSANYTCVAMSSLGVIEAVAQITVKSLPKAPGTPMVTENTATSITITWDSGNPDPVSYYVIEYKSKSQDGPYQIKEDITTTRYSIGGLSPNSEYEIWVSAVNSIGQGPPSESVVTRTGEQAPASAPRNVQARMLSATTMIVQWEEPVEPNGLIRGYRVYYTMEPEHPVGNWQKHNVDDSLLTTVGSLLEDETYTVRVLAFTSVGDGPLSDPIQVKTQQGVPGQPMNLRAEARSETSITLSWSPPRQESIIKYELLFREGDHGREVGRTFDPTTSYVVEDLKPNTEYAFRLAARSPQGLGAFTPVVRQRTLQSISPKNFKVKMIMKTSVLLSWEFPDNYNSPTPYKIQYNGLTLDVDGRTTKKLITHLKPHTFYNFVLTNRGSSLGGLQQTVTAWTAFNLLNGKPSVAPKPDADGFIMVYLPDGQSPVPVQSYFIVMVPLRKSRGGQFLTPLGSPEDMDLEELIQDISRLQRRSLRHSRQLEVPRPYIAARFSVLPPTFHPGDQKQYGGFDNRGLEPGHRYVLFVLAVLQKSEPTFAASPFSDPFQLDNPDPQPIVDGEEGLIWVIGPVLAVVFIICIVIAILLYKKKPHSKRKDSEPRTKCLLNNADLAPHHPKDPVEMRRINFQTPGMLSHPPIPIADMAEHTERLKANDSLKLSQEYESIDPGQQFTWEHSNLEVNKPKNRYANVIAYDHSRVILQPIEGIMGSDYINANYVDGYRCQNAYIATQGPLPETFGDFWRMVWEQRSATIVMMTRLEEKSRIKCDQYWPNRGTETYGFIQVTLLDTIELATFCVRTFSLHKNGSSEKREVRQFQFTAWPDHGVPEYPTPFLAFLRRVKTCNPPDAGPIVVHCSAGVGRTGCFIVIDAMLERIKPEKTVDVYGHVTLMRSQRNYMVQTEDQYSFIHEALLEAVGCGNTEVPARSLYAYIQKLAQVEPGEHVTGMELEFKRLANSKAHTSRFISANLPCNKFKNRLVNIMPYESTRVCLQPIRGVEGSDYINASFIDGYRQQKAYIATQGPLAETTEDFWRMLWENNSTIVVMLTKLREMGREKCHQYWPAERSARYQYFVVDPMAEYNMPQYILREFKVTDARDGQSRTVRQFQFTDWPEQGVPKSGEGFIDFIGQVHKTKEQFGQDGPISVHCSAGVGRTGVFITLSIVLERMRYEGVVDIFQTVKMLRTQRPAMVQTEDEYQFCYQAALEYLGSFDHYAT

SEQ ID NO: 11159 - protein, 1501 aa, Homo Sapiens
MAPTWGPGMVSVVGPMGLLVVLLVGGCAAEEPPRFIKEPKDQIGVSGGVASFVCQATGDPKPRVTWNKKGKKVNSQRFETIEFDESAGAVLRIQPLRTPRDENVYECVAQNSVGEITVHAKLTVLREDQLPSGFPNIDMGPQLKVVERTRTATMLCAASGNPDPEITWFKDFLPVDPSASNGRIKQLRSGALQIESSEETDQGKYECVATNSAGVRYSSPANLYVRVRRVAPRFSILPMSHEIMPGGNVNITCVAVGSPMPYVKWMQGAEDLTPEDDMPVGRNVLELTDVKDSANYTCVAMSSLGVIEAVAQITVKSLPKAPGTPMVTENTATSITITWDSGNPDPVSYYVIEYKSKSQDGPYQIKEDITTTRYSIGGLSPNSEYEIWVSAVNSIGQGPPSESVVTRTGEQAPASAPRNVQARMLSATTMIVQWEEPVEPNGLIRGYRVYYTMEPEHPVGNWQKHNVDDSLLTTVGSLLEDETYTVRVLAFTSVGDGPLSDPIQVKTQQGVPGQPMNLRAEARSETSITLSWSPPRQESIIKYELLFREGDHGREVGRTFDPTTSYVVEDLKPNTEYAFRLAARSPQGLGAFTPVVRQRTLQSISPKNFKVKMIMKTSVLLSWEFPDNYNSPTPYKIQYNGLTLDVDGRTTKKLITHLKPHTFYNFVLTNRGSSLGGLQQTVTAWTAFNLLNGKPSVAPKPDADGFIMVYLPDGQSPVPVQSYFIVMVPLRKSRGGQFLTPLGSPEDMDLEELIQDISRLQRRSLRHSRQLEVPRPYIAARFSVLPPTFHPGDQKQYGGFDNRGLEPGHRYVLFVLAVLQKSEPTFAASPFSDPFQLDNPDPQPIVDGEEGLIWVIGPVLAVVFIICIVIAILLYKNKPDSKRKDSEPRTKCLLNNADLAPHHPKDPVEMRRINFQTPGMLSHPPIPIADMAEHTERLKANDSLKLSQEYESIDPGQQFTWEHSNLEVNKPKNRYANVIAYDHSRVILQPIEGIMGSDYINANYVDGYRCQNAYIATQGPLPETFGDFWRMVWEQRSATIVMMTRLEEKSRIKCDQYWPNRGTETYGFIQVTLLDTIELATFCVRTFSLHKNGSSEKREVRQFQFTAWPDHGVPEYPTPFLAFLRRVKTCNPPDAGPIVVHCSAGVGRTGCFIVIDAMLERIKPEKTVDVYGHVTLMRSQRNYMVQTEDQYSFIHEALLEAVGCGNTEVPARSLYAYIQKLAQVEPGEHVTGMELEFKRLANSKAHTSRFISANLPCNKFKNRLVNIMPYESTRVCLQPIRGVEGSDYINASFIDGYRQQKAYIATQGPLAETTEDFWRMLWENNSTIVVMLTKLREMGREKCHQYWPAERSARYQYFVVDPMAEYNMPQYILREFKVTDARDGQSRTVRQFQFTDWPEQGVPKSGEGFIDFIGQVHKTKEQFGQDGPISVHCSAGVGRTGVFITLSIVLERMRYEGVVDIFQTVKMLRTQRPAMVQTEDEYQFCYQAALEYLGSFDHYAT

SEQ ID NO: 11160 - protein, 1910 aa, Homo Sapiens
MAPTWGPGMVSVVGPMGLLVVLLVGGCAAEEPPRFIKEPKDQIGVSGGVASFVCQATGDPKPRVTWNKKGKKVNSQRFETIEFDESAGAVLRIQPLRTPRDENVYECVAQNSVGEITVHAKLTVLREDQLPSGFPNIDMGPQLKVVERTRTATMLCAASGNPDPEITWFKDFLPVDPSASNGRIKQLRSGALQIESSEETDQGKYECVATNSAGVRYSSPANLYVRVRRVAPRFSILPMSHEIMPGGNVNITCVAVGSPMPYVKWMQGAEDLTPEDDMPVGRNVLELTDVKDSANYTCVAMSSLGVIEAVAQITVKSLPKAPGTPMVTENTATSITITWDSGNPDPVSYYVIEYKSKSQDGPYQIKEDITTTRYSIGGLSPNSEYEIWVSAVNSIGQGPPSESVVTRTGEQAPASAPRNVQARMLSATTMIVQWEEPVEPNGLIRGYRVYYTMEPEHPVGNWQKHNVDDSLLTTVGSLLEDETYTVRVLAFTSVGDGPLSDPIQVKTQQGVPGQPMNLRAEARSETSITLSWSPPRQESIIKYELLFREGDHGREVGRTFDPTTSYVVEDLKPNTEYAFRLAARSPQGLGAFTPVVRQRTLQSKPSAPPQDVKCVSVRSTAILVSWRPPPPETHNGALVGYSVRYRPLGSEDPEPKEVNGIPPTTTQILLEALEKWTQYRITTVAHTEVGPGPESSPVVVRTDEDVPSAPPRKVEAEALNATAIRVLWRSPAPGRQHGQIRGYQVHYVRMEGAEARGPPRIKDVMLADAQEMVITNLQPETAYSITVAAYTMKGDGARSKPKVVVTKGAVLGRPTLSVQQTPEGSLLARWEPPAGTAEDQVLGYRLQFGREDSTPLATLEFPPSEDRYTASGVHKGATYVFRLAARSRGGLGEEAAEVLSIPEDTPRGHPQILEAAGNASAGTVLLRWLPPVPAERNGAIVKYTVAVREAGALGPARETELPAAAEPGAENALTLQGLKPDTAYDLQVRAHTRRGPGPFSPPVRYRTFLRDQVSPKNFKVKMIMKTSVLLSWEFPDNYNSPTPYKIQYNGLTLDVDGRTTKKLITHLKPHTFYNFVLTNRGSSLGGLQQTVTAWTAFNLLNGKPSVAPKPDADGFIMVYLPDGQSPVPVQSYFIVMVPLRKSRGGQFLTPLGSPEDMDLEELIQDISRLQRRSLRHSRQLEVPRPYIAARFSVLPPTFHPGDQKQYGGFDNRGLEPGHRYVLFVLAVLQKSEPTFAASPFSDPFQLDNPDPQPIVDGEEGLIWVIGPVLAVVFIICIVIAILLYKNKPDSKRKDSEPRTKCLLNNADLAPHHPKDPVEMRRINFQTPGMLSHPPIPIADMAEHTERLKANDSLKLSQEYESIDPGQQFTWEHSNLEVNKPKNRYANVIAYDHSRVILQPIEGIMGSDYINANYVDGYRCQNAYIATQGPLPETFGDFWRMVWEQRSATIVMMTRLEEKSRIKCDQYWPNRGTETYGFIQVTLLDTIELATFCVRTFSLHKNGSSEKREVRQFQFTAWPDHGVPEYPTPFLAFLRRVKTCNPPDAGPIVVHCSAGVGRTGCFIVIDAMLERIKPEKTVDVYGHVTLMRSQRNYMVQTEDQYSFIHEALLEAVGCGNTEVPARSLYAYIQKLAQVEPGEHVTGMELEFKRLANSKAHTSRFISANLPCNKFKNRLVNIMPYESTRVCLQPIRGVEGSDYINASFIDGYRQQKAYIATQGPLAETTEDFWRMLWENNSTIVVMLTKLREMGREKCHQYWPAERSARYQYFVVDPMAEYNMPQYILREFKVTDARDGQSRTVRQFQFTDWPEQGVPKSGEGFIDFIGQVHKTKEQFGQDGPISVHCSAGVGRTGVFITLSIVLERMRYEGVVDIFQTVKMLRTQRPAMVQTEDEYQFCYQAALEYLGSFDHYAT

SEQ ID NO: 11161 - protein, 128 aa, Homo Sapiens
MAPTWGPGMVSVVGPMGLLVVLLVGGCAAEEPPRFIKEPKDQIGVSGGVASFVCQATGDPKPRVTWNKKGKKVNSQRFETIEFDESAGAVLRIQPLRTPRDENVYECVAQNSVGEITVHAKLTVLRGP

SEQ ID NO: 11162 - protein, 142 aa, Homo Sapiens
MAPGVARGPTPYWRLRLGGAALLLLLIPVAAAQEPPGAACSQNTNKTCEECLKNVSACLKKKTRMLDLKTTKALQHISPDASCEVHAPQPSPAGRPRGHCGLLTLASEPASLPGQAAGELPLKDSPLVLQTGDLLFPVHLCF

SEQ ID NO: 11163 - protein, 107 aa, Homo Sapiens
MAPGVARGPTPYWRLRLGGAALLLLLIPVAAAQEPPGAACSQNTNKTCEECLKNVSCLWCNTNKACLDYPVTSVLPPASLCKLSSARWGVCWGLFKEENPYARFENN

SEQ ID NO: 11164 - protein, 180 aa, Homo Sapiens
MAPGVARGPTPYWRLRLGGAALLLLLIPVAAAQEPPGAACSQNTNKTCEECLKNVSCLWCNTNKACLDYPVTSVLPPASLCKLSSARWGVCWVNFEALIITMSVVGGTLLLGIAICCCCCCRRKRSRKPDRSEEKAMREREERRIRQEERRAEMKTRHDEIRKKYGLFKEENPYARFENN

SEQ ID NO: 11165 - protein, 159 aa, Homo Sapiens
MGQAVSCVLGRLQPVKCTGARRVGRRGLRKQTSQECLWCNTNKACLDYPVTSVLPPASLCKLSSARWGVCWVNFEALIITMSVVGGTLLLGIAICCCCCCRRKRSRKPDRSEEKAMREREERRIRQEERRAEMKTRHDEIRKKYGLFKEENPYARFENN

SEQ ID NO: 11166 - protein, 381 aa, Homo Sapiens
MHLLAILFCALWSAVLAENSDDYDLMYVNLDNEIDNGLHPTEDPTPCACGQEHSEWDKLFIMLENSQMRERMLLQATDDVLRGELQRLREELGRLAESLARPCAPGAPAEARLTSALDELLQATRDAGRRLARMEGAEAQRPEEAGRALAAVLEELRQTRADLHAVQGWAARSWLPAGCETAILFPMRSKKIFGSVHPVRPMRLESFSACIWVKATDVLNKTILFSYGTKRNPYEIQLYLSYQSIVFVVGGEENKLVAEAMVSLGRWTHLCGTWNSEEGLTSLWVNGELAATTVEMATGHIVPEGGILQIGQEKNGCCVGGGFDETLAFSGRLTGFNIWDSVLSNEEIRETGGAESCHIRGNIVGWGVTEIQPHGGAQYVS

SEQ ID NO: 11167 - protein, 192 aa, Homo Sapiens
MGCSWRKTLSFFLVFVPIYLHGASSQEAAPVGPRKPFFERLRRLEEQFRRFQEVTWTHLQNIASNYNVSYNVDVRFRSLAEESQAVAQAVNRSQASVQGELAQLKAWVRKLQRRGRKFAAWAPPSFSQTPPPGTWSSSALVSSLPCEPCPSAAGSARPPAAWAPSCPTPPRTMTTSWCCTAETPCCPDPSTS

SEQ ID NO: 11168 - protein, 478 aa, Homo Sapiens
MGCSWRKTLSFFLVFVPIYLHGASSQEAAPVGPRKPFFERLRRLEEQFRRFQEVTWTHLQNIASNYNVSYNVDVRFRSLAEESQAVAQAVNRSQASVQGELAQLKAWVRKLQRRGRKVDTRLRALDLTLGERSQQRARERKAHKAQRDALQDSLARLEGLVHSQGARLAALEGRLPVAHPGTAALGPALVPTPTQPEELGPTSLKLQRDRQELRAASEHRGPPQDSSAPLQGRREPPASGSHRVLSGTAPKDPRQQAWSPQVPGEICGVGPTLVFPNASTRNVVFLSPGFVTALRALSFCSWVRTASGRLGTLLSYATEDNDNKLVLHGRDSLLPGSIHFVIGDPAFRELPLQLLLDGQWHHICVIWTSTQGRYWLHVDRRLVATGSRFREGYEIPPGGSLVLGQEQDSVGGGFDSSEAFVGSMSGLAIWDRALVPGEVANLAIGKEFPTGAILTLANAALAGGFVQGANCTCLERCP

SEQ ID NO: 11169 - protein, 473 aa, Homo Sapiens
MGSGNWEVTGPPCGSRCERPPGLPRGVHGQFRSAVGLSGLRWFRRFQEVTWTHLQNIASNYNVSYNVDVRFRSLAEESQAVAQAVNRSQASVQGELAQLKAWVRKLQRRGRKVDTRLRALDLTLGERSQQRARERKAHKAQRDALQDSLARLEGLVHSQGARLAALEGRLPVAHPGTAALGPALVPTPTQPEELGPTSLKLQRDRQELRAASEHRGPPQDSSAPLQGRREPPASGSHRVLSGTAPKDPRQQAWSPQVPGEICGVGPTLVFPNASTRNVVFLSPGFVTALRALSFCSWVRTASGRLGTLLSYATEDNDNKLVLHGRDSLLPGSIHFVIGDPAFRELPLQLLLDGQWHHICVIWTSTQGRYWLHVDRRLVATGSRFREGYEIPPGGSLVLGQEQDSVGGGFDSSEAFVGSMSGLAIWDRALVPGEVANLAIGKEFPTGAILTLANAALAGGFVQGANCTCLERCP

SEQ ID NO: 11170 - protein, 44 aa, Homo Sapiens
MARAMAAAWPLLLVALLVLSWPPPGTGAQHGGDACVTADLGAAW

SEQ ID NO: 11171 - protein, 364 aa, Homo Sapiens
MARAMAAAWPLLLVALLVLSWPPPGTGDVVVQAPTQVPGFLGDSVTLPCYLQVPNMEVTHVSQLTWARHGESGSMAVFHQTQGPSYSESKRLEFVAARLGAELRNASLRMFGLRVEDEGNYTCLFVTFPQGSRSVDIWLRVLAKPQNTAEVQKVQLTGEPVPMARCVSTGGRPPAQITWHSDLGGMPNTSQVPGFLSGTVTVTSLWILVPSSQVDGKNVTCKVEHESFEKPQLLTVNLTVYYPPEVSISGYDNNWYLGQNEATLTCDARSNPEPTGYNWSTTMGPLPPFAVAQGAQLLIRPVDKPINTTLICNVTNALGARQAELTVQVKGTEHASASANGHVSYSAVSRENSSSQDPQTEGTR

SEQ ID NO: 11172 - protein, 372 aa, Homo Sapiens
MARAMAAAWPLLLVALLVLSWPPPGTGDVVVQAPTQVPGFLGDSVTLPCYLQVPNMEVTHVSQLTWARHGESGSMAVFHQTQGPSYSESKRLEFVAARLGAELRNASLRMFGLRVEDEGNYTCLFVTFPQGSRSVDIWLRVLAKPQNTAEVQKVQLTGEPVPMARCVSTGGRPPAQITWHSDLGGMPNTSQVPGFLSGTVTVTSLWILVPSSQVDGKNVTCKVEHESFEKPQLLTVNLTVYYPPEVSISGYDNNWYLGQNEATLTCDARSNPEPTGYNWSTTMGPLPPFAVAQGAQLLIRPVDKPINTTLICNVTNALGARQAELTVQVKEGPPSEHSGTEHASASANGHVSYSAVSRENSSSQDPQTEGTR

SEQ ID NO: 11173 - protein, 392 aa, Homo Sapiens
MARAMAAAWPLLLVALLVLSWPPPGTGDVVVQAPTQVPGFLGDSVTLPCYLQVPNMEVTHVSQLTWARHGESGSMAVFHQTQGPSYSESKRLEFVAARLGAELRNASLRMFGLRVEDEGNYTCLFVTFPQGSRSVDIWLRVLAKPQNTAEVQKVQLTGEPVPMARCVSTGGRPPAQITWHSDLGGMPNTSQVPGFLSGTVTVTSLWILVPSSQVDGKNVTCKVEHESFEKPQLLTVNLTVYYPPEVSISGYDNNWYLGQNEATLTCDARSNPEPTGYNWSTTMGPLPPFAVAQGAQLLIRPVDKPINTTLICNVTNALGARQAELTVQVKEGPPSEHSGMSRNAIIFLVLGILVFLILLGIGIYFYWSKCSREVLWHCHLCPSSEHHQSCRN

SEQ ID NO: 11174 - protein, 417 aa, Homo Sapiens
MARAMAAAWPLLLVALLVLSWPPPGTGDVVVQAPTQVPGFLGDSVTLPCYLQVPNMEVTHVSQLTWARHGESGSMAVFHQTQGPSYSESKRLEFVAARLGAELRNASLRMFGLRVEDEGNYTCLFVTFPQGSRSVDIWLRVLAKPQNTAEVQKVQLTGEPVPMARCVSTGGRPPAQITWHSDLGGMPNTSQVPGFLSGTVTVTSLWILVPSSQVDGKNVTCKVEHESFEKPQLLTVNLTVYYPPEVSISGYDNNWYLGQNEATLTCDARSNPEPTGYNWSTTMGPLPPFAVAQGAQLLIRPVDKPINTTLICNVTNALGARQAELTVQVKEGPPSEHSGMSRNAIIFLVLGILVFLILLGIGIYFYWSKCSREVLWHCHLCPSSTEHASASANGHVSYSAVSRENSSSQDPQTEGTR

SEQ ID NO: 11175 - protein, 70 aa, Homo Sapiens
  misc_feature (1)..(1): Xaa can be any naturally occurring amino acid
XCKVEHESFEKPQLLTVNLTVYYPPEVSISGYDNNWYLGQNEATLTCDARSNPEPTGYNWSTYRACQRLS

SEQ ID NO: 11176 - protein, 224 aa, Homo Sapiens
MAKRSRGPGRRCLLALVLFCAWGTLAVVAQKPGAGCPSRCLCFRTTVRCMHLLLEAVPAVAPQTSILDLRFNRIREIQPGAFRRLRNLNTLLLNNNQIKRIPSGAFEDLENLKYLYLHFNQIETLDPDSFQHLPKLERLFLHNNRITHLVPGTFNHLESMKRLRLDSNTLHCDCEILWLADLLKTYAESGNAQAAAICEYPRRIQGRSVATITPEELNCERPRI

SEQ ID NO: 11177 - protein, 1479 aa, Homo Sapiens
MAKRSRGPGRRCLLALVLFCAWGTLAVVAQKPGAGCPSRCLCFRTTVRCMHLLLEAVPAVAPQTSILDLRFNRIREIQPGAFRRLRNLNTLLLNNNQIKRIPSGAFEDLENLKYLYLYKNEIQSIDRQAFKGLASLEQLYLHFNQIETLDPDSFQHLPKLERLFLHNNRITHLVPGTFNHLESMKRLRLDSNTLHCDCEILWLADLLKTYAESGNAQAAAICEYPRRIQGRSVATITPEELNCERPRITSEPQDADVTSGNTVYFTCRAEGNPKPEIIWLRNNNELSMKTDSRLNLLDDGTLMIQNTQETDQGIYQCMAKNVAGEVKTQEVTLRYFGSPARPTFVIQPQNTEVLVGESVTLECSATGHPPPRISWTRGDRTPLPVDPRVNITPSGGLYIQNVVQGDSGEYACSATNNIDSVHATAFIIVQALPQFTVTPQDRVVIEGQTVDFQCEAKGNPPPVIAWTKGGSQLSVDRRHLVLSSGTLRISGVALHDQGQYECQAVNIIGSQKVVAHLTVQPRVTPVFASIPSDTTVEVGANVQLPCSSQGEPEPAITWNKDGVQVTESGKFHISPEGFLTINDVGPADAGRYECVARNTIGSASVSMVLSVNVPDVSRNGDPFVATSIVEAIATVDRAINSTRTHLFDSRPRSPNDLLALFRYPRDPYTVEQARAGEIFERTLQLIQEHVQHGLMVDLNGTSYHYNDLVSPQYLNLIANLSGCTAHRRVNNCSDMCFHQKYRTHDGTCNNLQHPMWGASLTAFERLLKSVYENGFNTPRGINPHRLYNGHALPMPRLVSTTLIGTETVTPDEQFTHMLMQWGQFLDHDLDSTVVALSQARFSDGQHCSNVCSNDPPCFSVMIPPNDSRARSGARCMFFVRSSPVCGSGMTSLLMNSVYPREQINQLTSYIDASNVYGSTEHEARSIRDLASHRGLLRQGIVQRSGKPLLPFATGPPTECMRDENESPIPCFLAGDHRANEQLGLTSMHTLWFREHNRIATELLKLNPHWDGDTIYYETRKIVGAEIQHITYQHWLPKILGEVGMRTLGEYHGYDPGINAGIFNAFATAAFRFGHTLVNPLLYRLDENFQPIAQDHLPLHKAFFSPFRIVNEGGIDPLLRGLFGVAGKMRVPSQLLNTELTERLFSMAHTVALDLAAINIQRGRDHGIPPYHDYRVYCNLSAAHTFEDLKNEIKNPEIREKLKRLYGSTLNIDLFPALVVEDLVPGSRLGPTLMCLLSTQFKRLRDGDRLWYENPGVFSPAQLTQIKQTSLARILCDNADNITRVQSDVFRVAEFPHGYGSCDEIPRVDLRVWQDCCEDCRTRGQFNAFSYHFRGRRSLEFSYQEDKPTKKTRPRKIPSVGRQGEHLSNSTSAFSTRSDASGTNDFREFVLEMQKTITDLRTQIKKLESRLSTTECVDAGGESHANNTKWKKDACTICECKDGQVTCFVEACPPATCAVPVNIPGACCPVCLQKRAEEKP

SEQ ID NO: 11178 - protein, 197 aa, Homo Sapiens
  misc_feature (1)..(1): Xaa can be any naturally occurring amino acid
XGSWFPSAPGLSTTVLLNNNQIKRIPSGAFEDLENLKYLYLYKNEIQSIDRQAFKGLASLEQLYLHFNQIETLDPDSFQHLPKLERLFLHNNRITHLVPGTFNHLESMKRLRLDSNTLHCDCEILWLADLLKTYAESGNAQAAAICEYPRRIQGRSVATITPEELNCERPRITSEPQDADVTSGNTVYFTCRAEGNP

SEQ ID NO: 11179 - protein, 723 aa, Homo Sapiens
  misc_feature (1)..(1): Xaa can be any naturally occurring amino acid
XRGPGRRCLLALVLFCAWGTLAVVAQKPGAGCPSRCLCFRTTVRCMHLLLEAVPAVAPQTSILDLRFNRIREIQPGAFRRLRNLNTLLLNNNQIKRIPSGAFEDLENLKYLYLYKNEIQSIDRQAFKGLASLEQLYLHFNQIETLDPDSFQHLPKLERLFLHNNRITHLVPGTFNHLESMKRLRLDSNTLHCDCEILWLADLLKTYAESGNAQAAAICEYPRRIQGRSVATITPEELNCERPRITSEPQDADVTSGNTVYFTCRAEGNPKPEIIWLRNNNELSMKTDSRLNLLDDGTLMIQNTQETDQGIYQCMAKNVAGEVKTQEVTLRYFGSPARPTFVIQPQNTEVLVGESVTLECSATGHPPPRISWTRGDRTPLPVDPRVNITPSGGLYIQNVVQGDSGEYACSATNNIDSVHATAFIIVQALPQFTVTPQDRVVIEGQTVDFQCEAKGNPPPVIAWTKGGSQLSVDRRHLVLSSGTLRISGVALHDQGQYECQAVNIIGSQKVVAHLTVQPRVTPVFASIPSDTTVEVGANVQLPCSSQGEPEPAITWNKDGVQVTESGKFHISPEGFLTINDVGPADAGRYECVARNTIGSASVSMVLSVNVPDVSRNGDPFVATSIVEAIATVDRAINSTRTHLFDSRPRSPNDLLALFRYPRDPYTVEQARAGEIFERTLQLIQEHVQHGLMVDLNGTSQCQSLFFLLHGLSNGVEHASVKSHS

SEQ ID NO: 11180 - protein, 76 aa, Homo Sapiens
  misc_feature (1)..(1): Xaa can be any naturally occurring amino acid
XVQSDVFRVAEFPHGYGSCDEIPRVDLRVWQDCCEDCRTRGQFNAFSYHFRGRRSLEFSYQEDKPTKKTRPRKIPR

SEQ ID NO: 11181 - protein, 1463 aa, Homo Sapiens
MEPRLFCWTTLFLLAGWCLPGLPCPSRCLCFKSTVRCMHLMLDHIPQVPQQTTVLDLRFNRIREIPGSAFKKLKNLNTLLLNNNHIRKISRNAFEGLENLLYLYLYKNEIHALDKQTFKGLISLEHLYIHFNQLEMLQPETFGDLLRLERLFLHNNKLSKIPAGSFSNLDSLKRLRLDSNALVCDCDLMWLGELLQGFAQHGHTQAAATCEYPRRLHGRAVASVTVEEFNCQSPRITFEPQDVEVPSGNTVYFTCRAEGNPKPEIIWIHNNHSLDLEDDTRLNVFDDGTLMIRNTRESDQGVYQCMARNSAGEAKTQSAMLRYSSLPAKPSFVIQPQDTEVLIGTSTTLECMATGHPHPLITWTRDNGLELDGSRHVATSSGLYLQNITQRDHGRFTCHANNSHGTVQAAANIIVQAPPQFTVTPKDQVVLEEHAVEWLCEADGNPPPVIVWTKTGGQLPVEGQHTVLSSGTLRIDRAAQHDQGQYECQAVSSLGVKKVSVQLTVKPKALAVFTQLPQDTSVEVGKNINISCHAQGEPQPIITWNKEGVQITESGKFHVDDEGTLTIYDAGFPDQGRYECVARNSFGLAVTNMFLTVTAIQGRQAGDDFVESSILDAVQRVDSAINSTRRHLFSQKPHTSSDLLAQFHYPRDPLIVEMARAGEIFEHTLQLIRERVKQGLTVDLEGKEFRYNDLVSPRSLSLIANLSGCTARRPLPNCSNRCFHAKYRAHDGTCNNLQQPTWGAALTAFARLLQPAYRDGIRAPRGLGLPVGSRQPLPPPRLVATVWARAAAVTPDHSYTRMLMHWGWFLEHDLDHTVPALSTARFSDGRPCSSVCTNDPPCFPMNTRHADPRGTHAPCMLFARSSPACASGRPSATVDSVYAREQINQQTAYIDGSNVYGSSERESQALRDPSVPRGLLKTGFPWPPSGKPLLPFSTGPPTECARQEQESPCFLAGDHRANEHLALAAMHTLWFREHNRMATELSALNPHWEGNTVYQEARKIVGAELQHITYSHWLPKVLGDPGTRMLRGYRGYNPNVNAGIINSFATAAFRFGHTLINPILYRLNATLGEISEGHLPFHKALFSPSRIIKEGGIDPVLRGLFGVAAKWRAPSYLLSPELTQRLFSAAYSAAVDSAATIIQRGRDHGIPPYVDFRVFCNLTSVKNFEDLQNEIKDSEIRQKLRKLYGSPGDIDLWPALMVEDLIPGTRVGPTLMCLFVTQFQRLRDGDRFWYENPGVFTPAQLTQLKQASLSRVLCDNGDSIQQVQADVFVKAEYPQDYLNCSEIPKVDLRVWQDCCADCRSRGQFRAVTQESQKKRSAQYSYPVDKDMELSHLRSRQQDKIYVGEDARNVTVLAKTKFSQDFSTFAAEIQETITALREQINKLEARLRQAGCTDVRGVPRKAEERWMKEDCTHCICESGQVTCVVEICPPAPCPSPELVKGTCCPVCRDRGMPSDSPEKR

SEQ ID NO: 11182 - protein, 582 aa, Homo Sapiens
NNLQQPTWGAALTAFARLLQPAYRDGIRAPRGLGLPVGSRQPLPPPRLVATVWARAAAVTPDHSYTRMLMHWGWFLEHDLDHTVPALSTARFSDGRPCSSVCTNDPPCFPMNTRHADPRGTHAPCMLFARSSPACASGRPSATVDSVYAREQINQQTAYIDGSNVYGSSERESQALRDPSVPRGLLKTGFPWPPSGKPLLPFSTGPPTECARQEQESPCFLAGDHRANEHLALAAMHTLWFREHNRMATELSALNPHWEGNTVYQEARKIVGAELQHITYSHWLPKVLGDPGTRMLRGYRGYNPNVNAGIINSFATAAFRFGHTLINPILYRLNATLGEISEGHLPFHKALFSPSRIIKEGGIDPVLRGLFGVAAKWRAPSYLLSPELTQRLFSAAYSAAVDSAATIIQRGRDHGIPPYVDFRVFCNLTSVKNFEDLQNEIKDSEIRQKLRKLYGSPGDIDLWPALMVEDLIPGTRVGPTLMCLFVTQFQRLRDGDRFWYENPGVFTPAQLTQLKQASLSRVLCDNGDSIQQVQADVFVKAEYPQDYLNCSEIPKVDLRVWQDCCADKQAGGTPEAGRVYRC

SEQ ID NO: 11183 - protein, 537 aa, Homo Sapiens
  misc_feature (1)..(1): Xaa can be any naturally occurring amino acid
XAREQINQQTAYIDGSNVYGSSERESQALRDPSVPRGLLKTGFPWPPSGKPLLPFSTGPPTECARQEQESPCFLAGDHRANEHLALAAMHTLWFREHNRMATELSALNPHWEGNTVYQEARKIVGAELQHITYSHWLPKVLGDPGTRMLRGYRGYNPNVNAGIINSFATAAFRFGHTLINPILYRLNATLGEISEGHLPFHKALFSPSRIIKEGGIDPVLRGLFGVAAKWRAPSYLLSPELTQRLFSAAYSAAVDSAATIIQRGRDHGIPPYVDFRVFCNLTSVKNFEDLQNEIKDSEIRQKLRKFWYENPGVFTPAQLTQLKQASLSRVLCDNGDSIQQVQADVFVKAEYPQDYLNCSEIPKVDLRVWQDCCADCRSRGQFRAVTQESQKKRSAQYSYPVDKDMELSHLRSRQQDKIYVGEDARNVTVLAKTKFSQDFSTFAAEIQETITALREQINKLEARLRQAGCTDVRGVPRKAEERWMKEDCTHCICESGQVTCVVEICPPAPCPSPELVKGTCCPVCRDRGMPSDSPEKR

SEQ ID NO: 11184 - protein, 463 aa, Homo Sapiens
MDVLTALLLVHLIPVSTPKNGMSSKSRKRIMPDPVTEPPVTDPVYEALLYCNIPSVAERSMEGHAPHHFKLVSVHVFIRHGDRYPLYVIPKTKRPEIDCTLVANRKPYHPKLEAFISHMSKGSGASFESPLNSLPLYPNHPLCEMGELTQTGVVQHLQNGQLLRDIYLKKHKLLPNDWSADQLYLETTGKSRTLQSGLALLYGFLPDFDWKKIYFRHQPSALFCSGSCYCPVRNQYLEKEQRRQYLLRLKNSQLEKTYGEMAKIVDVPTKQLRAANPIDSMLCHFCHNVSFPCTRNGCVDMEHFKVIKTHQIEDERERREKKLYFGYSLLGAHPILNQTIGRMQRATEGRKEELFALYSAHDVTLSPVLSALGLSEARFPRFAARLIFELWQDREKPSEHSVRILYNGVDVTFHTSFCQDHHKRSPKPMCPLENLVRFVKRDMFVALGGSGTNYYDACHREGF

SEQ ID NO: 11185 - protein, 26 aa, Homo Sapiens
MLFRNRFLLLLALAALLAFVSLSLQF

SEQ ID NO: 11186 - protein, 26 aa, Homo Sapiens
MLFRNRFLLLLALAALLAFVSLSLQF

SEQ ID NO: 11187 - protein, 95 aa, Homo Sapiens
MLFRNRFLLLLALAALLAFVSLSLQFFHLIPVSTPKNGMSSKSRKRIMPDPVTEPPVTDPVYEALLYCNIPSVAERSMEGHAPHHFKLVSVHVFI

SEQ ID NO: 11188 - protein, 145 aa, Homo Sapiens
MLFRNRFLLLLALAALLAFVSLSLQFFHLIPVSTPKNGMSSKSRKRIMPDPVTEPPVTDPVYEALLYCNIPSVAERSMEGHAPHHFKLVSVHVFIRHGDRYPLYVIPKTKRPEIDCTLVANRKPYHPKLEAFISHMSKGSGASFE

SEQ ID NO: 11189 - protein, 480 aa, Homo Sapiens
MLFRNRFLLLLALAALLAFVSLSLQFFHLIPVSTPKNGMSSKSRKRIMPDPVTEPPVTDPVYEALLYCNIPSVAERSMEGHAPHHFKLVSVHVFIRHGDRYPLYVIPKTKRPEIDCTLVANRKPYHPKLEAFISHMSKGSGASFESPLNSLPLYPNHPLCEMGELTQTGVVQHLQNGQLLRDIYLKKHKLLPNDWSADQLYLETTGKSRTLQSGLALLYGFLPDFDWKKIYFRHQPSALFCSGSCYCPVRNQYLEKEQRRQYLLRLKNSQLEKTYGEMAKIVDVPTKQLRAANPIDSMLCHFCHNVSFPCTRNGCVDMEHFKVIKTHQIEDERERREKKLYFGYSLLGAHPILNQTIGRMQRATEGRKEELFALYSAHDVTLSPVLSALGLSEARFPRFAARLIFELWQDREKPSEHSVRILYNGVDVTFHTSFCQDHHKRSPKPMCPLENLVRFVKRDMFVALGGSGTNYYDACHREGF

SEQ ID NO: 11190 - protein, 480 aa, Homo Sapiens; identical to SEQ ID NO: 11189

SEQ ID NO: 11191 - protein, 179 aa, Homo Sapiens
MLFRNRFLLLLALAALLAFVSLSLQFFHLIPVSTPKNGMSSKSRKRIMPDPVTEPPVTDPVYEALLYCNIPSVAERSMEGHAPHHFKLVSVHVFIRHGDRYPLYVIPKTKRPEIDCTLVANRKPYHPKLEAFISHMSKGSGASFESPLNSLPLYPNHPLCEMGELTQTVGLAVHLRGSC

SEQ ID NO: 11192 - protein, 182 aa, Homo Sapiens
MLFRNRFLLLLALAALLAFVSLSLQFFHLIPVSTPKNGMSSKSRKRIMPDPVTEPPVTDPVYEALLYCNIPSVAERSMEGHAPHHFKLVSVHVFIRHGDRYPLYVIPKTKRPEIDCTLVANRKPYHPKLEAFISHMSKGSGASFESPLNSLPLYPNHPLCEMGELTQTVRRWLSASQEERPH

SEQ ID NO: 11193 - protein, 182 aa, Homo Sapiens; identical to SEQ ID NO: 11192

SEQ ID NO: 11194 - protein, 471 aa, Homo Sapiens
MRYFIKSMEHSVCPSSAVHLIPVSTPKNGMSSKSRKRIMPDPVTEPPVTDPVYEALLYCNIPSVAERSMEGHAPHHFKLVSVHVFIRHGDRYPLYVIPKTKRPEIDCTLVANRKPYHPKLEAFISHMSKGSGASFESPLNSLPLYPNHPLCEMGELTQTGVVQHLQNGQLLRDIYLKKHKLLPNDWSADQLYLETTGKSRTLQSGLALLYGFLPDFDWKKIYFRHQPSALFCSGSCYCPVRNQYLEKEQRRQYLLRLKNSQLEKTYGEMAKIVDVPTKQLRAANPIDSMLCHFCHNVSFPCTRNGCVDMEHFKVIKTHQIEDERERREKKLYFGYSLLGAHPILNQTIGRMQRATEGRKEELFALYSAHDVTLSPVLSALGLSEARFPRFAARLIFELWQDREKPSEHSVRILYNGVDVTFHTSFCQDHHKRSPKPMCPLENLVRFVKRDMFVALGGSGTNYYDACHREGF

SEQ ID NO: 11195 - protein, 131 aa, Homo Sapiens
MSSKSRKRIMPDPVTEPPVTDPVYEALLYCNIPSVAERSMEGHAPHHFKLVSVHVFIRHGDRYPLYVIPKTKRPEIDCTLVANRKPYHPKLEAFISHMSKGSGASFESPLNSLPLYPNHPLCEMGELTQTG

SEQ ID NO: 11196 - protein, 442 aa, Homo Sapiens
MSSKSRKRIMPDPVTEPPVTDPVYEALLYCNIPSVAERSMEGHAPHHFKLVSVHVFIRHGDRYPLYVIPKTKRPEIDCTLVANRKPYHPKLEAFISHMSKGSGASFESPLNSLPLYPNHPLCEMGELTQTGVVQHLQNGQLLRDIYLKKHKLLPNDWSADQLYLETTGKSRTLQSGLALLYGFLPDFDWKKIYFRHQPSALFCSGSCYCPVRNQYLEKEQRRQYLLRLKNSQLEKTYGEMAKIVDVPTKQLRAANPIDSMLCHFCHNVSFPCTRNGCVDMEHFKVIKTHQIEDERERREKKLYFGYSLLGAHPILNQTIGRMQRATEGRKEELFALYSAHDVTLSPVLSALGLSEARFPRFAARLIFELWQDREKPSEHSVRILYNGVDVTFHTSFCQDHHKRSPKPMCPLENLVRFVKRDMFVALGGSGTNYYDACHREGF

SEQ ID NO: 11197 - protein, 90 aa, Homo Sapiens
MVFVRRPWPALTTVLLALLVCLGALVDAYPIKPEAPREDASPEELNRYYASLRHYLNLVTRQRYGKRDGPDTLLSKTFFPDGEDRPVRSR

SEQ ID NO: 11198 - protein, 97 aa, Homo Sapiens
MVFVRRPWPALTTVLLALLVCLGALVDAYPIKPEAPREDASPEELNRYYASLRHYLNLVTRQRYGKRDGPDTLLSKTFFPDGEDRPVRSRSEGPDLW

SEQ ID NO: 11199 - protein, 144 aa, Homo Sapiens
MRKDRLLHLCLVLLLILLSASDSNSTEPQYMVLVPSLLHTEAPKKGCVLLSHLNETVTVSASLESGRENRSLFTDLVAEKDLFHCVSFTLPRISASSEVAFLSIQIKGPTQDFRKRNTVLVLNTQSLVFVQTDKPMYKPGQTGK

SEQ ID NO: 11200 - protein, 1482 aa, Homo Sapiens
MRKDRLLHLCLVLLLILLSASDSNSTEPQYMVLVPSLLHTEAPKKGCVLLSHLNETVTVSASLESGRENRSLFTDLVAEKDLFHCVSFTLPRISASSEVAFLSIQIKGPTQDFRKRNTVLVLNTQSLVFVQTDKPMYKPGQTVRFRVVSVDENFRPRNELIPLIYLENPRRNRIAQWQSLKLEAGINQLSFPLSSEPIQGSYRVVVQTESGGRIQHPFTVEEFVLPKFEVKVQVPKIISIMDEKVNITVCGEYTYGKPVPGLATVSLCRKLSRVLNCDKQEVCEEFSQQLNSNGCITQQVHTKMLQITNTGFEMKLRVEARIREEGTDLEVTANRISEITNIVSKLKFVKVDSHFRQGIPFFAQVLLVDGKGVPIPNKLFFISVNDANYYSNATTNEQGLAQFSINTTSISVNKLFVRVFTVHPNLCFHYSWVAEDHQGAQHTANRVFSLSGSYIHLEPVAGTLPCGHTETITAHYTLNRQAMGELSELSFHYLIMAKGVIVRSGTHTLPVESGDMKGSFALSFPVESDVAPIARMFIFAILPDGEVVGDSEKFEIENCLANKVDLSFSPAQSPPASHAHLQVAAAPQSLCALRAVDQSVLLMKPEAELSVSSVYNLLTVKDLTNFPDNVDQQEEEQGHCPRPFFIHNGAIYVPLSSNEADIYSFLKGMGLKVFTNSKIRKPKSCSVIPSVSAGAVGQGYYGAGLGVVERPYVPQLGTYNVIPLNNEQSSGPVPETVRSYFPETWIWELVAVNSSGVAEVGVTVPDTITEWKAGAFCLSEDAGLGISSTASLRAFQPFFVELTMPYSVIRGEVFTLKATVLNYLPKCIRVSVQLKASPAFLASQNTKGEESYCICGNERQTLSWTVTPKTLGNVNFSVSAEAMQSLELCGNEVVEVPEIKRKDTVIKTLLVEAEGIEQEKTFSSMTCASGANVSEQLSLKLPSNVVKESARASFSVLGDILGSAMQNIQNLLQMPYGCGEQNMVLFAPNIYVLNYLNETQQLTQEIKAKAVGYLITGYQRQLNYKHQDGSYSTFGERYGRNQGNTWLTAFVLKTFAQARSYIFIDEAHITQSLTWLSQMQKDNGCFRSSGSLLNNAIKGGVEDEATLSAYVTIALLEIPLPVTNPIVRNALFCLESAWNVAKEGTHGSHVYTKALLAYAFSLLGKQNQNREILNSLDKEAVKEDNLVHWERPQRPKAPVGHLYQTQAPSAEVEMTSYVLLAYLTAQPAPTSGDLTSATNIVKWIMKQQNAQGGFSSTQDTVVALHALSRYGAATFTRTEKTAQVTVQDSQTFSTNFQVDNNNLLLLQQISLPELPGEYVITVTGERCVYLQTSMKYNILPEKEDSPFALKVQTVPQTCDGHKAHTSFQISLTISYTGNRPASNMVIVDVKMVSGFIPLKPTVKMLERSSSVSRTEVSNNHVLIYVEQVTNQTLSFSFMVLQDIPVGDLKPAIVKVYDYYETDESVVAEYIAPCSTDTEHGNV

SEQ ID NO: 11201 - protein, 284 aa, Homo Sapiens
MAGGRHRRVVGTLHLLLLVAALPWASRGVSPSASAWPEEKHIMQRIQRLQADWVLEIDTFLSQTPYGYRSFSNIISTLNPTAKRHLVLACHYDSKYFSHWNNRVFVGATDSAVPCAMMLELARALDKKLLSLKTVSDSKPDLSLQLIFFDGEEAFLHWSPQDSLYGSRHLAAKMASTPHPPGARGTSQLHGMDLLVLLDLIGAPNPTFPNFFPNSARWFERLQAIEHELHELGLLKDHSLEGRYFQNYSYGGVIQDDHIPFLRRGVPVLHLIPSPFPEVWHTMD

SEQ ID NO: 11202 - protein, 361 aa, Homo Sapiens
MAGGRHRRVVGTLHLLLLVAALPWASRGVSPSASAWPEEKNYHQPAILNSSALRQIAEGTSISEMWQNDLQPLLIERYPGSPGSYAARQHIMQRIQRLQADWVLEIDTFLSQTPYGYRSFSNIISTLNPTAKRHLVLACHYDSKYFSHWNNRVFVGATDSAVPCAMMLELARALDKKLLSLKTVSDSKPDLSLQLIFFDGEEAFLHWSPQDSLYGSRHLAAKMASTPHPPGARGTSQLHGMDLLVLLDLIGAPNPTFPNFFPNSARWFERLQAIEHELHELGLLKDHSLEGRYFQNYSYGGVIQDDHIPFLRRGVPVLHLIPSPFPEVWHTMDDNEENLDESTIDNLNKILQVFVLEYLHL

SEQ ID NO: 11203 - protein, 118 aa, Homo Sapiens [sequence omitted]

SEQ ID NO: 11204 - protein, 149 aa, Homo Sapiens
MDAEGLALLLPPVTLAALVDSWLREDCPGLNYAALAVRAARQAADFTLKVEVECSSLQEAVQAAEAGADLVLLDNFKPEELHPTATVLKAQFPSVAVEASGGITLDNLPQFCGPHIDVISMGMLTQAAPALDFSLKLFAKEVAPVPKIH

SEQ ID NO: 11205 - protein, 297 aa, Homo Sapiens
MDAEGLALLLPPVTLAALVDSWLREDCPGLNYAALVSGAGPSQAALWAKSPGVLAGQPFFDAIFTQLNCQVSWFLPEGSKLVPVARVAEVRGPAHCLLLGERVALNTLARCSGIASAAAAAVEAARGAGWTGHVAGTRKTTPGFRLVEKYGLLVGGAASHRYDLGGLVMVKDNHVVAAGGVEKAVRAARQAADFTLKVEVECSSLQEAVQAAEAGADLVLLDNFKPEELHPTATVLKAQFPSVAVEASGGITLDNLPQFCGPHIDVISMGMLTQAAPALDFSLKLFAKEVAPVPKIH

SEQ ID NO: 11206 - protein, 136 aa, Homo Sapiens
MVRPYPLIYFLFLPLGACFPLLDRREPTDAMGGLGAGERWADLAMGPRPHSVWGSSRWLRASQPQALLVIARGLQTSGREHAGCRFRFGRQDEGSEATGFLPAAGEKTSGPLGNLAEELNGYSRKKGGFSFRFGRR

SEQ ID NO: 11207 - protein, 136 aa, Homo Sapiens; identical to SEQ ID NO: 11206

SEQ ID NO: 11208 - protein, 155 aa, Homo Sapiens
MRRCNSGSGPPPSLLLLLLWLLAVPGANAAPRSALYSPSDPLTLLQADTVRGAVLGSRSAWAVEFFASWCGHCIAFAPTWKALAEDVKAWRPALYLAALDCAEETNSAVCRDFNIPGFPTVRFFKAFTKNGSGAVFPGWRRLMDSLREITKSTWL

SEQ ID NO: 11209 - protein, 747 aa, Homo Sapiens
MRRCNSGSGPPPSLLLLLLWLLAVPGANAAPRSALYSPSDPLTLLQADTVRGAVLGSRSAWAVEFFASWCGHCIAFAPTWKALAEDVKAWRPALYLAALDCAEETNSAVCRDFNIPGFPTVRFFKAFTKNGSGAVFPVAGADVQTLRERLIDALESHHDTWPPACPPLEPAKLEEIDGFFARNNEEYLALIFEKGGSYLGREVALDLSQHKGVAVRRVLNTEANVVRKFGVTDFPSCYLLFRNGSVSRVPVLMESRSFYTAYLQRLSGLTREAAQTTVAPTTANKIAPTVWKLADRSKIYMADLESALHYILRIEVGRFPVLEGQRLVALKKFVAVLAKYFPGRPLVQNFLHSVNEWLKRQKRNKIPYSFFKTALDDRKEGAVLAKKVNWIGCQGSEPHFRGFPCSLWVLFHFLTVQAARQNVDHSQEAAKAKEVLPAIRGYVHYFFGCRDCASHFEQMAAASMHRVGSPNAAVLWLWSSHNRVNARLAGAPSEDPQFPKVQWPPRELCSACHNERLDVPVWDVEATLNFLKAHFSPSNIILDFPAAGSAARRDVQNVAAAPELAMGALELESRNSTLDPGKPEMMKSPTNTTPHVPAEGPEASRPPKLHPGLRAAPGQEPPEHMAELQRNEQEQPLGQWHLSKRDTGAALLAESRAEKNRLWGPLEVRRVGRSSKQLVDIPEGQLEARAGRGRGQWLQVLGGGFSYLDISLCVGLYSLSFMGLLAMYTYFQAKIRALKGHAGHPAA

SEQ ID NO: 11210 - protein, 604 aa, Homo Sapiens
MRRCNSGSGPPPSLLLLLLWLLAVPGANAAPRSALYSPSDPLTLLQADTVRGAVLGSRSAWAVEFFASWCGHCIAFAPTWKALAEDVKAWRPALYLAALDCAEETNSAVCRDFNIPGFPTVRFFKAFTKNGSGAVFPVAGADVQTLRERLIDALESHHDTWPPACPPLEPAKLEEIDGFFARNNEEYLALIFEKGGSYLGREVALDLSQHKGVAVRRVLNTEANVVRKFGVTDFPSCYLLFRNGSVSRVPVLMESRSFYTAYLQRLSGLTREAAQTTVAPTTANKIAPTVWKLADRSKIYMADLESALHYILRIEVGRFPVLEGQRLVALKKFVAVLAKYFPGRPLVQNFLHSVNEWLKRQKRNKIPYSFFKTALDDRKEGAVLAKKVNWIGCQGSEPHFRGFPCSLWVLFHFLTVQAARQNVDHSQEAAKAKEVLPAIRGYVHYFFGCRDCASHFEQMAAASMHRVGSPNAAVLWLWSSHNRVNARLAGAPSEDPQFPKVQWPPRELCSACHNERLDVPVWDVEATLNFLKAHFSPSNIILDFPAAGSAARRDVQNVAAAPELAMGALELESRNSTLDPGKPEMMKSPTNTTPHVPAEGPELI

SEQ ID NO: 11211 - protein, 72 aa, Homo Sapiens
  misc_feature (1)..(1): Xaa can be any naturally occurring amino acid
XNEQEQPLGQWHLSKRDTGAALLAESRAEKNRLWGPLEVRRVGRSSKQLVDIPEGQLEARAGRGRGQWLQLI

SEQ ID NO: 11212 - protein, 253 aa, Homo Sapiens
MPLLPSTVGLAGLLFWAGQAVNALIMPNATPAPAQPESTAMRLLSGLEVPRYRRKRHISVRDMNALLDYHNHIRASVYPPAANMEYMVWDKRLARAAEAWATQCIWAHGPSQLMRYVGQNLSIHSGQYRSVVDLMKSWSEEKWHYLFPAPRDCNPHCPWRCDGPTCSHYTQMVWASSNRLGCAIHTCSSISVWGNTWHRAAYLVCNYAIKGNWIGESPYKMGKPCSSCPPSYQGSCNSNMCFKGLKSNKFTWF

SEQ ID NO: 11213 - protein, 190 aa, Homo Sapiens
MLVGDSGVGKTCLLVRFKDGAFLAGTFISTVGIDFRNKVLDVDGVKVKLQMWDTAGQERFRSVTHAYYRDAHALLLLYDVTNKASFDNIQAWLTEIHEYAQHDVALMLLGNKVDSAHERVVKREDGEKLAKEYGLPFMETSAKTGLNVDLAFTAIAKELKQRSMKAPSEPRFRLHDYVKREGRGASCCRP

SEQ ID NO: 11214 - protein, 64 aa, Homo Sapiens
MLVGDSGVGKTCLLVRFKDGAFLAGTFISTVGIDFRQGLTLSPWLECSGDHGGLQPPTSGFKPS

SEQ ID NO: 11215 - protein, 256 aa, Homo Sapiens
MSRKKTPKSKGASTPAASTLPTANGARPARSGTALSGPDAPPNGPLQPGRPSLGGGVDFYDVAFKVMLVGDSGVGKTCLLVRFKDGAFLAGTFISTVGIDFRNKVLDVDGVKVKLQMWDTAGQERFRSVTHAYYRDAHALLLLYDVTNKASFDNIQAWLTEIHEYAQHDVALMLLGNKVDSAHERVVKREDGEKLAKEYGLPFMETSAKTGLNVDLAFTAIAKELKQRSMKAPSEPRFRLHDYVKREGRGASCCRP

SEQ ID NO: 11216 - protein, 136 aa, Homo Sapiens
  misc_feature (1)..(1): Xaa can be any naturally occurring amino acid
XKEYGLPFMETSAKTGLNVDLAFTAIANNSPNKQASESPWPHTGRHGKAVFCTGRGAASGQTLPRCSAAPSWARPGEGGLGLAPRTVPNPRKAMSSAAHAQAAKGGRLPTPGTEGFTANHIVHLCVLGAACSRPTL

SEQ ID NO: 11217 - protein, 311 aa, Homo Sapiens
MVIAGASWMLGRAAASPTQTPPTTSTIRVARRSRVALVAMVIAAAGSGGPGRAEPQLSQPSLDCGRMRSSLTPLGPPVSRDRVIASFPKWYTPEACLQLREHFHGQVSAACQRRNTGTVGFCKNVFDRDYKATIGVDFEIERFEIAGIPYSLQIWDTAGQEKFKCIASAYYRGAQVIITAFDLTDVQTLEHTRQWLEDALRENEAGSCFIFLVGTKKDLLSGAACEQAEADAVHLAREMQAEYWSVSAKTGENVKAFFSRVAALAFEQSVLQDLERQSSARLQVGNGDLIQMEGSPPETQESKRPSSLGCC

SEQ ID NO: 11218 - protein, 333 aa, Homo Sapiens
MVIAGASWMLGRAAASPTQTPPTTSTIRVARRSRVALVAMVIAAAGSGGPGRAEPQLSQPSLDCGRMRSSLTPLGPPVSRDRVIASFPKWYTPEACLQLREHFHGQVSAACQRRNTGTVGLKLSKVVVVGDLYVGKTSLIHRFCKNVFDRDYKATIGVDFEIERFEIAGIPYSLQIWDTAGQEKFKCIASAYYRGAQVIITAFDLTDVQTLEHTRQWLEDALRENEAGSCFIFLVGTKKDLLSGAACEQAEADAVHLAREMQAEYWSVSAKTGENVKAFFSRVAALAFEQSVLQDLERQSSARLQVGNGDLIQMEGSPPETQESKRPSSLGCC

SEQ ID NO: 11219 - protein, 132 aa, Homo Sapiens
  misc_feature (1)..(1): Xaa can be any naturally occurring amino acid
XVSAACQRRNTGTVGLKLSKVVVVGDLYVGKTSLIHRFCKNVFDRDYKATIGVDFEIERFEIAGIPYSLQIWDTAGQEKFKCIASAYYRGAQGEQHATSGLNCMQQRGPCRAPQWESRVLCTGTSFLSSKTH

SEQ ID NO: 11220 - protein, 201 aa, Homo Sapiens
MSGKSLLLKVILLGDGGVGKSSLMNRYVTNKFDSQAFHTIGVEFLNRDLEVDGRFVTLQIWDTAGQERFKSLRTPFYRGADCCLLTFSVDDRQSFENLGNWQKEFIYYADVKDPEHFPFVVLGNKVDKEDRQVTTEEAQTWCMENGDYPYLETSAKDDTNVTVAFEEAVRQVLAVEEQLEHCMLGHTIDLNSGSKAGSSCC

SEQ ID NO: 11221 - protein, 80 aa, Homo Sapiens
MRRISLTSSPVRLLLFLLLLLIALEIMVGGHSLCFNFTIKSLSRPGQPWCEAQVFLNKNLFLQYNSDNNMVKPLGLLGKK

SEQ ID NO: 11222 - protein, 117 aa, Homo Sapiens
MRRISLTSSPVRLLLFLLLLLIALEIMVGGHSLCFNFTIKSLSRPGQPWCEAQVFLNKNLFLQYNSDNNMVKPLGLLGKKILPLCKSRCFVNVKQNGALVHPGSSPPMERNPSSLTQ

SEQ ID NO: 11223 - protein, 209 aa, Homo Sapiens
MRRISLTSSPVRLLLFLLLLLIALEIMVGGHSLCFNFTIKSLSRPGQPWCEAQVFLNKNLFLQYNSDNNMVKPLGLLGKKVYATSTWGELTQTLGEVGRDLRMLLCDIKPQIKTSDPSTLQVEMFCQREAERCTGASWQFATNGEKSLLFDAMNMTWTVINHEASKIKETWKKDRGLEKYFRKLSKGDCDHWLREFLGHWEAMPEPTGN

SEQ ID NO: 11224 - protein, 212 aa, Homo Sapiens
MRRISLTSSPVRLLLFLLLLLIALEIMVGGHSLCFNFTIKSLSRPGQPWCEAQVFLNKNLFLQYNSDNNMVKPLGLLGKKVYATSTWGELTQTLGEVGRDLRMLLCDIKPQIKTSDPSTLQVEMFCQREAERCTGASWQFATNGEKSLLFDAMNMTWTVINHEASKIKETWKKDRGLEKYFRKLSKGDCDHWLREFLGHWEAMPEPTGRRST

SEQ ID NO: 11225 - protein, 263 aa, Homo Sapiens
MRRISLTSSPVRLLLFLLLLLIALEIMVGGHSLCFNFTIKSLSRPGQPWCEAQVFLNKNLFLQYNSDNNMVKPLGLLGKKVYATSTWGELTQTLGEVGRDLRMLLCDIKPQIKTSDPSTLQVEMFCQREAERCTGASWQFATNGEKSLLFDAMNMTWTVINHEASKIKETWKKDRGLEKYFRKLSKGDCDHWLREFLGHWEAMPEPTVSPVNASDIHWSSSSLPDRWIILGAFILLVLMGIVLICVWWQNGEWQAGLWPLRTS

SEQ ID NO: 11226 - protein, 227 aa, Homo Sapiens
MRRISLTSSPVRLLLFLLLLLIALEIMYNSDNNMVKPLGLLGKKVYATSTWGELTQTLGEVGRDLRMLLCDIKPQIKTSDPSTLQVEMFCQREAERCTGASWQFATNGEKSLLFDAMNMTWTVINHEASKIKETWKKDRGLEKYFRKLSKGDCDHWLREFLGHWEAMPEPTVSPVNASDIHWSSSSLPDRWIILGAFILLVLMGIVLICVWWQNGEWQAGLWPLRTS

SEQ ID NO: 11227 - protein, 334 aa, Homo Sapiens
MAAAASPAFLLRLPLLLLLSSWCRTGLADPHSLCYDITVIPKFRPGPRWCAVQGQVDEKTFLHYDCGSKTVTPVSPLGKKLNVTTAWKAQNPVLREVVDILTEQLLDIQLENYIPKEPLTLQARMSCEQKAEGHGSGSWQLSFDGQIFLLFDSENRMWTTVHPGARKMKEKWENDKDMTMSFHYISMGDCTGWLEDFLMGMDSTLEPSAGAPPTMSSGTAQPRATATTLILCCLLIMCLLICSRHSLTQSHGHHPQSLQPPPHPPLLHPTWLLRRVLWSDSYQIAKRPLSGGHVTRVTLPIIGDDSHSLPCPLALYTINNGAARYSEPLQVSIS

SEQ ID NO: 11228 - protein, 221 aa, Homo Sapiens
MAAAASPAFLLRLPLLLLLSSWCRTGLADPHSLCYDITVIPKFRPGPRWCAVQGQVDEKTFLHYDCGSKTVTPVSPLGKKLNVTTAWKAQNPVLREVVDILTEQLLDIQLENYIPKEPLTLQARMSCEQKAEGHGSGSWQLSFDGQIFLLFDSENRMWTTVHPGARKMKEKWENDKDMTMSFHYISMGDCTGWLEDFLMGMDSTLEPSAGGNRRKRNGDLQ

SEQ ID NO: 11229 - protein, 213 aa, Homo Sapiens
MAAAASPAFLLRLPLLLLLSSWCRTGLADPHSLCYDITVIPKFRPGPRWCAVQGQVDEKTFLHYDCGSKTVTPVSPLGKKLNVTTAWKAQNPVLREVVDILTEQLLDIQLENYIPKEPLTLQARMSCEQKAEGHGSGSWQLSFDGQIFLLFDSENRMWTTVHPGARKMKEKWENDKDMTMSFHYISMGDCTGWLEDFLMGMDSTLEPSAGGTV

SEQ ID NO: 11230 - protein, 180 aa, Homo Sapiens
MASLRVERAGGPRLPRTRVGRPAALRLLLLLGAVLNPHEALAQPLPTTGTPGSEASVPTGGTVKNYETAVQFCWNHYKDQMDPIEKDWCDWAMISRPYSTLRDCLEHFAELFDLGFPNPLAERIIFETHQIHFANCSLVQPTFSDPPEDVLLAMIIAPICLIPFLITLVVWRSKDSEAQA

SEQ ID NO: 11231 - protein, 175 aa, Homo Sapiens
MASLRVERAGGPRLPRTRVGRPAALRLLLLLGAVLNPHEALAQPLPTTGTPGSEGGTVKNYETAVQFCWNHYKDQMDPIEKDWCDWAMISRPYSTLRDCLEHFAELFDLGFPNPLAERIIFETHQIHFANCSLVQPTFSDPPEDVLLAMIIAPICLIPFLITLVVWRSKDSEAQA

SEQ ID NO: 11232 - protein, 112 aa, Homo Sapiens
MASLRVERAGGPRLPRTRVGRPAALRLLLLLGAVLNPHEALAQPLPTTGTPGSEGLIAPCEIAWSTLQSCLTWASPIPWQRGSSLRLTRSTLPTAPWCSPPSLTPQRMYSWP

SEQ ID NO: 11233 - protein, 49 aa, Homo Sapiens
MDPIEKDWCDWAMISRPYSTLRDCLEHFAELFDLGFPNPLAERIIFETH

SEQ ID NO: 11234 - protein, 100 aa, Homo Sapiens
MDPIEKDWCDWAMISRPYSTLRDCLEHFAELFDLGFPNPLAERIIFETHQIHFANCSLVQPTFSDPPEDVLLAMIIAPICLIPFLITLVVWRSKDSEAQA

SEQ ID NO: 11235 - protein, 730 aa, Homo Sapiens
MAIGVWQLLLDMGIMLSVDQHLYFQDTYVFYQFSSDECSYLYCEFEREEEWQNGVKLLLQLVPLIPARGGICELSHQKIEDSEESSDEILVRLTSAVQRELAAVIALKARKSAIEQDEENNDKHVAVTEAESVPDSQAGVMCKLQERDEIGRIELVQKLAKENYQFLQTDKKEQEKSEHQDDEVTTVQVKEQDQSVLVLKKVQCCGPAPTAGSAESHWRYVVVSGTPEKILEHLLNDLHLEEVQDKETETLLDDFLLTYTVFMTTDDLCQALLRHYSAKKYQGKEENSDVPRRKRKVLHLVSQWIALYKDWLPEDEHSKMFLKTIYRNVLDDVYEYPILEKELKEFQKILGMHRRHTVDEYSPQKKNKALFHQFSLKENWLQHRGTVTETEEIFCHVYITEHSYVSVKAKVSSIAQEILKVVAEKIQYAEEDLALVAITFSGEKHELQPNDLVISKSLEASGRIYVYRKDLADTLNPFAENEESQQRSMRILGMNTWDLALELMNFDWSLFNSIHEQELIYFTFSRQGSGEHTANLSLLLQRCNEVQLWVATEILLCSQLGKRVQLVKKFIKIAAHCKAQRNLNSFFAIVMGLNTASVSRLSQTWEKIPGKFKKLFSELESLTDPSLNHKAYRDAFKKMKPPKIPFMPLLLKDVTFIHEGNKTFLDNLVNFEKLHMIADTVRTLRHCRTNQFGDLSPKEHQELKSYVNHLYVIDSQQALFELSHRIEPRV

SEQ ID NO: 11236 - protein, 580 aa, Homo Sapiens
MGSSRLRVFDPHLERKDSAAALSDRELPLPTFDVPYFKYIDEEDEDDEWSSRSQSSTEDDSVDSLLSDRYVVVSGTPEKILEHLLNDLHLEEVQDKETETLLDDFLLTYTVFMTTDDLCQALLRHYSAKKYQGKEENSDVPRRKRKVLHLVSQWIALYKDWLPEDEHSKMFLKTIYRNVLDDVYEYPILEKELKEFQKILGMHRRHTVDEYSPQKKNKALFHQFSLKENWLQHRGTVTETEEIFCHVYITEHSYVSVKAKVSSIAQEILKVVAEKIQYAEEDLALVAITFSGEKHELQPNDLVISKSLEASGRIYVYRKDLADTLNPFAENEESQQRSMRILGMNTWDLALELMNFDWSLFNSIHEQELIYFTFSRQGSGEHTANLSLLLQRCNEVQLWVATEILLCSQLGKRVQLVKKFIKIAAHCKAQRNLNSFFAIVMGLNTASVSRLSQTWEKIPGKFKKLFSELESLTDPSLNHKAYRDAFKKMKPPKIPFMPLLLKDVTFIHEGNKTFLDNLVNFEKLHMIADTVRTLRHCRTNQFGDLSPKEHQELKSYVNHLYVIDSQQALFELSHRIEPRV

SEQ ID NO: 11237 - protein, 444 aa, Homo Sapiens
MGSSRLRVFDPHLERKDSAAALSDRELPLPTFDVPYFKYIDEEDEDDEWSSRSQSSTEDDSVDSLLSDRYVVVSGTPEKILEHLLNDLHLEEVQDKETETLLDDFLLTYTVFMTTDDLCQALLRHYSAKKYQGKEENSDVPRRKRKVLHLVSQWIALYKDWLPEDEHSKMFLKTIYRNVLDDVYEYPILEKELKEFQKILGMHRRHTVDEYSPQKKNKALFHQFSLKENWLQHRGTVTETEEIFCHVYITEHSYVSVKAKVSSIAQEILLCSQLGKRVQLVKKFIKIAAHCKAQRNLNSFFAIVMGLNTASVSRLSQTWEKIPGKFKKLFSELESLTDPSLNHKAYRDAFKKMKPPKIPFMPLLLKDVTFIHEGNKTFLDNLVNFEKLHMIADTVRTLRHCRTNQFGDLSPKEHQELKSYVNHLYVIDSQQALFELSHRIEPRV

SEQ ID NO: 11238 - protein, 124 aa, Homo Sapiens
MGSSRLRVFDPHLERKDSAAALSDRELPLPTFDVPYFKYIDEEDEDDEWSSRSQSSTEDDSVDSLLSDRYVVVSGTPEKILEHLLNDLHLEEVQDKETVIPTPGITCVTSAMCSQSQADQDFMA

SEQ ID NO: 11239 - protein, 400 aa, Homo Sapiens
MRMAVGSVKMQPPCESPALAAAAAVVAADGPLRRSPSAREPEREQPPASLRPRLRDLPALLRSGLTLRRKRSAAGGRTLSRRISNPYLEHTPSQIYGENSSCAGRALRNIIIVQAADLIKDRVNLKGFYRRSCVGSELVDWLLEHCPFVQCRSMAIGVWQLLLDMGIMLSVDQHLYFQDTYVFYQFSSDECSYLYCEFEREEEWQNGVKLLLQLVPLIPARGGICELSHQKIEDSEESSDEILVRLTSAVQRELAAVIALKARKSAIEQDEENNDKHVAVTEAESVPDSQAGVMCKLQERDEIGRIELVQKLAKENYQFLQTDKKEQEKSEHQDDEVTTVQVKEQDQSVLVLKKVQCCGPAPTAGSAESHWSVLADCRALSSQMDSVPSERTGMARSFSI

SEQ ID NO: 11240 - protein, 155 aa, Homo Sapiens
MSWDCGFKYIFAFSPTLKAGVMCKLQERDEIGRIELVQKLAKENYQFLQTDKKEQEKSEHQDDEVTTVQVKEQDQSVLVLKKVQCCGPAPTAGSAESHWRYVVVSGTPEKILEHLLNDLHLEEVQDKETETLLDDFLLTYTVFMTTDDLCQALLR

SEQ ID NO: 11241 - protein, 142 aa, Homo Sapiens
MTTDDLCQALLRHYSAKKYQGKEENSDVPRRKRKVLHLVSQWIALYKDWLPEDEHSKMFLKTIYRNVLDDVYEYPILEKELKEFQKILGMHRRHTVDEYSPQKKNKALFHQFSLKENWLQHRGTVTETEEIFCHVYITEHSY

SEQ ID NO: 11242 - protein, 294 aa, Homo Sapiens
MQPRRQRLPAPWSGPRGPRPTAPLLALLLLLAPVAAPAGSGDPDDPGQPQDAGVPRRLLQQAARAALHFFNFRSGSPSALRVLAEVQEGRAWINPKEGCKVHVVFSTERYNPESLLQEGEGRLGKCSARVFFKNQKPRPTINVTCTRLIEKKKRQQEDYLLYKQMKQLKNPLEIVSIPDNHGHIDPSLRLIWDLAFLGSSYVMWEMTTQVSHYYLAQLTSVRQWKTNDDTIDFDYTVLLHELSTQEIIPCRIHLVWYPGKPLKVKYHCQELQTPEEASGTEEGSAVVPTELSNF

SEQ ID NO: 11243 - protein, 228 aa, Homo Sapiens
MQPRRQRLPAPWSGPRGPRPTAPLLALLLLLAPVAAPAGSGDPDDPGQPQDAGVPRRLLQQAARAALHFFNFRSGSPSALRVLAEVQEGRAWINPKEGCKVHVVFSTERYNPESLLQEGEGRLGKCSARVFFKNQKPRPTINVTCTRLIEKKKRQQEDYLLYKQMKQLKNPLEIVSIPDNHGHIDPSLRLIWDLAFLGSSYVMWEMTTQVSHYYLAQLTSVRQWVRKT

SEQ ID NO: 11244 - protein, 163 aa, Homo Sapiens
MRRLLIPLALWLGAVGVGVAELTEAQRRGLQVALEEFHKHPPVQWAFQETSVESAVDTPFPAGIFVRLEFKLQQTSCRKRDWKKPECKVRPNGRKRKCLACIKLGSEDKVLGRLVHCPIETQVLREAEEHQETQCLRVQRAGEDPHSFYFPGQFAFSKALPRS

SEQ ID NO: 11245 - protein, 163 aa, Homo Sapiens; identical to SEQ ID NO: 11244

SEQ ID NO: 11246 - protein, 163 aa, Homo Sapiens; identical to SEQ ID NO: 11244

SEQ ID NO: 11247 - protein, 159 aa, Homo Sapiens
MRRLLIPLALWLGAVGVGVAELTEAQRRGLQVALEEFHKHPPVQWAFQETSVESAVDTPFPAGIFVRLEFKLQQTSCRKRDWKKPECKVRPNGRKRKCLACIKLGSEDKVLGRLVHCPIETQVLRRCVVPPGPLRVVTSGRPQPPGRGTRSIPSHDNKA

SEQ ID NO: 11248 - protein, 47 aa, Homo Sapiens
MAAAAPAAAAASSEAPAASATAEPEAGDQDSREVKQKIYCHILDPTK

SEQ ID NO: 11249 - protein, 849 aa, Homo Sapiens
MAAAAPAAAAASSEAPAASATAEPEAGDQDSREVRVLQSLRGKICEAKNLLPYLGPHKMRDCFCTINLDQEEVYRTQVVEKSLSPFFSEEFYFEIPRTFQYLSFYVYDKNVLQRDLRIGKVAIKKEDLCNHSGKETWFSLQPVDSNSEVQGKVHLELKLNELITENGTVCQQLVVHIKACHGLPLINGQSCDPYATVSLVGPSRNDQKKTKVKKKTSNPQFNEIFYFEVTRSSSYTRKSQFQVEEEDIEKLEIRIDLWNNGNLVQDVFLGEIKVPVNVLRTDSSHQAWYLLQPRDNGNKSSKTDDLGSLRLNICYTEDYVLPSEYYGPLKTLLLKSPDVQPISASAAYILSEICRDKNDAVLPLVRLLLHHDKLVPFATAVAELDLKDTQDANTIFRGNSLATRCLDEMMKIVGGHYLKVTLKPILDEICDSSKSCEIDPIKLKEGDNVENNKENLRYYVDKLFNTIVKSSMSCPTVMCDIFYSLRQMATQRFPNDPHVQYSAVSSFVFLRFFAVAVVSPHTFHLRPHHPDAQTIRTLTLISKTIQTLGSWGSLSKSKSSFKETFMCEFFKMFQEEGYIIAVKKFLDEISSTETKESSGTSEPVHLKEGEMYKRAQGRTRIGKKNFKKRWFCLTSRELTYHKQPGKDAIYTIPVKNILAVEKLEESSFNKKNMFQVIHTEKPLYVQANNCVEANEWIDVLCRVSRCNQNRLSFYHPSVYLNGNWLCCQETGENTLGCKPCTAGVPADIQIDIDEDRETERIYSLFTLSLLKLQKMEEACGTIAVYQGPQKEPDDYSNFVIEDSVTTFKTIQQIKSIIEKLDEPHEKYRKKRSSSAKYGSKENPIVGKAS

SEQ ID NO: 11250 - protein, 853 aa, Homo Sapiens [sequence omitted]

SEQ ID NO: 11251 - protein, 155 aa, Homo Sapiens
MAPRTWCPAGIFGLFCPLTLACSSLTIALTDCQPIILVSPTLSLWMVVRSVWIMQASLLGEPEEVALGPMGVVAATLEVVGTRAMGVAGIMTVDLEGMDMDMDVPETIMAETRVVMTATQEEITETIMTTEMRHAHNIGETWISALSEPVCHTLS

SEQ ID NO: 11252 - protein, 157 aa, Homo Sapiens
MSSEEGKLFVGGLNFNTDEQALEDHFSSFGPISEVVVVKDRETQRSRGFGFITFTNPEHASVAMRAMNGESLDGRQIRVDHAGKSARGTRGGGFGAHGRGRSYSRGGGDQGYGSGRYYDSRPGGYGYGYGRSRDYNGRNQGGYDRYSGGNYRDNYDN

SEQ ID NO: 11253 - protein, 157 aa, Homo Sapiens; identical to SEQ ID NO: 11252

SEQ ID NO: 11254 - protein, 1247 aa, Homo Sapiens
MMREWVLLMSVLLCGLAGPTHLFQPSLVLDMAKVLLDNYCFPENLLGMQEAIQQAIKSHEILSISDPQTLASVLTAGVQSSLNDPRLVISYEPSTPEPPPQVPALTSLSEEELLAWLQRGLRHEVLEGNVGYLRVDSVPGQEVLSMMGEFLVAHVWGNLMGTSALVLDLRHCTGGQVSGIPYIISYLHPGNTILHVDTIYNRPSNTTTEIWTLPQVLGERYGADKDVVVLTSSQTRGVAEDIAHILKQMRRAIVVGERTGGGALDLRKLRIGESDFFFTVPVSRSLGPLGGGSQTWEGSGVLPCVGTPAEQALEKALAILTLRSALPGVVHCLQEVLKDYYTLVDRVPTLLQHLASMDFSTVVSEEDLVTKLNAGLQAASEDPRLLVRAIGPTETPSWPAPDAAAEDSPGVAPELPEDEAIRQALVDSVFQVSVLPGNVGYLRFDSFADASVLGVLAPYVLRQVWEPLQDTEHLIMDLRHNPGGPSSAVPLLLSYFQGPEAGPVHLFTTYDRRTNITQEHFSHMELPGPRYSTQRGVYLLTSHRTATAAEEFAFLMQSLGWATLVGEITAGNLLHTRTVPLLDTPEGSLALTVPVLTFIDNHGEAWLGGGVVPDAIVLAEEALDKAQEVLEFHQSLGALVEGTGHLLEAHYARPEVVGQTSALLRAKLAQGAYRTAVDLESLASQLTADLQEVSGDHRLLVFHSPGELVVEEAPPPPPAVPSPEELTYLIEALFKTEVLPGQLGYLRFDAMAELETVKAVGPQLVRLVWQQLVDTAALVIDLRYNPGSYSTAIPLLCSYFFEAEPRQHLYSVFDRATSKVTEVWTLPQVAGQRYGSHKDLYILMSHTSGSAAEAFAHTMQDLQRATVIGEPTAGGALSVGIYQVGSSPLYASMPTQMAMSATTGKAWDLAGVEPDITVPMSEALSIAQDIVALRAKVPTVLQTAGKLVADNYASAELGAKMATKLSGLQSRYSRVTSEVALAEILGADLQMLSGDPHLKAAHIPENAKDRIPGIVPMQIPSPEVFEELIKFSFHTNVLEDNIGYLRFDMFGDGELLTQVSRLLVEHIWKKIMHTDAMIIDMRFNIGGPTSSIPILCSYFFDEGPPVLLDKIYSRPDDSVSELWTHAQVVGERYGSKKSMVILTSSVTAGTAEEFTYIMKRLGRALVIGEVTSGGCQPPQTYHVDDTNLYLTIPTARSVGASDGSSWEGVGVTPHVVVPAEEALARAKEMLQHNQLRVKRSPGLQDHL

SEQ ID NO: 11255 - protein, 201 aa, Homo Sapiens
MKWVWALLLLAALGSGRAERDCRVSSFRVKENFDKARFSGTWYAMAKKDPEGLFLQDNIVAEFSVDETGQMSATAKGRVRLLNNWDVCADMVGTFTDTEDPAKFKMKYWGVASFLQKGNDDHWIVDTDYDTYAVQYSCRLLNLDGTCADSYSFVFSRDPNGLPPEAQKIVRQRQEELCLARQYRLIVHNGYCDGRSERNLL

SEQ ID NO: 11256 - protein, 201 aa, Homo Sapiens; identical to SEQ ID NO: 11255

SEQ ID NO: 11257 - protein, 199 aa, Homo Sapiens
MNYSKIPAQVDLRRQTERDCRVSSFRVKENFDKARFSGTWYAMAKKDPEGLFLQDNIVAEFSVDETGQMSATAKGRVRLLNNWDVCADMVGTFTDTEDPAKFKMKYWGVASFLQKGNDDHWIVDTDYDTYAVQYSCRLLNLDGTCADSYSFVFSRDPNGLPPEAQKIVRQRQEELCLARQYRLIVHNGYCDGRSERNLL

SEQ ID NO: 11258 - protein, 199 aa, Homo Sapiens; identical to SEQ ID NO: 11257

SEQ ID NO: 11259 - protein, 28 aa, Homo Sapiens
EILENWNMFVGSQATNYGEDLTKNHDEL

SEQ ID NO: 11260 - protein, 331 aa, Homo Sapiens
MARGGRGRRLGLALGLLLALVLAPRVLRAKPTVRKERVVRPDSELGERPPEDNQSFQYDHEAFLGKEDSKTFDQLTPDESKERLGKIVDRIDNDGDGFVTTEELKTWIKRVQKRYIFDNVAKVWKDYDRDKDDKISWEEYKQATYGYYLGNPAEFHDSSDHHTFKKMLPRDERRFKAADLNGDLTATREEFTAFLHPEEFEHMKEIVVLETLEDIDKNGDGFVDQDEYIADMFSHEENGPEPDWVLSEREQFNEFRDLNKDGKLDKDEIRHWILPQDYDHAQAEARHLVYESDKNKDEKLTKEEILENWNMFVGSQATNYGEDLTKNHDEL

SEQ ID NO: 11261 - protein, 20 aa, Homo Sapiens
MLPRDERRFKAADLNGDLTA

SEQ ID NO: 11262 - protein, 57 aa, Homo Sapiens
  misc_feature (1)..(1): Xaa can be any naturally occurring amino acid
XETLEDIDKNGDGFVDQDEYIDKETSGSVTELSQKPGFIFWLLNSVLSTPPHGLHHE

SEQ ID NO: 11263 - protein, 335 aa, Homo Sapiens
MRLGPRTAALGLLLLCAAAAGAGKAEELHYPLGERRSDYDREALLGVQEDVDEYVKLGHEEQQKRLQAIIKKIDLDSDGFLTESELSSWIQMSFKHYAMQEAKQQFVEYDKNSDDTVTWDEYNIQMYDRVIDFDENTALDDAEEESFRKEFAICKKQSFCFWLLRFNLHLKDKKRFEKANQDSGPGLSLEEFIAFEHPEEVDYMTEFVIQEALEEHDKNGDGFVSLEEFLGDYRWDPTANEDPEWILVEKDRFVNDYDKDNDGRLDPQELLPWVVPNNQGIAQEEALHLIDEMDLNGDKKLSEEEILENPDLFLTSEATDYGRQLHDDYFYHDEL

SEQ ID NO: 11264 - protein, 317 aa, Homo Sapiens
MRLGPRTAALGLLLLCAAAAGAGKAEELHYPLGERRSDYDREALLGVQEDVDEYVKLGHEEQQKRLQAIIKKIDLDSDGFLTESELSSWIQMSFKHYAMQEAKQQFVEYDKNSDDTVTWDEYNIQMYDRVIDFDENTALDDAEEESFRKLHLKDKKRFEKANQDSGPGLSLEEFIAFEHPEEVDYMTEFVIQEALEEHDKNGDGFVSLEEFLGDYRWDPTANEDPEWILVEKDRFVNDYDKDNDGRLDPQELLPWVVPNNQGIAQEEALHLIDEMDLNGDKKLSEEEILENPDLFLTSEATDYGRQLHDDYFYHDEL

SEQ ID NO: 11265 - protein, 216 aa, Homo Sapiens
MRLGPRTAALGLLLLCAAAAGAGKAEELHYPLGERRSDYDREALLGVQLHLKDKKRFEKANQDSGPGLSLEEFIAFEHPEEVDYMTEFVIQEALEEHDKNGDGFVSLEEFLGDYRWDPTANEDPEWILVEKDRFVNDYDKDNDGRLDPQELLPWVVPNNQGIAQEEALHLIDEMDLNGDKKLSEEEILENPDLFLTSEATDYGRQLHDDYFYHDEL

SEQ ID NO: 11266 - protein, 155 aa, Homo Sapiens
  misc_feature (1)..(1): Xaa can be any naturally occurring amino acid
XGLLLLCAAAAGAGKAEELHYPLGERRSDYDREALLGVQEDVDEYVKLGHEEQQKRLQAIIKKIDLDSDGFLTESELSSWIQMSFKHYAMQEAKQQFVEYDKNSDDTVTWDEYNIQMYDRVIDFDENTALDDAEEESFRKHQCGGLGLHPQSQSA

SEQ ID NO: 11267 - protein, 169 aa, Homo Sapiens
FQYDHEAFLGREVAKEFDQLTPEESQARLGRIVDRMDRAGDGDGWVSLAELRAWIAHTQQRHIRDSVSAAWDTYDTDRDGRVGWEELRNATYGHYAPGEEFHDVEDAETYKKMLARDERRFRVADQDGDSMATREELTAFLHPEEFPHMRDIVIALFFSRIYLLTFLLL

SEQ ID NO: 11268 - protein, 150 aa, Homo Sapiens
MMWRPSVLLLLLLLRHGAQGKPSPDAGPHGQGRVHQAAPLSDAPHDDAHGNFQYDHEAFLGREVAKEFDQLTPEESQARLGRIVDRMDRAGDGDGWVSLAELRAWIAHTQQRHIRDSVKNFMTWRMQRPTKRCWLGTSGVSGWPTRMGTR

SEQ ID NO: 11269 - protein, 328 aa, Homo Sapiens
MMWRPSVLLLLLLLRHGAQGKPSPDAGPHGQGRVHQAAPLSDAPHDDAHGNFQYDHEAFLGREVAKEFDQLTPEESQARLGRIVDRMDRAGDGDGWVSLAELRAWIAHTQQRHIRDSVSAAWDTYDTDRDGRVGWEELRNATYGHYAPGEEFHDVEDAETYKKMLARDERRFRVADQDGDSMATREELTAFLHPEEFPHMRDIVIAETLEDLDRNKDGYVQVEEYIADLYSAEPGEEEPAWVQTERQQFRDFRDLNKDGHLDGSEVGHWVLPPAQDQPLVEANHLLHESDTDKDGRLSKAEILGNWNMFVGSQATNYGEDLTRHHDEL

SEQ ID NO: 11270 - protein, 58 aa, Homo Sapiens
  misc_feature (1)..(1): Xaa can be any naturally occurring amino acid
XTERQQFRDFRDLNKDGHLDGSEDGRLSKAEILGNWNMFVGSQATNYGEDLTRHHDEL

SEQ ID NO: 11271 - protein, 485 aa, Homo Sapiens
MPAMVEKGPEVSGKRRGRNNAAASASAAAASAAASAACASPAATAASGAAASSASAAAASAAAAPNNGQNKSLAAAAPNGNSSSNSWEEGSSGSSSDEEHGGGGMRVGPQYQAVVPDFDPAKLARRSQERDNLGMLVWSPNQNLSEAKLDEYIAIAKEKHGYNMEQALGMLFWHKHNIEKSLADLPNFTPFPDEWTVEDKVLFEQAFSFHGKTFHRIQQMLPDKSIASLVKFYYSWKKTRTKTSVMDRHARKQKREREESEDELEEANGNNPIDIEVDQNKESKKEVPPTETVPQVKKEKHSTQAKNRAKRKPPKGMFLSQEDVEAVSANATAATTVLRQLDMELVSVKRQIQNIKQTNSALKEKLDGGIEPYRLPEVIQKCNARWTTEEQLLAVQAIRKYGRDFQAISDVIGNKSVVQVKNFFVNYRRRFNIDEVLQEWEAEHGKEETNGPSNQKPVKSPDNSIKMPEEEDEAPVLDVRYASAS

SEQ ID NO: 11272 - protein, 35 aa, Homo Sapiens
QTNSALKEKLDGGIEPYRLPEPSGNMAEIFRQSQT

SEQ ID NO: 11273 - protein, 305 aa, Homo Sapiens
MVELMFPLLLLLLPFLLYMAAPQIRKMLSSGVCTSTVQLPGKVVVVTGANTGARVYLACRDVEKGELVAKEIQTTTGNQQVLVRKLDLSDTKSIRAFAKGFLAEEKHLHVLINNAGVMMCPYSKTADGFEMHIGVNHLGHFLLTHLLLEKLKESAPSRIVNVSSLAHHLGRIHFHNLQGEKFYNAGLAYCHSKLANILFTQELARRLKGSGVTTYSVHPGTVQSELVRHSSFMRWMWWLFSFFIKTPQQGAQTSLHCALTEGLEILSGNHFSDCHVAWVSAQARNETIARRLWDVSCDLLGLPID

SEQ ID NO: 11274 - protein, 187 aa, Homo Sapiens [sequence omitted]

SEQ ID NO: 11275 - protein, 318 aa, Homo Sapiens
MVELMFPLLLLLLPFLLYMAAPQIRKMLSSGVCTSTVQLPGKVVVVTGANTGIGKETAKELAQRGARVYLACRDVEKGELVAKEIQTTTGNQQVLVRKLDLSDTKSIRAFAKGFLAEEKHLHVLINNAGVMMCPYSKTADGFEMHIGVNHLGHFLLTHLLLEKLKESAPSRIVNVSSLAHHLGRIHFHNLQGEKFYNAGLAYCHSKLANILFTQELARRLKGSGVTTYSVHPGTVQSELVRHSSFMRWMWWLFSFFIKTPQQGAQTSLHCALTEGLEILSGNHFSDCHVAWVSAQARNETIARRLWDVSCDLLGLPID

SEQ ID NO: 11276 - protein, 248 aa, Homo Sapiens
MVELMFPLLLLLLPFLLYMAAPQIRKMLSSGVCTSTVQLPGKVVVVTGANTGIGKETAKELAQRGARVYLACRDVEKGELVAKEIQTTTGNQQVLVRKLDLSDTKSIRAFAKGFLAEEKHLHVLINNAGVMMCPYSKTADGFEMHIGVNHLGSGVTTYSVHPGTVQSELVRHSSFMRWMWWLFSFFIKTPQQGAQTSLHCALTEGLEILSGNHFSDCHVAWVSAQARNETIARRLWDVSCDLLGLPID

SEQ ID NO: 11277 - protein, 178 aa, Homo Sapiens
MVELMFPLLLLLLPFLLYMAAPQIRKMLSSGVCTSTVQLPGKVVVVTGANTGIGKETAKELAQRGHFLLTHLLLEKLKESAPSRIVNVSSLAHHLGRIHFHNLQGEKFYNAGLAYCHSKLANILFTQELARRLKGSGVTTYSVHPGTVQSELVRHSSFMRWMWWLFSFFIKTPQQGAQ

SEQ ID NO: 11278 - protein, 61 aa, Homo Sapiens
MVELMFPLLLLLLPFLLYMAAPQIRSLPPNPSAARETKGISPIKDSKCVFPRTSPGKDPLP

SEQ ID NO: 11279 - protein, 62 aa, Homo Sapiens
MVELMFPLLLLLLPFLLYMAAPQIRSSSIFSLPGCGKGGIGGQRDPDHDREPAGVGAETGPV

SEQ ID NO: 11280 - protein, 204 aa, Homo Sapiens
SDTKSIRAFAKGFLAEEKHLHVLINNAGVMMCPYSKTADGFEMHIGVNHLGHFLLTHLLLEKLKESAPSRIVNVSSLAHHLGRIHFHNLQGEKFYNAGLAYCHSKLANILFTQELARRLKVQSELVRHSSFMRWMWWLFSFFIKTPQQGAQTSLHCALTEGLEILSGNHFSDCHVAWVSAQARNETIARRLWDVSCDLLGLPID

SEQ ID NO: 11281 - protein, 316 aa, Homo Sapiens
MLVTLGLLTSFFSFLYMVAPSIRKFFAGGVCRTNVQLPGKVVVITGANTGIGKETARELASRGARVYIACRDVLKGESAASEIRVDTKNSQVLVRKLDLSDTKSIRAFAEGFLAEEKQLHILINNAGVMMCPYSKTADGFETHLGVNHLGHFLLTYLLLERLKVSAPARVVNVSSVAHHIGKIPFHDLQSEKRYSRGFAYCHSKLANVLFTRELAKRLQGTGVTTYAVHPGVVRSELVRHSSLLCLLWRLFSPFVKTAREGAQTSLHCALAEGLEPLSGKYFSDCKRTWVSPRARNNKTAERLWNVSCELLGIRWE

SEQ ID NO: 11282 - protein, 316 aa, Homo Sapiens; identical to SEQ ID NO: 11281

SEQ ID NO: 11283 - protein, 42 aa, Homo Sapiens
MEKCEAAAKDIRGETLNHHVNARHLDLASLKSIREFAAKIIE

SEQ ID NO: 11284 - protein, 260 aa, Homo Sapiens
MEKCEAAAKDIRGETLNHHVNARHLDLASLKSIREFAAKIIEEEERVDILINNAGVMRCPHWTTEDGFEMQFGVNHLGHFLLTNLLLDKLKASAPSRIINLSSLAHVAGHIDFDDLNWQTRKYNTKAAYCQSKLAIVLFTKELSRRLQGSGVTVNALHPGVARTELGRHTGIHGSTFSSTTLGPIFWLLVKSPELAAQPSTYLAVAEELADVSGKYFDGLKQKAPAPEAEDEEVARRLWAESARLVGLEAPSVREQPLPR

SEQ ID NO: 11285 - protein, 260 aa, Homo Sapiens; identical to SEQ ID NO: 11284

SEQ ID NO: 11286 - protein, 29 aa, Homo Sapiens
MSRYLLPLSALGTVAGAAVLLKDYVTGGA

SEQ ID NO: 11287 - protein, 220 aa, Homo Sapiens
MSRYLLPLSALGTVAGAAVLLKDYVTGGACPSKATIPGKTVIVTGANTGIGKQTALELARRGGNIILACRDMEKCEAAAKDIRGETLNHHVNARHLDLASLKSIREFAAKIIEEEERVDILINNAGVMRCPHWTTEDGFEMQFGVNHLGHFLLTNLLLDKLKASAPSRIINLSSLAHVAGHIDFDDLNWQTRKYNTKAAYCQSKLAIVLFTKELSRRLQG

SEQ ID NO: 11288 - protein, 220 aa, Homo Sapiens; identical to SEQ ID NO: 11287

SEQ ID NO: 11289 - protein, 331 aa, Homo Sapiens
MSRYLLPLSALGTVAGAAVLLKDYVTGGACPSKATIPGKTVIVTGANTGIGKQTALELARRGGNIILACRDMEKCEAAAKDIRGETLNHHVNARHLDLASLKSIREFAAKIIEEEERVDILINNAGVMRCPHWTTEDGFEMQFGVNHLGHFLLTNLLLDKLKASAPSRIINLSSLAHVAGHIDFDDLNWQTRKYNTKAAYCQSKLAIVLFTKELSRRLQGSGVTVNALHPGVARTELGRHTGIHGSTFSSTTLGPIFWLLVKSPELAAQPSTYLAVAEELADVSGKYFDGLKQKAPAPEAEDEEVARRLWAESARLVGLEAPSVREQPLPR

SEQ ID NO: 11290 - protein, 35 aa, Homo Sapiens
MSRYLLPLSALGTVAGAAVLLKRQHHPGLPRHGEV

SEQ ID NO: 11291 - protein, 35 aa, Homo Sapiens; identical to SEQ ID NO: 11290

SEQ ID NO: 11292 - protein, 55 aa, Homo Sapiens
MHVKEAGLFGLVNNAGVAGIIGPTPWLTRDDFQRVLNVNTMGPIGVTLALLPLLQ

SEQ ID NO: 11293 - protein, 221 aa, Homo Sapiens
MHVKEAGLFGLVNNAGVAGIIGPTPWLTRDDFQRVLNVNTMGPIGVTLALLPLLQQARGRVINITSVLGRLAANGGGYCVSKFGLEAFSDSLRRDVAHFGIRVSIVEPGFFRTPVTNLESLEKTLQACWARLPPATQAHYGGAFLTKYLKMQQRIMNLICDPDLTKVSRCLEHALTARHPRTRYSPGWDAKLLWLPASYLPASLVDAVLTWVLPKPAQAVY

SEQ ID NO: 11294 - protein, 318 aa, Homo Sapiens
MWLPLLLGALLWAVLWLLRDRQSLPASNAFVFITGCDSGFGRLLALQLDQRGFRVLASCLTPSGAEDLQRVASSRLHTTLLDITDPQSVQQAAKWVEMHVKEAGLFGLVNNAGVAGIIGPTPWLTRDDFQRVLNVNTMGPIGVTLALLPLLQQARGRVINITSVLGRLAANGGGYCVSKFGLEAFSDSLRRDVAHFGIRVSIVEPGFFRTPVTNLESLEKTLQACWARLPPATQAHYGGAFLTKYLKMQQRIMNLICDPDLTKVSRCLEHALTARHPRTRYSPGWDAKLLWLPASYLPASLVDAVLTWVLPKPAQAVY

SEQ ID NO: 11295 - protein, 318 aa, Homo Sapiens; identical to SEQ ID NO: 11294

SEQ ID NO: 11296 - protein, 103 aa, Homo Sapiens
  misc_feature (1)..(1): Xaa can be any naturally occurring amino acid
XLLLGALLWAVLWLLRDRQSLPASNAFVFITGCDSGFGRLLALQLDQRGFRVLASCLTPSGAEDLQRVASSRLHTTLLDITDPQSVQQAAKWVEMHVKEAGGM

SEQ ID NO: 11297 - protein, 331 aa, Homo Sapiens
MNGQSQVLPGGGHESREGINMAAAPRTVLISGCSSGIGLELAVQLAHDPKKRYQVVATMRDLGKKETLEAAAGEALGQTLTVAQLDVCSDESVAQCLSCIQGEVDVLVNNAGMGLVGPLEGLSLAAMQNVFDTNFFGAVRLVKAVLPGMKRRRQGHIVVISSVMGLQGVIFNDVYAASKFALEGFFESLAIQLLQFNIFISLVEPGPVVTEFEGKLLAQVSMAEFPGTDPETLHYFRDLYLPASRKLFCSVGQNPQDVVQAIVNVISSTRPPLRRQTNIRYSPLTTLKTVDSSGSLYVRTTHRLLFRCPRLLNLGLQCLSCGCLPTRVRPR

SEQ ID NO: 11298 - protein, 79 aa, Homo Sapiens
  misc_feature (1)..(1): Xaa can be any naturally occurring amino acid
XFESLAIQLLQFNILFLWLSSQALTLRPCTTSGTSISQPPGSCFAPWDRTHRTWFRPLSTSSARLDHPCADRPTSATRR

SEQ ID NO: 11299 - protein, 166 aa, Homo Sapiens
MAQTSSYFMLISCLMFLSQSQGQEAQTELPQARISCPEGTNAYRSYCYYFNEDRETWVDADLYCQNMNSGNLVSVLTQAEGAFVASLIKESGTDDFNVWIGLHDPKKNRRWHWSSGSLVSYKSWGIGAPSSVNPGYCVSLTSSTGFQKWKDVPCEDKFSFVCKFKN

SEQ ID NO: 11300 - protein, 149 aa, Homo Sapiens
FNEDPETWVDADLYCQNMNSGNLVSVLTQAEGAFVASLIKESSTDDSNVWIGLHDPKKNRRWHWSSGSLVSYKSWDTGSPSSANAGYCASLTSCSGERQTIYPPVAISFPLISGDEHGDWDRGKDSRNGRMNLVRRSSPLFASSKTRGS

SEQ ID NO: 11301 - protein, 166 aa, Homo Sapiens
MAQTNSFFMLISSLMFLSLSQGQESQTELPNPRISCPEGTNAYRSYCYYFNEDPETWVDADLYCQNMNSGNLVSVLTQAEGAFVASLIKESSTDDSNVWIGLHDPKKNRRWHWSSGSLVSYKSWDTGSPSSANAGYCASLTSCSGFKKWKDESCEKKFSFVCKFKN

SEQ ID NO: 11302 - protein, 175 aa, Homo Sapiens
MLPPMALPSVSWMLLSCLMLLSQVQGEEPQRELPSARIRCPKGSKAYGSHCYALFLSPKSWTDADLACQKRPSGNLVSVLSGAEGSFVSSLVKSIGNSYSYVWIGLHDPTQGTEPNGEGWEWSSSDVMNYFAWERNPSTISSPGHCASLSRSTAFLRWKDYNCNVRLPYVCKFTD

SEQ ID NO: 11303 - protein, 175 aa, Homo Sapiens; identical to SEQ ID NO: 11302

SEQ ID NO: 11304 - protein, 175 aa, Homo Sapiens; identical to SEQ ID NO: 11302

SEQ ID NO: 11305 - protein, 129 aa, Homo Sapiens
MLPPMALPSVSWMLLSCLILLCQVQGEETQKELPSPRISCPKGSKAYGSPCYALFLSPKSWMDADGSEPDGDGWEWSSTDVMNYFAWEKNPSTILNPGHCGSLSRSTGFLKWKDYNCDAKLPYVCKFKD

SEQ ID NO: 11306 - protein, 175 aa, Homo Sapiens
MLPPMALPSVSWMLLSCLILLCQVQGEETQKELPSPRISCPKGSKAYGSPCYALFLSPKSWMDADLACQKRPSGKLVSVLSGAEGSFVSSLVRSISNSYSYIWIGLHDPTQGSEPDGDGWEWSSTDVMNYFAWEKNPSTILNPGHCGSLSRSTGFLKWKDYNCDAKLPYVCKFKD

SEQ ID NO: 11307 - protein, 175 aa, Homo Sapiens; identical to SEQ ID NO: 11306

SEQ ID NO: 11308 - protein, 158 aa, Homo Sapiens
MASRSMRLLLLLSCLAKTGVLGDIIMRPSCAPGWFYHKSNCYGYFRKLRNWSDAELECQSYGNGAHLASILSLKEASTIAEYISGYQRSQPIWIGLHDPQKRQQWQWIDGAMYLYRSWSGKSMGGNKHCAEMSSNNNFLTWSSNECNKRQHFLCKYRP

SEQ ID NO: 11309 - protein, 158 aa, Homo Sapiens; identical to SEQ ID NO: 11308

SEQ ID NO: 11310 - protein, 103 aa, Homo Sapiens
MASRSMRLLLLLSCLAKTGVLGDIIMRPSCAPGWFYHKSNCYGYFRKLRNWSDAELECQSYGNGAHLASILSLKEASTIAEYISGYQRSQPIWIGLHDPQKTF

SEQ ID NO: 11311 - protein, 134 aa, Homo Sapiens
MASRSMRLLLLLSCLAKTGVLGDIIMRPSCAPGWFYHKSNCYGYFRKLRNWSDAEVRNLLPAWPGLSRAKDQPEPQISFDSGSSVLPGHYEEKPLWLVKWREEGCVFNSFNSVSIAEAGAVCQTLDGLQAHTDT

SEQ ID NO: 11312 - protein, 3458 aa, Homo Sapiens
MERSGWARQTFLLALLLGATLRARAAAGYYPRFSPFFFLCTHHGELEGDGEQGEVLISLHIAGNPTYYVPGQEYHVTISTSTFFDGLLVTGLYTSTSVQASQSIGGSSAFGFGIMSDHQFGNQFMCSVVASHVSHLPTTNLSFIWIAPPAGTGCVNFMATATHRGQVIFKDALAQQLCEQGAPTDVTVHPHLAEIHSDSIILRDDFDSYHQLQLNPNIWVECNNCETGEQCGAIMHGNAVTFCEPYGPRELITTGLNTTTASVLQFSIGSGSCRFSYSDPSIIVLYAKNNSADWIQLEKIRAPSNVSTIIHILYLPEDAKGENVQFQWKQENLRVGEVYEACWALDNILIINSAHRQVVLEDSLDPVDTGNWLFFPGATVKHSCQSDGNSIYFHGNEGSEFNFATTRDVDLSTEDIQEQWSEEFESQPTGWDVLGAVIGTECGTIESGLSMVFLKDGERKLCTPSMDTTGYGNLRFYFVMGGICDPGNSHENDIILYAKIEGRKEHITLDTLSYSSYKVPSLVSVVINPELQTPATKFCLRQKNHQGHNRNVWAVDFFHVLPVLPSTMSHMIQFSINLGCGTHQPGNSVSLEFSTNHGRSWSLLHTECLPEICAGPHLPHSTVYSSENYSGWNRITIPLPNAALTRNTRIRWRQTGPILGNMWAIDNVYIGPSCLKFCSGRGQCTRHGCKCDPGFSGPACEMASQTFPMFISESFGSSRLSSYHNFYSIRGAEVSFGCGVLASGKALVFNKDGRRQLITSFLDSSQSRFLQFTLRLGSKSVLSTCRAPDQPGEGVLLHYSYDNGITWKLLEHYSYLSYHEPRIISVELPGDAKQFGIQFRWWQPYHSSQREDVWAIDEIIMTSVLFNSISLDFTNLVEVTQSLGFYLGNVQPYCGHDWTLCFTGDSKLASSMRYVETQSMQIGASYMIQFSLVMGCGQKYTPHMDNQVKLEYSTNHGLTWHLVQEECLPSMPSCQEFTSASIYHASEFTQWRRVIVLLPQKTWSSATRFRWSQSYYTAQDEWALDSIYIGQQCPNMCSGHGSCDHGICRCDQGYQGTECHPEAALPSTIMSDFENQNGWESDWQEVIGGEIVKPEQGCGVISSGSSLYFSKAGKRQLVSWDLDTSWVDFVQFYIQIGGESASCNKPDSREEGVLLQYSNNGGIQWHLLAEMYFSDFSKPRFVYLELPAAAKTPCTRFRWWQPVFSGEDYDQWAVDDIIILSEKQKQIIPVINPTLPQNFYEKPAFDYPMNQMSVWLMLANEGMVKNETFCAATPSAMIFGKSDGDRFAVTRDLTLKPGYVLQFKLNIGCANQFSSTAPVLLQYSHDAGMSWFLVKEGCYPASAGKGCEGNSRELSEPTMYHTGDFEEWTRITIVIPRSLASSKTRFRWIQESSSQKNVPPFGLDGVYISEPCPSYCSGHGDCISGVCFCDLGYTAAQGTCVSNVPNHNEMFDRFEGKLSPLWYKITGAQVGTGCGTLNDGKSLYFNGPGKREARTVPLDTRNIRLVQFYIQIGSKTSGITCIKPRTRNEGLIVQYSNDNGILWHLLRELDFMSFLEPQIISIDLPQDAKTPATAFRWWQPQHGKHSAQWALDDVLIGMNDSSQTGFQDKFDGSIDLQANWYRIQGGQVDIDCLSMDTALIFTENIGKPRYAETWDFHVSASTFLQFEMSMGCSKPFSNSHSVQLQYSLNNGKDWHLVTEECVPPTIGCLHYTESSIYTSERFQNWKRITVYLPLSTISPRTRFRWIQANYTVGADSWAIDNVVLASGCPWMCSGRGICDAGRCVCDRGFGGPYCVPVVPLPSILKDDFNGNLHPDLWPEVYGAERGNLNGETIKSGTSLIFKGEGLRMLISRDLDCTNTMYVQFSLRFIAKSTPERSHSILLQFSISGGITWHLMDEFYFPQTTNILFINVPLPYTAQTNATRFRLWQPYNNGKKEEIWIVDDFIIDGNNVNNPVMLLDTFDFGPREDNWFFYPGGNIGLYCPYSSKGAPEEDSAMVFVSNEVGEHSITTRDLNVNENTIIQFEINVGCSTDSSSADPVRLEFSRDFGATWHLLLPLCYHSSSHVSSLCSTEHHPSSTYYAGTMQGWRREVVHFGKLHLCGSVRFRWYQGFYPAGSQPVTWAIDNVYIGPQCEEMCNGQGSCINGTKCICDPGYSGPTCKISTKNPDFLKDDFEGQLESDRFLLMSGGKPSRKCGILSSGNNLFFNEDGLRMLMTRDLDLSHARFVQFFMRLGCGKGVPDPRSQPVLLQYSLNGGLSWSLLQEFLFSNSSNVGRYIALEIPLKARSGSTRLRWWQPSENGHFYSPWVIDQILIGGNISGNTVLEDDFTTLDSRKWLLHPGGTKMPVCGSTGDALVFIEKASTRYVVSTDVAVNEDSFLQIDFAASCSVTDSCYAIELEYSVDLGLSWHPLVRDCLPTNVECSRYHLQRILVSDTFNKWTRITLPLPPYTRSQATRFRWHQPAPFDKQQTWAIDNVYIGDGCIDMCSGHGRCIQGNCVCDEQWGGLYCDDPETSLPTQLKDNFNRAPSSQNWLTVNGGKLSTVCGAVASGMALHFSGGCSRLLVTVDLNLTNAEFIQFYFMYGCLITPNNRNQGVLLEYSVNGGITWNLLMEIFYDQYSKPGFVNILLPPDAKEIATRFRWWQPRHDGLDQNDWAIDNVLISGSADQRTVMLDTFSSAPVPQHERSPADAGPVGRIAFDMFMEDKTSVNEHWLFHDDCTVERFCDSPDGVMLCGSHDGREVYAVTHDLTPTEGWIMQFKISVGCKVSEKIAQNQIHVQYSTDFGVSWNYLVPQCLPADPKCSGSVSQPSVFFPTKGWKRITYPLPESLVGNPVRFRFYQKYSDMQWAIDNFYLGPGCLDNCRGHGDCLREQCICDPGYSGPNCYLTHTLKTFLKERFDSEEIKPDLWMSLEGGSTCTECGILAEDTALYFGGSTVRQAVTQDLDLRGAKFLQYWGRIGSENNMTSCHRPICRKEGVLLDYSTDGGITWTLLHEMDYQKYISVRHDYILLPEDALTNTTRLRWWQPFVISNGIVVSGVERAQWALDNILIGGAEINPSQLVDTFDDEGTSHEENWSFYPNAVRTAGFCGNPSFHLYWPNKKKDKTHNALSSRELIIQPGYMMQFKIVVGCEATSCGDLHSVMLEYTKDARSDSWQLVQTQCLPSSSNSIGCSPFQFHEATIYNSVNSSSWKRITIQLPDHVSSSATQFRWIQKGEETEKQSWAIDHVYIGEACPKLCSGHGYCTTGAICICDESFQGDDCSVFSHDLPSYIKDNFESARVTEANWETIQGGVIGSGCGQLAPYAHGDSLYFNGCQIRQAATKPLDLTRASKIMFVLQIGSMSQTDSCNSDLSGPHAVDKAVLLQYSVNNGITWHVIAQHQPKDFTQAQRVSYNVPLEARMKGVLLRWWQPRHNGTGHDQWALDHVEVVLTRKQNYMMNFSRQHGLRHFYNRRRRSLRRYP

SEQ ID NO: 11313 - protein, 3460 aa, Homo Sapiens [sequence omitted]

SEQ ID NO: 11314 - protein, 3460 aa, Homo Sapiens
MERSGWARQTFLLALLLGATLRARAAAGYYPRFSPFFFLCTHHGELEGDGEQGEVLISLHIAGNPTYYVPGQEYHVTISTSTFFDGLLVTGLYTSTSVQASQSIGGSSAFGFGIMSDHQFGNQFMCSVVASHVSHLPTTNLSFIWIAPPAGTGCVNFMATATHRGQVIFKDALAQQLCEQGAPTDVTVHPHLAEIHSDSIILRDDFDSYHQLQLNPNIWVECNNCETGEQCGAIMHGNAVTFCEPYGPRELITTGLNTTTASVLQFSIGSGSCRFSYSDPSIIVLYAKNNSADWIQLEKIRAPSNVSTIIHILYLPEDAKGENVQFQWKQENLRVGEVYEACWALDNILIINSAHRQVVLEDSLDPVDTGNWLFFPGATVKHSCQSDGNSIYFHGNEGSEFNFATTRDVDLSTEDIQEQWSEEFESQPTGWDVLGAVIGTECGTIESGLSMVFLKDGERKLCTPSMDTTGYGNLRFYFVMGGICDPGNSHENDIILYAKIEGRKEHITLDTLSYSSYKVPSLVSVVINPELQTPATKFCLRQKNHQGHNRNVWAVDFFHVLPVLPSTMSHMIQFSINLGCGTHQPGNSVSLEFSTNHGRSWSLLHTECLPEICAGPHLPHSTVYSSENYSGWNRITIPLPNAALTRNTRIRWRQTGPILGNMWAIDNVYIGPSCLKFCSGRGQCTRHGCKCDPGFSGPACEMASQTFPMFISESFGSSRLSSYHNFYSIRGAEVSFGCGVLASGKALVFNKDGRRQLITSFLDSSQSRFLQFTLRLGSKSVLSTCRAPDQPGEGVLLHYSYDNGITWKLLEHYSYLSYHEPRIISVELPGDAKQFGIQFRWWQPYHSSQREDVWAIDEIIMTSVLFNSISLDFTNLVEVTQSLGFYLGNVQPYCGHDWTLCFTGDSKLASSMRYVETQSMQIGASYMIQFSLVMGCGQKYTPHMDNQVKLEYSTNHGLTWHLVQEECLPSMPSCQEFTSASIYHASEFTQWRRVIVLLPQKTWSSATRFRWSQSYYTAQDEWALDSIYIGQQCPNMCSGHGSCDHGICRCDQGYQGTECHPEAALPSTIMSDFENQNGWESDWQEVIGGEIVKPEQGCGVISSGSSLYFSKAGKRQLVSWDLDTSWVDFVQFYIQIGGESASCNKPDSREEGVLLQYSNNGGIQWHLLAEMYFSDFSKPRFVYLELPAAAKTPCTRFRWWQPVFSGEDYDQWAVDDIIILSEKQKQIIPVINPTLPQNFYEKPAFDYPMNQMSVWLMLANEGMVKNETFCAATPSAMIFGKSDGDRFAVTRDLTLKPGYVLQFKLNIGCANQFSSTAPVLLQYSHDAGMSWFLVKEGCYPASAGKGCEGNSRELSEPTMYHTGDFEEWTRITIVIPRSLASSKTRFRWIQESSSQKNVPPFGLDGVYISEPCPSYCSGHGDCISGVCFCDLGYTAAQGTCVSNVPNHNEMFDRFEGKLSPLWYKITGAQVGTGCGTLNDGKSLYFNGPGKREARTVPLDTRNIRLVQFYIQIGSKTSGITCIKPRTRNEGLIVQYSNDNGILWHLLRELDFMSFLEPQIISIDLPQDAKTPATAFRWWQPQHGKHSAQWALDDVLIGMNDSSQTGFQDKFDGSIDLQANWYRIQGGQVDIDCLSMDTALIFTENIGKPRYAETWDFHVSASTFLQFEMSMGCSKPFSNSHSVQLQYSLNNGKDWHLVTEECVPPTIGCLHYTESSIYTSERFQNWKRITVYLPLSTISPRTRFRWIQANYTVGADSWAIDNVVLASGCPWMCSGRGICDAGRCVCDRGFGGPYCVPVVPLPSILKDDFNGNLHPDLWPEVYGAERGNLNGETIKSGTSLIFKGEGLRMLISRDLDCTNTMYVQFSLRFIAKSTPERSHSILLQFSISGGITWHLMDEFYFPQTTNILFINVPLPYTAQTNATRFRLWQPYNNGKKEEIWIVDDFIIDGNNVNNPVMLLDTFDFGPREDNWFFYPGGNIGLYCPYSSKGAPEEDSAMVFVSNEVGEHSITTRDLNVNENTIIQFEINVGCSTDSSSADPVRLEFSRDFGATWHLLLPLCYHSSSHVSSLCSTEHHPSSTYYAGTMQGWRREVVHFGKLHLCGSVRFRWYQGFYPAGSQPVTWAIDNVYIGPQCEEMCNGQGSCINGTKCICDPGYSGPTCKISTKNPDFLKDDFEGQLESDRFLLMSGGKPSRKCGILSSGNNLFFNEDGLRMLMTRDLDLSHARFVQFFMRLGCGKGVPDPRSQPVLLQYSLNGGLSWSLLQEFLFSNSSNVGRYIALEIPLKARSGSTRLRWWQPSENGHFYSPWVIDQILIGGNISGNTVLEDDFTTLDSRKWLLHPGGTKMPVCGSTGDALVFIEKASTRYVVSTDVAVNEDSFLQIDFAASCSVTDSCYAIELEYSVDLGLSWHPLVRDCLPTNVECSRYHLQRILVSDTFNKWTRITLPLPPYTRSQATRFRWHQPAPFDKQQTWAIDNVYIGDGCIDMCSGHGRCIQGNCVCDEQWGGLYCDDPETSLPTQLKDNFNRAPSSQNWLTVNGGKLSTVCGAVASGMALHFSGGCSRLLVTVDLNLTNAEFIQFYFMYGCLITPNNRNQGVLLEYSVNGGITWNLLMEIFYDQYSKPGFVNILLPPDAKEIATRFRWWQPRHDGLDQNDWAIDNVLISGSADQRTVMLDTFSSAPVPQHERSPADAGPVGRIAFDMFMEDKTSVNEHWLFHDDCTVERFCDSPDGVMLCGSHDGREVYAVTHDLTPTEGWIMQFKISVGCKVSEKIAQNQIHVQYSTDFGVSWNYLVPQCLPADPKCSGSVSQPSVFFPTKGWKRITYPLPESLVGNPVRFRFYQKYSDMQWAIDNFYLGPGCLDNCRGHGDCLREQCICDPGYSGPNCYLTHTLKTFLKERFDSEEIKPDLWMSLEGGSTCTECGILAEDTALYFGGSTVRQAVTQDLDLRGAKFLQYWGRIGSENNMTSCHRPICRKEGVLLDYSTDGGITWTLLHEMDYQKYISVRHDYILLPEDALTNTTRLRWWQPFVISNGIVVSGVERAQWALDNILIGGAEINPSQLVDTFDDEGTSHEENWSFYPNAVRTAGFCGNPSFHLYWPNKKKDKTHNALSSRELIIQPGYMMQFKIVVGCEATSCGDLHSVMLEYTKDARSDSWQLVQTQCLPSSSNSIGCSPFQFHEATIYNSVNSSSWKRITIQLPDHVSSSATQFRWIQKGEETEKQSWAIDHVYIGEACPKLCSGHGYCTTGAICICDESFQGDDCSVFSHDLPSYIKDNFESARVTEANWETIQGGVIGSGCGQLAPYAHGDSLYFNGCQIRQAATKPLDLTRASKIMFVLQIGSMSQTDSCNSDLSGPHAVDKAVLLQYSVNNGITWHVIAQHQPKDFTQAQRVSYNVPLEARMKGVLLRWWQPRHNGTGHDQWALDHVEVVLVSTRKQNYMMNFSRQHGLRHFYNRRRRSLRRYP

SEQ ID NO: 11315 - protein, 68 aa, Homo Sapiens
  misc_feature (1)..(1): Xaa can be any naturally occurring amino acid
XLRWWQPRHNGTGHDQWALDHVEVVLDEKSYIASKPDQTFMTNHSAACIERHFLTCVIFHYLLSLVFH

SEQ ID NO: 11316 - protein, 103 aa, Homo Sapiens
MKPSLLCRPLSCFLMLLPWPLATLTSTTLWQCPPGEEPDLDPGQGTLCRPCPPGTFSAAWGSSPCQPHARCSLWRRLEAQVGMATRDTLCGDCWPGNQPCLPD

SEQ ID NO: 11317 - protein, 101 aa, Homo Sapiens
MKPSLLCRPLSCFLMLLPWPLATLTSTTLWQCPPGEEPDLDPGQGTLCRPCPPGTFSAAWGSSPCQPHARCSLWRRLEAQVGMATRDTLCGDCWPGWFGPW

SEQ ID NO: 11318 - protein, 430 aa, Homo Sapiens
MKPSLLCRPLSCFLMLLPWPLATLTSTTLWQCPPGEEPDLDPGQGTLCRPCPPGTFSAAWGSSPCQPHARCSLWRRLEAQVGMATRDTLCGDCWPGWFGPWGVPRVPCQPCSWAPLGTHGCDEWGRRARRGVEVAAGASSGGETRQPGNGTRAGGPEETAAQYAVIAIVPVFCLMGLLGILVCNLLKRKGYHCTAHKEVGPGPGGGGSGINPAYRTEDANEDTIGVLVRLITEKKENAAALEELLKEYHSKQLVQTSHRPVSKLPPAPPNVPHICPHRHHLHTVQGLASLSGPCCSRCSQKKWPEVLLSPEAVAATTPVPSLLPNPTRVPKAGAKAGRQGEITILSVGRFRVARIPEQRTSSMVSEVKTITEAGPSWGDLPDSPQPGLPPEQQALLGSGGSRTKWLKPPAENKAEENRYVVRLSESNLVI

SEQ ID NO: 11319 - protein, 430 aa, Homo Sapiens; identical to SEQ ID NO: 11318

SEQ ID NO: 11320 - protein, 406 aa, Homo Sapiens
MDGWRRMPRWGLLLLLWGSCTFGLPTDTTTFKRIFLKRMPSIRESLKERGVDMARLGPEWSQPMKRLTLGNTTSSVILTNYMDTQYYGEIGIGTPPQTFKVVFDTGSSNVWVPSSKCSRLYTACVYHKLFDASDSSSYKHNGTELTLRYSTGTVSGFLSQDIITVGGITVTQMFGEVTEMPALPFMLAEFDGVVGMGFIEQAIGRVTPIFDNIISQGVLKEDVFSFYYNRDSENSQSLGGQIVLGGSDPQHYEGNFHYINLIKTGVWQIQMKGVSVGSSTLLCEDGCLALVDTGASYISGSTSSIEKLMEALGAKKRLFDYVVKCNEGPTLPDISFHLGGKEYTLTSADYVFQESYSSKKLCTLAIHAMDIPPPTGPTWALGATFIRKFYTEFDRRNNRIGFALAR

SEQ ID NO: 11321 - protein, 368 aa, Homo Sapiens
MPSIRESLKERGVDMARLGPEWSQPMKRLTLGNTTSSVILTNYMDTQYYGEIGIGTPPQTFKVVFDTGSSNVWVPSSKCSRLYTACVYHKLFDASDSSSYKHNGTELTLRYSTGTVSGFLSQDIITVGGITVTQMFGEVTEMPALPFMLAEFDGVVGMGFIEQAIGRVTPIFDNIISQGVLKEDVFSFYYNRDSENSQSLGGQIVLGGSDPQHYEGNFHYINLIKTGVWQIQMKGVSVGSSTLLCEDGCLALVDTGASYISGSTSSIEKLMEALGAKKRLFDYVVKCNEGPTLPDISFHLGGKEYTLTSADYVFQESYSSKKLCTLAIHAMDIPPPTGPTWALGATFIRKFYTEFDRRNNRIGFALAR

SEQ ID NO: 11322 - protein, 394 aa, Homo Sapiens
MDGRRVPAQPAAEFSLTPGGYRSVGRSRRCSRGSIPRNIPKRSWKKPHPQLCSLQAEEEPMLERRCRGPLAMGLAQPRLLSGPSQESPQTLGKESRGLRQQGTSVAQSGAQAPGRAHRCAHCRRHFPGWVALWLHTRRCQARLPLPCPECGRRFRHAPFLALHRQVHAAATPDLGFACHLCGQSFRGWVALVLHLRAHSAAKRPIACPKCERRFWRRKQLRAHLRRCHPPAPEARPFICGNCGRSFAQWDQLVAHKRVHVAEALEEAAAKALGPRPRGRPAVTAPRPGGDAVDRPFQCACCGKRFRHKPNLIAHRRVHTGERPHQCPECGKRFTNKPYLTSHRRIHTGEKPYPCKECGRRFRHKPNLLSHSKIHKRSEGSAQAAPGPGSPQLPA

SEQ ID NO: 11323 - protein, 366 aa, Homo Sapiens
MDGRRVPAQPAAEFSLTPGGYRSVGRSRRCSRGSIPRNIPKRSWKKPHPQLCSLQEEEPMLERRCRGPLAMGLAQPRLLSGPSQESPQTLGKESRGLRQQGTSVAQSGAQAPGRAHRCAHCRRHFPGWVALWLHTRRCQARLPLPCPECGRRFRHAPFLALHRQVHAAATPDLGFACHLCGQSFRGWVALVLHLRAHSAAKRPIACPKCERRFWRRKQLRAHLRRCHPPAPEARPFICGNCGRSFAQWDQLVAHKRVHVAEALEEAAAKALGPRPRGRPAVTAPRPGGDAVDRPFQCACCGKRFRHKPNLIAHRRVHTGERPHQCPECGKRFTNKPYLTSHRRIHTGEKPYPCKECGRRFRHKPNL

SEQ ID NO: 11324 - protein, 55 aa, Homo Sapiens
MDGRRVPAQPAAEQRKNRCWNVVAGAPWPWAWPSPDSFLGPPRSHPRPWGRSPAG

SEQ ID NO: 11325 - protein, 47 aa, Homo Sapiens
MDGRRVPAQPAAEVRPGQGRGATAGPRGAAPPAGRVTVRLASLQSEV

SEQ ID NO: 11326 - protein, 47 aa, Homo Sapiens; identical to SEQ ID NO: 11325

SEQ ID NO: 11327 - protein, 136 aa, Homo Sapiens
MDGRRVPAQPAAEVRPGQGRGATAGPRGAAPPAGRVTVSVRDRVRGRTDAGTSLQGPPGHGPGPAPTPFWALPGVTPDPGEGVPRAEATRHVSGPVWCPSPRQGPSLCPLSKALPWLGGSVASHPPVPGPAALALP

SEQ ID NO: 11328 - protein, 624 aa, Homo Sapiens
MGIGVSLLLQFSLTPGGYRSVGRSRRCSRGSIPRNIPKRSWKKPHPQLCSLQAEEEPMLERRCRGPLAMGLAQPRLLSGPSQESPQTLGKESRGLRQQGTSVAQSGAQAPGRAHRCAHCRRHFPGWVALWLHTRRCQARLPLPCPECGRRFRHAPFLALHRQVHAAATPDLGFACHLCGQSFRGWVALVLHLRAHSAAKRPIACPKCERRFWRRKQLRAHLRRCHPPAPEARPFICGNCGRSFAQWDQLVAHKRVHVAEALEEAAAKALGPRPRGRPAVTAPRPGGDAVDRPFQCACCGKRFRHKPNLIAHRRVHTGERPHQCPECGKRFTNKPYLTSHRRIHTGEKPYPCKECGRRFRHKPNLLSHSKIHKRSEGSAQAAPGPGSPQLPAGPQESAAEPTPAVPLKPAQEPPPGAPPEHPQDPIEAPPSLYSCDDCGRSFRLERFLRAHQRQHTGERPFTCAECGKNFGKKTHLVAHSRVHSGERPFACEECGRRFSQGSHLAAHRRDHAPDRPFVCPDCGKAFRHKPYLAAHRRIHTGEKPYVCPDCGKAFSQKSNLVSHRRIHTGERPYACPDCDRSFSQKSNLITHRKSHIRDGAFCCAICGQTFDDEERLLAHQKKHDV

SEQ ID NO: 11329 - protein, 87 aa, Homo Sapiens
MGIGVSLLLQFSLTPGGYRSVGRSRRCSRGSIPRNIPKRSWKKPHPQLCSLQGLVIFDVSQLLHLLNRELSVCLSSFSELLCSSDVA

SEQ ID NO: 11330 - protein, 136 aa, Homo Sapiens
MGIGVSLLLQFSLTPGGYRSVGRSRRCSRGSIPRNIPKRSWKKPHPQLCSLQGSSVSVCPASQSCCAARMWHRKQQTQGEGSIRHCREQWPHFLQRKNRCWNVVAGAPWPWAWPSPDSFLGPPRSHPRPWGRSPAG

SEQ ID NO: 11331 - protein, 136 aa, Homo Sapiens; identical to SEQ ID NO: 11330

SEQ ID NO: 11332 - protein, 146 aa, Homo Sapiens
MLERRCRGPLAMGLAQPRLLSGPSQESPQTLGKESRGLRQQGTSVAQSGAQAPGRAHRCAHCRRHFPGWVALWLHTRRCQARLPLPCPECGRRFRHAPFLALHRQVHAAATPDLGFACHLCGQSFRGWVALVLHLRAHSAAKRPIA

SEQ ID NO: 11333 - protein, 567 aa, Homo Sapiens
MLERRCRGPLAMGLAQPRLLSGPSQESPQTLGKESRGLRQQGTSVAQSGAQAPGRAHRCAHCRRHFPGWVALWLHTRRCQARLPLPCPECGRRFRHAPFLALHRQVHAAATPDLGFACHLCGQSFRGWVALVLHLRAHSAAKRPIACPKCERRFWRRKQLRAHLRRCHPPAPEARPFICGNCGRSFAQWDQLVAHKRVHVAEALEEAAAKALGPRPRGRPAVTAPRPGGDAVDRPFQCACCGKRFRHKPNLIAHRRVHTGERPHQCPECGKRFTNKPYLTSHRRIHTGEKPYPCKECGRRFRHKPNLLSHSKIHKRSEGSAQAAPGPGSPQLPAGPQESAAEPTPAVPLKPAQEPPPGAPPEHPQDPIEAPPSLYSCDDCGRSFRLERFLRAHQRQHTGERPFTCAECGKNFGKKTHLVAHSRVHSGERPFACEECGRRFSQGSHLAAHRRDHAPDRPFVCPDCGKAFRHKPYLAAHRRIHTGEKPYVCPDCGKAFSQKSNLVSHRRIHTGERPYACPDCDRSFSQKSNLITHRKSHIRDGAFCCAICGQTFDDEERLLAHQKKHDV

SEQ ID NO: 11334 - protein, 567 aa, Homo Sapiens; identical to SEQ ID NO: 11333

SEQ ID NO: 11335 - protein, 567 aa, Homo Sapiens; identical to SEQ ID NO: 11333

SEQ ID NO: 11336 - protein, 659 aa, Homo Sapiens
MEAAAAAAAAAAAAAAAGGGCGSGPPPLLLSEGEQQCYSELFARCAGAAGGGPGSGPPEAARVAPGTATAAAGPVADLFRASQLPAETLHQITELCGAKRVGYFGPTQFYIALKLIAAAQSGLPVRIESIKCELPLPRFMMSKNDGEIRFGNPAELHGTKVQIPYLTTEKNSFKRMDDEDKQETQSPTMSPLASPPSSPPHYQRVPLSHGYSKLRSSAEQMHPAPYEARQPLVQPEGSSSGGPGTKPLRHQASLIRSFSVERELQDNSSYPDEPWRITEEQREYYVNQFRSLQPDPSSFISGSVAKNFFTKSKLSIPELSYIWELSDADCDGALTLPEFCAAFHLIVARKNGYPLPEGLPPTLQPEYLQAAFPKPKWDCQLFDSYSESLPANQQPRDLNRMEKTSVKDMADLPVPNQDVTSDDKQALKSTINEALPKDVSEDPATPKDSNSLKARPRSRSYSSTSIEEAMKRGEDPPTPPPRPQKTHSRASSLDLNKVFQPSVPATKSGLLPPPPALPPRPCPSQSEQVSEAELLPQLSRAPSQAAESSPAKKDVLYSQPPSKPIRRKFRPENQATENQEPSTAASGPASAATMKPHPTVQKQSSKQKKAIQTAIRKNKEANAVLARLNSELQQQLKEVHQERIALENQLEQLRPVTVL

SEQ ID NO: 11337 - protein, 660 aa, Homo Sapiens
MEAAAAAAAAAAAAAAAGGGCGSGPPPLLLSEGEQQCYSELFARCAGAAGGGPGSGPPEAARVAPGTATAAAGPVADLFRASQLPAETLHQITELCGAKRVGYFGPTQFYIALKLIAAAQSGLPVRIESIKCELPLPRFMMSKNDGEIRFGNPAELHGTKVQIPYLTTEKNSFKRMDDEDKQQETQSPTMSPLASPPSSPPHYQRVPLSHGYSKLRSSAEQMHPAPYEARQPLVQPEGSSSGGPGTKPLRHQASLIRSFSVERELQDNSSYPDEPWRITEEQREYYVNQFRSLQPDPSSFISGSVAKNFFTKSKLSIPELSYIWELSDADCDGALTLPEFCAAFHLIVARKNGYPLPEGLPPTLQPEYLQAAFPKPKWDCQLFDSYSESLPANQQPRDLNRMEKTSVKDMADLPVPNQDVTSDDKQALKSTINEALPKDVSEDPATPKDSNSLKARPRSRSYSSTSIEEAMKRGEDPPTPPPRPQKTHSRASSLDLNKVFQPSVPATKSGLLPPPPALPPRPCPSQSEQVSEAELLPQLSRAPSQAAESSPAKKDVLYSQPPSKPIRRKFRPENQATENQEPSTAASGPASAATMKPHPTVQKQSSKQKKAIQTAIRKNKEANAVLARLNSELQQQLKEVHQERIALENQLEQLRPVTVL

SEQ ID NO: 11338 - protein, 181 aa, Homo Sapiens
MAKATSGAAGLRLLLLLLLPLLGKDVAEEAGCPLSCAVSKRRLECEECGGLGSPTGRCEWRQGDGKGITRNFSTCSPSTKTCPDGHCDVVETQDINICPQDCLRGSIVGGHEPGEPRGIKAGYGTCNCFPEEEKCFCEPEDIQDPLCDELCRTVIAAAVLFSFIVSVLLSAFCIHCYHKFA

SEQ ID NO: 11339 - protein, 1114 aa, Homo Sapiens
MAKATSGAAGLRLLLLLLLPLLGKVALGLYFSRDAYWEKLYVDQAAGTPLLYVHALRDAPEEVPSFRLGQHLYGTYRTRLHENNWICIQEDTGLLYLNRSLDHSSWEKLSVRNRGFPLLTVYLKVFLSPTSLREGECQWPGCARVYFSFFNTSFPACSSLKPRELCFPETRPSFRIRENRPPGTFHQFRLLPVQFLCPNISVAYRLLEGEGLPFRCAPDSLEVSTRWALDREQREKYELVAVCTVHAGAREEVVMVPFPVTVYDEDDSAPTFPAGVDTASAVVEFKRKEDTVVATLRVFDADVVPASGELVRRYTSTLLPGDTWAQQTFRVEHWPNETSVQANGSFVRATVHDYRLVLNRNLSISENRTMQLAVLVNDSDFQGPGAGVLLLHFNVSVLPVSLHLPSTYSLSVSRRARRFAQIGKVCVENCQAFSGINVQYKLHSSGANCSTLGVVTSAEDTSGILFVNDTKALRRPKCAELHYMVVATDQQTSRQAQAQLLVTVEGSYVAEEAGCPLSCAVSKRRLECEECGGLGSPTGRCEWRQGDGKGITRNFSTCSPSTKTCPDGHCDVVETQDINICPQDCLRGSIVGGHEPGEPRGIKAGYGTCNCFPEEEKCFCEPEDIQDPLCDELCRTVIAAAVLFSFIVSVLLSAFCIHCYHKFAHKPPISSAEMTFRRPAQAFPVSYSSSGARRPSLDSMENQVSVDAFKILEDPKWEFPRKNLVLGKTLGEGEFGKVVKATAFHLKGRAGYTTVAVKMLKENASPSELRDLLSEFNVLKQVNHPHVIKLYGACSQDGPLLLIVEYAKYGSLRGFLRESRKVGPGYLGSGGSRNSSSLDHPDERALTMGDLISFAWQISQGMQYLAEMKLVHRDLAARNILVAEGRKMKISDFGLSRDVYEEDSYVKRSQGRIPVKWMAIESLFDHIYTTQSDVWSFGVLLWEIVTLGGNPYPGIPPERLFNLLKTGHRMERPDNCSEEMYRLMLQCWKQEPDKRPVFADISKDLEKMMVKRRDYLDLAASTPSDSLIYDDGLSEEETPLVDCNNAPLPRALPSTWIENKLYGMSDPNWPGESPVPLTRADGTNTGFPRYPNDSVYANWMLSPSAAKLMDTFDS

SEQ ID NO: 11340 - protein, 1072 aa, Homo Sapiens
MAKATSGAAGLRLLLLLLLPLLGKVALGLYFSRDAYWEKLYVDQAAGTPLLYVHALRDAPEEVPSFRLGQHLYGTYRTRLHENNWICIQEDTGLLYLNRSLDHSSWEKLSVRNRGFPLLTVYLKVFLSPTSLREGECQWPGCARVYFSFFNTSFPACSSLKPRELCFPETRPSFRIRENRPPGTFHQFRLLPVQFLCPNISVAYRLLEGEGLPFRCAPDSLEVSTRWALDREQREKYELVAVCTVHAGAREEVVMVPFPVTVYDEDDSAPTFPAGVDTASAVVEFKRKEDTVVATLRVFDADVVPASGELVRRYTSTLLPGDTWAQQTFRVEHWPNETSVQANGSFVRATVHDYRLVLNRNLSISENRTMQLAVLVNDSDFQGPGAGVLLLHFNVSVLPVSLHLPSTYSLSVSRRARRFAQIGKVCVENCQAFSGINVQYKLHSSGANCSTLGVVTSAEDTSGILFVNDTKALRRPKCAELHYMVVATDQQTSRQAQAQLLVTVEGSYVAEEAGCPLSCAVSKRRLECEECGGLGSPTGRCEWRQGDGKGITRNFSTCSPSTKTCPDGHCDVVETQDINICPQDCLRGSIVGGHEPGEPRGIKAGYGTCNCFPEEEKCFCEPEDIQDPLCDELCRTVIAAAVLFSFIVSVLLSAFCIHCYHKFAHKPPISSAEMTFRRPAQAFPVSYSSSGARRPSLDSMENQVSVDAFKILEDPKWEFPRKNLVLGKTLGEGEFGKVVKATAFHLKGRAGYTTVAVKMLKENASPSELRDLLSEFNVLKQVNHPHVIKLYGACSQDGPLLLIVEYAKYGSLRGFLRESRKVGPGYLGSGGSRNSSSLDHPDERALTMGDLISFAWQISQGMQYLAEMKLVHRDLAARNILVAEGRKMKISDFGLSRDVYEEDSYVKRSQGRIPVKWMAIESLFDHIYTTQSDVWSFGVLLWEIVTLGGNPYPGIPPERLFNLLKTGHRMERPDNCSEEMYRLMLQCWKQEPDKRPVFADISKDLEKMMVKRRDYLDLAASTPSDSLIYDDGLSEEETPLVDCNNAPLPRALPSTWIENKLYGRISHAFTRF

SEQ ID NO: 11341 - protein, 458 aa, Homo Sapiens
MAKATSGAAGLRLLLLLLLPLLGKVALGLYFSRDAYWEKLYVDQAAGTPLLYVHALRDAPEEVPSFRLGQHLYGTYRTRLHENNWICIQEDTGLLYLNRSLDHSSWEKLSVRNRGFPLLTVYLKVFLSPTSLREGECQWPGCARVYFSFFNTSFPACSSLKPRELCFPETRPSFRIRENRPPGTFHQFRLLPVQFLCPNISVAYRLLEGEGLPFRCAPDSLEVSTRWALDREQREKYELVAVCTVHAGAREEVVMVPFPVTVYDEDDSAPTFPAGVDTASAVVEFKRKEDTVVATLRVFDADVVPASGELVRRYTSTLLPGDTWAQQTFRVEHWPNETSVQANGSFVRATVHDYRLVLNRNLSISENRTMQLAVLVNDSDFQGPGAGVLLLHFNVSVLPVSLHLPSTYSLSVSRRARRFAQIGKVCVENCLADLTGDAVSGRDEARSSGLGSQKHPGS

SEQ ID NO: 11342 - protein, 114 aa, Homo Sapiens
  misc_feature (1)..(1): Xaa can be any naturally occurring amino acid
XDAYWEKLYVDQAAGTPLLYVHALRDAPEEVPSFRLGQHLYGTYRTRLHENNWICIQEDTGLLYLNRSLDHSSWEKLSVRNVADAPTDLTSLCRPRLSPAHRLPQGLPVTHIPS

SEQ ID NO: 11343 - protein, 191 aa, Homo Sapiens
  misc_feature (1)..(1): Xaa can be any naturally occurring amino acid
XDAYWEKLYVDQAAGTPLLYVHALRDAPEEVPSFRLGQHLYGTYRTRLHENNWICIQEDTGLLYLNRSLDHSSWEKLSVRTCSSLKPRELCFPETRPSFRIRENRPPGTFHQFRLLPVQFLCPNISVAYRLLEGECRPCGAAPQCLLLLVLLCEPLTQAIWFILHLHAISSFNIPEVPLACLPGARYCSRS

SEQ ID NO: 11344 - protein, 108 aa, Homo Sapiens
MKALCLLLLPVLGLLVSSKTLCSMEEAINERIQEVAGSLIFRAISSIGLECQSVTSRGDLATCPRGFAVTGCTCGSACGSWDVRAETTCHCQCAGMDWTGARCCRVQP

SEQ ID NO: 11345 - protein, 82 aa, Homo Sapiens
MKALCLLLLPVLGLLVSSKTLCSMEEAINERIQEVAGSLSFAVTGCTCGSACGSWDVRAETTCHCQCAGMDWTGARCCRVQP

SEQ ID NO: 11346 - protein, 82 aa, Homo Sapiens; identical to SEQ ID NO: 11345

SEQ ID NO: 11347 - protein, 111 aa, Homo Sapiens
MGPSSCLLLILIPLLQLINPGSTQCSLDSVMDKKIKDVLNSLEYSPSPISKKLSCASVKSQGRPSSCPAGMAVTGCACGYGCGSWDVQLETTCHCQCSVVDWTTARCCHLT

SEQ ID NO: 11348 - protein, 610 aa, Homo Sapiens
MWLPLVLLLAVLLLAVLCKVYLGLFSGSSPNPFSEDVKRPPAPLVTDKEARKKVLKQAFSANQVPEKLDVVVIGSGFGGLAAAAILAKAGKRVLVLEQHTKAGGCCHTFGKNGLEFDTGIHYIGRMEEGSIGRFILDQITEGQLDWAPLSSPFDIMVLEGPNGRKEYPMYSGEKAYIQGLKEKFPQEEAIIDKYIKLVKVVSSGAPHAILLKFLPLPVVQLLDRCGLLTRFSPFLQASTQSLAEVLQQLGASSELQAVLSYIFPTYGVTPNHSAFSMHALLVNHYMKGGFYPRGGSSEIAFHTIPVIQRAGGAVLTKATVQSVLLDSAGKACGVSVKKGHELVNIYCPIVVSNAGLFNTYEHLLPGNARCLPGVKQQLGTVRPGLGMTSVFICLRGTKEDLHLPSTNYYVYYDTDMDQAMERYVSMPREEAAEHIPLLFFAFPSAKDPTWEDRFPGRSTMIMLIPTAYEWFEEWQAELKGKRGSDYETFKNSFVEASMSVVLKLFPQLEGKVESVTAGSPLTNQFYLAAPRGACYGADHDLGRLHPCVMASLRAQSPIPNLYLTGQDIFTCGLVGALQGALLCSSAILKRNLYSDLKNLDSRIRAQKKKN

SEQ ID NO: 11349 - protein, 140 aa, Homo Sapiens
  misc_feature (1)..(1): Xaa can be any naturally occurring amino acid
XFHTIPVIQRAGGAVLTKATVQSVLLDSAGKACGVSVKKGHELVNIYCPIVVSNAGLFNTYEHLLPGNARCLPGKRRVCTAPLAGSPMCPLLEPTCSVWVMLLLFLAGPLIVLKQQGENATSNIILTLAFNVGETEAHTD

SEQ ID NO: 11350 - protein, 320 aa, Homo Sapiens
  misc_feature (1)..(1): Xaa can be any naturally occurring amino acid
XGRKEYPMYSGEKAYIQGLKEKFPQEEAIIDKYIKLVKVVSSGAPHAILLKFLPLPVVQLLDRCGLLTRFSPFLQASTQSLAEVLQQLGASSELQAVLSYIFPTYGVTPNHSAFSMHALLVNHYMKGGFYPRGGSSEIAFHTIPVIQRAGGAVLTKATVQSVLLDSAGKACGVSVKKGHELVNIYCPIVVSNAGLFNTYEHLLPGNARCLPGVKQQLGTVRPGLGMTSVFICLRGTKEDLHLPSTNYYVYYDTDMDQAMERYVSMPREEAAEHIPLLFFAFPSAKDPTWEDRFPGGECDCRIPTHQPVLSGCSPRCLLRG

SEQ ID NO: 11351 - protein, 399 aa, Homo Sapiens
  misc_feature (1)..(1): Xaa can be any naturally occurring amino acid
XPLVLLLAVLLLAVLCKVYLGLFSGSSPNPFSEDVKRPPAPLVTDKEARKKVLKQGVTPNHSAFSMHALLVNHYMKGGFYPRGGSSEIAFHTIPVIQRAGGAVLTKATVQSVLLDSAGKACGVSVKKGHELVNIYCPIVVSNAGLFNTYEHLLPGNARCLPGVKQQLGTVRPGLGMTSVFICLRGTKEDLHLPSTNYYVYYDTDMDQAMERYVSMPREEAAEHIPLLFFAFPSAKDPTWEDRFPGRSTMIMLIPTAYEWFEEWQAELKGKRGSDYETFKNSFVEASMSVVLKLFPQLEGKVESVTAGSPLTNQFYLAAPRGACYGADHDLGRLHPCVMASLRAQSPIPNLYLTGQDIFTCGLVGALQGALLCSSAILKRNLYSDLKNLDSRIRAQKKKN

SEQ ID NO: 11352 - protein, 255 aa, Homo Sapiens
  misc_feature (1)..(1): Xaa can be any naturally occurring amino acid
XWLPLVLLLAVLLLAVLCKVYLGLFSGSSPNPFSEDVKRPPAPLVTDKEARKKVLKQGIHYIGRMEEGSIGRFILDQITEGQLDWAPLSSPFDIMVLEGPNGRKEYPMYSGEKAYIQGLKEKFPQEEAIIDKYIKLVKVVSSGAPHAILLKFLPLPVVQLLDRCGLLTRFSPFLQASTQSLAEVLQQLGASSELQAVLSYIFPTYGVTPNHSAFSMHALLVNHYMKGGFYPRGGSSEIAFHTIPVIQRAGGAVLT

SEQ ID NO: 11353 - protein, 331 aa, Homo Sapiens
MSRARGALCRACLALAAALAALLLLPLPLPRAPAPARTPAPAPRAPPSRPAAPSLRPDDVFIAVKTTRKNHGPRLRLLLRTWISRARQQTFIFTDGDDPELELQGGDRVINTNCSAVRTRQALCCKMSVEYDKFIESGRKWFCHVDDDNYVNARSLLHLLSSFSPSQDVYLGRPSLDHPIEATERVQGGRTVTTVKFWFATGGAGFCLSRGLALKMSPWASLGSFMSTAEQVRLPDDCTVGYIVEGLLGARLLHSPLFHSHLENLQRLPPDTLLQQVTLSHGGPENPHNVVNVAGGFSLHQDPTRFKSIHCLLYPDTDWCPRQKQGAPTSR

SEQ ID NO: 11354 - protein, 60 aa, Homo Sapiens
MSVEYDKFIESGRKWFCHVDDDNYVNARSLLHLLSSFSPSQDVYLGRPSLDHPIEATERV

SEQ ID NO: 11355 - protein, 205 aa, Homo Sapiens
MSVEYDKFIESGRKWFCHVDDDNYVNARSLLHLLSSFSPSQDVYLGRPSLDHPIEATERVQGGRTVTTVKFWFATGGAGFCLSRGLALKMSPWASLGSFMSTAEQVRLPDDCTVGYIVEGLLGARLLHSPLFHSHLENLQRLPPDTLLQQVTLSHGGPENPHNVVNVAGGFSLHQDPTRFKSIHCLLYPDTDWCPRQKQGAPTSR

SEQ ID NO: 11356 - protein, 137 aa, Homo Sapiens
MKPPAAQGSPAAAAAAAPALDSAAAEDLSDALCEFDAVLADFASPFHERHFHYEEHLERMKRRSSASVSDSSGFSDSESADSLYRNSFSFSDEKLNSPTDSTPALLSATVTPQKAKLGDTKELEAFIADLDKTLASM

SEQ ID NO: 11357 - protein, 337 aa, Homo Sapiens
MPALEPAPPLLADLGPALEPESPAALGPPGYLHSAPGPAPAPGEGPPPGTVLEPQSAPESSCPCRGSVKNQPSEELPDMTTFPPRLLAEQLTLMDAELFKKVVLHECLGCIWGQGHLKGNEHMAPTVRATIAHFNRLTNCITTSCLGDHSMRARDRARVVEHWIKVARECLSLNNFSSVHVIVSALCSNPIGQLHKTWAGVSSKSMKELKELCKKDTAVKRDLLIKAGSFKVATQERNPQRVQMRLRRQKKGVVPFLGDFLTELQRLDSAIPDDLDGNTNKRSKEVRVLQEMQLLQVAAMNYRLRPLEKFVTYFTRMEQLSDKESYKLSCQLEPENP

SEQ ID NO: 11358 - protein, 356 aa, Homo Sapiens
MPALEPAPPLLADLGPALEPESPAALGPPGYLHSAPGPAPAPGEGPPPGTVLEPQSAPESSCPCRGSVKNQPSEELPDMTTFPPRLLAEQLTLMDAELFKKVVLHECLGCIWGQGHLKGNEHMAPTVRATIAHFNRLTNCITTSCLGDHSMRARDRARVVEHWIKVARECLSLNNFSSVHVIVSALCSNPIGQLHKTWAGVSSKSMKELKELCKKDTAVKRDLLIKAGSFKVATQERNPQRVQMRLRRQKKGVVPFLGDFLTELQRLDSAIPDDLDGNTNKRSKEVRVLQEMQLLQVAAMNYRLRPLEKFVTYFTRMEQLSDKERWGFTMMSRIVSNSWPQAIHPPQPPKVLTLQV

SEQ ID NO: 11359 - protein, 410 aa, Homo Sapiens
MPALEPAPPLLADLGPALEPESPAALGPPGYLHSAPGPAPAPGEGPPPGTVLEPQSAPESSCPCRGSVKNQPSEELPDMTTFPPRLLAEQLTLMDAELFKKVVLHECLGCIWGQGHLKGNEHMAPTVRATIAHFNRLTNCITTSCLGDHSMRARDRARVVEHWIKVARECLSLNNFSSVHVIVSALCSNPIGQLHKTWAGVSSKSMKELKELCKKDTAVKRDLLIKAGSFKVATQERNPQRVQMRLRRQKKGVVPFLGDFLTELQRLDSAIPDDLDGNTNKRSKEVRVLQEMQLLQVAAMNYRLRPLEKFVTYFTRMEQLSDKERLHCSVTISVHCNVCLLGSSPSSASQAAGTTAVHHHVRLFCCCCSATSCPASWSPKTRRLATSCSGWEPTGMLARTPALHHPSPRP

SEQ ID NO: 11360 - protein, 473 aa, Homo Sapiens
MRKLLTNLPAAAVLSAQVYSAVLQGLWEENVCGTPGRTRVCTALLYGQVCPFQDSTDGLRTITSILFNWPPENTSVYYQPPQRSSFRIKLAFRNLSWPGLGLEDHQEIVLGQLVLPEPNEAKPDDPAPRPGQHALTMPALEPAPPLLADLGPALEPESPAALGPPGYLHSAPGPAPAPGEGPPPGTVLEPQSAPESSCPCRGSVKNQPSEELPDMTTFPPRLLAEQLTLMDAELFKKVVLHECLGCIWGQGHLKGNEHMAPTVRATIAHFNRLTNCITTSCLGDHSMRARDRARVVEHWIKVARECLSLNNFSSVHVIVSALCSNPIGQLHKTWAGVSSKSMKELKELCKKDTAVKRDLLIKAGSFKVATQERNPQRVQMRLRRQKKGVVPFLGDFLTELQRLDSAIPDDLDGNTNKRSKEVRVLQEMQLLQVAAMNYRLRPLEKFVTYFTRMEQLSDKESYKLSCQLEPENP

SEQ ID NO: 11361 - protein, 536 aa, Homo Sapiens
MRKLLTNLPAAAVLSAQVYSAVLQGLWEENVCGTPGRTRVCTALLYGQVCPFQDSTDGLRTITSILFNWPPENTSVYYQPPQRSSFRIKLAFRNLSWPGLGLEDHQEIVLGQLVLPEPNEAKPDDPAPRPGQHALTMPALEPAPPLLADLGPALEPESPAALGPPGYLHSAPGPAPAPGEGPPPGTVLEPQSAPESSCPCRGSVKNQPSEELPDMTTFPPRLLAEQLTLMDAELFKKVVLHECLGCIWGQGHLKGNEHMAPTVRATIAHFNRLTNCITTSCLGDHSMRARDRARVVEHWIKVARECLSLNNFSSVHVIVSALCSNPIGQLHKTWAGVSSKSMKELKELCKKDTAVKRDLLIKAGSFKVATQERNPQRVQMRLRRQKKGVVPFLGDFLTELQRLDSAIPDDLDGNTNKRSKEVRVLQEMQLLQVAAMNYRLRPLEKFVTYFTRMEQLSDKERWGFTMMSRIVSNSWPQAIHPPQPPKVLTLQLQAVLPAGARKPVGWQHPAVAGNPPGCWPEHRLCTIPHPDRRHQG

SEQ ID NO: 11362 - protein, 435 aa, Homo Sapiens
MRKLLTNLPAAAVLSAQVYSAVLQGLWEENVCGTPGRTRVCTALLYGQVCPFQDSTDGLRTITSILFNWPPENTSVYYQPPQRSSFRIKLAFRNLSWPGLGLEDHQEIVLGQLVLPEPNEAKPDDPAPRPGQHALTMPALEPAPPLLADLGPALEPESPAALGPPGYLHSAPGPAPAPGEGPPPGTVLEPQSAPESSCPCRGSVKNQPSEELPDMTTFPPRLLAEQLTLMDAELFKKVVLHECLGCIWGQGHLKGNEHMAPTVRATIAHFNRLTNCITTSCLGDHSMRARDRARVVEHWIKVARECLSLNNFSSVHVIVSALCSNPIGQLHKTWAGVSSKSMKELKELCKKDTAVKRDLLIKRDDGENNGNSYRKLSPQRPCEVAVVCITLYRRGNSLREARLQDWVTHTGSVDLGQWRGALRWPPRRGTPRESR

SEQ ID NO: 11363 - protein, 155 aa, Homo Sapiens
  misc_feature (1)..(1): Xaa can be any naturally occurring amino acid
XWASGMSTVPGGSRHSLGIQVRGGWGVTGGEEESLTVPVADTWQAGSFKVATQERNPQRVQMRLRRQKKGVVPFLGDFLTELQRLDSAIPDDLDGNTNKRSKEVRVLQEMQLLQVAAMNYRLRPLEKFVTYFTRMEQLSDKESYKLSCQLEPENP

SEQ ID NO: 11364 - protein, 458 aa, Homo Sapiens
MGGLGPRRAGTSRERLVVTGRAGWMGMGRGAGRSALGFWPTLAFLLCSFPAATSPCKILKCNSEFWSATSGSHAPASDDTPEFCAALRSYALCTRRTARTCRGDLAYHSAVHGIEDLMSQHNCSKDGPTSQPRLRTLPPAGDSQERSDSPEICHYEKSFHKHSATPNYTHCGLFGDPHLRTFTDRFQTCKVQGAWPLIDNNYLNVQVTNTPVLPGSAATATSKLTIIFKNFQECVDQKVYQAEMDELPAAFVDGSKNGGDKHGANSLKITEKVSGQHVEIQAKYIGTTIVVRQVGRYLTFAVRMPEEVVNAVEDWDSQGLYLCLRGCPLNQQIDFQAFHTNAEGTGARRLAAASPAPTAPETFPYETAVAKCKEKLPVEDLYYQACVFDLLTTGDVNFTLAAYYALEDVKMLHSNKDKLHLYERTRDLPGRAAAGLPLAPRPLLGALVPLLALLPVFC

SEQ ID NO: 11365 - protein, 10 aa, Homo Sapiens
MGMGRGAGRS

SEQ ID NO: 11366 - protein, 46 aa, Homo Sapiens
MGMGRGAGRSALGFWPTLAFLLCSFPAAHHHLQELPGVCGPEGVPG

SEQ ID NO: 11367 - protein, 61 aa, Homo Sapiens
MGMGRGAGRSALGFWPTLAFLLCSFPAAIKRSPGSFCAALEMRRLWNLMSWKERRVQKPLM

SEQ ID NO: 11368 - protein, 90 aa, Homo Sapiens
MGMGRGAGRSALGFWPTLAFLLCSFPAATSPCKILKCNSEFWSATSGSHAPASDDTPEFCAALRSYALCTRRTARTCRGDLAYHSAVHGI

SEQ ID NO: 11369 - protein, 434 aa, Homo Sapiens
MGMGRGAGRSALGFWPTLAFLLCSFPAATSPCKILKCNSEFWSATSGSHAPASDDTPEFCAALRSYALCTRRTARTCRGDLAYHSAVHGIEDLMSQHNCSKDGPTSQPRLRTLPPAGDSQERSDSPEICHYEKSFHKHSATPNYTHCGLFGDPHLRTFTDRFQTCKVQGAWPLIDNNYLNVQVTNTPVLPGSAATATSKLTIIFKNFQECVDQKVYQAEMDELPAAFVDGSKNGGDKHGANSLKITEKVSGQHVEIQAKYIGTTIVVRQVGRYLTFAVRMPEEVVNAVEDWDSQGLYLCLRGCPLNQQIDFQAFHTNAEGTGARRLAAASPAPTAPETFPYETAVAKCKEKLPVEDLYYQACVFDLLTTGDVNFTLAAYYALEDVKMLHSNKDKLHLYERTRDLPGRAAAGLPLAPRPLLGALVPLLALLPVFC

SEQ ID NO: 11370 - protein, 434 aa, Homo Sapiens; identical to SEQ ID NO: 11369

SEQ ID NO: 11371 - protein, 434 aa, Homo Sapiens; identical to SEQ ID NO: 11369

SEQ ID NO: 11372 - protein, 450 aa, Homo Sapiens
MQPPRERLVVTGRAGWMGMGRGAGRSALGFWPTLAFLLCSFPAATSPCKILKCNSEFWSATSGSHAPASDDTPEFCAALRSYALCTRRTARTCRGDLAYHSAVHGIEDLMSQHNCSKDGPTSQPRLRTLPPAGDSQERSDSPEICHYEKSFHKHSATPNYTHCGLFGDPHLRTFTDRFQTCKVQGAWPLIDNNYLNVQVTNTPVLPGSAATATSKLTIIFKNFQECVDQKVYQAEMDELPAAFVDGSKNGGDKHGANSLKITEKVSGQHVEIQAKYIGTTIVVRQVGRYLTFAVRMPEEVVNAVEDWDSQGLYLCLRGCPLNQQIDFQAFHTNAEGTGARRLAAASPAPTAPETFPYETAVAKCKEKLPVEDLYYQACVFDLLTTGDVNFTLAAYYALEDVKMLHSNKDKLHLYERTRDLPGRAAAGLPLAPRPLLGALVPLLALLPVFC

SEQ ID NO: 11373 - protein, 341 aa, Homo Sapiens
MSQHNCSKDGPTSQPRLRTLPPAGDSQERSDSPEICHYEKSFHKHSATPNYTHCGLFGDPHLRTFTDRFQTCKVQGAWPLIDNNYLNVQVTNTPVLPGSAATATSKLTIIFKNFQECVDQKVYQAEMDELPAAFVDGSKNGGDKHGANSLKITEKVSGQHVEIQAKYIGTTIVVRQVGRYLTFAVRMPEEVVNAVEDWDSQGLYLCLRGCPLNQQIDFQAFHTNAEGTGARRLAAASPAPTAPETFPYETAVAKCKEKLPVEDLYYQACVFDLLTTGDVNFTLAAYYALEDVKMLHSNKDKLHLYERTRDLPGRAAAGLPLAPRPLLGALVPLLALLPVFC

SEQ ID NO: 11374 - protein, 437 aa, Homo Sapiens
MGLRAAPSSAAAAAAEVEQRRSPGLCPPPLELLLLLLFSLGLLHAGDCQQPAQCRIQKCTTDFVSLTSHLNSAVDGFDSEFCKALRAYAGCTQRTSKACRGNLVYHSAVLGISDLMSQRNCSKDGPTSSTNPEVTHDPCNYHSHAGAREHRRGDQNPPSYLFCGLFGDPHLRTFKDNFQTCKVEGAWPLIDNNYLSVQVTNVPVVPGSSATATNKITIIFKAHHECTDQKVYQAVTDDLPAAFVDGTTSGGDSDAKSLRIVERESGHYVEMHARYIGTTVFVRQVGRYLTLAIRMPEDLAMSYEESQDLQLCVNGCPLSERIDDGQGQVSAILGHSLPRTSLVQAWPGYTLETANTQCHEKMPVKDIYFQSCVFDLLTTGDANFTAAAHSALEDVEALHPRKERWHIFPSSGNGTPRGGSDLSVSLGLTCLILIVFL

SEQ ID NO: 11375 - protein, 478 aa, Homo Sapiens
MIRKKRKRSAPPGPCRSHGPRPATAPAPPPSPEPTRPAWTGMGLRAAPSSAAAAAAEVEQRRSPGLCPPPLELLLLLLFSLGLLHAGDCQQPAQCRIQKCTTDFVSLTSHLNSAVDGFDSEFCKALRAYAGCTQRTSKACRGNLVYHSAVLGISDLMSQRNCSKDGPTSSTNPEVTHDPCNYHSHAGAREHRRGDQNPPSYLFCGLFGDPHLRTFKDNFQTCKVEGAWPLIDNNYLSVQVTNVPVVPGSSATATNKITIIFKAHHECTDQKVYQAVTDDLPAAFVDGTTSGGDSDAKSLRIVERESGHYVEMHARYIGTTVFVRQVGRYLTLAIRMPEDLAMSYEESQDLQLCVNGCPLSERIDDGQGQVSAILGHSLPRTSLVQAWPGYTLETANTQCHEKMPVKDIYFQSCVFDLLTTGDANFTAAAHSALEDVEALHPRKERWHIFPSSGNGTPRGGSDLSVSLGLTCLILIVFL

SEQ ID NO: 11376 - protein, 50 aa, Homo Sapiens
MAHGPGALMLKCVVVGDGAVGKTCLLMSYANDAFPEEYVPTVFDHYAGRL

SEQ ID NO: 11377 - protein, 205 aa, Homo Sapiens
MAHGPGALMLKCVVVGDGAVGKTCLLMSYANDAFPEEYVPTVFDHYAVSVTVGGKQYLLGLYDTAGQEDYDRLRPLSYPMTDVFLICFSVVNPASFQNVKEEWVPELKEYAPNVPFLLIGTQIDLRDDPKTLARLNDMKEKPICVEQGQKLAKEIGACCYVECSALTQKGLKTVFDEAIIAILTPKKHTVKKRIGSRCINCCLIT

SEQ ID NO: 11378 - protein, 75 aa, Homo Sapiens
MTDVFLICFSVVNPASFQNVKEEWVPELKEYAPNVPFLLIGTQIDLRDDPKTLARLNDMKEKPICVEQGQKLAKE

SEQ ID NO: 11379 - protein, 91 aa, Homo Sapiens
PEEYVPTVFDHYAVSVTVGGKQYLLGLYDTAGQALQQSELDFWEEISVSSGSWGHVITFSFHTRAWVSSGQDLLCPLAPASAVLLLDRGRL

SEQ ID NO: 11380 - protein, 34 aa, Homo Sapiens
  misc_feature (1)..(1): Xaa can be any naturally occurring amino acid
XGGKQYLLGLYDTAGQEDTGELAVRSCDFDKSIF

SEQ ID NO: 11381 - protein, 45 aa, Homo Sapiens
MAYSTVQRVALASGLVLALSLLLPKAFLSRGKRQEPPPTPEEHRL

SEQ ID NO: 11382 - protein, 43 aa, Homo Sapiens
MAYSTVQRVALASGLVLALSLLLPKAFLSRGKRQEPPPTPEEN

SEQ ID NO: 11383 - protein, 288 aa, Homo Sapiens
MAYSTVQRVALASGLVLALSLLLPKAFLSRGKRQEPPPTPEGKLGRFPPMMHHHQAPSDGQTPGARFQRSHLAEAFAKAKGSGGGAGGGGSGRGLMGQIIPIYGFGIFLYILYILFKLSKGKTTAEDGKCYTAMPGNTHRKISYPEETYPIYDLSDCIKRRQETILVDYPDPKELSAEEIAERMGMIEEEESDHLGWESLPTDPRAQEDNSVTSCDPKPETCSCCFHEDEDPAVLAENAGFSADSYPEQEETTKEEWSQDFKDEGLGISTDKAYTGSMLRKRNPQGLE

SEQ ID NO: 11384 - protein, 368 aa, Homo Sapiens
MAYSTVQRVALASGLVLALSLLLPKAFLSRGKRQEPPPTPEGKLGRFPPMMHHHQAPSDGQTPGARFQRSHLAEAFAKAKGSGGGAGGGGSGRGLMGQIIPIYGFGIFLYILYILFKLSKGKTTAEDGKCYTAMPGNTHRKITSFELAQLQEKLKETEAAMEKLINRVGPNGERAQTVTSDQEKRLLHQLREITRVMKEGKFIDRFSPEKEAEEAPYMEDWEGYPEETYPIYDLSDCIKRRQETILVDYPDPKELSAEEIAERMGMIEEEESDHLGWESLPTDPRAQEDNSVTSCDPKPETCSCCFHEDEDPAVLAENAGFSADSYPEQEETTKEEWSQDFKDEGLGISTDKAYTGSMLRKRNPQGLE

SEQ ID NO: 11385 - protein, 369 aa, Homo Sapiens
MAYSTVQRVALASGLVLALSLLLPKAFLSRGKRQEPPPTPEGKLGRFPPMMHHHQAPSDGQTPGARFQRSHLAEAFAKAKGSGGGAGGGGSGRGLMGQIIPIYGFGIFLYILYILFKLSKGKTTAEDGKCYTAMPGNTHRKITSFELAQLQEKLKETEAAMEKLINRVGPNGESRAQTVTSDQEKRLLHQLREITRVMKEGKFIDRFSPEKEAEEAPYMEDWEGYPEETYPIYDLSDCIKRRQETILVDYPDPKELSAEEIAERMGMIEEEESDHLGWESLPTDPRAQEDNSVTSCDPKPETCSCCFHEDEDPAVLAENAGFSADSYPEQEETTKEEWSQDFKDEGLGISTDKAYTGSMLRKRNPQGLE

SEQ ID NO: 11386 - protein, 328 aa, Homo Sapiens
MAYSTVQRVALASGLVLALSLLLPKAFLSRGKRQEPPPTPEGKLGRFPPMMHHHQAPSDGQTPGARFQRSHLAEAFAKAKGSGGGAGGGGSGRGLMGQIIPIYGFGIFLYILYILFKLSKGKTTAEDGKCYTAMPGNTHRKITSFELAQLQEKLKETEAAMEKLINRVGPNGESTQTDHSDVYVHCLGVFTTKWLDCLIFLSRAQTVTSDQEKRLLHQLREITRVMKEGKFIDRFSPEKEAEEAPYMEDWEGYPEETYPIYDLSDCIKRRQETILVDYPDPKELSAEEIAERMGMIEEEESDHLGWESLPTDPRAQEDNSVTSCDPKP

SEQ ID NO: 11387 - protein, 128 aa, Homo Sapiens
MAYSTVQRVALASGLVLALSLLLPKAFLSRGKRQEPPPTPEGKLGRFPPMMHHHQAPSDGQTPGARFQRSHLAEAFAKAKGSGGGAGGGGSGRGLMGQIIPIYGFGIFLYILYILFKVSRIILIILHQ

SEQ ID NO: 11388 - protein, 187 aa, Homo Sapiens
MAYSTVQRVALASGLVLALSLLLPKAFLSRGKRQEPPPTPEGYPEETYPIYDLSDCIKRRQETILVDYPDPKELSAEEIAERMGMIEEEESDHLGWESLPTDPRAQEDNSVTSCDPKPETCSCCFHEDEDPAVLAENAGFSADSYPEQEETTKEEWSQDFKDEGLGISTDKAYTGSMLRKRNPQGLE

SEQ ID NO: 11389 - protein, 42 aa, Homo Sapiens
MSSLIRRVISTAKAPGAIGPYRTDRHGPFKWTACVRRGSRRS

SEQ ID NO: 11390 - protein, 137 aa, Homo Sapiens
MSSLIRRVISTAKAPGAIGPYSQAVLVDRTIYISGQIGMDPSSGQLVSGGVAEEAKQALKNMGEILKAAGCDFTNVVKTTVLLADINDFNTVNEIYKQYFKSNFPARAAYQVAALPKGSRIEIEAVAIQGPLTTASL

SEQ ID NO: 11391 - protein, 148 aa, Homo Sapiens
  misc_feature (1)..(1): Xaa can be any naturally occurring amino acid
XGRLSHVVLDQKGDQHRESPRGHWTLQLSVYCSQAVLVDRTIYISGQIGMDPSSGQLVSGGVAEEAKQALKNMGEILKAAGCDFTNVVKTTVLLADINDFNTVNEIYKQYFKSNFPARAAYQVAALPKGSRIEIEAVAIQGPLTTASL

SEQ ID NO: 11392 - protein, 127 aa, Homo Sapiens
  misc_feature (1)..(1): Xaa can be any naturally occurring amino acid
XSSKKPAGLVLGLLLLKGLQEGRLSHVVLDQKGDQHRESPRGHWTLQALKNMGEILKAAGCDFTNVVKTTVLLADINDFNTVNEIYKQYFKSNFPARAAYQVAALPKGSRIEIEAVAIQGPLTTASL

SEQ ID NO: 11393 - protein, 219 aa, Homo Sapiens
MAAEMRKMVRQPSRESTDGSINSYSSEGNLIFPGVRLGADSQFSDFLDGLGPAQLVGRQTLATPAMGDIQIGMEDKKGQLEVEVIRARSLTQKPGSKSTPAPYVKVYLLENGACIAKKKTRIARKTLDPLYQQSLVFDESPQGKVLQVIVWGDYGRMDHKCFMGVAQILLEELDLSSMVIGWYKLFPPSSLVDPTLTPLTRRASQSSLESSTGPPCIRS

SEQ ID NO: 11394 - protein, 1012 aa, Homo Sapiens
MCAPGIHVSSEGWEEVRSVDSEEGTIEARRAVAGDLDYYWLDPATWHSRETSPISSHPVTWQPSKEGDRLIGRVILNKRTTMPKDSGALLGLKVVGGKMTDLGRLGAFITKVKKGSLADVVGHLRAGDEVLEWNGKPLPGATNEEVYNIILESKSEPQVEIIVSRPIGDIPRIPESSHPPLESSSSSFESQKMERPSISVISPTSPGALKDAPQVLPGQLSVKLWYDKVGHQLIVNVLQATDLPARVDGRPRNPYVKMYFLPDRSDKSKRRTKTVKKILEPKWNQTFVYSHVHRRDFRERMLEITVWDQPRVQEEESEFLGEILIELETALLDDEPHWYKLQTHDESSLPLPQPSPFMPRRHIHGESSSKKLQRSQRISDSDISDYEVDDGIGVVPPGYRSSARESKSTTLTVPEQQRTTHHRSRSVSPHRGNDQGKPRSRLPNVPLQRSLDEIHPTRRSRSPTRHHDASRSPVDHRTRDVDSQYLSEQDSELLMLPRAKRGRSAECLHTTSELQPFLDRARSASTNCLRPDTSLHSPERERHSRKSERSSIQKQTRKGTASDAERMHRQRSPTQSPPADTSFSSRRGRQLPQVPVRSGSIEQASLVVEERTRQMKMKVHRFKQTTGSGSSQELDREQYSKYNIHKDQYRSCDNVSAKSSDSDVSDVSAISRTSSASRLSSTSFMSEQSERPRGRISSFTPKMQGRRMGTSGRSIMKSTSVSGEMYTLEHNDGSQSDTAVGTVGAGGKKRRSSLSAKVVAIVSRRSRSTSQLSQTESGHKKLKSTIQRSTETGMAAEMRKMVRQPSRESTDGSINSYSSEGNLIFPGVRLGADSQFSDFLDGLGPAQLVGRQTLATPAMGDIQIGMEDKKGQLEVEVIRARSLTQKPGSKSTPAPYVKVYLLENGACIAKKKTRIARKTLDPLYQQSLVFDESPQGKVLQVIVWGDYGRMDHKCFMGVAQILLEELDLSSMVIGWYKLFPPSSLVDPTLTPLTRRASQSSLESSTGPPCIRS

SEQ ID NO: 11395 - protein, 817 aa, Homo Sapiens
MCAPGIHVSSEGWEEVRSVDSEEGTIEARRAVAGDLDYYWLDPATWHSRETSPISSHPVTWQPSKEGDRLIGRVILNKRTTMPKDSGALLGLKVVGGKMTDLGRLGAFITKVKKGSLADVVGHLRAGDEVLEWNGKPLPGATNEEVYNIILESKSEPQVEIIVSRPIGDIPRIPESSHPPLESSSSSFESQKMERPSISVISPTSPGALKDAPQVLPGQLSVKLWYDKVGHQLIVNVLQATDLPARVDGRPRNPYVKMYFLPDRSDKSKRRTKTVKKILEPKWNQTFVYSHVHRRDFRERMLEITVWDQPRVQEEESEFLGEILIELETALLDDEPHWYKLQTHDESSLPLPQPSPFMPRRHIHGESSSKKLQRSQRISDSDISDYEVDDGIGVVPPVGYRSSARESKSTTLTVPEQQRTTHHRSRSVSPHRGNDQGKPRSRLPNVPLQRSLDEIHPTRRSRSPTRHHDASRSPVDHRTRDVDSQYLSEQDSELLMLPRAKRGRSAECLHTTSELQPFLDRARSASTNCLRPDTSLHSPERERMHRQRSPTQSPPADTSFSSRRGRQLPQVPVRSGSIEQESGHKKLKSTIQRSTETGMAAEMRKMVRQPSRESTDGSINSYSSEGNLIFPGVRLGADSQFSDFLDGLGPAQLVGRQTLATPAMGDIQIGMEDKKGQLEVEVIRARSLTQKPGSKSTPAPYVKVYLLENGACIAKKKTRIARKTLDPLYQQSLVFDESPQGKVLQVIVWGDYGRMDHKCFMGVAQILLEELDLSSMVIGWYKLFPPSSLVDPTLTPLTRRASQSSLESSTGPPCIRS

SEQ ID NO: 11396 - protein, 826 aa, Homo Sapiens
MFAGFLQFLLLHTLHSGTGDLDYYWLDPATWHSRETSPISSHPVTWQPSKEGDRLIGRVILNKRTTMPKDSGALLGLKVVGGKMTDLGRLGAFITKVKKGSLADVVGHLRAGDEVLEWNGKPLPGATNEEVYNIILESKSEPQVEIIVSRPIGDIPRIPESSHPPLESSSSSFESQKMERPSISVISPTSPGALKDAPQVLPGQLSVKLWYDKVGHQLIVNVLQATDLPARVDGRPRNPYVKMYFLPDRSDKSKRRTKTVKKILEPKWNQTFVYSHVHRRDFRERMLEITVWDQPRVQEEESEFLGEILIELETALLDDEPHWYKLQTHDESSLPLPQPSPFMPRRHIHGESSSKKLQRSQRISDSDISDYEVDDGIGVVPPVGYRSSARESKSTTLTVPEQQRTTHHRSRSVSPHRGNDQGKPRSRLPNVPLQRSLDEIHPTRRSRSPTRHHDASRSPVDHRTRDVDSQYLSEQDSELLMLPRAKRGRSAECLHTTSELQPFLDRARSASTNCLRPDTSLHSPERERHSRKSERSSIQKQTRKGTASDAERMHRQRSPTQSPPADTSFSSRRGRQLPQVPVRSGSIEQESGHKKLKSTIQRSTETGMAAEMRKMVRQPSRESTDGSINSYSSEGNLIFPGVRLGADSQFSDFLDGLGPAQLVGRQTLATPAMGDIQIGMEDKKGQLEVEVIRARSLTQKPGSKSTPAPYVKVYLLENGACIAKKKTRIARKTLDPLYQQSLVFDESPQGKVLQVIVWGDYGRMDHKCFMGVAQILLEELDLSSMVIGWYKLFPPSSLVDPTLTPLTRRASQSSLESSTGPPCIRS

SEQ ID NO: 11397 - protein, 753 aa, Homo Sapiens
MPKDSGALLGLKVVGGKMTDLGRLGAFITKVKKGSLADVVGHLRAGDEVLEWNGKPLPGATNEEVYNIILESKSEPQVEIIVSRPIGDIPRIPESSHPPLESSSSSFESQKMERPSISVISPTSPGALKDAPQVLPGQLSVKLWYDKVGHQLIVNVLQATDLPARVDGRPRNPYVKMYFLPDRSDKSKRRTKTVKKILEPKWNQTFVYSHVHRRDFRERMLEITVWDQPRVQEEESEFLGEILIELETALLDDEPHWYKLQTHDESSLPLPQPSPFMPRRHIHGESSSKKLQRSQRISDSDISDYEVDDGIGVVPPVGYRSSARESKSTTLTVPEQQRTTHHRSRSVSPHRGNDQGKPRSRLPNVPLQRSLDEIHPTRRSRSPTRHHDASRSPVDHRTRDVDSQYLSEQDRMHRQRSPTQSPPADTSFSSRRGRQLPQVPVRSGSIEQASLVVEERTRQMKMKVHRFKQTTGSGSSQELDREQYSKYNIHKDQYRSCDNVSAKSSDSDVSDVSAISRTSSASRLSSTSFMSEQSERPRGRISSFTPKMQGRRMGTSGRSIMKSTSVSGEMYTLEHNDGSQSDTAVGTVGAGGKKRRSSLSAKVVAIVSRRSRSTSQLSQTESGHKKLKSTIQRSTETGMAAEMRKMVRQPSRESTDGSINSYSSEGNLIFPGVRLGADSQFSDFLDGLGPAQLVGRQTLATPAMGDIQIGMEDKKGQLEVEVIRARSLTQKPGSKSTPAPYVKVYLLENGACI

SEQ ID NO: 11398 - protein, 760 aa, Homo Sapiens
MPKDSGALLGLKVVGGKMTDLGRLGAFITKVKKGSLADVVGHLRAGDEVLEWNGKPLPGATNEEVYNIILESKSEPQVEIIVSRPIGDIPRIPESSHPPLESSSSSFESQKMERPSISVISPTSPGALKDAPQVLPGQLSVKLWYDKVGHQLIVNVLQATDLPARVDGRPRNPYVKMYFLPDRSDKSKRRTKTVKKILEPKWNQTFVYSHVHRRDFRERMLEITVWDQPRVQEEESEFLGEILIELETALLDDEPHWYKLQTHDESSLPLPQPSPFMPRRHIHGESSSKKLQRSQRISDSDISDYEVDDGIGVVPPVGYRSSARESKSTTLTVPEQQRTTHHRSRSVSPHRGNDQGKPRSRLPNVPLQRSLDEIHPTRRSRSPTRHHDASRSPVDHRTRDVDSQYLSEQDSELLMLPRAKRGRSAECLHTTSELQPFLDRARSASTNCLRPDTSLHSPERERHSRKSERSSIQKQTRKGTASDAERMHRQRSPTQSPPADTSFSSRRGRQLPQVPVRSGSIEQESGHKKLKSTIQRSTETGMAAEMRKMVRQPSRESTDGSINSYSSEGNLIFPGVRLGADSQFSDFLDGLGPAQLVGRQTLATPAMGDIQIGMEDKKGQLEVEVIRARSLTQKPGSKSTPAPYVKVYLLENGACIAKKKTRIARKTLDPLYQQSLVFDESPQGKVLQVIVWGDYGRMDHKCFMGVAQILLEELDLSSMVIGWYKLFPPSSLVDPTLTPLTRRASQSSLESSTGPPCIRS

SEQ ID NO: 11399 - protein, 1541 aa, Homo Sapiens
MSSAVGPRGPRPPTVPPPMQELPDLSHLTEEERNIIMAVMDRQKEEEEKEEAMLKCVVRDMAKPAACKTPRNAENQPHQPSPRLHQQFESYKEQVRKIGEEARRYQGEHKDDAPTCGICHKTKFADGCGHLCSYCRTKFCARCGGRVSLRSNNEDKVVMWVCNLCRKQQEILTKSGAWFFGSGPQQTSQDGTLSDTATGAGSEVPREKKARLQERSRSQTPLSTAAASSQDAAPPSAPPDRSKGAEPSQQALGPEQKQASSRSRSEPPRERKKTPGLSEQNGKGALKSERKRVPKTSAQPVEGAVEERERKERRESRRLEKGRSQDYPDTPEKRDEGKAADEEKQRKEEDYQTRYRSDPNLARYPVKPPPEEQQMRMHARVSRARHERRHSDVALPRTEAGAALPEGKAGKRAPAAARASPPDSPRAYSAERTAETRAPGAKQLTNHSPPAPRHGPVPAEAPELKAQEPLRKQSRLDPSSAVLMRKAKREKVETMLRNDSLSSDQSESVRPSPPKPHRSKRGGKKRQMSVSSSEEEGVSTPEYTSCEDVELESESVSEKGDLDYYWLDPATWHSRETSPISSHPVTWQPSKEGDRLIGRVILNKRTTMPKDSGALLGLKVVGGKMTDLGRLGAFITKVKKGSLADVVGHLRAGDEVLEWNGKPLPGATNEEVYNIILESKSEPQVEIIVSRPIGDIPRIPESSHPPLESSSSSFESQKMERPSISVISPTSPGALKDAPQVLPGQLSVKLWYDKVGHQLIVNVLQATDLPARVDGRPRNPYVKMYFLPDRSDKSKRRTKTVKKILEPKWNQTFVYSHVHRRDFRERMLEITVWDQPRVQEEESEFLGEILIELETALLDDEPHWYKLQTHDESSLPLPQPSPFMPRRHIHGESSSKKLQRSQRISDSDISDYEVDDGIGVVPPVGYRSSARESKSTTLTVPEQQRTTHHRSRSVSPHRGNDQGKPRSRLPNVPLQRSLDEIHPTRRSRSPTRHHDASRSPVDHRTRDVDSQYLSEQDSELLMLPRAKRGRSAECLHTTRHLVRHYKTLPPKMPLLQSSSHWNIYSELQPFLDRARSASTNCLRPDTSLHSPERERMHRQRSPTQSPPADTSFSSRRGRQLPQVPVRSGSIEQASLVVEERTRQMKMKVHRFKQTTGSGSSQELDREQYSKYNIHKDQYRSCDNVSAKSSDSDVSDVSAISRTSSASRLSSTSFMSEQSERPRGRISSFTPKMQGRRMGTSGRSIMKSTSVSGEMYTLEHNDGSQSDTAVGTVGAGGKKRRSSLSAKVVAIVSRRSRSTSQLSQTESGHKKLKSTIQRSTETGMAAEMRKMVRQPSRESTDGSINSYSSEGNLIFPGVRLGADSQFSDFLDGLGPAQLVGRQTLATPAMGDIQIGMEDKKGQLEVEVIRARSLTQKPGSKSTPAPYVKVYLLENGACIAKKKTRIARKTLDPLYQQSLVFDESPQGKVLQVIVWGDYGRMDHKCFMGVAQILLEELDLSSMVIGWYKLFPPSSLVDPTLTPLTRRASQSSLESSTGPPCIRS

SEQ ID NO: 11400 - protein, 1291 aa, Homo Sapiens
MSSAVGPRGPRPPTVPPPMQELPDLSHLTEEERNIIMAVMDRQKEEEEKEEAMLKCVVRDMAKPAACKTPRNAENQPHQPSPRLHQQFESYKEQVRKIGEEARRYQGEHKDDAPTCGICHKTKFADGCGHLCSYCRTKFCARCGGRVSLRSNNEDKVVMWVCNLCRKQQEILTKSGAWFFGSGPQQTSQDGTLSDTATGAGSEVPREKKARLQERSRSQTPLSTAAASSQDAAPPSAPPDRSKGAEPSQQALGPEQKQASSRSRSEPPRERKKTPGLSEQNGKGALKSERKRVPKTSAQPVEGAVEERERKERRESRRLEKGRSQDYPDTPEKRDEGKAADEEKQRKEEDYQTRYRSDPNLARYPVKPPPEEQQMRMHARVSRARHERRHSDVALPRTEAGAALPEGKAGKRAPAAARASPPDSPRAYSAERTAETRAPGAKQLTNHSPPAPRHGPVPAEAPELKAQEPLRKQSRLDPSSAVLMRKAKREKVETMLRNDSLSSDQSESVRPSPPKPHRSKRGGKKRQMSVSSSEEEGVSTPEYTSCEDVELESESVSEKGDLDYYWLDPATWHSRETSPISSHPVTWQPSKEGDRLIGRVILNKRTTMPKDSGALLGLKVVGGKMTDLGRLGAFITKVKKGSLADVVGHLRAGDEVLEWNGKPLPGATNEEVYNIILESKSEPQVEIIVSRPIGDIPRIPESSHPPLESSSSSFESQKMERPSISVISPTSPGALKDAPQVLPGQLSVKLWYDKVGHQLIVNVLQATDLPARVDGRPRNPYVKMYFLPDRSDKSKRRTKTVKKILEPKWNQTFVYSHVHRRDFRERMLEITVWDQPRVQEEESEFLGEILIELETALLDDEPHWYKLQTHDESSLPLPQPSPFMPRRHIHGESSSKKLQRSQRISDSDISDYEVDDGIGVVPPGYRSSARESKSTTLTVPEQQRTTHHRSRSVSPHRGNDQGKPRSRLPNVPLQRSLDEIHPTRRSRSPTRHHDASRSPVDHRTRDVDSQYLSEQDRMHRQRSPTQSPPADTSFSSRRGRQLPQVPVRSGSIEQESGHKKLKSTIQRSTETGMAAEMRKMVRQPSRESTDGSINSYSSEGNLIFPGVRLGADSQFSDFLDGLGPAQLVGRQTLATPAMGDIQIGMEDKKGQLEVEVIRARSLTQKPGSKSTPAPYVKVYLLENGACIAKKKTRIARKTLDPLYQQSLVFDESPQGKVLQVIVWGDYGRMDHKCFMGVAQILLEELDLSSMVIGWYKLFPPSSLVDPTLTPLTRRASQSSLESSTGPPCIRS

SEQ ID NO: 11401 - protein, 1342 aa, Homo Sapiens
MSSAVGPRGPRPPTVPPPMQELPDLSHLTEEERNIIMAVMDRQKEEEEKEEAMLKCVVRDMAKPAACKTPRNAENQPHQPSPRLHQQFESYKEQVRKIGEEARRYQGEHKDDAPTCGICHKTKFADGCGHLCSYCRTKFCARCGGRVSLRSNNEDKVVMWVCNLCRKQQEILTKSGAWFFGSGPQQTSQDGTLSDTATGAGSEVPREKKARLQERSRSQTPLSTAAASSQDAAPPSAPPDRSKGAEPSQQALGPEQKQASSRSRSEPPRERKKTPGLSEQNGKGALKSERKRVPKTSAQPVEGAVEERERKERRESRRLEKGRSQDYPDTPEKRDEGKAADEEKQRKEEDYQTRYRSDPNLARYPVKPPPEEQQMRMHARVSRARHERRHSDVALPRTEAGAALPEGKAGKRAPAAARASPPDSPRAYSAERTAETRAPGAKQLTNHSPPAPRHGPVPAEAPELKAQEPLRKQSRLDPSSAVLMRKAKREKVETMLRNDSLSSDQSESVRPSPPKPHRSKRGGKKRQMSVSSSEEEGVSTPEYTSCEDVELESESVSEKGDLDYYWLDPATWHSRETSPISSHPVTWQPSKEGDRLIGRVILNKRTTMPKDSGALLGLKVVGGKMTDLGRLGAFITKVKKGSLADVVGHLRAGDEVLEWNGKPLPGATNEEVYNIILESKSEPQVEIIVSRPIGDIPRIPESSHPPLESSSSSFESQKMERPSISVISPTSPGALKDAPQVLPGQLSVKLWYDKVGHQLIVNVLQATDLPARVDGRPRNPYVKMYFLPDRSDKSKRRTKTVKKILEPKWNQTFVYSHVHRRDFRERMLEITVWDQPRVQEEESEFLGEILIELETALLDDEPHWYKLQTHDESSLPLPQPSPFMPRRHIHGESSSKKLQRSQRISDSDISDYEVDDGIGVVPPGYRSSARESKSTTLTVPEQQRTTHHRSRSVSPHRGNDQGKPRSRLPNVPLQRSLDEIHPTRRSRSPTRHHDASRSPVDHRTRDVDSQYLSEQDSELLMLPRAKRGRSAECLHTTSELQPFLDRARSASTNCLRPDTSLHSPERERMHRQRSPTQSPPADTSFSSRRGRQLPQVPVRSGSIEQESGHKKLKSTIQRSTETGMAAEMRKMVRQPSRESTDGSINSYSSEGNLIFPGVRLGADSQFSDFLDGLGPAQLVGRQTLATPAMGDIQIGMEDKKGQLEVEVIRARSLTQKPGSKSTPAPYVKVYLLENGACIAKKKTRIARKTLDPLYQQSLVFDESPQGKVLQVIVWGDYGRMDHKCFMGVAQILLEELDLSSMVIGWYKLFPPSSLVDPTLTPLTRRASQSSLESSTGPPCIRS

SEQ ID NO: 11402 - protein, 1371 aa, Homo Sapiens
MSSAVGPRGPRPPTVPPPMQELPDLSHLTEEERNIIMAVMDRQKEEEEKEEAMLKCVVRDMAKPAACKTPRNAENQPHQPSPRLHQQFESYKEQVRKIGEEARRYQGEHKDDAPTCGICHKTKFADGCGHLCSYCRTKFCARCGGRVSLRSNNEDKVVMWVCNLCRKQQEILTKSGAWFFGSGPQQTSQDGTLSDTATGAGSEVPREKKARLQERSRSQTPLSTAAASSQDAAPPSAPPDRSKGAEPSQQALGPEQKQASSRSRSEPPRERKKTPGLSEQNGKGALKSERKRVPKTSAQPVEGAVEERERKERRESRRLEKGRSQDYPDTPEKRDEGKAADEEKQRKEEDYQTRYRSDPNLARYPVKPPPEEQQMRMHARVSRARHERRHSDVALPRTEAGAALPEGKAGKRAPAAARASPPDSPRAYSAERTAETRAPGAKQLTNHSPPAPRHGPVPAEAPELKAQEPLRKQSRLDPSSAVLMRKAKREKVETMLRNDSLSSDQSESVRPSPPKPHRSKRGGKKRQMSVSSSEEEGVSTPEYTSCEDVELESESVSEKGDLDYYWLDPATWHSRETSPISSHPVTWQPSKEGDRLIGRVILNKRTTMPKDSGALLGLKVVGGKMTDLGRLGAFITKVKKGSLADVVGHLRAGDEVLEWNGKPLPGATNEEVYNIILESKSEPQVEIIVSRPIGDIPRIPESSHPPLESSSSSFESQKMERPSISVISPTSPGALKDAPQVLPGQLSVKLWYDKVGHQLIVNVLQATDLPARVDGRPRNPYVKMYFLPDRSDKSKRRTKTVKKILEPKWNQTFVYSHVHRRDFRERMLEITVWDQPRVQEEESEFLGEILIELETALLDDEPHWYKLQTHDESSLPLPQPSPFMPRRHIHGESSSKKLQRSQRISDSDISDYEVDDGIGVVPPVGYRSSARESKSTTLTVPEQQRTTHHRSRSVSPHRGNDQGKPRSRLPNVPLQRSLDEIHPTRRSRSPTRHHDASRSPVDHRTRDVDSQYLSEQDSELLMLPRAKRGRSAECLHTTSELQPFLDRARSASTNCLRPDTSLHSPERERGRWSPSLDRRRPPSPRIQIQHASPENDRMHRQRSPTQSPPADTSFSSRRGRQLPQVPVRSGSIEQESGHKKLKSTIQRSTETGMAAEMRKMVRQPSRESTDGSINSYSSEGNLIFPGVRLGADSQFSDFLDGLGPAQLVGRQTLATPAMGDIQIGMEDKKGQLEVEVIRARSLTQKPGSKSTPAPYVKVYLLENGACIAKKKTRIARKTLDPLYQQSLVFDESPQGKVLQVIVWGDYGRMDHKCFMGVAQILLEELDLSSMVIGWYKLFPPSSLVDPTLTPLTRRASQSSLESSTGPPCIRS

SEQ ID NO: 11403 - protein, 1692 aa, Homo Sapiens
MSSAVGPRGPRPPTVPPPMQELPDLSHLTEEERNIIMAVMDRQKEEEEKEEAMLKCVVRDMAKPAACKTPRNAENQPHQPSPRLHQQFESYKEQVRKIGEEARRYQGEHKDDAPTCGICHKTKFADGCGHLCSYCRTKFCARCGGRVSLRSNNEDKVVMWVCNLCRKQQEILTKSGAWFFGSGPQQTSQDGTLSDTATGAGSEVPREKKARLQERSRSQTPLSTAAASSQDAAPPSAPPDRSKGAEPSQQALGPEQKQASSRSRSEPPRERKKTPGLSEQNGKGALKSERKRVPKTSAQPVEGAVEERERKERRESRRLEKGRSQDYPDTPEKRDEGKAADEEKQRKEEDYQTRYRSDPNLARYPVKPPPEEQQMRMHARVSRARHERRHSDVALPRTEAGAALPEGKAGKRAPAAARASPPDSPRAYSAERTAETRAPGAKQLTNHSPPAPRHGPVPAEAPELKAQEPLRKQSRLDPSSAVLMRKAKREKVETMLRNDSLSSDQSESVRPSPPKPHRSKRGGKKRQMSVSSSEEEGVSTPEYTSCEDVELESESVSEKGDLDYYWLDPATWHSRETSPISSHPVTWQPSKEGDRLIGRVILNKRTTMPKDSGALLGLKVVGGKMTDLGRLGAFITKVKKGSLADVVGHLRAGDEVLEWNGKPLPGATNEEVYNIILESKSEPQVEIIVSRPIGDIPRIPESSHPPLESSSSSFESQKMERPSISVISPTSPGALKDAPQVLPGQLSVKLWYDKVGHQLIVNVLQATDLPARVDGRPRNPYVKMYFLPDRSDKSKRRTKTVKKILEPKWNQTFVYSHVHRRDFRERMLEITVWDQPRVQEEESEFLGEILIELETALLDDEPHWYKLQTHDESSLPLPQPSPFMPRRHIHGESSSKKLQRSQRISDSDISDYEVDDGIGVVPPVGYRSSARESKSTTLTVPEQQRTTHHRSRSVSPHRGNDQGKPRSRLPNVPLQRSLDEIHPTRRSRSPTRHHDASRSPVDHRTRDVDSQYLSEQDSELLMLPRAKRGRSAECLHTTRHLVRHYKTLPPKMPLLQSSSHWNIYSSILPAHTKTKSVTRQDISLHHECFNSTVLRFTDEILVSELQPFLDRARSASTNCLRPDTSLHSPERERGRWSPSLDRRRPPSPRIQIQHASPENDRHSRKSERSSIQKQTRKGTASDAERVLPTCLSRRGHAAPRATDQPVIRGKHPARSRSSEHSSIRTLCSMHHLVPGGSAPPSPLLTRMHRQRSPTQSPPADTSFSSRRGRQLPQVPVRSGSIEQASLVVEERTRQMKMKVHRFKQTTGSGSSQELDREQYSKYNIHKDQYRSCDNVSAKSSDSDVSDVSAISRTSSASRLSSTSFMSEQSERPRGRISSFTPKMQGRRMGTSGRSIMKSTSVSGEMYTLEHNDGSQSDTAVGTVGAGGKKRRSSLSAKVVAIVSRRSRSTSQLSQTESGHKKLKSTIQRSTETGMAAEMRKMVRQPSRESTDGSINSYSSEGNLIFPGVRLGADSQFSDFLDGLGPAQLVGRQTLATPAMGDIQIGMEDKKGQLEVEVIRARSLTQKPGSKSTPAPYVKVYLLENGACIAKKKTRIARKTLDPLYQQSLVFDESPQGKVLQVIVWGDYGRMDHKCFMGVAQILLEELDLSSMVIGWYKLFPPSSLVDPTLTPLTRRASQSSLESSTGPPCIRS

SEQ ID NO: 11404 - protein, 1481 aa, Homo Sapiens
MSSAVGPRGPRPPTVPPPMQELPDLSHLTEEERNIIMAVMDRQKEEEEKEEAMLKCVVRDMAKPAACKTPRNAENQPHQPSPRLHQQFESYKEQVRKIGEEARRYQGEHKDDAPTCGICHKTKFADGCGHLCSYCRTKFCARCGGRVSLRSNNEDKVVMWVCNLCRKQQEILTKSGAWFFGSGPQQTSQDGTLSDTATGAGSEVPREKKARLQERSRSQTPLSTAAASSQDAAPPSAPPDRSKGAEPSQQALGPEQKQASSRSRSEPPRERKKTPGLSEQNGKGALKSERKRVPKTSAQPVEGAVEERERKERRESRRLEKGRSQDYPDTPEKRDEGKAADEEKQRKEEDYQTRYRSDPNLARYPVKPPPEEQQMRMHARVSRARHERRHSDVALPRTEAGAALPEGKAGKRAPAAARASPPDSPRAYSAERTAETRAPGAKQLTNHSPPAPRHGPVPAEAPELKAQEPLRKQSRLDPSSAVLMRKAKREKVETMLRNDSLSSDQSESVRPSPPKPHRSKRGGKKRQMSVSSSEEEGVSTPEYTSCEDVELESESVSEKGDLDYYWLDPATWHSRETSPISSHPVTWQPSKEGDRLIGRVILNKRTTMPKDSGALLGLKVVGGKMTDLGRLGAFITKVKKGSLADVVGHLRAGDEVLEWNGKPLPGATNEEVYNIILESKSEPQVEIIVSRPIGDIPRIPESSHPPLESSSSSFESQKMERPSISVISPTSPGALKDAPQVLPGQLSVKLWYDKVGHQLIVNVLQATDLPARVDGRPRNPYVKMYFLPDRSDKSKRRTKTVKKILEPKWNQTFVYSHVHRRDFRERMLEITVWDQPRVQEEESEFLGEILIELETALLDDEPHWYKLQTHDESSLPLPQPSPFMPRRHIHGESSSKKLQRSQRISDSDISDYEVDDGIGVVPPVGYRSSARESKSTTLTVPEQQRTTHHRSRSVSPHRGNDQGKPRSRLPNVPLQRSLDEIHPTRRSRSPTRHHDASRSPVDHRTRDVDSQYLSEQDSELLMLPRAKRGRSAECLHTTSELQPFLDRARSASTNCLRPDTSLHSPERERMHRQRSPTQSPPADTSFSSRRGRQLPQVPVRSGSIEQASLVVEERTRQMKMKVHRFKQTTGSGSSQELDREQYSKYNIHKDQYRSCDNVSAKSSDSDVSDVSAISRTSSASRLSSTSFMSEQSERPRGRISSFTPKMQGRRMGTSGRSIMKSTSVSGEMYTLEHNDGSQSDTAVGTVGAGGKKRRSSLSAKVVAIVSRRSRSTSQLSQTESGHKKLKSTIQRSTETGMAAEMRKMVRQPSRESTDGSINSYSSEGNLIFPGVRLGADSQFSDFLDGLGPAQLVGRQTLATPAMAPYVKVYLLENGACIAKKKTRIARKTLDPLYQQSLVFDESPQGKVLQVIVWGDYGRMDHKCFMGVAQILLEELDLSSMVIGWYKLFPPSSLVDPTLTPLTRRASQSSLESSTGPPCIRS

SEQ ID NO: 11405 - protein, 1475 aa, Homo Sapiens
MSSAVGPRGPRPPTVPPPMQELPDLSHLTEEERNIIMAVMDRQKEEEEKEEAMLKCVVRDMAKPAACKTPRNAENQPHQPSPRLHQQFESYKEQVRKIGEEARRYQGEHKDDAPTCGICHKTKFADGCGHLCSYCRTKFCARCGGRVSLRSNNEDKVVMWVCNLCRKQQEILTKSGAWFFGSGPQQTSQDGTLSDTATGAGSEVPREKKARLQERSRSQTPLSTAAASSQDAAPPSAPPDRSKGAEPSQQALGPEQKQASSRSRSEPPRERKKTPGLSEQNGKGALKSERKRVPKTSAQPVEGAVEERERKERRESRRLEKGRSQDYPDTPEKRDEGKAADEEKQRKEEDYQTRYRSDPNLARYPVKPPPEEQQMRMHARVSRARHERRHSDVALPRTEAGAALPEGKAGKRAPAAARASPPDSPRAYSAERTAETRAPGAKQLTNHSPPAPRHGPVPAEAPELKAQEPLRKQSRLDPSSAVLMRKAKREKVETMLRNDSLSSDQSESVRPSPPKPHRSKRGGKKRQMSVSSSEEEGVSTPEYTSCEDVELESESVSEKGDLDYYWLDPATWHSRETSPISSHPVTWQPSKEGDRLIGRVILNKRTTMPKDSGALLGLKVVGGKMTDLGRLGAFITKVKKGSLADVVGHLRAGDEVLEWNGKPLPGATNEEVYNIILESKSEPQVEIIVSRPIGDIPRIPESSHPPLESSSSSFESQKMERPSISVISPTSPGALKDAPQVLPGQLSVKLWYDKVGHQLIVNVLQATDLPARVDGRPRNPYVKMYFLPDRSDKSKRRTKTVKKILEPKWNQTFVYSHVHRRDFRERMLEITVWDQPRVQEEESEFLGEILIELETALLDDEPHWYKLQTHDESSLPLPQPSPFMPRRHIHGESSSKKLQRSQRISDSDISDYEVDDGIGVVPPGYRSSARESKSTTLTVPEQQRTTHHRSRSVSPHRGNDQGKPRSRLPNVPLQRSLDEIHPTRRSRSPTRHHDASRSPVDHRTRDVDSQYLSEQDSELLMLPRAKRGRSAECLHTTRMHRQRSPTQSPPADTSFSSRRGRQLPQVPVRSGSIEQASLVVEERTRQMKMKVHRFKQTTGSGSSQELDREQYSKYNIHKDQYRSCDNVSAKSSDSDVSDVSAISRTSSASRLSSTSFMSEQSERPRGRIRRMGTSGRSIMKSTSVSGEMYTLEHNDGSQSDTAVGTVGAGGKKRRSSLSAKVVAIVSRRSRSTSQLSQTESGHKKLKSTIQRSTETGMAAEMRKMVRQPSRESTDGSINSYSSEGNLIFPGVRLGADSQFSDFLDGLGPAQLVGRQTLATPAMGDIQIGMEDKKGQLEVEVIRARSLTQKPGSKSTPAPYVKVYLLENGACIAKKKTRIARKTLDPLYQQSLVFDESPQGKVLQVIVWGDYGRMDHKCFMGVAQILLEELDLSSMVIGWYKLFPPSSLVDPTLTPLTRRASQSSLESSTGPPCIRS

SEQ ID NO: 11406 - protein, 740 aa, Homo Sapiens
RPRNPYVKMYFLPDRSDKSKRRTKTVKKILEPKWNQTFVYSHVHRRDFRERMLEITVWDQPRVQEEESEFLGEILIELETALLDDEPHWYKLQTHDESSLPLPQPSPFMPRRHIHGESSSKKLQRSQRISDSDISDYEVDDGIGVVPPVGYRSSARESKSTTLTVPEQQRTTHHRSRSVSPHRGNDQGKPRSRLPNVPLQRSLDEIHPTRRSRSPTRHHDASRSPVDHRTRDVDSQYLSEQDSELLMLPRAKRGRSAECLHTTSELQPFLDRARSASTNCLRPDTSLHSPERERMHRQRSPTQSPPADTSFSSRRGRQLPQVPVRSGSIEQASLVVEERTRQMKMKVHRFKQTTGSGSSQELDREQYSKYNIHKDQYRSCDNVSAKSSDSDVSDVSAISRTSSASRLSSTSFMSEQSERPRGRISSFTPKMQGRRMGTSGRSIMKSTSVSGEMYTLEHNDGSQSDTAVGTVGAGGKKRRSSLSAKVVAIVSRRSRSTSQLSQTESGHKKLKSTIQRSTETGMAAEMRKMVRQPSRESTDGSINSYSSEGNLIFPGVRLGADSQFSDFLDGLGPAQLVGRQTLATPAMGDIQIGMEDKKGQLEVEVIRARSLTQKPGSKSTPAPYVKVYLLENGACIAKKKTRIARKTLDPLYQQSLVFDESPQGKVLQVIVWGDYGRMDHKCFMGVAQILLEELDLSSMVIGWYKLFPPSSLVDPTLTPLTRRASQSSLESSTGPPCIRS

SEQ ID NO: 11407 - protein, 610 aa, Homo Sapiens
  misc_feature (1)..(1): Xaa can be any naturally occurring amino acid
XDYEVDDGIGVVPPVGYRSSARESKSTTLTVPEQQRTTHHRSRSVSPHRGNDQGKPRSRLPNVPLQRSLDEIHPTRRSRSPTRHHDASRSPVDHRTRDVDSQYLSEQDSELLMLPRAKRGRSAECLHTTRHSRKSERSSIQKQTRKGTASDAERMHRQRSPTQSPPADTSFSSRRGRQLPQVPVRSGSIEQEQEKYNSSTKASLVVEERTRQMKMKVHRFKQTTGSGSSQELDREQYSKYNIHKDQYRSCDNVSAKSSDSDVSDVSAISRTSSASRLSSTSFMSEQSERPRGRISSFTPKMQGRRMGTSGRSIMKSTSVSGEMYTLEHNDGSQSDTAVGTVGAGGKKRRSSLSAKVVAIVSRRSRSTSQLSQTESGHKKLKSTIQRSTETGMAAEMRKMVRQPSRESTDGSINSYSSEGNLIFPGVRLGADSQFSDFLDGLGPAQLVGRQTLATPAMGDIQIGMEDKKGQLEVEVIRARSLTQKPGSKSTPAPYVKVYLLENGACIAKKKTRIARKTLDPLYQQSLVFDESPQGKVLQVIVWGDYGRMDHKCFMGVAQILLEELDLSSMVIGWYKLFPPSSLVDPTLTPLTRRASQSSLESSTGPPCIRS

SEQ ID NO: 11408 - protein, 1038 aa, Homo Sapiens
  misc_feature (1)..(1): Xaa can be any naturally occurring amino acid
XYSAERTAETRAPGAKQLTNHSPPAPRHGPVPAEAPELKAQEPLRKQSRLDPSSAVLMRKAKREKVETMLRNDSLSSDQSESVRPSPPKPHRSKRGGKKRQMSVSSSEEEGVSTPEYTSCEDVELESESVSEKGDLDYYWLDPATWHSRETSPISSHPVTWQPSKEGDRLIGRVILNKRTTMPKDSGALLGLKVVGGKMTDLGRLGAFITKVKKGSLADVVGHLRAGDEVLEWNGKPLPGATNEEVYNIILESKSEPQVEIIVSRPIGDIPRIPESSHPPLESSSSSFESQKMERPSISVISPTSPGALKDAPQVLPGQLSVKLWYDKVGHQLIVNVLQATDLPARVDGRPRNPYVKMYFLPDRSDKSKRRTKTVKKILEPKWNQTFVYSHVHRRDFRERMLEITVWDQPRVQEEESEFLGEILIELETALLDDEPHWYKLQTHDESSLPLPQPSPFMPRRHIHGESSSKKLQRSQRISDSDISDYEVDDGIGVVPPVGYRSSARESKSTTLTVPEQQRTTHHRSRSVSPHRGNDQGKPRSRLPNVPLQRSLDEIHPTRRSRSPTRHHDASRSPVDHRTRDVDSQYLSEQDRMHRQRSPTQSPPADTSFSSRRGRQLPQVPVRSGSIEQASLVVEERTRQMKMKVHRFKQTTGSGSSQELDREQYSKYNIHKDQYRSCDNVSAKSSDSDVSDVSAISRTSSASRLSSTSFMSEQSERPRGRISSFTPKMQGRRMGTSGRSIMKSTSVSGEMYTLEHNDGSQSDTAVGTVGAGGKKRRSSLSAKVVAIVSRRSRSTSQLSQTESGHKKLKSTIQRSTETGMAAEMRKMVRQPSRESTDGSINSYSSEGNLIFPGVRLGADSQFSDFLDGLGPAQLVGRQTLATPAMGDIQIGMEDKKGQLEVEVIRARSLTQKPGSKSTPAPYVKVYLLENGACIAKKKTRIARKTLDPLYQQSLVFDESPQGKVLQVIVWGDYGRMDHKCFMGVAQILLEELDLSSMVIGWYKLFPPSSLVDPTLTPLTRRASQSSLESSTGPPCIRS

SEQ ID NO: 11409 - protein, 151 aa, Homo Sapiens
MDSAACAAAATPVPALALALAPDLAQAPLALPGLLSPSCLLSSGQEVNGSERGTCLWRPWLSSTNDSPRQMRKLVDLAAGGATAAEVTKAESKFHHPVRLFWPKSRSFDYLYSAGEILLQNFPVQATINLYEDSDSEEEEEDEEQEDEEEK

SEQ ID NO: 11410 - protein, 104 aa, Homo Sapiens
MDSAACAAAATPVPALALALAPDLAQAPLALPGLLSPSCLLSSGQEVNGSERLFWPKSRSFDYLYSAGEILLQNFPVQATINLYEDSDSEEEEEDEEQEDEEEK

SEQ ID NO: 11411 - protein, 185 aa, Homo Sapiens
MPRLFLFHLLEFCLLLNQFSRAVAAKWKDDVIKLCGRELVRAQIAICGMSTWSKRSLSQEDAPQTPRPVAEIVPSFINKDTETIIIMLEFIANLPPELKAALSERQPSLPELQQYVPALKDSNLSFEEFKKLIRNRQSEAADSNPSELKYLGLDTHSQKKRRPYVALFEKCCLIGCTKRSLAKYC

SEQ ID NO: 11412 - protein, 185 aa, Homo Sapiens
MPRLFFFHLLGVCLLLNQFSRAVADSWMEEVIKLCGRELVRAQIAICGMSTWSKRSLSQEDAPQTPRPVAEIVPSFINKDTETINMMSEFVANLPQELKLTLSEMQPALPQLQQHVPVLKDSSLLFEEFKKLIRNRQSEAADSSPSELKYLGLDTHSRKKRQLYSALANKCCHVGCTKRSLARFC

SEQ ID NO: 11413 - protein, 68 aa, Homo Sapiens
  misc_feature (1)..(1): Xaa can be any naturally occurring amino acid
XTWSKRSLSQEDAPQTPRPVAGDFIQTVSLGISPDGGKALRTGSCFTREFLGALSKLCHPSSTKIQKP

SEQ ID NO: 11414 - protein, 109 aa, Homo Sapiens
MARYMLLLLLAVWVLTGELWPGAEARAAPYGVRLCGREFIRAVIFTCGGSRWRRSDILAHEAMEKNIEAPRSKFTCSRLEKLDSCSVSPAPKCTRSSINKERYLPGCRC

SEQ ID NO: 11415 - protein, 142 aa, Homo Sapiens
MARYMLLLLLAVWVLTGELWPGAEARAAPYGVRLCGREFIRAVIFTCGGSRWRRSDILAHEAMGDTFPDADADEDSLAGELDEAMGSSEWLALTKSPQAFYRGRPSWQGTPGVLRGSRDVLAGLSSSCCKWGCSKSEISSLC

SEQ ID NO: 11416 - protein, 165 aa, Homo Sapiens
EEKKLLVYEALEYAKRALEKNESSFASHKWYAICLSDVGDYEGIKAKIANAYIIKEHFEKAIELNPKDATSIHLMGIWCYTFAEMPWYQRRIAKMLFATPPSSTYEKALGYFHRAEQGKTYLKLHNKKLAAFWLMKAKDYPAHTEEDKQIQTEAAQLLTSFSEKN

SEQ ID NO: 11417 - protein, 108 aa, Homo Sapiens
MALAARLWRLLPFRRGAAPGSRLPAGTSGSRGHCGPCRFRGFEVMGNPGTFKRGLLLSALSYLGFETYQVISQAAVVHATAKESRCVTEGRVWRCDLSSLQPLPPGFK

SEQ ID NO: 11418 - protein, 271 aa, Homo Sapiens
MALAARLWRLLPFRRGAAPGSRLPAGTSGSRGHCGPCRFRGFEVMGNPGTFKRGLLLSALSYLGFETYQVISQAAVVHATAKVEEILEQADYLYESGETEKLYQLLTQYKESEDAELLWRLARASRDVAQLSRTSEEEKKLLVYEALEYAKRALEKNESSFASHKKAIELNPKDATSIHLMGIWCYTFAEMPWYQRRIAKMLFATPPSSTYEKALGYFHRAEQGKTYLKLHNKKLAAFWLMKAKDYPAHTEEDKQIQTEAAQLLTSFSEKN

SEQ ID NO: 11419 - protein, 284 aa, Homo Sapiens
MALAARLWRLLPFRRGAAPGSRLPAGTSGSRGHCGPCRFRGFEVMGNPGTFKRGLLLSALSYLGFETYQVISQAAVVHATAKVEEILEQADYLYESGETEKLYQLLTQYKESEDAELLWRLARASRDVAQLSRTSEEEKKLLVYEALEYAKRALEKNESSFASHKKAIELNPKDATSIHLMGIWCYTFAEMPWYQRRIAKMLFATPPSSTYEKALGYFHRAEQVDPNFYSKNLLLLGKTYLKLHNKKLAAFWLMKAKDYPAHTEEDKQIQTEAAQLLTSFSEKN

SEQ ID NO: 11420 - protein, 314 aa, Homo Sapiens
MALAARLWRLLPFRRGAAPGSRLPAGTSGSRGHCGPCRFRGFEVMGNPGTFKRGLLLSALSYLGFETYQVISQAAVVHATAKVEEILEQADYLYESGETEKLYQLLTQYKESEDAELLWRLARASRDVAQLSRTSEEEKKLLVYEALEYAKRALEKNESSFASHKWYAICLSDVGDYEGIKAKIANAYIIKEHFEKAIELNPKDATSIHLMGIWCYTFAEMPWYQRRIAKMLFATPPSSTYEKALGYFHRAEQVDPNFYSKNLLLLGKTYLKLHNKKLAAFWLMKAKDYPAHTEEDKQIQTEAAQLLTSFSEKN

SEQ ID NO: 11421 - protein, 64 aa, Homo Sapiens
MGNPGTFKRGLLLSALSYLGFETYQVISQAAVVHATAKESRCVTEGRVWRCDLSSLQPLPPGFK

SEQ ID NO: 11422 - protein, 95 aa, Homo Sapiens
MGNPGTFKRGLLLSALSYLGFETYQVISQAAVVHATAKVEEILEQADYLYESGETEKLYQLLTQYKESEDAELLWRLARASRDVAQLSRTSEEEK

SEQ ID NO: 11423 - protein, 248 aa, Homo Sapiens
MGNPGTFKRGLLLSALSYLGFETYQVISQAAVVHATAKVEEILEQADYLYESGETEKLYQLLTQYKESEDAELLWRLARASRDVAQLSRTSEEEKKLLVYEALEYAKRALEKNESSFASHKWYAICLSDVGDYEGIKAKIANAYIIKEHFEKAIELNPKDATSIHLMGIWCYTFAEMPWYQRRIAKMLFATPPSSTYEKALGYFHRAEQGKTYLKLHNKKLAAFWLMKAKDYPAHTEEDKQVKRNRSS

SEQ ID NO: 11424 - protein, 42 aa, Homo Sapiens
MGNPGTFKRGLLLSALSYLGFETYQVISQAAVVHATAKVRQY

SEQ ID NO: 11425 - protein, 159 aa, Homo Sapiens
  misc_feature (1)..(1): Xaa can be any naturally occurring amino acid
XCYTFAEMPWYQRRIAKMLFATPPSSTYEKALGYFHRAEQVDPNFYSKNLLLLGKTYLKLHNKKLAAFWLMKAKDYPAHTEEDKQEPDSPRVTLVRDVSPLRVRPITENKPQESLTFSFPCSPHLIVLVWIPELTAGLRCLFPHVHVYQRFCVASPSAS

SEQ ID NO: 11426 - protein, 107 aa, Homo Sapiens
  misc_feature (1)..(1): Xaa can be any naturally occurring amino acid
XKAIELNPKDATSIHLMGIWCYTFAEMPWYQRRIAKMLFATPPSSTYEKALGYFHRAEQVDPNFYSKNLLLLGKTYLKLHNKKLAAFWLMKAKDYPAHTEEDKQEII

SEQ ID NO: 11427 - protein, 151 aa, Homo Sapiens
  misc_feature (1)..(1): Xaa can be any naturally occurring amino acid
XKNESSFASHKWYAICLSDVGDYEGIKAKIANAYIIKEHFEKAIELNPKDATSIHLMGIWCYTFAEMPWYQRRIAKMLFATPPSSTYEKALGYFHRAEQVDPNFYSKNLLLLGKTYLKLHNKKLAAFWLMKAKDYPAHTEEDKQVKRNRSS

SEQ ID NO: 11428 - protein, 130 aa, Homo Sapiens
  misc_feature (1)..(1): Xaa can be any naturally occurring amino acid
XKTYLKLHNKKLAAFWLMKAKDYPAHTEEDKQEPDSPRVTLVRDVSPLRVRPITENKPQESLTFSFPCSPHLIVLVWIPELTAGLRCLFPHVHVYQSLKITRVFIIRIWKRSLFNQADLCLSFVFTMNSE

SEQ ID NO: 11429 - protein, 225 aa, Homo Sapiens
  misc_feature (1)..(1): Xaa can be any naturally occurring amino acid
XLLSALSYLGFETYQVISQAAVVHATAKVEEILEQADYLYESGETEKLYQLLTQYKESEDAELLWRLARASRDVAQLSRTSEEEKKLLVYEALEYAKRALEKNESSFASHKWYAICLSDVGDYEGIKAKIANAYIIKEHFEKAIELNPKDATSIHLMGIWCYTFAEMPWYQRRIAKMLFATPPSSTYEKALGYFHRAEQGEEKQKQLKGQEVGLSRDVAFCWMAF

SEQ ID NO: 11430 - protein, 156 aa, Homo Sapiens
MALEKSLVRLLLLVLILLVLGWVQPSLGKESRAKKFQRQHMDSDSSPSSSSTYCNQMMRRRNMTQGRCKPVNTFVHEPLVDVQNVCFQEKVTCKNGQGNCYKSNSSMHITDCRLTNGSRYPNCAYRTSPKERHIIVACEGSPYVPVHFDASVEDST

SEQ ID NO: 11431 - protein, 156 aa, Homo Sapiens; identical to SEQ ID NO: 11430

SEQ ID NO: 11432 - protein, 156 aa, Homo Sapiens; identical to SEQ ID NO: 11430

SEQ ID NO: 11433 - protein, 156 aa, Homo Sapiens; identical to SEQ ID NO: 11430

SEQ ID NO: 11434 - protein, 116 aa, Homo Sapiens
MDSDSSPSSSSTYCNQMMRRRNMTQGRCKPVNTFVHEPLVDVQNVCFQEKVTCKNGQGNCYKSNSSMHITDCRLTNGSRYPNCAYRTSPKERHIIVACEGSPYVPVHFDASVEDST

SEQ ID NO: 11435 - protein, 216 aa, Homo Sapiens
MKLNLVQIFFMLLMLLLGLGMGLGLGLHMATAVLEESDQPLNEFWSSDSQDKAEATEEGDGTQTTETLVLSNKEVVQPGWPEDPILGEDEVGGNKMLRASALFQSNKDYLRLDQTDRECNDMMAHKMKEPSQSCIAQYAFIHEDLNTVKAVCNSPVIACELKGGKCHKSSRPFDLTLCELSQPDQVTPNCNYLTSVIKKHIIITCNDMKRQLPTGQ

SEQ ID NO: 11436 - protein, 244 aa, Homo Sapiens
MWGAPLPRRPVWDVRSASAGPQPCLGGKMKLNLVQIFFMLLMLLLGLGMGLGLGLHMATAVLEESDQPLNEFWSSDSQDKAEATEEGDGTQTTETLVLSNKEVVQPGWPEDPILGEDEVGGNKMLRASALFQSNKDYLRLDQTDRECNDMMAHKMKEPSQSCIAQYAFIHEDLNTVKAVCNSPVIACELKGGKCHKSSRPFDLTLCELSQPDQVTPNCNYLTSVIKKHIIITCNDMKRQLPTGQ

SEQ ID NO: 11437 - protein, 136 aa, Homo Sapiens
METFPLLLLSLGLVLAEASESTMKIIKEEFTDEEMQYDMAKSGQEKQTIEILMNPILLVKNTSLSMSKDDMSSTLLTFRSLHYNDPKGNSSGNDKECCNDMTVWRKVSEANGSCKWSNNFIRSSTEVMRRVHRAPS

SEQ ID NO: 11438 - protein, 143 aa, Homo Sapiens
METFPLLLLSLGLVLAEASESTMKIIKEEFTDEEMQYDMAKSGQEKQTIEILMNPILLVKNTSLSMSKDDMSSTLLTFRSLHYNDPKGNSSGNDKECCNDMTVWRKVSEANGSCKWSNNFIRSSTEVMRRVHRAPSCKFVQNP

SEQ ID NO: 11439 - protein, 171 aa, Homo Sapiens
METFPLLLLSLGLVLAEASESTMKIIKEEFTDEEMQYDMAKSGQEKQTIEILMNPILLVKNTSLSMSKDDMSSTLLTFRSLHYNDPKGNSSGNDKECCNDMTVWRKVSEANGSCKWSNNFIRSSTEVMRRVHRAPSCKFVQNPGISCCESLELENTVCQFTTGKQFPRCQY

SEQ ID NO: 11440 - protein, 178 aa, Homo Sapiens
METFPLLLLSLGLVLAEASESTMKIIKEEFTDEEMQYDMAKSGQEKQTIEILMNPILLVKNTSLSMSKDDMSSTLLTFRSLHYNDPKGNSSGNDKECCNDMTVWRKVSEANGSCKWSNNFIRSSTEVMRRVHRAPSCKFVQNPGISCCESLELENTVCQFTTGKQFPRCQYHSVTSLE

SEQ ID NO: 11441 - protein, 178 aa, Homo Sapiens; identical to SEQ ID NO: 11440

SEQ ID NO: 11442 - protein, 199 aa, Homo Sapiens
METFPLLLLSLGLVLAEASESTMKIIKEEFTDEEMQYDMAKSGQEKQTIEILMNPILLVKNTSLSMSKDDMSSTLLTFRSLHYNDPKGNSSGNDKECCNDMTVWRKVSEANGSCKWSNNFIRSSTEVMRRVHRAPSCKFVQNPGISCCESLELENTVCQFTTGKQFPRCQYHSVTSLEKILTVLTGHSLMSWLVCGSKL

SEQ ID NO: 11443 - protein, 199 aa, Homo Sapiens; identical to SEQ ID NO: 11442

SEQ ID NO: 11444 - protein, 199 aa, Homo Sapiens; identical to SEQ ID NO: 11442

SEQ ID NO: 11445 - protein, 199 aa, Homo Sapiens; identical to SEQ ID NO: 11442

SEQ ID NO: 11446 - protein, 199 aa, Homo Sapiens; identical to SEQ ID NO: 11442

SEQ ID NO: 11447 - protein, 199 aa, Homo Sapiens; identical to SEQ ID NO: 11442

SEQ ID NO: 11448 - protein, 147 aa, Homo Sapiens
MIIMVIIFLVLLFWENEVNDEAVMSTLEHLHVDYPQNDVPVPARYCNHMIIQRVIREPDHTCKKEHVFIHERPRKINGICISPKKVACQNLSAIFCFQSETKFKMTVCQLIEGTRYPACRYHYSPTEGFVLVTCDDLRPDSFLGYVK

SEQ ID NO: 11449 - protein, 156 aa, Homo Sapiens
MAPAVTRLLFLQLVLGPTLVMDIKMQIGSRNFYTLSIDYPRVNYPKGFRGYCNGLMSYMRGKMQNSDCPKIHYVIHAPWKAIQKFCKYSDSFCENYNEYCTLTQDSLPITVCSLSHQQPPTSCYYNSTLTNQKLYLLCSRKYEADPIGIAGLYSGI

SEQ ID NO: 11450 - protein, 161 aa, Homo Sapiens
MVPKLFTSQICLLLLLGLLAVEGSLHVKPPQFTWAQWFETQHINMTSQQCTNAMQVINNYQRRCKNQNTFLLTTFANVVNVCGNPNMTCPSNKTRKNCHHSGSQVPLIHCNLTTPSPQNISNCRYAQTPANMFYIVACDNRDQRRDPPQYPVVPVHLDRII

SEQ ID NO: 11451 - protein, 160 aa, Homo Sapiens
MVPKLFTSQICLLLLLGLMGVEGSLHARPPQFTRAQWFAIQHISLNPPRCTIAMRAINNYRWRCKNQNTFLRTTFANVVNVCGNQSIRCPHNRTLNNCHRSRFRVPLLHCDLINPGAQNISNCTYADRPGRRFYVVACDNRDPRDSPRYPVVPVHLDTTI

SEQ ID NO: 11452 - protein, 147 aa, Homo Sapiens
MALQRTHSLLLLLLLTLLGLGLVQPSYGQDGMYQRFLRQHVHPEETGGSDRYCNLMMQRRKMTLYHCKRFNTFIHEDIWNIRSICSTTNIQCKNGKMNCHEGVVKVTDCRDTGSSRAPNCRYRAIASTRRVVIACEGNPQVPVHFDG

SEQ ID NO: 11453 - protein, 147 aa, Homo Sapiens; identical to SEQ ID NO: 11452

SEQ ID NO: 11454 - protein, 147 aa, Homo Sapiens; identical to SEQ ID NO: 11452

SEQ ID NO: 11455 - protein, 150 aa, Homo Sapiens
MVLCFPLLLLLLVLWGPVCPLHAWPKRLTKAHWFEIQHIQPSPLQCNRAMSGINNYTQHCKHQNTFLHDSFQNVAAVCDLLSIVCKNRRHNCHQSSKPVNMTDCRLTSGKYPQCRYSAAAQYKFFIVACDPPQKSDPPYKLVPVHLDSIL

SEQ ID NO: 11456 - protein, 156 aa, Homo Sapiens
MAPARAGFCPLLLLLLLGLWVAEIPVSAKPKGMTSSQWFKIQHMQPSPQACNSAMKNINKHTKRCKDLNTFLHEPFSSVAATCQTPKIACKNGDKNCHQSHGAVSLTMCKLTSGKHPNCRYKEKRQNKSYVVACKPPQKKDSQQFHLVPVHLDRVL

SEQ ID NO: 11457 - protein, 156 aa, Homo Sapiens; identical to SEQ ID NO: 11456

SEQ ID NO: 11458 - protein, 154 aa, Homo Sapiens
MAPARAGCCPLLLLLLGLWVAEVLVRAKPKDMTSSQWFKTQHVQPSPQACNSAMSIINKYTERCKDLNTFLHEPFSSVAITCQTPNIACKNSCKNCHQSHGPMSLTMGELTSGKYPNCRYKEKHLNTPYIVACDPPQQGDPGYPLVPVHLDKVV

SEQ ID NO: 11459 - protein, 205 aa, Homo Sapiens
MMRTLITTHPLPLLLLPQQLLQLVQFQEVDTDFDFPEEDKKEEFEECLEKFFSTGPARPPTKEKVKRRVLIEPGMPLNHIEYCNHEIMGKNVYYKHRWVAEHYFLLMQYDELQKICYNRFVPCKNGIRKCNRSKGLVEGVYCNLTEAFEIPACKYESLYRKGYVLITCSWQNEMQKRIPHTINDLVEPPEHRSFLSEDGVFVISP

SEQ ID NO: 11460 - protein, 205 aa, Homo Sapiens; identical to SEQ ID NO: 11459

SEQ ID NO: 11461 - protein, 205 aa, Homo Sapiens; identical to SEQ ID NO: 11459

SEQ ID NO: 11462 - protein, 205 aa, Homo Sapiens; identical to SEQ ID NO: 11459

SEQ ID NO: 11463 - protein, 205 aa, Homo Sapiens; identical to SEQ ID NO: 11459

SEQ ID NO: 11464 - protein, 205 aa, Homo Sapiens; identical to SEQ ID NO: 11459

SEQ ID NO: 11465 - protein, 210 aa, Homo Sapiens
MSAGKMMRTLITTHPLPLLLLPQQLLQLVQFQEVDTDFDFPEEDKKEEFEECLEKFFSTGPARPPTKEKVKRRVLIEPGMPLNHIEYCNHEIMGKNVYYKHRWVAEHYFLLMQYDELQKICYNRFVPCKNGIRKCNRSKGLVEGVYCNLTEAFEIPACKYESLYRKGYVLITCSWQNEMQKRIPHTINDLVEPPEHRSFLSEDGVFVISP

SEQ ID NO: 11466 - protein, 210 aa, Homo Sapiens; identical to SEQ ID NO: 11465

SEQ ID NO: 11467 - protein, 210 aa, Homo Sapiens; identical to SEQ ID NO: 11465

SEQ ID NO: 11468 - protein, 210 aa, Homo Sapiens; identical to SEQ ID NO: 11465

SEQ ID NO: 11469 - protein, 210 aa, Homo Sapiens; identical to SEQ ID NO: 11465

SEQ ID NO: 11470 - protein, 43 aa, Homo Sapiens
MSWLLFLAHRVALAALPCRRGSRGFGMFYAVRRGRKTGVFLTC

SEQ ID NO: 11471 - protein, 43 aa, Homo Sapiens
MSWLLFLAHRVALAALPCRRGSRGFGMFYAVRRGRKTGVFLTW

SEQ ID NO: 11472 - protein, 286 aa, Homo Sapiens
MSWLLFLAHRVALAALPCRRGSRGFGMFYAVRRGRKTGVFLTWNECRAQVDRFPAARFKKFATEDEAWAFVRKSASPEVSEGHENQHGQESEAKASKRLREPLDGDGHESAEPYAKHMKPSVEPAPPVSRDTFSYMGDFVVVYTDGCCSSNGRRRPRAGIGVYWGPGHPLNVGIRLPGRQTNQRAEIHAACKAIEQAKTQNINKLVLYTDSMFTINGITNWVQGWKKNGWKTSAGKEVINKEDFVALERLTQGMDIQWMHVPGHSGFIGNEEADRLAREGAKQSED

SEQ ID NO: 11473 - protein, 254 aa, Homo Sapiens
MRPAALRGALLGCLCLALLCLGGADKRLRDNHEWKKLIMVQHWPETVCEKIQNDCRDPPDYWTIHGLWPDKSEGCNRSWPFNLEEIKDLLPEMRAYWPDVIHSFPNRSRFWKHEWEKHGTCAAQVDALNSQKKYFGRSLELYRELDLNSVLLKLGIKPSINYYQVADFKDALARVYGVIPKIQCLPPSQDEEVQTIGQIELCLTKQDQQLQNCTEPGEQPSPKQEVWLANGAAESRGLRVCEDGPVFYPPPKKT

SEQ ID NO: 11474 - protein, 256 aa, Homo Sapiens
MRPAALRGALLGCLCLALLCLGGADKRLRDNHEWKKLIMVQHWPETVCEKIQNDCRDPPDYWTIHGLWPDKSEGCNRSWPFNLEEIKDLLPEMRAYWPDVIHSFPNRSRFWKHEWEKHGTCAAQVDALNSQKKYFGRSLELYRELDLNSVLLKLGIKPSINYYQVADFKDALARVYGVIPKIQCLPPSQDEEVQTIGQIELCLTKQDQQLQNCTEPGEQPSPKQEVWLANGAAESRGLRVCEDGPVFYPPPKKTKH

SEQ ID NO: 11475 - protein, 256 aa, Homo Sapiens; identical to SEQ ID NO: 11474

SEQ ID NO: 11476 - protein, 238 aa, Homo Sapiens
MRPAALRGALLGCLCLALLCLGGADKRLRDNHEWKKLIMVQHWPETVCEKIQNDCRDPPDYWTIHGLWPDKSEGCNRSWPFNLEEIKKNWMEITDSSLPSPSMGPAPPRWMRSTPRRSTLAEAWNSTGSWTSTGGCALPPAALPSGDLCCRPSLTAGSRGVGVDLTALQQLLHVHYSATGIIPEECSEPTKPFQIILHHDHTEWVQSIGMPIWTISSSESAIGKTRTQPACAVLSHDS

SEQ ID NO: 11477 - protein, 121 aa, Homo Sapiens
MRPAALRGALLGCLCLALLCLGGADKRLRDNHEWKKLIMVQHWPETVCEKIQNDCRDPPDYWTIHGLWPDKSEGCNRSWPFNLEEIKKNWMEITDSSLPSPSTLPIINIFYSVLHLLQLMN

SEQ ID NO: 11478 - protein, 306 aa, Homo Sapiens [sequence omitted]

SEQ ID NO: 11479 - protein, 71 aa, Homo Sapiens
MRPAALRGALLGCLCLALLCLGGADKRLRDNHEWKKLIMVQHWPETVCEKIQNDCRDPPDYWTIHGLWQAR

SEQ ID NO: 11480 - protein, 218 aa, Homo Sapiens
MVQHWPETVCEKIQNDCRDPPDYWTIHGLWPDKSEGCNRSWPFNLEEIKDLLPEMRAYWPDVIHSFPNRSRFWKHEWEKHGTCAAQVDALNSQKKYFGRSLELYRELDLNSVLLKLGIKPSINYYQVADFKDALARVYGVIPKIQCLPPSQDEEVQTIGQIELCLTKQDQQLQNCTEPGEQPSPKQEVWLANGAAESRGLRVCEDGPVFYPPPKKTKH

SEQ ID NO: 11481 - protein, 9 aa, Homo Sapiens
MAGCGEIDH

SEQ ID NO: 11482 - protein, 358 aa, Homo Sapiens
MAGCGEIDHSINMLPTNRKANESCSNTAPSLTVPECAICLQTCVHPVSLPCKHVFCYLCVKGASWLGKRCALCRQEIPEDFLDKPTLLSPEELKAASRGNGEYAWYYEGRNGWWQYDERTSRELEDAFSKGKKNTEMLIAGFLYVADLENMVQYRRNEHGRRRKIKRDIIDIPKKGVAGLRLDCDANTVNLARESSADGADSVSAQSGASVQPLVSSVRPLTSVDGQLTSPATPSPDASTSLEDSFAHLQLSGDNTAERSHRGEGEEDHESPSSGRVPAPDTSIEETESDASSDSEDVSAVVAQHSLTQQRLLVSNANQTVPDRSDRSGTDRSVAGGGTVSVSVRSRRPDGQCTVTEV

SEQ ID NO: 11483 - protein, 358 aa, Homo Sapiens; identical to SEQ ID NO: 11482

SEQ ID NO: 11484 - protein, 14 aa, Homo Sapiens
MCWGSSIFMLFSPL

SEQ ID NO: 11485 - protein, 42 aa, Homo Sapiens
MCWGSSIFMLFSPLVLYDCYLYEALVITKHFFCPFLPELCKL

SEQ ID NO: 11486 - protein, 42 aa, Homo Sapiens; identical to SEQ ID NO: 11485

SEQ ID NO: 11487 - protein, 42 aa, Homo Sapiens; identical to SEQ ID NO: 11485

SEQ ID NO: 11488 - protein, 40 aa, Homo Sapiens
MGSSIFMLFSPLVLYDCYLYEALVITKHFFCPFLPELCKL

SEQ ID NO: 11489 - protein, 40 aa, Homo Sapiens; identical to SEQ ID NO: 11488

SEQ ID NO: 11490 - protein, 359 aa, Homo Sapiens
MMAGCGEIDHSINMLPTNRKANESCSNTAPSLTVPECAICLQTCVHPVSLPCKHVFCYLCVKGASWLGKRCALCRQEIPEDFLDKPTLLSPEELKAASRGNGEYAWYYEGRNGWWQYDERTSRELEDAFSKGKKNTEMLIAGFLYVADLENMVQYRRNEHGRRRKIKRDIIDIPKKGVAGLRLDCDANTVNLARESSADGADSVSAQSGASVQPLVSSVRPLTSVDGQLTSPATPSPDASTSLEDSFAHLQLSGDNTAERSHRGEGEEDHESPSSGRVPAPDTSIEETESDASSDSEDVSAVVAQHSLTQQRLLVSNANQTVPDRSDRSGTDRSVAGGGTVSVSVRSRRPDGQCTVTEV

SEQ ID NO: 11491 - protein, 359 aa, Homo Sapiens; identical to SEQ ID NO: 11490

SEQ ID NO: 11492 - protein, 359 aa, Homo Sapiens; identical to SEQ ID NO: 11490

SEQ ID NO: 11493 - protein, 101 aa, Homo Sapiens
MSFLRITPSTHSSVSSGLLRLSIFLLLSFPDSNGKAIWTAHLNITFQGTENIVAVMISNLKGMEILHSIQKGVYVTVIIEVGRMHMQWEAKSNKDRCEESY

SEQ ID NO: 11494 - protein, 305 aa, Homo Sapiens
MSFLRITPSTHSSVSSGLLRLSIFLLLSFPDSNGKAIWTAHLNITFQVGNEITSELGESGVFGNHSPLERVSGVVALPEGWNQNACHPLTNFSRPKQADSWLALIERGGCTFTHKINVAAEKGANGVIIYNYQGTGSKVFPMSHQGTENIVAVMISNLKGMEILHSIQKGVYVTVIIEVGRMHMQWVSHYIMYLFTFLAATIAYFYLDCVWRLTPRVPNSFTRRRSQIKTDVKKAIDQLQLRVLKEGDEELDLNEDNCVVCFDTYKPQDVVRILTCKHFFHKACIDPWLLAHRTCPMCKCDILKT

SEQ ID NO: 11495 - protein, 396 aa, Homo Sapiens
MAMSLIQACCSLALSTWLLSFCFVHLLCLDFTVAEKEEWYTAFVNITYAEPAPDPGAGAAGGGGAELHTEKTECGRYGEHSPKQDARGEVVMASSAHDRLACDPNTKFAAPTRGKNWIALIPKGNCTYRDKIRNAFLQNASAVVIFNVGSNTNETITMPHAGVEDIVAIMIPEPKGKEIVSLLERNITVTMYITIGTRNLQKYRRLGDAAKKAISKLQIRTIKKGDKETESDFDNCAVCIEGYKPNDVVRILPCRHLFHKSCVDPWLLDHRTCPMCKMNILKALGIPPNADCMDDLPTDFEGSLGGPPTNQITGASDTTVNESSVTLDPAVRTVGALQVVQDTDPIPQEGDVIFTTNSEQEPAVSSDSDISLIMAMEVGLSDVELSTDQDCEEVKS

SEQ ID NO: 11496 - protein, 405 aa, Homo Sapiens
MAMSLIQACCSLALSTWLLSFCFVHLLCLDFTVAEKEEWYTAFVNITYAEPAPDPGAGAAGGGGAELHTEKTECGRYGEHSPKQDARGEVVMASSAHDRLACDPNTKFAAPTRGKNWIALIPKGNCTYRDKIRNAFLQNASAVVIFNVGSNTNETITMPHAGVEDIVAIMIPEPKGKEIVSLLERNITVTMYITIGTRNLQKYVSRTSVVFVSISFIVLMIISLAWLVFYYIQRFRYANARDRNQRRLGDAAKKAISKLQIRTIKKGDKETESDFDNCAVCIEGYKPNDVVRILPCRHLFHKSCVDPWLLDHRTCPMCKMNILKALGIPPNADCMDDLPTDFEGSLGGPPTNQITGASDTTVNESSVTLDPAVRTVGALQVVQDTDPIPQEGDVIFTTNSEFCHT

SEQ ID NO: 11497 - protein, 438 aa, Homo Sapiens
MAMSLIQACCSLALSTWLLSFCFVHLLCLDFTVAEKEEWYTAFVNITYAEPAPDPGAGAAGGGGAELHTEKTECGRYGEHSPKQDARGEVVMASSAHDRLACDPNTKFAAPTRGKNWIALIPKGNCTYRDKIRNAFLQNASAVVIFNVGSNTNETITMPHAGVEDIVAIMIPEPKGKEIVSLLERNITVTMYITIGTRNLQKYVSRTSVVFVSISFIVLMIISLAWLVFYYIQRFRYANARDRNQRRLGDAAKKAISKLQIRTIKKGDKETESDFDNCAVCIEGYKPNDVVRILPCRHLFHKSCVDPWLLDHRTCPMCKMNILKALGIPPNADCMDDLPTDFEGSLGGPPTNQITGASDTTVNESSVTLDPAVRTVGALQVVQDTDPIPQEGDVIFTTNSEQEPAVSSDSDISLIMAMEVGLSDVELSTDQDCEEVKS

SEQ ID NO: 11498 - protein, 230 aa, Homo Sapiens
MIPEPKGKEIVSLLERNITVTMYITIGTRNLQKYVSRTSVVFVSISFIVLMIISLAWLVFYYIQRFRYANARDRNQRRLGDAAKKAISKLQIRTIKKGDKETESDFDNCAVCIEGYKPNDVVRILPCRHLFHKSCVDPWLLDHRTCPMCKMNILKALGIPPNADCMDDLPTDFEGSLGGPPTNQITGASDTTVNESSVTLDPAVRTVGALQVVQDTDPIPQEGDVIFTTN

SEQ ID NO: 11499 - protein, 297 aa, Homo Sapiens
MSSHAQPLKLISPCPYSLSSGVEDIVAIMIPEPKGKEIVSLLERNITVTMYITIGTRNLQKYVSRTSVVFVSISFIVLMIISLAWLVFYYIQRFRYANARDRNQRRLGDAAKKAISKLQIRTIKKGDKETESDFDNCAVCIEGYKPNDVVRILPCRHLFHKSCVDPWLLDHRTCPMCKMNILKALGIPPNADCMDDLPTDFEGSLGGPPTNQITGASDTTVNESSVTLDPAVRTVGALQVVQDTDPIPQEGDVIFTTNSEQEPAVSSDSDISLIMAMEVGLSDVELSTDQDCEEVKS

SEQ ID NO: 11500 - protein, 208 aa, Homo Sapiens
HNVNSNELLNMVWNSEEIQQQIWIPSVFIGERSSEYLRALFVYEKGARVLLVPDNTFPLGYYLIPFTGIVGLLVLAMGAVMIARCIQHRKRLQRNRLTKEQLKQIPTHDYQKGDQYDVCAICLDEYEDGDKLRVLPCAHGEALTACPCPSATSSHQVLHLVPLCSLPQPLRGPLAHSDPEDLPHLQAACSSGSWGRRPRGRNSRARGG

SEQ ID NO: 11501 - protein, 72 aa, Homo Sapiens
MDFADLPALFGATLSQEGLQGFLVEAHPDNACSPIAPPPPAPVNGSVFIALLRRFDCNFDLKVLNAQKAGYG

SEQ ID NO: 11502 - protein, 315 aa, Homo Sapiens
MDFADLPALFGATLSQEGLQGFLVEAHPDNACSPIAPPPPAPVNGSVFIALLRRFDCNFDLKVLNAQKAGYGAAVVHNVNSNELLNMVWNSEEIQQQIWIPSVFIGERSSEYLRALFVYEKGARVLLVPDNTFPLGYYLIPFTGIVGLLVLAMGAVMIARCIQHRKRLQRNRLTKEQLKQIPTHDYQKGDQYDVCAICLDEYEDGDKLRVLPCAHAYHSRCVDPWLTQTRKTCPICKQPVHRGPGDEDQEEETQGQEEGDEGEPRDHPASERTPLLGSSPTLPTSFGSLAPAPLVFPGPSTDPPLSPPSSPVILV

SEQ ID NO: 11503 - protein, 133 aa, Homo Sapiens
MHPAAFPLPVVVAAVLWGAAPTRGLIRAGFLVEAHPDNACSPIAPPPPAPVNGSVFIALLRRFDCNFDLKVLNAQKAGYGAAVVHNVNSNELLNMVWNSEEIQQQIWIPSVFIGERSSEYLRALFVYEKGRPV

SEQ ID NO: 11504 - protein, 97 aa, Homo Sapiens
MHPAAFPLPVVVAAVLWGAAPTRGLIRATSDHNASMDFADLPALFGATLSQEGLQGFLVEAHPDNACSPIAPPPPAPVNGSVFIALLRRFDCNFDLK

SEQ ID NO: 11505 - protein, 122 aa, Homo Sapiens
MHPAAFPLPVVVAAVLWGAAPTRGLIRATSDHNASMDFADLPALFGATLSQEGLQGFLVEAHPDNACSPIAPPPPAPVNGSVFIALLRRFDCNFDLKVLNAQKAGYGAAVVHNVNSNELLNM

SEQ ID NO: 11506 - protein, 350 aa, Homo Sapiens [sequence omitted]

SEQ ID NO: 11507 - protein, 350 aa, Homo Sapiens [sequence omitted]

SEQ ID NO: 11508 - protein, 350 aa, Homo Sapiens [sequence omitted]

SEQ ID NO: 11509 - protein, 350 aa, Homo Sapiens [sequence omitted]

SEQ ID NO: 11510 - protein, 74 aa, Homo Sapiens
  misc_feature (1)..(1): Xaa can be any naturally occurring amino acid
XEIQQQIWIPSVFIGERSSEYLRALFVYEKGLPQPLRGPLAHSDPEDLPHLQAACSSGSWGRRPRGRNSRARGG

SEQ ID NO: 11511 - protein, 566 aa, Homo Sapiens
MDLHRAAFKMENSSYLPNPLASPALMVLASTAEASRDASIPCQQPRPFGVPVSVDKDVHIPFTNGSYTFASMYHRQGGVPGTFANRDFPPSLLHLHPQFAPPNLDCTPISMLNHSGVGAFRPFASTEDRESYQSAFTPAKRLKNCHDTESPHLRFSDADGKEYDFGTQLPSSSPGSLKVDDTGKKIFAVSGLISDREASSSPEDRNDRCKKKAAALFDSQAPICPICQVLLRPSELQEHMEQELEQLAQLPSSKNSLLKDAMAPGTPKSLLLSASIKREGESPTASPHSSATDDLHHSDRYQTFLRVRANRQTRLNARIGKMKRRKQDEGQREGSCMAEDDAVDIEHENNNRFEEYEWCGQKRIRATTLLEGGFRGSGFIMCSGKENPDSDADLDVDGDDTLEYGKPQYTEADVIPCTGEEPGEAKEREALRGAVLNGGPPSTRITPEFSKWASDEMPSTSNGESSKQEAMQKTCKNSDIEKITEDSAVTTFEALKARVRELERQLSRGDRYKCLICMDSYSMPLTSIQCWHVHCEECWLRTLGAKKLCPQCNTITAPGDLRRIYL

SEQ ID NO: 11512 - protein, 566 aa, Homo Sapiens; identical to SEQ ID NO: 11511

SEQ ID NO: 11513 - protein, 566 aa, Homo Sapiens; identical to SEQ ID NO: 11511

SEQ ID NO: 11514 - protein, 259 aa, Homo Sapiens
MPRARSGRRSRGAGGREETFLRVRANRQTRLNARIGKMKRRKQDEGQREGSCMAEDDAVDIEHENNNRFEEYEWCGQKRIRATTLLEGGFRGSGFIMCSGKENPDSDADLDVDGDDTLEYGKPQYTEADVIPCTGEEPGEAKEREALRGAVLNGGPPSTRITPEFSKWASDEMPSTSNGESSKQEAMQKTCKNSDIEKITEDSAVTTFEALKARVRELERQLSRGDRYKCLICMDSYSMPLTSIQCWHVHCEECWLRTL

SEQ ID NO: 11515 - protein, 260 aa, Homo Sapiens
MPRARSGRRSRGAGGREETFLRVRANRQTRLNARIGKMKRRKQDEGQVCPLCNRPLAGSEQEMSRHVEHCLSKREGSCMAEDDAVDIEHENNNRFEEYEWCGQKRIRATTLLEGGFRGSGFIMCSGKENPDSDADLDVDGDDTLEYGKPQYTEADVIPCTGEEPGEAKEREALRGAVLNGGPPSTRITPEFSKWASDEMPSTSNGESSKQEAMQKTCKNSDIEKITEDSAVTTFEALKARVRELERQLSRGDRYKCLICM

SEQ ID NO: 11516 - protein, 45 aa, Homo Sapiens
MPRARSGRRSRGAGGREEVDLSASTSQPADPTECSDWENETEEAR

SEQ ID NO: 11517 - protein, 121 aa, Homo Sapiens
  misc_feature (1)..(1): Xaa can be any naturally occurring amino acid
XEGESPTASPHSSATDDLHHSDRYQTFLRVRANRQTRLNARIGKMKRRKQDEGQVCPLCNRPLAGSEQEMSRHVEHCLSKREGSCMAEDDAVDIEHENNNRFEEYEWCGQKRIRATTLLEG

SEQ ID NO: 11518 - protein, 372 aa, Homo Sapiens
MKAGATSMWASCCGLLNEVMGTGAVRGQQSAFAGATGPFRFTPNPEFSTYPPAATEGPNIVCKACGLSFSVFRKKHVCCDCKKDFCSVCSVLQENLRRCSTCHLLQETAFQRPQLMRLKVKDLRQYLILRNIPIDTCREKEDLVDLVLCHHGLGSEDDMDTSSLNSSRSQTSSFFTRSFFSNYTAPSATMSSFQGELMDGDQTSRSGVPAQVQSEITSANTEDDDDDDDEDDDDEEENAEDRNPGLSKERVRASLSDLSSLDDVEGMSVRQLKEILARNFVNYSGCCEKWELVEKVNRLYKENEENQKSYGERLQLQDEEDDSLCRICMDAVIDCVLLECGHMVTCTKCGKRMSECPICRQYVVRAVHVFKS

SEQ ID NO: 11519 - protein, 507 aa, Homo Sapiens
MKAGATSMWASCCGLLNEVMGTGAVRGQQSAFAGATGPFRFTPNPEFSTYPPAATEGPNIVCKACGLSFSVFRKKHVCCDCKKDFCSVCSVLQENLRRCSTCHLLQETAFQRPQLMRLKVKDLRQYLILRNIPIDTCREKEDLVDLVLCHHGLGSEDDMDTSSLNSSRSQTSSFFTRSFFSNYTAPSATMSSFQGELMDGDQTSRSGVPAQVQSEITSANTEDDDDDDDEDDDDEEENAEDRNPGLSKERVRASLSDLSSLDDVEGMSVRQLKEILARNFVNYSGCCEKWELVEKVNRLYKENEENQKSYGERLQLQDEEDDSLCRICMDAVIDCVLLECGHMVTCTKCGKRMRMSSCKGRLRNGPESSAVTIQKDQRKVSAHSSPKRVVEQLLPWKDLQNGIALWSVVPRSKWKIKALIFVKSLPSQSPPRIYILILGLTQFLQEFFFYLPKLDTHRHLGYELLTAFLGDLLAVPQVNMTDVSTAFEEGQALISDLIAVCREEIVM

SEQ ID NO: 11520 - protein, 180 aa, Homo Sapiens
MKGELMDGDQTSRSGVPAQVQSEITSANTEDDDDDDDEDDDDEEENAEDRNPGLSKERVRASLSDLSSLDDVEGMSVRQLKEILARNFVNYSGCCEKWELVEKVNRLYKENEENQKSYGERLQLQDEEDDSLCRICMDAVIDCVLLECGHMVTCTKCGKRMSECPICRQYVVRAVHVFKS

SEQ ID NO: 11521 - protein, 45 aa, Homo Sapiens
MKMASGCSCRMRKTTACVASAWMPSSTVSYWSVGTWLPAPSAASA

SEQ ID NO: 11522 - protein, 373 aa, Homo Sapiens
MRKAGATSMWASCCGLLNEVMGTGAVRGQQSAFAGATGPFRFTPNPEFSTYPPAATEGPNIVCKACGLSFSVFRKKHVCCDCKKDFCSVCSVLQENLRRCSTCHLLQETAFQRPQLMRLKVKDLRQYLILRNIPIDTCREKEDLVDLVLCHHGLGSEDDMDTSSLNSSRSQTSSFFTRSFFSNYTAPSATMSSFQGELMDGDQTSRSGVPAQVQSEITSANTEDDDDDDDEDDDDEEENAEDRNPGLSKERVRASLSDLSSLDDVEGMSVRQLKEILARNFVNYSGCCEKWELVEKVNRLYKENEENQKSYGERLQLQDEEDDSLCRICMDAVIDCVLLECGHMVTCTKCGKRMSECPICRQYVVRAVHVFKS

SEQ ID NO: 11523 - protein, 38 aa, Homo Sapiens
MWASCCGLLNEVMGTGAVRGQQSAFAGATGPFRFTPNP

SEQ ID NO: 11524 - protein, 74 aa, Homo Sapiens
MWASCCGLLNEVMGTGAVRGQQSAFAGATGPFRFTPNPEFSTYPPAATEGPNIVCKACGLSFSVFRKKHVCCDC

SEQ ID NO: 11525 - protein, 163 aa, Homo Sapiens
MWASCCGLLNEVMGTGAVRGQQSAFAGATGPFRFTPNPEFSTYPPAATEGPNIVCKACGLSFSVFRKKHVCCDCKKDFCSVCSVLQENLRRCSTCHLLQETAFQRPQLMRLKVKDLRQYLILRNIPIDTCREKEDLVDLVLCHHGLGSEDDMDTSSLNSSRSQ

SEQ ID NO: 11526 - protein, 175 aa, Homo Sapiens
MAQVLIVGAGMTGSLCAALLRRQTSGPLYLAVWDKAEDSGGRMTTACSPHNPQCTADLGAQYITCTPHYAKKHQRFYDELLAYGVLRPLSSPIEGMVMKEGDCNFVAPQGISSIIKHYLKESGAEVYFRHRVTQINLRDDKWEVSKQTGSPEQFDLIVLTMPVPEILQLQGDITT

SEQ ID NO: 11527 - protein, 342 aa, Homo Sapiens
MAQVLIVGAGMTGSLCAALLRRQTSGPLYLAVWDKAEDSGGRMTTACSPHNPQCTADLGAQYITCTPHYAKKHQRFYDELLAYGVLRPLSSPIEGMVMKEGDCNFVAPQGISSIIKHYLKESGAEVYFRHRVTQINLRDDKWEVSKQTGSPEQFDLIVLTMPVPEILQLQGDITTLISECQRQQLEAVSYSSRYALGLFYEAGTKIDVPWAGQYITSNPCIRFVSIDNKKRNIESSEIGPSLVIHTTVPFGVTYLEHSIEDVQELVFQQLENILPGLPQPIATKCQKWRHSQVTNAAANCPGQMTLHHKPFLACGGDGFTQSNFDGCITSALCVLEALKNYI

SEQ ID NO: 11528 - protein, 315 aa, Homo Sapiens
MAQVLIVGAGMTGSLCAALLRRQTSGPLYLAVWDKAEDSGGRMTTACSPHNPQCTADLGAQYITCTPHYAKKHQRFYDELLAYGVLRPLSSPIEGMVMKEGDCNFVAPQGISSIIKHYLKESGAEVYFRHRVTQINLRDDKWEVSKQTGSPEQFDLIVLTMPVPEILQLQGDITTLISECQRQQLEAVSYSSRYALGLFYEAGTKIDVPWAGQYITSNPCIRFVSIDNKKRNIESSEIGPSLVIHTTVPFGVTYLEHSIEDVQELVFQQLENILPGLPQPIATKCQKWRHSQVPSAGVILGCAKSPWMMAIGFPI

SEQ ID NO: 11529 - protein, 171 aa, Homo Sapiens
FRAFELLHLHLDLRAEFGPPGPGAGSRGLSGTAVLDLRCLEPEGAAELRLDSHPCLEVTAAALRRERPGSEEPPAEPVSFYTQPFSHYGQALCVSFPQPCRAAERLQVLLTYRVGEGPGVCWLAPEQTAGKKKPFVYTQGQAVLNRAFFPCFDTPAVKYKYSALIEEPGVG

SEQ ID NO: 11530 - protein, 168 aa, Homo Sapiens
LIDAAKEEYNGVIEEFLATGEKLFGPYVWGRYDLLFMPPSFPFGGMENPCLTFVTPCLLAGDRSLADVIIHEISHSWFGNLVTNANWGEFWLNEGFTMYAQRRISTILFGVDPDDTYNETPYEKGFCFVSYLAHLVGDQDQFDSFLKAYVHEFKFRSILADDFLDFYL

SEQ ID NO: 11531 - protein, 650 aa, Homo Sapiens
MASGEHSPGSGAARRPLHSAQAVDVASASNFRAFELLHLHLDLRAEFGPPGPGAGSRGLSGTAVLDLRCLEPEGAAELRLDSHPCLEVTAAALRRERPGSEEPPAEPVSFYTQPFSHYGQALCVSFPQPCRAAERLQVLLTYRVGEGPGVCWLAPEQTAGKKKPFVYTQGQAVLNRAFFPCFDTPAVKYKYSALIEVPDGFTAVMSASTWEKRGPNKFFFQMCQPIPSYLIALAIGDLVSAEVGPRSRVWAEPCLIDAAKEEYNGVIEEFLATGEKLFGPYVWGRYDLLFMPPSFPFGGMENPCLTFVTPCLLAGDRSLADVIIHEISHSWFGNLVTNANWGEFWLNEGFTMYAQRRISTILFGAAYTCLEAATGRALLRQHMDITGEENPLNKLRVKIEPGVDPDDTYNETPYEKGFCFVSYLAHLVGDQDQFDSFLKAYVHEFKFRSILADDFLDFYLEYFPELKKKRVDIIPGFEFDRWLNTPGWPPYLPDLSPGDSLMKPAEELAQLWAAEELDMKAIEAVAISPWKTYQLVYFLDKILQKSPLPPGNVKKLGDTYPSISNARNAELRLRWGQIVLKNDHQEDFWKVKEFLHNQGKQKYTLPLYHAMMGGSEVAQTLAKETFASTASQLHSNVVNYVQQIVAPKGS

SEQ ID NO: 11532 - protein, 611 aa, Homo Sapiens
MASGEHSPGSGAARRPLHSAQAVDVASASNFRAFELLHLHLDLRAEFGPPGPGAGSRGLSGTAVLDLRCLEPEGAAELRLDSHPCLEVTAAALRRERPGSEEPPAEPVSFYTQPFSHYGQALCVSFPQPCRAAERLQVLLTYRVGEGPGVCWLAPEQTAGKKKPFVYTQGQAVLNRAFFPCFDTPAVKYKYSALIEVPDGFTAVMSASTWEKRGPNKFFFQMCQPIPSYLIALAIGDLVSAEVGPRYDLLFMPPSFPFGGMENPCLTFVTPCLLAGDRSLADVIIHEISHSWFGNLVTNANWGEFWLNEGFTMYAQRRISTILFGAAYTCLEAATGRALLRQHMDITGEENPLNKLRVKIEPGVDPDDTYNETPYEKGFCFVSYLAHLVGDQDQFDSFLKAYVHEFKFRSILADDFLDFYLEYFPELKKKRVDIIPGFEFDRWLNTPGWPPYLPDLSPGDSLMKPAEELAQLWAAEELDMKAIEAVAISPWKTYQLVYFLDKILQKSPLPPGNVKKLGDTYPSISNARNAELRLRWGQIVLKNDHQEDFWKVKEFLHNQGKQKYTLPLYHAMMGGSEVAQTLAKETFASTASQLHSNVVNYVQQIVAPKGS

SEQ ID NO: 11533 - protein, 344 aa, Homo Sapiens
MTCCSCTSLSALLDFWAEVCWLAPEQTAGKKKPFVYTQGQAVLNRAFFPCFDTPAVKYKYSALIEVPDGFTAVMSASTWEKRGPNKFFFQMCQPIPSYLIALAIGDLVSAEVGPRSRVWAEPCLIDAAKEEYNGVIEEFLATGEKLFGPYVWGRYDLLFMPPSFPFGGMENPCLTFVTPCLLAGDRSLADVIIHEISHSWFGNLVTNANWGEFWLNEGFTMYAQRRISTILFGAAYTCLEAATGRALLRQHMDITGEENPLNKLRVKIEPGVDPDDTYNETPYEKGFCFVSYLAHLVGDQDQFDSFLKAYVHEFKFRSILADDFLDFYLEYFPELKKKRVDIIP

SEQ ID NO: 11534 - protein, 151 aa, Homo Sapiens
  misc_feature (1)..(1): Xaa can be any naturally occurring amino acid
XPGAGSRGLSGTAVLDLRCLEPEGAAELRLDSHPCLEVTAAALRRERPGSEEPPAEPVSFYTQPFSHYGQALCVSFPQPCRAAERLQVLLTYRVGEGPGVCWLAPEQTAGKKKPFVYTQGQAVLNRAFFPCFDTPAVKYKYSALIEEPGVG

SEQ ID NO: 11535 - protein, 937 aa, Homo Sapiens
MHRPRRRGTRPPLLALLAALLLAARGAAAQETELSVSAELVPTSSWNISSELNKDSYLTLDEPMNNITTSLGQTAELHCKVSGNPPPTIRWFKNDAPVVQEPRRLSFRSTIYGSRLRIRNLDTTDTGYFQCVATNGKEVVSSTGVLFVKFGPPPTASPGYSDEYEEDGFCQPYRGIACARFIGNRTVYMESLHMQGEIENQITAAFTMIGTSSHLSDKCSQFAIPSLCHYAFPYCDETSSVPKPRDLCRDECEILENVLCQTEYIFARSNPMILMRLKLPNCEDLPQPESPEAANCIRIGIPMADPINKNHKCYNSTGVDYRGTVSVTKSGRQCQPWNSQYPHTHTFTALRFPELNGGHSYCRNPGNQKEAPWCFTLDENFKSDLCDIPACDSKDSKEKNKMEILYILVPSVAIPLAIALLFFFICVCRNNQKSSSAPVQRQPKHVRGQNVEMSMLNAYKPKSKAKELPLSAVRFMEELGECAFGKIYKGHLYLPGMDHAQLVAIKTLKDYNNPQQWTEFQQEASLMAELHHPNIVCLLGAVTQEQPVCMLFEYINQGDLHEFLIMRSPHSDVGCSSDEDGTVKSSLDHGDFLHIAIQIAAGMEYLSSHFFVHKDLAARNILIGEQLHVKISDLGLSREIYSADYYRVQSKSLLPIRWMPPEAIMYGKFSSDSDIWSFGVVLWEIFSFGLQPYYGFSNQEVIEMVRKRQLLPCSEDCPPRMYSLMTECWNEIPSRRPRFKDIHVRLRSWEGLSSHTSSTTPSGGNATTQTTSLSASPVSNLSNPRYPNYMFPSQGITPQGQIAGFIGPPIPQNQRFIPINGYPIPPGYAAFPAAHYQPTGPPRVIQHCPPPKSRSPSSASGSTSTGHVTSLPSSGSNQEANIPLLPHMSIPNHPGGMGITVFGNKSQKPYKIDSKQASLLGDANIHGHTESMISAEL

SEQ ID NO: 11536 - protein, 393 aa, Homo Sapiens
MHRPRRRGTRPPLLALLAALLLAARGAAAQETELSVSAELVPTSSWNISSELNKDSYLTLDEPMNNITTSLGQTAELHCKVSGNPPPTIRWFKNDAPVVQEPRRLSFRSTIYGSRLRIRNLDTTDTGYFQCVATNGKEVVSSTGVLFVKFGPPPTASPGYSDEYEEDGFCQPYRGIACARFIGNRTVYMESLHMQGEIENQITAAFTMIGTSSHLSDKCSQFAIPSLCHYAFPYCDETSSVPKPRDLCRDECEILENVLCQTEYIFARSNPMILMRLKLPNCEDLPQPESPEAANCIRIGIPMADPINKNHKCYNSTGVDYRGTVSVTKSGRQCQPWNSQYPHTHTFTALRFPELNGGHSYCRNPGNQKEAPWCFTLDENFKSDLCDIPACGK

SEQ ID NO: 11537 - protein, 882 aa, Homo Sapiens
SYLTLDEPMNNITTSLGQTAELHCKVSGNPPPTIRWFKNDAPVVQEPRRLSFRSTIYGSRLRIRNLDTTDTGYFQCVATNGKEVVSSTGVLFVKFGPPPTASPGYSDEYEEDGFCQPYRGIACARFIGNRTVYMESLHMQGEIENQITAAFTMIGTSSHLSDKCSQFAIPSLCHYAFPYCDETSSVPKPRDLCRDECEILENVLCQTEYIFARSNPMILMRLKLPNCEDLPQPESPEAANCIRIGIPMADPINKNHKCYNSTGVDYRGTVSVTKSGRQCQPWNSQYPHTHTFTALRFPELNGGHSYCRNPGNQKEAPWCFTLDENFKSDLCDIPACDSKDSKEKNKMEILYILVPSVAIPLAIALLFFFICVCRNNQKSSSAPVQRQPKHVRGQNVEMSMLNAYKPKSKAKELPLSAVRFMEELGECAFGKIYKGHLYLPGMDHAQLVAIKTLKDYNNPQQWTEFQQEASLMAELHHPNIVCLLGAVTQEQPVCMLFEYINQGDLHEFLIMRSPHSDVGCSSDEDGTVKSSLDHGDFLHIAIQIAAGMEYLSSHFFVHKDLAARNILIGEQLHVKISDLGLSREIYSADYYRVQSKSLLPIRWMPPEAIMYGKFSSDSDIWSFGVVLWEIFSFGLQPYYGFSNQEVIEMVRKRQLLPCSEDCPPRMYSLMTECWNEIPSRRPRFKDIHVRLRSWEGLSSHTSSTTPSGGNATTQTTSLSASPVSNLSNPRYPNYMFPSQGITPQGQIAGFIGPPIPQNQRFIPINGYPIPPGYAAFPAAHYQPTGPPRVIQHCPPPKSRSPSSASGSTSTGHVTSLPSSGSNQEANIPLLPHMSIPNHPGGMGITVFGNKSQKPYKIDSKQASLLGDANIHGHTESMISAEL

SEQ ID NO: 11538 - protein, 180 aa, Homo Sapiens
MSHRKFSAPRHGSLGFLPRKRSSRHRGKVKSFPKDDPSKPVHLTAFLGYKAGMTHIVREVDRPGSKVNKKEVVEAVTIVETPPMVVVGIVGYVETPRGLRTFKTVFAEHISDECKRRFYKNCSARLCPMSSIQAPLAGGKGSLEAGNELHPHAVPVCLPLTPRRGDEGLHLVPSPTLLCS

SEQ ID NO: 11539 - protein, 403 aa, Homo Sapiens
MSHRKFSAPRHGSLGFLPRKRSSRHRGKVKSFPKDDPSKPVHLTAFLGYKAGMTHIVREVDRPGSKVNKKEVVEAVTIVETPPMVVVGIVGYVETPRGLRTFKTVFAEHISDECKRRFYKNWHKSKKKAFTKYCKKWQDEDGKKQLEKDFSSMKKYCQVIRVIAHTQMRLLPLRQKKAHLMEIQVNGGTVAEKLDWARERLEQQVPVNQVFGQDEMIDVIGVTKGKGYKGVTSRWHTKKLPRKTHRGLRKVACIGAWHPARVAFSVARAGQKGYHHRTEINKKIYKIGQGYLIKDGKLIKNNASTDYDLSDKSINPLGGFVHYGEVTNDFVMLKGCVVGTKKRVLTLRKSLLVQTKRRALEKIDLKFIDTTSKFGHGRFQTMEEKKAFMGPLKKDRIAKEEGA

SEQ ID NO: 11540 - protein, 351 aa, Homo Sapiens
MTHIVREVDRPGSKVNKKEVVEAVTIVETPPMVVVGIVGYVETPRGLRTFKTVFAEHISDECKRRFYKNWHKSKKKAFTKYCKKWQDEDGKKQLEKDFSSMKKYCQVIRVIAHTQMRLLPLRQKKAHLMEIQVNGGTVAEKLDWARERLEQQVPVNQVFGQDEMIDVIGVTKGKGYKGVTSRWHTKKLPRKTHRGLRKVACIGAWHPARVAFSVARAGQKGYHHRTEINKKIYKIGQGYLIKDGKLIKNNASTDYDLSDKSINPLGGFVHYGEVTNDFVMLKGCVVGTKKRVLTLRKSLLVQTKRRALEKIDLKFIDTTSKFGHGRFQTMEEKKAFMGPLKKDRIAKEEGA

SEQ ID NO: 11541 - protein, 272 aa, Homo Sapiens
MTHIVREVDRPGSKVNKKEVVEAVTIVETPPMVVVGIVGYVETPRGLRTFKTVFAEHISDECKRRFYKNWHKSKKKAFTKYCKKWQDEDGKKQLEKDFSSMKKYCQVIRVIAHTQMRLLPLRQKKAHLMEIQVNGGTVAEKLDWARERLEQQVPVNQVFGQDEMIDVIGVTKGKGYKGVTSRWHTKKLPRKTHRGLRKVACIGAWHPARVAFSVARAGQKGYHHRTEINKKIYKIGQGYLIKDGKLIKNNASTDYDLSDKSINPLGGFVHYG

SEQ ID NO: 11542 - protein, 305 aa, Homo Sapiens
QMMNLLTGGQKLCADCHVLIWLCGVLWPSHRKFSAPRHGSLGFLPRKRSSRHRGKVKSFPKDDPSKPVHLTAFLGYKAGMTHIVREVDRPGSKVNKKEVVEAVTIVETPPMVVVGIVGYVETPRGLRTFKTVFAEHISDECKRRFYKNWHKSKKKAFTKYCKKWQDEDGKKQLEKDFSSMKKYCQVIRVIAHTQMRLLPLRQKKAHLMEIQVNGGTVAEKLDWARERLEQQVPVNQVFGQDEMIDVIGVTKGKGYKGVTSRWHTKKLPRKTHRGLRKVACIGAWHPARVAFSVARAGQKGYHHRT

SEQ ID NO: 11543 - protein, 261 aa, Homo Sapiens
  misc_feature (1)..(1): Xaa can be any naturally occurring amino acid
XVCVVMAAVSLSPASARLNPRRIAAIPSWPAPGSHRKFSAPRHGSLGFLPRKRSSRHRGKVKSFPKDDPSKPVHLTAFLGYKAGMTHIVREVDRPGSKVNKKEVVEAVTIVETPPMVVVGIVGYVETPRGLRTFKTVFAEHISDECKRRFYKNWHKSKKKAFTKYCKKWQDEDGKKQLEKDFSSMKKYCQVIRVIAHTQMRLLPLRQKKAHLMEIQVNGGTVAEKLDWARERLEQQVPVNQVFGQDEMIDVIGVTKGKGYK

SEQ ID NO: 11544 - protein, 115 aa, Homo Sapiens
MRYVASYLLAALGGNSSPSAKDIKKILDSVGIEADDDRLNKVISELNGKNIEDVIAQGIGKLASVPAGGAVAVSAAPGSAAPAAGSAPAAAEEKKDEKKEESEESDDDMGFGLFD

SEQ ID NO: 11545 - protein, 115 aa, Homo Sapiens; identical to SEQ ID NO: 11544

SEQ ID NO: 11546 - protein, 92 aa, Homo Sapiens
  misc_feature (1)..(1): Xaa can be any naturally occurring amino acid
XGGNSSPSAKDIKKILDSVISELNGKNIEDVIAQGIGKLASVPAGGAVAVSAAPGSAAPAAGSAPAAAEEKKDEKKEESEESDDDMGFGLFD

SEQ ID NO: 11547 - protein, 138 aa, Homo Sapiens
ELDTSERKIEFDSASGTYTLYLIIGDATLKNPILWNVADVVIKFPEEEAPSTVLSQNLFTPKQEIQWIRIGANVSNFTFAPSTIIFHLGHAAMLGLMYVYWTQLNMFQTLKYLAILGSVTFLAGNRMLAQQAVKRTAH

SEQ ID NO: 11548 - protein, 615 aa, Homo Sapiens
MAPPGSSTVFLLALTIIASTWALTPTHYLTKHDVERLKASLDRPFTNLESAFYSIVGLSSLGAQVPDAKISISNETKDLLLAAVSEDSSVTQIYHAVAALSGFGLPLASQEALSALTARLSKEETVLATVQALQTASHLSQQADLRSIVEEIEDLVARLDELGGVYLQFEEGLETTALFVAATYKLMDHVGTEPSIKEDQVIQLMNAIFSKKNFESLSEAFSVASAAAVLSHNRYHVPVVVVPEGSASDTHEQAILRLQVTNVLSQPLTQATVKLEHAKSVASRATVLQKTSFTPVGDVFELNFMNVKFSSGYYDFLVEVEGDNRYIANTVELRVKISTEVGITNVDLSTVDKDQSIAPKTTRVTYPAKAKGTFIADSHQNFALFFQLVDVNTGAELTPHQTFVRLHNQKTGQEVVFVAEPDNKNVYKFELDTSERKIEFDSASGTYTLYLIIGDATLKNPILWNVADVVIKFPEEEAPSTVLSQNLFTPKQEIQHLFREPEKRPPTVVSNTFTALILSPLLLLFALWIRIGANVSNFTFAPSTIIFHLGHAAMLGLMYVYWTQLNMFQTLKYLAILGSVTFLAGNRMLAQQAVKRIAAEQSSRLAKYRTLRTAH

SEQ ID NO: 11549 - protein, 345 aa, Homo Sapiens
MAPPGSSTVFLLALTIIASTWALTPTHYLTKHDVERLKASLDRPFTNLESAFYSIVGLSSLGAQVPDAKKACTYIRSNLDPSNVDSLFYAAQASQALSGCEISISNETKDLLLAAVSEDSSVTQIYHAVAALSGFGLPLASQEALSALTARLSKEETVLARVWSTVLESRSLFSKRTVQALQTASHLSQQADLRSIVEEIEDLVARLDELGGVYLQFEEGLETTALFVAATYKLMDHVGTEPSIKEDQVIQLMNAIFSKKNFESLSEAFSVASAAAVLSHNRYHVPVVVVPEGSASDTHEQAILRLQVTNVLSQPLTQATVKLEHAKSVASRATVLQKTSFTPVG

SEQ ID NO: 11550 - protein, 631 aa, Homo Sapiens
MAPPGSSTVFLLALTIIASTWALTPTHYLTKHDVERLKASLDRPFTNLESAFYSIVGLSSLGAQVPDAKKACTYIRSNLDPSNVDSLFYAAQASQALSGCEISISNETKDLLLAAVSEDSSVTQIYHAVAALSGFGLPLASQEALSALTARLSKEETVLATVQALQTASHLSQQADLRSIVEEIEDLVARLDELGGVYLQFEEGLETTALFVAATYKLMDHVGTEPSIKEDQVIQLMNAIFSKKNFESLSEAFSVASAAAVLSHNRYHVPVVVVPEGSASDTHEQAILRLQVTNVLSQPLTQATVKLEHAKSVASRATVLQKTSFTPVGDVFELNFMNVKFSSGYYDFLVEVEGDNRYIANTVELRVKISTEVGITNVDLSTVDKDQSIAPKTTRVTYPAKAKGTFIADSHQNFALFFQLVDVNTGAELTPHQTFVRLHNQKTGQEVVFVAEPDNKNVYKFELDTSERKIEFDSASGTYTLYLIIGDATLKNPILWNVADVVIKFPEEEAPSTVLSQNLFTPKQEIQHLFREPEKRPPTVVSNTFTALILSPLLLLFALWIRIGANVSNFTFAPSTIIFHLGHAAMLGLMYVYWTQLNMFQTLKYLAILGSVTFLAGNRMLAQQAVKRTAH

SEQ ID NO: 11551 - protein, 162 aa, Homo Sapiens
MQRKHVPTSDLTLIPAMWIPSSTLPRPARPSQDVRTVQALQTASHLSQQADLRSIVEEIEDLVARLDELGGVYLQFEEGLETTALFVAATYKLMDHVGTEPSIKEDQVIQLMNAIFSKKNFESLSEAFSVASAAAVLSHNRYHVPVVVVPEGSASDTHEQAI

SEQ ID NO: 11552 - protein, 167 aa, Homo Sapiens
MQRTVQALQTASHLSQQADLRSIVEEIEDLVARLDELGGVYLQFEEGLETTALFVAATYKLMDHVGTEPSIKEDQVIQLMNAIFSKKNFESLSEAFSVASAAAVLSHNRYHVPVVVVPEGSASDTHEQAILRLQVTNVLSQPLTQATVKLEHAKSVASRATVLQKTS

SEQ ID NO: 11553 - protein, 147 aa, Homo Sapiens
  misc_feature (1)..(1): Xaa can be any naturally occurring amino acid
XGTYTLYLIIGDATLKNPILWNVADVVIKFPEEEAPSTVLSQNLFTPKQEIQHLFREPEKRPPTVVSNTFTALILSPLLLLFALWIRIGANVSNFTFAPSTIIFHLGHAEQHISSRRKMEILKTECQEKESRTIHSMRRKMEKKNFI

SEQ ID NO: 11554 - protein, 100 aa, Homo Sapiens
MCQRCGLKLIVIICFFVQLARDLLHPSLEEEKKKHKKKRLVQSPNSYFMDVKCPGCYKITTVFSHAQTVVLCVGCSTVLCQPTGGKARLTEGCSFRRKQH

SEQ ID NO: 11555 - protein, 52 aa, Homo Sapiens
MDVKCPGCYKITTVFSHAQTVVLCVGCSTVLCQPTGGKARLTEGCSFRRKQH

SEQ ID NO: 11556 - protein, 52 aa, Homo Sapiens; identical to SEQ ID NO: 11555

SEQ ID NO: 11557 - protein, 52 aa, Homo Sapiens; identical to SEQ ID NO: 11555

SEQ ID NO: 11558 - protein, 84 aa, Homo Sapiens
MPLARDLLHPSLEEEKKKHKKKRLVQSPNSYFMDVKCPGCYKITTVFSHAQTVVLCVGCSTVLCQPTGGKARLTEGCSFRRKQH

SEQ ID NO: 11559 - protein, 97 aa, Homo Sapiens
MPLARDLLHPSLEEEKKKHKKKRLVQSPNSYFMDVKCPGCYKITTVFSHAQTVVLCVGCSTVLCQPTGGKARLTEGISFGILQPSDEIDDYKCLYLH

SEQ ID NO: 11560 - protein, 224 aa, Homo Sapiens
MSRKIEGFLLLLLFGYEATLGLSSTEDEGEDPWYQKACKCDCQGGPNALWSAGATSLDCIPECPYHKPLGFESGEVTPDQITCSNPEQYVGWYSSWTANKARLNSQGFGCAWLSKFQDSSQWLQIDLKEIKVISGILTQGRCDIDEWMTKYSVQYRTDERLNWIYYKDQTGNNRVFYGNSDRTSTVQNLLRPPIISRFIRLIPLGWHVRIAIRMELLECVSKCA

SEQ ID NO: 11561 - protein, 702 aa, Homo Sapiens
ATAAAAAAVMAPPGCPGSCPNFAVVCSFLERYGPLLDLPELPFPELERVLQAPPPDVGNGEVPKELVELHLKLMRKIGKSVTADRWEKYLIKICQEFNSTWAWEMEKKGYLEMSVECKLALLKYLCECQFDDNLKFKNIINEEDADTMRLQPIGRDKDGLMYWYQLDQDHNVRMYIEEQDDQDGSSWKCIVRNRNELAETLALLKAQIDPVLLKNSSQQDNSSRESPSLEDEETKKEEETPKQEEQKESEKMKSEEQPMDLENRSTANVLEETTVKKEKEDEKELVKLPVIVKLEKPLPENEEKKIIKEESDSFKENVKPIKVEVKECRADPKDTKSSMEKPVAQEPERIEFGGNIKSSHEITEKSTEETEKLKNDQQAKIPLKKREIKLSDDFDSPVKGPLCKSVTPTKEFLKDEIKQEEETCKRISTITALGHEGKQLVNGEVSDERVAPNFKTEPIETKFYETKEESYSPSKDRNIITEGNGTESLNSVITSMKTGELEKETAPLRKDADSSISVLEIHSQKAQIEEPDPPEMETSLDSSEMAKDLSSKTALSSTESCTMKGEEKSPKTKKDKRPPILECLEKLEKSKKTFLDKDAQRLSPIPEEVPKSTLESEKPGSPEAAETSPPSNIIDHCEKLASEKEVVECQSTSTVGGQSVKKVDLETLKEDSEFTKVEMDNLDNAQTSGIEEPSETKGSMQK

SEQ ID NO: 11562 - protein, 276 aa, Homo Sapiens
EPCKKCGLPNHPELILLCDSCDSGYHTACLRPPLMIIPDGEWFCPPCQHKLLCEKLEEQLQDLDVALKKKERAERRKERLVYVGISIENIIPPQEPDFSEDQEEKKKDSKKSKANLLERRSTRTRKCISYRFDEFDEAIDEAIEDDIKEADGGGVGRGKDISTITGHRGKDISTILDEERKENKRPQRAAAARRKKRRRLNDLDSDSNLDEEESEDEFKISDGSQDEFVVSDENPDESEEDPPSNDDSDTDFCSRRLRRHPSRPMRQSRRLRRKTP

SEQ ID NO: 11563 - protein, 803 aa, Homo Sapiens
ETLALLKAQIDPVLLKNSSQQDNSSRESPSLEDEETKKEEETPKQEEQKESEKMKSEEQPMDLENRSTANVLEETTVKKEKEDEKELVKLPVIVKLEKPLPENEEKKIIKEESDSFKENVKPIKVEVKECRADPKDTKSSMEKPVAQEPERIEFGGNIKSSHEITEKSTEETEKLKNDQQAKIPLKKREIKLSDDFDSPVKGPLCKSVTPTKEFLKDEIKQEEETCKRISTITALGHEGKQLVNGEVSDERVAPNFKTEPIETKFYETKEESYSPSKDRNIITEGNGTESLNSVITSMKTGELEKETAPLRKDADSSISVLEIHSQKAQIEEPDPPEMETSLDSSEMAKDLSSKTALSSTESCTMKGEEKSPKTKKDKRPPILECLEKLEKSKKTFLDKDAQRLSPIPEEVPKSTLESEKPGSPEAAETSPPSNIIDHCEKLASEKEVVECQSTSTVGGQSVKKVDLETLKEDSEFTKVEMDNLDNAQTSGIEEPSETKGSMQKSKFKYKLVPEEETTASENTEITSERQKEGIKLTIRISSRKKKPDSPPKVLEPENKQEKTEKEEEKTNVGRTLRRSPRISRPTAKVAEIRDQKADKKRGEGEDEVEEESTALQKTDKKEILKKSEKDTNSKVSKVKPKGKVRWTGSRTRGRWKYSSNDESEGSGSEKSSAASEEEEEKESEEAILADDDEPCKKCGLPNHPELILLCDSCDSGYHTACLRPPLMIIPDGEWFCPPCQHKLLCEKLEEQLQDLDVALKKKERAERRKERLVYVGISIENIIPPQEPDFSEDQEEKKKDSKK

SEQ ID NO: 11564 - protein, 1441 aa, Homo Sapiens
MATAAAAAAVMAPPGCPGSCPNFAVVCSFLERYGPLLDLPELPFPELERVLQAPPPDVGNGEVPKELVELHLKLMRKIGKSVTADRWEKYLIKICQEFNSTWAWEMEKKGYLEMSVECKLALLKYLCECQFDDNLKFKNIINEEDADTMRLQPIGRDKDGLMYWYQLDQDHNVRMYIEEQDDQDGSSWKCIVRNRNELAETLALLKAQIDPVLLKNSSQQDNSSRESPSLEDEETKKEEETPKQEEQKESEKMKSEEQPMDLENRSTANVLEETTVKKEKEDEKELVKLPVIVKLEKPLPENEEKKIIKEESDSFKENVKPIKVEVKECRADPKDTKSSMEKPVAQEPERIEFGGNIKSSHEITEKSTEETEKLKNDQQAKIPLKKREIKLSDDFDSPVKGPLCKSVTPTKEFLKDEIKQEEETCKRISTITALGHEGKQLVNGEVSDERVAPNFKTEPIETKFYETKEESYSPSKDRNIITEGNGTESLNSVITSMKTGELEKETAPLRKDADSSISVLEIHSQKAQIEEPDPPEMETSLDSSEMAKDLSSKTALSSTESCTMKGEEKSPKTKKDKRPPILECLEKLEKSKKTFLDKDAQRLSPIPEEVPKSTLESEKPGSPEAAETSPPSNIIDHCEKLASEKEVVECQSTSTVGGQSVKKVDLETLKEDSEFTKVEMDNLDNAQTSGIEEPSETKGSMQKSKFKYKLVPEEETTASENTEITSERQKEGIKLTIRISSRKKKPDSPPKVLEPENKQEKTEKEEEKTNVGRTLRRSPRISRPTAKVAEIRDQKADKKRGEGEDEVEEESTALQKTDKKEILKKSEKDTNSKVSKVKPKGKVRWTGSRTRGRWKYSSNDESEGSGSEKSSAASEEEEEKESEEAILADDDEPCKKCGLPNHPELILLCDSCDSGYHTACLRPPLMIIPDGEWFCPPCQHKLLCEKLEEQLQDLDVALKKKERAERRKERLVYVGISIENIIPPQEPDFSEDQEEKKKDSKKSKANLLERRSTRTRKCISYRFDEFDEAIDEAIEDDIKEADGGGVGRGKDISTITGHRGKDISTILDEERKENKRPQRAAAARRKKRRRLNDLDSDSNLDEEESEDEFKISDGSQDEFVVSDENPDESEEDPPSNDDSDTDFCSRRLRRHPSRPMRQSRRLRRKTPKKKYSDDDEEEESEENSRDSESDFSDDFSDDFVETRRRRSRRNQKRQINYKEDSESDGSQKSLRRGKEIRRVHKRRLSSSESEESYLSKNSEDDELAKESKRSVRKRGRSTDEYSEADEEEEEEEGKPSRKRLHRIETDEEESCDNAHGDANQPARDSQPRVLPSEQESTKKPYRIESDEEEDFENVGKVGSPLDYSLVDLPSTNGQSPGKAIENLIGKPTEKSQTPKDNSTASASLASNGTSGGQEAGAPEEEEDELLRVTDLVDYVCNSEQL

SEQ ID NO: 11565 - protein, 1189 aa, Homo Sapiens
MKSEEQPMDLENRSTANVLEETTVKKEKEDEKELVKLPVIVKLEKPLPENEEKKIIKEESDSFKENVKPIKVEVKECRADPKDTKSSMEKPVAQEPERIEFGGNIKSSHEITEKSTEETEKLKNDQQAKIPLKKREIKLSDDFDSPVKGPLCKSVTPTKEFLKDEIKQEEETCKRISTITALGHEGKQLVNGEVSDERVAPNFKTEPIETKFYETKEESYSPSKDRNIITEGNGTESLNSVITSMKTGELEKETAPLRKDADSSISVLEIHSQKAQIEEPDPPEMETSLDSSEMAKDLSSKTALSSTESCTMKGEEKSPKTKKDKRPPILECLEKLEKSKKTFLDKDAQRLSPIPEEVPKSTLESEKPGSPEAAETSPPSNIIDHCEKLASEKEVVECQSTSTVGGQSVKKVDLETLKEDSEFTKVEMDNLDNAQTSGIEEPSETKGSMQKSKFKYKLVPEEETTASENTEITSERQKEGIKLTIRISSRKKKPDSPPKVLEPENKQEKTEKEEEKTNVGRTLRRSPRISRPTAKVAEIRDQKADKKRGEGEDEVEEESTALQKTDKKEILKKSEKDTNSKVSKVKPKGKVRWTGSRTRGRWKYSSNDESEGSGSEKSSAASEEEEEKESEEAILADDDEPCKKCGLPNHPELILLCDSCDSGYHTACLRPPLMIIPDGEWFCPPCQHKLLCEKLEEQLQDLDVALKKKERAERRKERLVYVGISIENIIPPQEPDFSEDQEEKKKDSKKSKANLLERRSTRTRKCISYRFDEFDEAIDEAIEDDIKEADGGGVGRGKDISTITGHRGKDISTILDEERKENKRPQRAAAARRKKRRRLNDLDSDSNLDEEESEDEFKISDGSQDEFVVSDENPDESEEDPPSNDDSDTDFCSRRLRRHPSRPMRQSRRLRRKTPKKKYSDDDEEEESEENSRDSESDFSDDFSDDFVETRRRRSRRNQKRQINYKEDSESDGSQKSLRRGKEIRRVHKRRLSSSESEESYLSKNSEDDELAKESKRSVRKRGRSTDEYSEADEEEEEEEGKPSRKRLHRIETDEEESCDNAHGDANQPARDSQPRVLPSEQESTKKPYRIESDEEEDFENVGKVGSPLDYSLVDLPSTNGQSPGKAIENLIGKPTEKSQTPKDNSTASASLASNGTSGGQEAGAPEEEEDELLRVTDLVDYVCNSEQL

SEQ ID NO: 11566 - protein, 202 aa, Homo Sapiens
  misc_feature (1)..(1): Xaa can be any naturally occurring amino acid
XAAAAAAVMAPPGCPGSCPNFAVVCSFLERYGPLLDLPELPFPELERVLQAPPPDVGNGEVPKELVELHLKLMRKIGKSVTADRWEKYLIKYLCECQFDDNLKFKNIINEEDADTMRLQPIGRDKDGLMYWYQLDQDHNVRMYIEEQDDQDGSSWKCIVRNRNELAETLALLKAQIDPVLLKNSSQQDNSSRESPSLEDEET

SEQ ID NO: 11567 - protein, 165 aa, Homo Sapiens
  misc_feature (1)..(1): Xaa can be any naturally occurring amino acid
XKPDSPPKVLEPENKQEKTEKEEEKTNVGRTLRRSPRISRPTAKVAEIRDQKADKKRGEGEDEVEEESTALQKTDKKEILKKSEKDTNSKVKPKGKVRWTGSRTRGRWKYSSNDESEGSGSEKSSAASEEEEEKESEEAILADDDEPCKKCGLPNHPELILLCDS

SEQ ID NO: 11568 - protein, 236 aa, Homo Sapiens
MIFRVSAEGSQACAKGCELCSEVNGCLKCSPKLFILLERNDIRQVGVCLPSCPPGYFDARNPDMNKCIKCKIEHCEACFSHNFCTKCKEGLYLHKGRCYPACPEGSSAANGTMECSSPAQCEMSEWSPWGPCSKKQQLCGFRRGSEERTRRVLHAPVGDHAACSDTKETRRCTVRRVPCPEGQKRRKGGQGRRENANRNLARKESKEAGAGSRRRKGQQQQQQQGTVGPLTSAGPA

SEQ ID NO: 11569 - protein, 263 aa, Homo Sapiens
MRLGLCVVALVLSWTHLTISSRGIKGKRQRRISAEGSQACAKGCELCSEVNGCLKCSPKLFILLERNDIRQVGVCLPSCPPGYFDARNPDMNKCIKCKIEHCEACFSHNFCTKCKEGLYLHKGRCYPACPEGSSAANGTMECSSPAQCEMSEWSPWGPCSKKQQLCGFRRGSEERTRRVLHAPVGDHAACSDTKETRRCTVRRVPCPEGQKRRKGGQGRRENANRNLARKESKEAGAGSRRRKGQQQQQQQGTVGPLTSAGPA

SEQ ID NO: 11570 - protein, 263 aa, Homo Sapiens; identical to SEQ ID NO: 11569

SEQ ID NO: 11571 - protein, 200 aa, Homo Sapiens
MRLGLCVVALVLSWTHLTISSRGIKGKRQRRISAEGSQACAKGCELCSEVNGCLKCSPKLFILLERNDIRQVGVCLPSCPPGYFDARNPDMNKCIKCKIEHCEACFSHNFCTKCKEGLYLHKGRCYPACPEGSSAANGTMECSSPGQKRRKGGQGRRENANRNLARKESKEAGAGSRRRKGQQQQQQQGTVGPLTSAGPA

SEQ ID NO: 11572 - protein, 89 aa, Homo Sapiens
MDLASYVSNPICKGCLSCSKDNGCSRCQQKLFFFLRREGMRQYGECLHSCPSGYYGHRAPDMNRCARCRIENCDSCFSKDFCTKCKVGF

SEQ ID NO: 11573 - protein, 77 aa, Homo Sapiens
MQFRLFSFALIILNCMDYSHCQGNRWRRSKRASYVSNPICKGCLSCSKDNGCSRCQQKLFFFLRREGMRQYGECLHS

SEQ ID NO: 11574 - protein, 121 aa, Homo Sapiens
MQFRLFSFALIILNCMDYSHCQGNRWRRSKRASYVSNPICKGCLSCSKDNGCSRCQQKLFFFLRREGMRQYGECLHSCPSGYYGHRAPDMNRCARCRIENCDSCFSKDFCTKCKVGFYLHR

SEQ ID NO: 11575 - protein, 243 aa, Homo Sapiens
MQFRLFSFALIILNCMDYSHCQGNRWRRSKRASYVSNPICKGCLSCSKDNGCSRCQQKLFFFLRREGMRQYGECLHSCPSGYYGHRAPDMNRCARCRIENCDSCFSKDFCTKCKVGFYLHRGRCFDECPDGFAPLEETMECVEGCEVGHWSEWGTCSRNNRTCGFKWGLETRTRQIVKKPVKDTILCPTIAESRRCKMTMRHCPGGKRTPKAKEKRNKKKKRKLIERAQEQHSVFLATDRANQ

SEQ ID NO: 11576 - protein, 179 aa, Homo Sapiens
MQFRLFSFALIILNCMDYSHCQGNRWRRSKRGCRIENCDSCFSKDFCTKCKVGFYLHRGRCFDECPDGFAPLEETMECVGCEVGHWSEWGTCSRNNRTCGFKWGLETRTRQIVKKPVKDTILCPTIAESRRCKMTMRHCPGGKRTPKAKEKRNKKKKRKLIERAQEQHSVFLATDRANQ

SEQ ID NO: 11577 - protein, 89 aa, Homo Sapiens
MRQYGECLHSCPSGYYGHRAPDMNRCARCRIENCDSCFSKDFCTKCKVGFYLHRGRCFDECPDGFAPLEETMECVEGCEVGHWSEWGTC

SEQ ID NO: 11578 - protein, 168 aa, Homo Sapiens
MRQYGECLHSCPSGYYGHRAPDMNRCARCRIENCDSCFSKDFCTKCKVGFYLHRGRCFDECPDGFAPLEETMECVEGCEVGHWSEWGTCSRNNRTCGFKWGLETRTRQIVKKPVKDTILCPTIAESRRCKMTMRHCPGGKRTPKAKEKRNKKKKRKLIERAQEQHSVF

SEQ ID NO: 11579 - protein, 176 aa, Homo Sapiens
MRQYGECLHSCPSGYYGHRAPDMNRCARCRIENCDSCFSKDFCTKCKVGFYLHRGRCFDECPDGFAPLEETMECVEGCEVGHWSEWGTCSRNNRTCGFKWGLETRTRQIVKKPVKDTILCPTIAESRRCKMTMRHCPGGKRTPKAKEKRNKKKKRKLIERAQEQHSVFLATDRANQ

SEQ ID NO: 11580 - protein, 272 aa, Homo Sapiens
MHLRLISWLFIILNFMEYIGSQNASRGRRQRRMHPNVSQGCQGGCATCSDYNGCLSCKPRLFFALERIGMKQIGVCLSSCPSGYYGTRYPDINKCTKCKADCDTCFNKNFCTKCKSGFYLHLGKCLDNCPEGLEANNHTMECVSIVHCEVSEWNPWSPCTKKGKTCGFKRGTETRVREIIQHPSAKGNLCPPTNETRKCTVQRKKCQKGERGKKGRERKRKKPNKGESKEAIPDSKSLESSKEIPEQRENKQQQKKRKVQDKQKSVSVSTVH

SEQ ID NO: 11581 - protein, 292 aa, Homo Sapiens
MHLRLISWLFIILNFMEYIGSQNASRGRRQRRMHPNVSQGCQGGCATCSDYNGCLSCKPRLFFALERIGMKQIGVCLSSCPSGYYGTRYPDINKCTKCKADCDTCFNKNFCTKCKSGFYLHLGKCLDNCPEGLEANNHTMECVSIVHCEVSEWNPWSPCTKKGKTCGFKRGTETRVREIIQHPSAKGNLCPPTNETRKCTVQRKKCQKGERGKKGRERKRKKPNKGESKEAIPDSKSLESSKEIPEQRENKQQQKKRKVQDKQKSGIEVTLAEGLTSVSQRTQPTPCRRRYL

SEQ ID NO: 11582 - protein, 172 aa, Homo Sapiens
MRAPLCLLLLVAHAVDMLALNRRKKQVGTGLGGNCTGCIICSEENGCSTCQQRLFLFIRREGIRQYGKCLHDCPPGYFGIRGQEVNRCKKCGATCESCFSQDFCIRCKRQFYLYKGKCLPTCPPGTLAHQNTRECQERSPGQKKGRKDRRPRKDRKLDRRLDVRPRQPGLQP

SEQ ID NO: 11583 - protein, 234 aa, Homo Sapiens
MRAPLCLLLLVAHAVDMLALNRRKKQVGTGLGGNCTGCIICSEENGCSTCQQRLFLFIRREGIRQYGKCLHDCPPGYFGIRGQEVNRCKKCGATCESCFSQDFCIRCKRQFYLYKGKCLPTCPPGTLAHQNTRECQGECELGPWGGWSPCTHNGKTCGSAWGLESRVREAGRAGHEEAATCQVLSESRKCPIQRPCPGERSPGQKKGRKDRRPRKDRKLDRRLDVRPRQPGLQP

SEQ ID NO: 11584 - protein, 45 aa, Homo Sapiens
MITLHEMAETDEGWLDVVQSLIRVIPLEDPLGPAVITLLLDECPL

SEQ ID NO: 11585 - protein, 172 aa, Homo Sapiens
MIVFGWAVFLASRSLGQGLLLTLEEHIAHFLGTGGAATTMGNSCICRDDSGTDDSVDTQQQQAENSAVPTADTRSQPRDPVRPPRRGRGPHEPRRKKQNVDGLVLDTLAVIRTLVDKRKLQNEDAYIGPCFHKSSTGIVVSLPGISLSDQEPPYSMITLHEMAETDEGWLDV

SEQ ID NO: 11586 - protein, 121 aa, Homo Sapiens
MIVFGWAVFLASRSLGQGLLLTLEEHIAHFLGTGGAATTMGNSCICRDDSGTDDSVDTQQQQAENSAVPTADTRSQPRDPVRPPRRGRGPHEPRRKKQNVDGLVLDTLAVIRTLVDNDQEP

SEQ ID NO: 11587 - protein, 146 aa, Homo Sapiens
MIVFGWAVFLASRSLGQGLLLTLEEHIAHFLGTGGAATTMGNSCICRDDSGTDDSVDTQQQQAENSAVPTADTRSQPRDPVRPPRRGRGPHEPRRKKQNVDGLVLDTLAVIRTLVDNDQEPPYSMITLHEMAETDEGWLDVVQSLI

SEQ ID NO: 11588 - protein, 146 aa, Homo Sapiens; identical to SEQ ID NO: 11587

SEQ ID NO: 11589 - protein, 576 aa, Homo Sapiens
MIVFGWAVFLASRSLGQGLLLTLEEHIAHFLGTGGAATTMGNSCICRDDSGTDDSVDTQQQQAENSAVPTADTRSQPRDPVRPPRRGRGPHEPRRKKQNVDGLVLDTLAVIRTLVDNDQEPPYSMITLHEMAETDEGWLDVVQSLIRVIPLEDPLGPAVITLLLDECPLPTKDALQKLTEILNLNGEVACQDSSHPAKHRNTSAVLGCLAEKLAGPASIGLLSPGILEYLLQCLKLQSHPTVMLFALIALEKFAQTSENKLTISESSISDRLVTLESWANDPDYLKRQVGFCAQWSLDNLFLKEGRQLTYEKVNLSSIRAMLNSNDVSEYLKISPHGLEARCDASSFESVRCTFCVDAGVWYYEVTVVTSGVMQIGWATRDSKFLNHEGYGIGDDEYSCAYDGCRQLIWYNARSKPHIHPCWKEGDTVGFLLDLNEKQMIFFLNGNQLPPEKQVFSSTVSGFFAAASFMSYQQCEFNFGAKPFKYPPSMKFSTFNDYAFLTAEEKIILPRHRRLALLKQVSIRENCCSLCCDEVADTQLKPCGHSDLCMDCALQLETCPLCRKEIVSRIRQISHIS

SEQ ID NO: 11590 - protein, 576 aa, Homo Sapiens; identical to SEQ ID NO: 11589

SEQ ID NO: 11591 - protein, 239 aa, Homo Sapiens
MARQLLSQVDMDCRVHMRPIGLTWVLQLTLAWILLEACGGSRPLQARSQQHHGLAADLGKGKLHLAGPCCPSEMDTTETSGPGNHPERCGVPSPECESFLEHLQRALRSRFRLRLLGVRQAQPLCEELCQAWFANCEDDITCGPTWLPLSEKRGCEPSCLTYGQTFADGTDLCRSALGHALPVAAPGARHCFNISISAVPRPRPGRRGREAPSRRSRSPRTSILDAAGSGSGSGSGSGP

SEQ ID NO: 11592 - protein, 191 aa, Homo Sapiens
MARQVDMDCRVHMRPIGLTWVLQLTLAWILLEACGGSRPLQARSQQHHGLAADLGKGKLHLAGPCCPSEMDTTETSGPGNHPERCGVPSPECESFLEHLQRALRSRFRLRLLGVRQAQPLCEELCQAWFANCEDDITCGPTWLPLSEKRGCEPSCLTYGQTFADGTDLCRSALGHALPVAAPGARHCFNIS

SEQ ID NO: 11593 - protein, 70 aa, Homo Sapiens
MDCRVHMRPIGLTWVLQLTLAWILLEACGGSRPLQARSQQHHGLAADLGKGKLHLAEMDTTETSGPGNHP

SEQ ID NO: 11594 - protein, 193 aa, Homo Sapiens
MDCRVHMRPIGLTWVLQLTLAWILLEACGGSRPLQARSQQHHGLAADLGKGKLHLAEMDTTETSGPGNHPERCGVPSPECESFLEHLQRALRSRFRLRLLGVRQAQPLCEELCQAWFANCEDDITCGPTWLPLSEKRGCEPSCLTYGQTFADGTDLCRSALGHALPVAAPGARHCFNISISAVPRPRPGRRGR

SEQ ID NO: 11595 - protein, 174 aa, Homo Sapiens
MDCRVHMRPIGLTWVLQLTLAWILLEACGGSRPLQARSQQHHGLAADLGKGKLHLAGDPQASVPKPYLNIQDPSSQGSPLPGPCCPSEMDTTETSGPGNHPERCGVPSPECESFLEHLQRALRSRFRLRLLGVRQAQPLCEELCQAWFANCEDDITCGPTWLPLSEKRGCEPSC

SEQ ID NO: 11596 - protein, 130 aa, Homo Sapiens
MDCRVHMRPIGLTWVLQLTLAWILLEACGGSRPLQARSQQHHGLAADLGKGKLHLAGPCCPSEMDTTETSGPGNHPERCGVPSPECESFLEHLQRALRSRFRLRLLGVRQAQPLCEELCQAWFANCEDDI

SEQ ID NO: 11597 - protein, 186 aa, Homo Sapiens
MDCRVHMRPIGLTWVLQLTLAWILLEACGGSRPLQARSQQHHGLAADLGKGKLHLAGPCCPSEMDTTETSGPGNHPERCGVPSPECESFLEHLQRALRSRFRLRLLGVRQAQPLCEELCQAWFANCEDDITCGPTWLPLSEKRGCEPSCLTYGQTFADGTDLCRSALGHALPVAAPGARHCFNISI

SEQ ID NO: 11598 - protein, 214 aa, Homo Sapiens
MDCRVHMRPIGLTWVLQLTLAWILLEACGGSRPLQARSQQHHGLAADLGKGKLHLAGPCCPSEMDTTETSGPGNHPERCGVPSPECESFLEHLQRALRSRFRLRLLGVRQAQPLCEELCQAWFANCEDDITCGPTWLPLSEKRGCEPSCLTYGQTFADGTDLCRSALGHALPVAAPGARHCFNISISAVPRPRPGRRGREAPSRRSRSPRTSIL

SEQ ID NO: 11599 - protein, 229 aa, Homo Sapiens
MDCRVHMRPIGLTWVLQLTLAWILLEACGGSRPLQARSQQHHGLAADLGKGKLHLAGPCCPSEMDTTETSGPGNHPERCGVPSPECESFLEHLQRALRSRFRLRLLGVRQAQPLCEELCQAWFANCEDDITCGPTWLPLSEKRGCEPSCLTYGQTFADGTDLCRSALGHALPVAAPGARHCFNISISAVPRPRPGRRGREAPSRRSRSPRTSILDAAGSGSGSGSGSGP

SEQ ID NO: 11600 - protein, 229 aa, Homo Sapiens; identical to SEQ ID NO: 11599

SEQ ID NO: 11601 - protein, 114 aa, Homo Sapiens [sequence omitted]

SEQ ID NO: 11602 - protein, 205 aa, Homo Sapiens
MDEALETQLKTSRGRFSATESLPTLELLSQVDMDCRVHMRPIGLTWVLQLTLAWILLEACGGSRPLQARSQQHHGLAADLGKGKLHLAGPCCPSEMDTTETSGPGNHPERCGVPSPECESFLEHLQRALRSRFRLRLLGVRQAQPLCEELCQAWFANCEDDITCGPTWLPLSEKRGCEPSCLTYGQAGVQWRDLSSMQPPPPGFK

SEQ ID NO: 11603 - protein, 261 aa, Homo Sapiens
MDEALETQLKTSRGRFSATESLPTLELLSQVDMDCRVHMRPIGLTWVLQLTLAWILLEACGGSRPLQARSQQHHGLAADLGKGKLHLAGPCCPSEMDTTETSGPGNHPERCGVPSPECESFLEHLQRALRSRFRLRLLGVRQAQPLCEELCQAWFANCEDDITCGPTWLPLSEKRGCEPSCLTYGQTFADGTDLCRSALGHALPVAAPGARHCFNISISAVPRPRPGRRGREAPSRRSRSPRTSILDAAGSGSGSGSGSGP

SEQ ID NO: 11604 - protein, 441 aa, Homo Sapiens
MLRKGCCVELLLLLVAAELPLGGGCPRDCVCYPAPMTVSCQAHNFAAIPEGIPVDSERVFLQNNRIGLLQPGHFSPAMVTLWIYSNNITYIHPSTFEGFVHLEELDLGDNRQLRTLAPETFQGLVKLHALYLYKCGLSALPAGVFGGLHSLQYLYLQDNHIEYLQDDIFVDLVNLSHLFLHGNKLWSLGPGTFRGLVNLDRLLLHENQLQWVHHKAFHDLRRLTTLFLFNNSLSELQGECLAPLGALEFLRLNGNPWDCGCRARSLWEWLQRFRGSSSAVPCVSPGLRHGQDLKLLRAEDFRNCTGPASPHQIKSHTLTTTDRAARKEHHSPHGPTRSKGHPHGPRPGHRKPGKNCTNPRNRNQISKAGAGKQAPELPDYAPDYQHKFSFDIMPTARPKRKGKCARRTPIRAPSGVQQASSASSLGASLLAWTLGLAVTLR

SEQ ID NO: 11605 - protein, 420 aa, Homo Sapiens
MLPGLRRLLQAPASACLLLMLLALPLAAPSCPMLCTCYSSPPTVSCQANNFSSVPLSLPPSTQRLFLQNNLIRTLRPGTFGSNLLTLWLFSNNLSTIYPGTFRHLQALEELDLGDNRHLRSLEPDTFQGLERLQSLHLYRCQLSSLPGNIFRGLVSLQYLYLQENSLLHLQDDLFADLANLSHLFLHGNRLRLLTEHVFRGLGSLDRLLLHGNRLQGVHRAAFRGLSRLTILYLFNNSLASLPGEALADLPSLEFLRLNANPWACDCRARPLWAWFQRARVSSSDVTCATPPERQGRDLRALREADFQACPPAAPTRPGSRARGNSSSNHLYGVAEAGAPPADPSTLYRDLPAEDSRGRQGGDAPTEDDYWGGYGGEDQRGEQMCPGAACQAPPDSRGPALSAGLPSPLLCLLLLVPHHL

SEQ ID NO: 11606 - protein, 204 aa, Homo Sapiens
MLPGLRRLLQAPASACLLLMLLALPLAAPSCPMLCTCYSSPPTVSCQANNFSSVPLSLPPSTQRLFLQNNLIRTLRPGTFGSNLLTLWLFSNNLSTIYPGTFRHLQALEELDLGDNRHLRSLEPDTFQGLERLQSLHLYRCQLSSLPGNIFRGLVSLQYLYLQENSLLHLQGKKEKGKSLLCSWRMDALKMEGIPVIVIHCYYY

SEQ ID NO: 11607 - protein, 193 aa, Homo Sapiens
MLPGLRRLLQAPASACLLLMLLALPLAAPSCPMLCTCYSSPPTVSCQANNFSSVPLSLPPSTQRLFLQNNLIRTLRPGTFGSNLLTLWLFSNNLSTIYPGTFRHLQALEELDLGDNRHLRSLEPDTFQGLERLQSLHLYRCQLSSLPGNIFRGLVSLQYLYLQENSLLHLQGPLPKGLCSCFSHPPSSLPTSR

SEQ ID NO: 11608 - protein, 122 aa, Homo Sapiens
MKLLTGLVFCSLVLGVSSRSFFSFLGEAFDGARDMWRAYSDMREANYIGSDKYFHARGNYDAAKRGPGGAWAAEVITDARENIQRFFGHGAEDSLADQAANEWGRSGKDPNHFRPAGLPEKY

SEQ ID NO: 11609 - protein, 122 aa, Homo Sapiens; identical to SEQ ID NO: 11608

SEQ ID NO: 11610 - protein, 122 aa, Homo Sapiens; identical to SEQ ID NO: 11608

SEQ ID NO: 11611 - protein, 80 aa, Homo Sapiens
MKLLTGLVFCSLVLSVSSRSFFSFLGEAFDGARDMWRAYSDMREANYIGSDKYFHARGNYDAAKRGPGGAWAAEVIREDD

SEQ ID NO: 11612 - protein, 113 aa, Homo Sapiens
MKLLTGLVFCSLVLSVSSRSFFSFLGEAFDGARDMWRAYSDMREANYIGSDKYFHARGNYDAAKRGPGGAWAAEVIRLKCHGMIMAHCNLDLPGLKRSSHFSLLNNWDCRCAP

SEQ ID NO: 11613 - protein, 83 aa, Homo Sapiens
MKLLTGLVFCSLVLSVSSRSFFSFLGEAFDGARDMWRAYSDMREANYIGSDKYFHARGNYDAAKRGPGGAWAAEVISLFSAEL

SEQ ID NO: 11614 - protein, 122 aa, Homo Sapiens
MKLLTGLVFCSLVLSVSSRSFFSFLGEAFDGARDMWRAYSDMREANYIGSDKYFHARGNYDAAKRGPGGAWAAEVISNARENIQRLTGRGAEDSLADQAANKWGRSGRDPNHFRPAGLPEKY

SEQ ID NO: 11615 - protein, 122 aa, Homo Sapiens; identical to SEQ ID NO: 11614

SEQ ID NO: 11616 - protein, 122 aa, Homo Sapiens; identical to SEQ ID NO: 11614

SEQ ID NO: 11617 - protein, 130 aa, Homo Sapiens
MRLFTGIVFCSLVMGVTSESWRSFFKEALQGVGDMGRAYWDIMISNHQNSNRYLYARGNYDAAQRGPGGVWAAKLISRSRVYLQGLIDCYLFGNSSTVLEDSKSNEKAEEWGRSGKDPDRFRPDGLPKKY

SEQ ID NO: 11618 - protein, 220 aa, Homo Sapiens
MNGFTPDEMSRGGDAAAAVAAVVAAAAAAASAGNGTGAGTGAEVPGAGAVSAAGPPGAAGPGPGQLCCLREDGERCGRAAGNASFSKRIQKSISQKKVKIELDKSARHLYICDYHKNLIQSVRNRRKRKGSDDDGGDSPVQDIDTPEVDLYQLQVNTLRRYKRHFKLPTRPGLNKAQLVEIVGCHFRSIPVNEKDTLTYFIYSVKNDKNKSDLKVDSGVH

SEQ ID NO: 11619 - protein, 51 aa, Homo Sapiens
MSFIFEWIYNGFSSVLQFLGLYKKSGKLVFLGLDNAGKTTLLHMLKDDRLG

SEQ ID NO: 11620 - protein, 198 aa, Homo Sapiens
MSFIFEWIYNGFSSVLQFLGLYKKSGKLVFLGLDNAGKTTLLHMLKDDRLGQHVPTLHPTSEELTIAGMTFTTFDLGGHEQARRVWKNYLPAINGIVFLVDCADHSRLVESKVELNALMTDETISNVPILILGNKIDRTDAISEEKLREIFGLYGQTTGKGNVTLKELNARPMEVFMCSVLKRQGYGEGFRWLSQYID

SEQ ID NO: 11621 - protein, 198 aa, Homo Sapiens; identical to SEQ ID NO: 11620

SEQ ID NO: 11622 - protein, 198 aa, Homo Sapiens; identical to SEQ ID NO: 11620

SEQ ID NO: 11623 - protein, 198 aa, Homo Sapiens; identical to SEQ ID NO: 11620

SEQ ID NO: 11624 - protein, 121 aa, Homo Sapiens
MSFIFEWIYNGFSSVLQFLGLYKKSGKLVFLGLDNAGKTTLLHMLKDDRLGQHVPTLHPTSEELTIAGMTFTTFDLGGHEQARRVWKNYLPAINGIVFLVDCADHSRLVESKVELNVCFVL

SEQ ID NO: 11625 - protein, 115 aa, Homo Sapiens
  misc_feature (1)..(1): Xaa can be any naturally occurring amino acid
XSFWWTVQIILASWNPKLSLMIYCSSLLTLAPNALMTDETISNVPILILGNKIDRTDAISEEKLREIFGLYGQTTGKGNVTLKELNARPMEVFMCSVLKRQGYGEGFRWLSQYID

SEQ ID NO: 11626 - protein, 213 aa, Homo Sapiens
IAYKFGKTVVSCEGYESSEDQYVLRGSCGLEYNLDYTELGLQKLKESGKQHGFASFSDYYYKWSSADSCNMSGLITIVVLLGIAFVVYKLFLSDGQYSPPPYSEYPPFSHRYQRFTNSAGPPPPGFKSEFTGPQNTGHGATSGFGSAFTGQQGYENSGPGFWTGLGTGGILGYLFGSNRAYSPLHGGSGSYSVCSNSDTKTRTASGYGGTRRR

SEQ ID NO: 11627 - protein, 36 aa, Homo Sapiens
MAAACGPGAAGYCLLLGLHLFLLTAGPALGWIPSHS

SEQ ID NO: 11628 - protein, 147 aa, Homo Sapiens
MAAACGPGAAGYCLLLGLHLFLLTAGPALGWNDPALTLHYDRYTTSRRLDPIPQLKCVGGTAGCDSYTPKVIQCQNKGWDGYDVQWECKTDLDIAYKFGKTVVSCEGYESSEDQYVLRGSCGLEYNLDYTELGLQKLKESGKQHGFA

SEQ ID NO: 11629 - protein, 339 aa, Homo Sapiens
MAAACGPGAAGYCLLLGLHLFLLTAGPALGWNDPDRMLLRDVKALTLHYDRYTTSRRLDPIPQLKCVGGTAGCDSYTPKVIQCQNKGWDGYDVQWECKTDLDIAYKFGKTVVSCEGYESSEDQYVLRGSCGLEYNLDYTELGLQKLKESGKQHGFASFSDYYYKWSSADSCNMSGLITIVVLLGIAFVVYKLFLSDGQYSPPPYSEYPPFSHRYQRFTNSAGPPPPGFKSEFTGPQNTGHGATSGFGSAFTGQQGYENSGPGFWTGLGTGGILGYLFGSNRAATPFSDSWYYPSYPPSYPGTWNRAYSPLHGGSGSYSVCSNSDTKTRTASGYGGTRRR

SEQ ID NO: 11630 - protein, 40 aa, Homo Sapiens
MAAACGPGAAGYCLLLGLHLFLLTAGPALGWNDPECCCGM

SEQ ID NO: 11631 - protein, 37 aa, Homo Sapiens
MAAACGPGAAGYCLLLGLHLFLLTAGPALGWNDPVGM

SEQ ID NO: 11632 - protein, 37 aa, Homo Sapiens; identical to SEQ ID NO: 11631

SEQ ID NO: 11633 - protein, 202 aa, Homo Sapiens
MLLRDVKALTLHYDRYTTSRRLDPIPQLKCVGGTAGCDSYTPKVIQCQNKGWDGYDVQWECKTDLDIAYKFGKTVVSCEGYESSEDQYVLRGSCGLEYNLDYTELGLQKLKESGKQHGFASFSDYYYKWSSADSCNMSGLITIVVLLGIAFVVYKLFLSDGQYSPPPYSEYPPFSHRYQRFTNSAGPPPPGFKSEFTGPQNT

SEQ ID NO: 11634 - protein, 167 aa, Homo Sapiens
MSGLITIVVLLGIAFVVYKLFLSDGQYSPPPYSEYPPFSHRYQRFTNSAGPPPPGFKSEFTGPQNTGHGATSGFGSAFTGQQGYENSGPGFWTGLGTGGILGYLFGSNRAATPFSDSWYYPSYPPSYPGTWNRAYSPLHGGSGSYSVCSNSDTKTRTASGYGGTRRR

SEQ ID NO: 11635 - protein, 347 aa, Homo Sapiens
  misc_feature (1)..(1): Xaa can be any naturally occurring amino acid
XAAACGPGAAGYCLLLGLHLFLLTAGPALGWNDPDRMLLRDVKALTLHYDRYTTSRRLDPIPQLKCVGGTAGCDSYTPKVIQCQNKGWDGYDVQWECKTDLDIAYKFGKTVVSCEGYESSEDQYVLRGSCGLEYNLDYTELGLQKLKESGKQHGFASFSDYYYKWSSADSCNMSGLITIVVLLGIAFVVYKLFLSDGQYSPPPYSEYPPFSHRYQRFTNSAGPPPPGFKSEFTGPQNTGHGATSGFGSAFTGQQGYENSGPGFWTGLGTGGILGYLFGSNRAATPFSDSWYYPSYPPSYPGTWNRAYSPLHGGSGSYSDMVVPGDDKVESWSQTLDAEILDFSSLSL

SEQ ID NO: 11636 - protein, 218 aa, Homo Sapiens
  misc_feature (1)..(1): Xaa can be any naturally occurring amino acid
XLEYNLDYTELGLQKLKESGKQHGFASFSDYYYKWSSADSCNMSGLITIVVLLGIAFVVYKLFLSDGQYSPPPYSEYPPFSHRYQRFTNSAGPPPPGFKSEFTGPQNTGHGATSGFGSAFTGQQGYENSGPGFWTGLGTGGILGYLFGSNRAATPFSDSWYYPSYPPSYPGTWNRAYSPLHGGSGSYSVCSNSDTKTRTASGKSKKYKFLLPRSKVQK

SEQ ID NO: 11637 - protein, 724 aa, Homo Sapiens
MVLTLLLSAYKLCRFFAMSGPRPGAERLAVPGPDGGGGTGPWWAAGGRGPREVSPGAGTEVQDALERALPELQQALSALKQAGGARAVGAGLAEVFQLVEEAWLLPAVGREVAQGLCDAIRLDGGLDLLLRLLQAPELETRVQAARLLEQILVAENRDRVARIGLGVILNLAKEREPVELARSVAGILEHMFKHSEETCQRLVAAGGLDAVLYWCRRTDPALLRHCALALGNCALHGGQAVQRRMVEKRAAEWLFPLAFSKEDELLRLHACLAVAVLATNKEVEREVERSGTLALVEPLVASLDPGRFARCLVDASDTSQGRGPDDLQRLVPLLDSNRLEAQCIGAFYLCAEAAIKSLQGKTKVFSDIGAIQSLKRLVSYSTNGTKSALAKRALRLLGEEVPRPILPSVPSWKEAEVQTWLQQIGFSKYCESFREQQVDGDLLLRLTEEELQTDLGMKSGITRKRFFRELTELKTFANYSTCDRSNLADWLGSLDPRFRQYTYGLVSCGLDRSLLHRVSEQQLLEDCGIHLGVHRARILTAAREMLHSPLPCTGGKPSGDTPDVFISYRRNSGSQLASLLKVHLQLHGFSVFIDVEKLEAGKFEDKLIQSVMGARNFVLVLSPGALDKCMQDHDCKDWVHKEIVTALSCGKNIVPIIDGFEWPEPQVLPEDMQAVLTFNGIKWSHEYQEATIEKIIRFLQGRSSRDSSAGSDTSLEGAAPMGPT

SEQ ID NO: 11638 - protein, 107 aa, Homo Sapiens
  misc_feature (1)..(1): Xaa can be any naturally occurring amino acid
XASLLKVHLQLHGFSVFIDVEKLEAGKFEDKLIQSVMGARNFVLVLSPGALDKCMQDHDCKDWVHKEIVTALSCGKNIVPIIDGFEWPEPQVLPEDMQAVLTFNGIK

SEQ ID NO: 11639 - protein, 118 aa, Homo Sapiens
  misc_feature (1)..(1): Xaa can be any naturally occurring amino acid
XLLPQEQQVDGDLLLRLTEEELQTDLGMKSGITRKRFFRELTELKTFANYSTCDRSNLADWLGSLDPRFRQYTYGLVSCGLDRSLLHRVSEQQLLEDCGIHLGVHRARILTAARAITD

SEQ ID NO: 11640 - protein, 257 aa, Homo Sapiens
  misc_feature (1)..(1): Xaa can be any naturally occurring amino acid
XNLADWLGSLDPRFRQYTYGLVSCGLDRSLLHRVSEQQLLEDCGIHLGVHRARILTAARVSDAEGPPSPCCLLPTSEMLHSPLPCTGGKPSGDTPDVFISYRRNSGSQLASLLKVHLQLHGFSVFIDVEKLEAGKFEDKLIQSVMGARNFVLVLSPGALDKCMQDHDCKDWVHKEIVTALSCGKNIVPIIDGFEWPEPQVLPEDMQAVLTFNGIKWSHEYQEATIEKIIRFLQGRSSRDSSAGSDTSLEGAAPMGPT

SEQ ID NO: 11641 - protein, 8 aa, Homo Sapiens
MDHLNEAT

SEQ ID NO: 11642 - protein, 82 aa, Homo Sapiens
MDHLNEATQGKEHSEMSNNVSDPKGPPAKIARLEQNGSPLGRGRLGSTGAKMQGVPLKHSGHLMKTNLRKDIEIVYYEHQFG

SEQ ID NO: 11643 - protein, 71 aa, Homo Sapiens
MDHLNEATQGKEHSEMSNNVSDPKGPPAKIARLEQNGSPLGRGRLGSTGAKMQGVPLKHSGHLMKTNLRKG

SEQ ID NO: 11644 - protein, 116 aa, Homo Sapiens
MDHLNEATQGKEHSEMSNNVSDPKGPPAKIARLEQNGSPLGRGRLGSTGAKMQGVPLKHSGHLMKTNLRKGTMLPVFCVVEHYENAIEYDCKEEHAEFVLVRKDMLFNQLIEMALL

SEQ ID NO: 11645 - protein, 130 aa, Homo Sapiens
MDHLNEATQGKEHSEMSNNVSDPKGPPAKIARLEQNGSPLGRGRLGSTGAKMQGVPLKHSGHLMKTNLRKGTMLPVFCVVEHYENAIEYDCKEEHAEFVLVRKDMLFNQLIEMALLSLGYSHSSAAQAKG

SEQ ID NO: 11646 - protein, 166 aa, Homo Sapiens
MDHLNEATQGKEHSEMSNNVSDPKGPPAKIARLEQNGSPLGRGRLGSTGAKMQGVPLKHSGHLMKTNLRKGTMLPVFCVVEHYENAIEYDCKEEHAEFVLVRKDMLFNQLIEMALLSLGYSHSSAAQAKGLIQVGKWNPVPLSYVTDAPDATVADMLQDVYHVVTL

SEQ ID NO: 11647 - protein, 172 aa, Homo Sapiens
MDHLNEATQGKEHSEMSNNVSDPKGPPAKIARLEQNGSPLGRGRLGSTGAKMQGVPLKHSGHLMKTNLRKGTMLPVFCVVEHYENAIEYDCKEEHAEFVLVRKDMLFNQLIEMALLSLGYSHSSAAQAKGLIQVGKWNPVPLSYVTDAPDATVADMLQDVYHVVTLKIQLHR

SEQ ID NO: 11648 - protein, 224 aa, Homo Sapiens
MDHLNEATQGKEHSEMSNNVSDPKGPPAKIARLEQNGSPLGRGRLGSTGAKMQGVPLKHSGHLMKTNLRKGTMLPVFCVVEHYENAIEYDCKEEHAEFVLVRKDMLFNQLIEMALLSLGYSHSSAAQAKGLIQVGKWNPVPLSYVTDAPDATVADMLQDVYHVVTLKIQLHSCPKLEDLPPEQWSHTTVRNALKDLLKDMNQSSLAKECPLSQSMISSIVNSTY

SEQ ID NO: 11649 - protein, 763 aa, Homo Sapiens
MDHLNEATQGKEHSEMSNNVSDPKGPPAKIARLEQNGSPLGRGRLGSTGAKMQGVPLKHSGHLMKTNLRKGTMLPVFCVVEHYENAIEYDCKEEHAEFVLVRKDMLFNQLIEMALLSLGYSHSSAAQAKGLIQVGKWNPVPLSYVTDAPDATVADMLQDVYHVVTLKIQLHSCPKLEDLPPEQWSHTTVRNALKDLLKDMNQSSLAKECPLSQSMISSIVNSTYYANVSAAKCQEFGRWYKHFKKTKDMMVEMDSLSELSQQGANHVNFGQQPVPGNTAEQPPSPAQLSHGSQPSVRTPLPNLHPGLVSTPISPQLVNQQLVMAQLLNQQYAVNRLLAQQSLNQQYLNHPPPVSRSMNKPLEQQVSTNTEVSSEIYQWVRDELKRAGISQAVFARVAFNRTQGLLSEILRKEEDPKTASQSLLVNLRAMQNFLQLPEAERDRIYQDERERSLNAASAMGPAPLISTPPSRPPQVKTATIATERNGKPENNTMNINASIYDEIQQEMKRAKVSQALFAKVAATKSQGWLCELLRWKEDPSPENRTLWENLSMIRRFLSLPQPERDAIYEQESNAVHHHGDRPPHIIHVPAEQIQQQQQQQQQQQQQQQAPPPPQPQQQPQTGPRLPPRQPTVASPAESDEENRQKTRPRTKISVEALGILQSFIQDVGLYPDEEAIQTLSAQLDLPKYTIIKFFQNQRYYLKHHGKLKDNSGLEVDVAEYKEEELLKDLEESVQDKNTNTLFSVKLEEELSVEGNTDINTDLKD

SEQ ID NO: 11650 - protein, 763 aa, Homo Sapiens; identical to SEQ ID NO: 11649

SEQ ID NO: 11651 - protein, 795 aa, Homo Sapiens
MDHLNEATQGKEHSEMSNNVSDPKGPPAKIARLEQNGSPLGRGRLGSTGAKMQGVPLKHSGHLMKTNLRKGTMLPVFCVVEHYENAIEYDCKEEHAEFVLVRKDMLFNQLIEMALLSLGYSHSSAAQAKGLIQVGKWNPVPLSYVTDAPDATVADMLQDVYHVVTLKIQLHSCPKLEDLPPEQWSHTTVRNALKDLLKDMNQSSLAKECPLSQSMISSIVNSTYYANVSAAKCQEFGRWYKHFKKTKDMMVEMDSLSELSQQGANHVNFGQQPVPGNTAEQPPSPAQLSHGSQPSVRTPLPNLHPGLVSTPISPQLVNQQLVMAQLLNQQYAVNRLLAQQSLNQQYLNHPPPVSRSMNKPLEQQVSTNTEVSSEIYQWVRDELKRAGISQAVFARVAFNRTQGLLSEILRKEEDPKTASQSLLVNLRAMQNFLQLPEAERDRIYQDERERSLNAASAMGPAPLISTPPSRPPQVKTATIATERNGKPENNTMNINASIYDEIQQEMKRAKVSQALFAKVAATKSQGWLCELLRWKEDPSPENRTLWENLSMIRRFLSLPQPERDAIYEQESNAVHHHGDRPPHIIHVPAEQIQSPSPTTLGKGESRGVFLPGLPTPAPWLGAAPQQQQQQQQQQQQQQQAPPPPQPQQQPQTGPRLPPRQPTVASPAESDEENRQKTRPRTKISVEALGILQSFIQDVGLYPDEEAIQTLSAQLDLPKYTIIKFFQNQRYYLKHHGKLKDNSGLEVDVAEYKEEELLKDLEESVQDKNTNTLFSVKLEEELSVEGNTDINTDLKD

SEQ ID NO: 11652 - protein, 138 aa, Homo Sapiens
MLFNQLIEMALLSLGYSHSSAAQAKGLIQVGKWNPVPLSYVTDAPDATVADMLQDVYHVVTLKIQLHSCPKLEDLPPEQWSHTTVRNALKDLLKDMNQSSLAKECPLSQHPEISNMLDNLFINGKINFKKKLPRAPEA

SEQ ID NO: 11653 - protein, 166 aa, Homo Sapiens
MLPVFCVVEHYENAIEYDCKEEHAEFVLVRKDMLFNQLIEMALLSLGYSHSSAAQAKGLIQVGKWNPVPLSYVTDAPDATVADMLQDVYHVVTLKIQLHSCPKLEDLPPEQWSHTTVRNALKDLLKDMNQSSLAKECPLSQSMISSIVNSTYYANVSAAKCQEFGR

SEQ ID NO: 11654 - protein, 41 aa, Homo Sapiens
MGAKSMRSWCLCQICSCGFLSSQPDHIPIPVQAAVLWDPPD

SEQ ID NO: 11655 - protein, 29 aa, Homo Sapiens
MGAKSMRSWCLCQICSCGPGLTREPLPLP

SEQ ID NO: 11656 - protein, 398 aa, Homo Sapiens
MGAKSMRSWCLCQICSCGSDYCPYEIVKQPRHVPEEYKPKQGKIDLGTTYKRDLNSYKVQPVAIVRPLERQVKKGKLDTVPTYKDDYRAWDLHKSELYKPEQTYHPPTVKFGNSTTFQDDFVPQEIKPRQSFKPSSVVKRSTAPFNGITSHRLDYIPHQLELKFERPKEVYKPTDQRFEDLTTHRCDFQGLIGETAKLCRPVHTRVTQNALFEGSTEFRESFQPWEIPPPEVKKVPEYVPPTGSMLLNSTSHLDYVPYQANHVVPIRPVSQKRSNNFPFQGKSIMKEDFPAWESCRQGLIKKQQQIPNPSGKFDGLSTFRSHYVPHELIPTESCKPLNIAFKSSVPFDDVTMYSVEYTPKRQEICPASYPSPPGYIFDNTNSQGHKFFRKIIPAVKAF

SEQ ID NO: 11657 - protein, 30 aa, Homo Sapiens
MYDNVLPPQSLKAKQEIRACHGKMEGITTF

SEQ ID NO: 11658 - protein, 104 aa, Homo Sapiens
MYDNVLPPQSLKAKQEIRACHGKMEGITTFKSDYCPYEIVKQPRHVPEEYKPKQGKIDLGTTYKRDLNSYKVQPVAIVRPLERQVKKGKLDTVPTYKGNLLFHT

SEQ ID NO: 11659 - protein, 149 aa, Homo Sapiens
GWAASDDPIEKVIEGINRGLSNAEREVGKALDGINSGITHAGREVEKVFNGLSNMGSHTGKELDKGVQGLNHGMDKVAHEINHGIGQAGKEAEKLGHGVNNAAGQGNHQSGSSSHQGGATTTPLASGASVNTPFINLPALWRSVANIMP

SEQ ID NO: 11660 - protein, 247 aa, Homo Sapiens
MHLARLVGSCSLLLLLGALSGWAASDDPIEKVIEGINRGLSNAEREVGKALDGINSGITHAGREVEKVFNGLSNMGSHTGKELDKGVQGLNHGMDKVAHEINHGIGQAGKEAEKLGHGVNNAAGQAGKEADKAVQGFHTGVHQAGKEAEKLGQGVNHAADQAGKEVEKLGQGAHHAAGQAGKELQNAHNGVNQASKEANQLLNGNHQSGSSSHQGGATTTPLASGASVNTPFINLPALWRSVANIMP

SEQ ID NO: 11661 - protein, 590 aa, Homo Sapiens
MHLARLVGSCSLLLLLGALSGWAASDDPIEKVIEGINRGLSNAEREVGKALDGINSGITHAGREVEKVFNGLSNMGSHTGKELDKGVQGLNHGMDKVAHEINHGIGQAGKEAEKLGHGVNNAAGQVGKEADKLIHHGVHHGANQAGSEAGKFGQGVDNAAGQAGNEAGRFGQGVHHAAGQAGNEAGRFGQGVHHAAGQAGNEAGRFGQGAHHGLSEGWKETEKFGQGIHHAAGQVGKEAEKFGQGAHHAAGQAGNEAGRFGQGVHHGLSEGWKETEKFGQGVHHTAGQVGKEAEKFGQGAHHAAGQAGNEAGRFGQGAHHAAGQAGNEAGRFGQGVHHGLSEGWKETEKFGQGVHHAASQFGKETEKLGHGVHHGVNEAWKEAEKFGQGVHHAASQVGKEEDRVVQGLHHGVSQAGREAGQFGHDIHHTAGQAGKEGDIAVHGVQPGVHEAGKEAGQFGQGVHHTLEQAGKEADKAVQGFHTGVHQAGKEAEKLGQGVNHAADQAGKEVEKLGQGAHHAAGQAGKELQNAHNGVNQASKEANQLLNGNHQSGSSSHQGGATTTPLASGASVNTPFINLPALWRSVANIMP

SEQ ID NO: 11662 - protein, 264 aa, Homo Sapiens
MRTLWMALCALSRLWPGAQAGCAEAGRCCPGRDPACFARGWRLDRVYGTCFCDQACRFTGDCCFDYDRACPARPCFVGEWSPWSGCADQCKPTTRVRRRSVQQEPQNGGAPCPPLEERAGCLEYSTPQGQDCGHTYVPAFITTSAFNKERTRQATSPHWSTHTEDAGYCMEFKTESLTPHCALENWPLTRWMQYLREGYTVCVDCQPPAMNSVSLRCSGDGLDSDGNQTLHWQAIGNPRCQGTWKKVRRVDQCSCPAVHSFIFI

SEQ ID NO: 11663 - protein, 49 aa, Homo Sapiens
MGLGLLLPLLLLWTRGTQGSELDPKGQHVCVASRWVSWESDACGQQPLC

SEQ ID NO: 11664 - protein, 830 aa, Homo Sapiens
MGLGLLLPLLLLWTRGTQGSELDPKGQHVCVASSPSAELQCCAGWRQKDQECTIPICEGPDACQKDEVCVKPGLCRCKPGFFGAHCSSRCPGQYWGPDCRESCPCHPHGQCEPATGACQCQADRWGARCEFPCACGPHGRCDPATGVCHCEPGWWSSTCRRPCQCNTAAARCEQATGACVCKPGWWGRRCSFRCNCHGSPCEQDSGRCACRPGWWGPECQQQCECVRGRCSAASGECTCPPGFRGARCELPCPAGSHGVQCAHSCGRCKHNEPCSPDTGSCESCEPGWNGTQCQQPCLPGTFGESCEQQCPHCRHGEACEPDTGHCQRCDPGWLGPRCEDPCPTGTFGEDCGSTCPTCVQGSCDTVTGDCVCSAGYWGPSCNASCPAGFHGNNCSVPCECPEGLCHPVSGSCQPGSGSRDTALIAGSLVPLLLLFLGLACCACCCWAPRSDLKDRPARDGATVSRMKLQVWGTLTSLGSTLPCRSLSSHKLPWVTVSHHDPEVPFNHSFIEPPSAGWATDDSFSSDPESGEADEVPAYCVPPQEGMVPVAQAGSSEASLAAGAFPPPEDASTPFAIPRTSSLARAKRPSVSFAEGTKFAPQSRRSSGELSSPLRKPKRLSRGAQSGPEGREAEESTGPEEAEAPESFPAAASPGDSATGHRRPPLGGRTVAEHVEAIEGSVQESSGPVTTIYMLAGKPRGSEGPVRSVFRHFGSFQKGQAEAKVKRAIPKPPRQALNRKKGSPGLASGSVGQSPNSAPKAGLPGATGPMAVRPEEAVRGLGAGTESSRRAQEPVSGCGSPEQDPQKQAEEERQEEPEYENVVPISRPPEP

SEQ ID NO: 11665 - protein, 744 aa, Homo Sapiens
MGLGLLLPLLLLWTRGTQGSELDPKGQHVCVASSPSAELQCCAGWRQKDQECTIPICEGPDACQKDEVCVKPGLCRCKPGFFGAHCSSRCPGQYWGPDCRESCPCHPHGQCEPATGACQCQADRWGARCEFPCACGPHGRCDPATGVCHCEPGWWSSTCRRPCQCNTAAARCEQATGACVCKPGWWGRRCSFRCNCHGSPCEQDSGRCACRPGWWGPECQQQCECVRGRCSAASGECTCPPGFRGARCELPCPAGSHGVQCAHSCGRCKHNEPCSPDTGSCESCEPGWNGTQCQQPCLPGTFGESCEQQCPHCRHGEACEPDTGHCQPGSGSRDTALIAGSLVPLLLLFLGLACCACCCWAPRSDLKDRPARDGATVSRMKLQVWGTLTSLGSTLPCRSLSSHKLPWVTVSHHDPEVPFNHSFIEPPSAGWATDDSFSSDPESGEADEVPAYCVPPQEGMVPVAQAGSSEASLAAGAFPPPEDASTPFAIPRTSSLARAKRPSVSFAEGTKFAPQSRRSSGELSSPLRKPKRLSRGAQSGPEGREAEESTGPEEAEAPESFPAAASPGDSATGHRRPPLGGRTVAEHVEAIEGSVQESSGPVTTIYMLAGKPRGSEGPVRSVFRHFGSFQKGQAEAKVKRAIPKPPRQALNRKKGSPGLASGSVGQSPNSAPKAGLPGATGPMAVRPEEAVRGLGAGTESSRRAQEPVSGCGSPEQDPQKQAEEERQEEPEYENVVPISRPPEP

SEQ ID NO: 11666 - protein, 342 aa, Homo Sapiens
MGLGLLLPLLLLWTRGTQGSELDPKGQHVCVASSPSAELQCCAGWRQKDQECTIPICEGPDACQKDEVCVKPGLCRCKPGFFGAHCSSRCPGQYWGPDCRESCPCHPHGQCEPATGACQCQADRWGARCEFPCACGPHGRCDPATGVCHCEPGWWSSTCRRPCQCNTAAARCEQATGACVCKPGWWGRRCSFRCNCHGSPCEQDSGRCACRPGWWGPECQQQCECVRGRCSAASGECTCPPGFRGARCELPCPAGSHGVQCAHSCGRCKHNEPCSPDTGSCESCEPGWNGTQCQQPCLPGTFGESCEQQCPHCRHGEACEPDTGHCQRCDPGWLGPRGPVIL

SEQ ID NO: 11667 - protein, 569 aa, Homo Sapiens
MGLGLLLPLLLLWTRGTQGSELDPKGQHVCVASSPSAELQCCAGWRQKDQECTIPICEGPDACQKDEVCVKPGLCRCKPGFFGAHCSSRCPGQYWGPDCRESCPCHPHGQCEPATGACQCQADRWGARCEFPCACGPHGRCDPATGVCHCEPGWWSSTCRRPCQCNTAAARCEQATGACVCKPGWWGRRCSFRCNCHGSPCEQDSGRCACRPGWWGPECQQQCECVRGRCSAASGECTCPPGFRGARCELPCPAGSHGVQCAHSCGRCKHNEPCSPDTGSCESCEPGWNGTQCQQPCLPGTFGESCEQQCPHCRHGEACEPDTGHCQRCDPGWLGPRCEDPCPTGTFGEDCGSTCPTCVQGSCDTVTGDCVCSAGYWGPSCNASCPAGFHGNNCSVPCECPEGLCHPVSGSCQPGSGSRDTALIAGSLVPLLLLFLGLACCACCCWAPRSDLKDRPARDGATVSRMKLQVWGTLTSLGSTLPCRSLSSHKLPWVTASSSRPLPAGPLMTPSHPILSLERQMRFLPTVCHPKKGWSLWPRQGRQRPAWLQVLSRPLRTPPRHSPSRAPPA

SEQ ID NO: 11668 - protein, 125 aa, Homo Sapiens
MAEAKTHWLGAALSLIPLIFLISGAEAASFQRNQLLQKEPDLRLENVQKFPSPEMIRALEYIENLRQQAHKEESSPDYNPYQGVSVPLQQKENGDESHLPERDSLSEEDWMRIILEALRQAENEP

SEQ ID NO: 11669 - protein, 144 aa, Homo Sapiens
MAEAKTHWLGAALSLIPLIFLISGAEAASFQRNQLLQKEPDLRLENVQKFPSPEMIRALEYIENLRQQAHKEESSPDYNPYQGVSVPLQQKENGDESHLPERDSLSEEDWMRIILEALRQAENEPQSAPKENKPYALNSEKNFP

SEQ ID NO: 11670 - protein, 617 aa, Homo Sapiens
MAEAKTHWLGAALSLIPLIFLISGAEAASFQRNQLLQKEPDLRLENVQKFPSPEMIRALEYIENLRQQAHKEESSPDYNPYQGVSVPLQQKENGDESHLPERDSLSEEDWMRIILEALRQAENEPQSAPKENKPYALNSEKNFPMDMSDDYETQQWPERKLKHMQFPPMYEENSRDNPFKRTNEIVEEQYTPQSLATLESVFQELGKLTGPNNQKRERMDEEQKLYTDDEDDIYKANNIAYEDVVGGEDWNPVEEKIESQTQEEVRDSKENIEKNEQINDEMKRSGQLGIQEEDLRKESKDQLSDDVSKVIAYLKRLVNAAGSGRLQNGQNGERATRLFEKPLDSQSIYQLIEISRNLQIPPEDLIEMLKTGEKPNGSVEPERELDLPVDLDDISEADLDHPDLFQNRMLSKSGYPKTPGRAGTEALPDGLSVEDILNLLGMESAANQKTSYFPNPYNQEKVLPRLPYGAGRSRSNQLPKAAWIPHVENRQMAYENLNDKDQELGEYLARMLVKYPEIINSNQVKRVPGQGSSEDDLQEEEQIEQAIKEHLNQGSSQETDKLAPVSKRFPVGPPKNDDTPNRQYWDEDLLMKVLEYLNQEKAEKGREHIAKRAMENM

SEQ ID NO: 11671 - protein, 57 aa, Homo Sapiens
MAAIQDGLAKGENDETVSNTLTLTNGLERRTKTYSEDNFEELQYFPNFYALLKSIDS

SEQ ID NO: 11672 - protein, 236 aa, Homo Sapiens
MAAIQDGLAKGENDETVSNTLTLTNGLERRTKTYSEDNFEELQYFPNFYALLKSIDSEKEAKEKETLITIMKTLIDFVKMMVKYGTISPEEGVSYLENLDEMIALQTKNKLEKNATDNISKLFPAPSEKSHEETDSTKEEAAKMEKEYGSLKDSTKDDNSNPGGKTDEPKGKTEAYLEAIRKNIEWLKKHDKKGNKEDYDLSKMRDFINKQADAYVEKGILDKEEAEAIKRIYSSL

SEQ ID NO: 11673 - protein, 468 aa, Homo Sapiens
MGFLGTGTWILVLVLPIQAFPKPGGSQDKSLHNRELSAERPLNEQIAEAEEDKIKKTYPPENKPGQSNYSFVDNLNLLKAITEKEKIEKERQSIRSSPLDNKLNVEDVDSTKNRKLIDDYDSTKSGLDHKFQDDPDGLHQLDGTPLTAEDIVHKIAARIYEENDRAVFDKIVSKLLNLGLITESQAHTLEDEVAEVLQKLISKEANNYEEDPNKPTSWTENQAGKIPEKVTPMAAIQDGLAKGENDETVSNTLTLTNGLERRTKTYSEDNFEELQYFPNFYALLKSIDSEKEAKEKETLITIMKTLIDFVKMMVKYGTISPEEGVSYLENLDEMIALQTKNKLEKNATDNISKLFPAPSEKSHEETDSTKEEAAKMEKEYGSLKDSTKDDNSNPGGKTDEPKGKTEAYLEAIRKNIEWLKKHDKKGNKEDYDLSKMRDFINKQADAYVEKGILDKEEAEAIKRIYSSL

SEQ ID NO: 11674 - protein, 212 aa, Homo Sapiens
MVSRMVSTMLSGLLFWLASGWTPAFAYSPRTPDRVSEADIQRLLHGVMEQLGIARPRVEYPAHQAMNLVGPQSIEGGAHEGLQHLGPFGNIPNIVAELTGDNIPKDFSEDQGYPDPPNPCPVGKTADDGCLENTPDTAEFSREFQLHQHLFDPEHDYPGLGKWNKKLLYEKMKGGERRKRRSVNPYLQGQRLDNVVAKKSVPHFSDEDKDPE

SEQ ID NO: 11675 - protein, 194 aa, Homo Sapiens
MVSRMVSTMLSGLLFWLASGWTPAFAYSPRTPDRVSEADIQRLLHGVMEQLGIARPRVEYPAHQAMNLVGPQSIEGGAHEGLQHLGPFGNIPNIVAELTGDNIPKDFSEDQGYPDPPNPCPVGKTADDGCLENTPDTAEFSREFQLHQHLFDPEHDYPGLGKWSVNPYLQGQRLDNVVAKKSVPHFSDEDKDPE

SEQ ID NO: 11676 - protein, 211 aa, Homo Sapiens
MVSRMVSTMLSGLLFWLASGWTPAFAYSPRTPDRVSEADIQRLLHGVMEQLGIARPRVEYPAHQAMNLVGPQSIEGGAHEGLQHLGPFGNIPNIVAELTGDNIPKDFSEDQGYPDPPNPCPVGKTDDGCLENTPDTAEFSREFQLHQHLFDPEHDYPGLGKWNKKLLYEKMKGGERRKRRSVNPYLQGQRLDNVVAKKSVPHFSDEDKDPE

SEQ ID NO: 11677 - protein, 193 aa, Homo Sapiens
MVSRMVSTMLSGLLFWLASGWTPAFAYSPRTPDRVSEADIQRLLHGVMEQLGIARPRVEYPAHQAMNLVGPQSIEGGAHEGLQHLGPFGNIPNIVAELTGDNIPKDFSEDQGYPDPPNPCPVGKTDDGCLENTPDTAEFSREFQLHQHLFDPEHDYPGLGKWSVNPYLQGQRLDNVVAKKSVPHFSDEDKDPE

SEQ ID NO: 11678 - protein, 216 aa, Homo Sapiens
SGLLFWLASGWTPAFAYSPRTPDRVSEADIQRLLHGVMEQLGIARPRVEYPAHQAMNLVGPQSIEGGAHEGLQHLGPFGNIPNIVAELTGDNIPKDFSEDQGYPDPPNPCPVGKTADDGCLENTPDTAEFSREFQLHQHLFDPEHDYPGLGKWNKKLLYEKMKGGERRKRRVTRAWLDCCGDAWSFLSGAVNRLKPSLVGKSQNPPLCSPEKHWSM

SEQ ID NO: 11679 - protein, 56 aa, Homo Sapiens
MDTPSSYEAAMELFSPDQDMREAGAQLKKLVDTLPQKPRESIIKLMEKIAQSSLCN

SEQ ID NO: 11680 - protein, 91 aa, Homo Sapiens
MKLAVTLTLVTLALCCSSASAEICPSFQRVIETLLMDTPSSYEAAMELFSPDQDMREAGAQLKKLVDTLPQKPRESIIKLMEKIAQSSLCN

SEQ ID NO: 11681 - protein, 95 aa, Homo Sapiens
MKGSRALLLVALTLFCICRMATGEDNDEFFMDFLQTLLVGTPEELYEGTLGKYNVNEDAKAAMTELKSCIDGLQPMHKAELVKLLVQVLGSQDGA

SEQ ID NO: 11682 - protein, 95 aa, Homo Sapiens
MKGSRALLLVALTLFCICRMATGEDNDEFFMDFLQTLLVGTPEELYEGTLGKYNVNEDAKAAMTELKSCRDGLQPMHKAELVKLLVQVLGSQDGA

SEQ ID NO: 11683 - protein, 90 aa, Homo Sapiens
MRLSVCLLLLTLALCCYRANAVVCQALGSEITGFLLAGKPVFKFQLAKFKAPLEAVAAKMEVKKCVDTMAYEKRVLITKTLGKIAEKCDR

SEQ ID NO: 11684 - protein, 90 aa, Homo Sapiens
MKLSVCLLLVTLALCCYQANAEFCPALVSELLDFFFISEPLFKLSLAKFDAPPEAVAAKLGVKRCTDQMSLQKRSLIAEVLVKILKKCSV

SEQ ID NO: 11685 - protein, 83 aa, Homo Sapiens
MRLSVCLLMVSLALCCYQAHALVCPAVASEITVFLFLSDAAVNLQVAKLNPPPEALAAKLEVKHCTDQISFKKRLSLKKSWWK

SEQ ID NO: 11686 - protein, 95 aa, Homo Sapiens
MKLLMVLMLAALLLHCYADSGCKLLEDMVEKTINSDISIPEYKELLQEFIDSDAAAEAMGKFKQCFLNQSHRTLKNFGLMMHTVYDSIWCNMKSN

SEQ ID NO: 11687 - protein, 93 aa, Homo Sapiens
MKLLMVLMLAALSQHCYAGSGCPLLENVISKTINPQVSKTEYKELLQEFIDDNATTNAIDELKECFLNQTDETLSNVEVFMQLIYDSSLCDLF

SEQ ID NO: 11688 - protein, 120 aa, Homo Sapiens
MKLLMVLMLAALSQHCYAGSGCPLLENVISKTINPQVSKTEYKELLQEFIDDNATTNAIDELKECFLNQTDETLSNVEVFMVISFSSYKLFKSPDQGQVGSSFLTDNAKATSEQAFSYIG

SEQ ID NO: 11689 - protein, 96 aa, Homo Sapiens
MRVTSATCALLLALICSVQLGDACLDIDKLLANVVFDVSQDLLKEELARYNPSPLTEESFLNVQQCFANVSVTERFAHSVVIKKILQSNDCIEAAF

SEQ ID NO: 11690 - protein, 96 aa, Homo Sapiens; identical to SEQ ID NO: 11689

SEQ ID NO: 11691 - protein, 104 aa, Homo Sapiens
MKLAALLGLCVALSCSSAAAFLVGSAKPVAQPVAALESAAEAGAGTLANPLGTLNPLKLLLSSLGIPVNHLIEGSQKCVAELGPQAVGAVKALKALLGALTVFG

SEQ ID NO: 11692 - protein, 48 aa, Homo Sapiens
MDPLKLLLKTLGISVEHLVEGLRKCVNELGPEASEAVKKLLEALSHLV

SEQ ID NO: 11693 - protein, 93 aa, Homo Sapiens
MKLVTIFLLVTISLCSYSATAFLINKVPLPVDKLAPLPLDNILPFMDPLKLLLKTLGISVEHLVEGLRKCVNELGPEASEAVKKLLEALSHLV

SEQ ID NO: 11694 - protein, 218 aa, Homo Sapiens
MGRLLALVVGAALVSSACGGCVEVDSETEAVYGMTFKILCISCKRRSETNAETFTEWTFRQKGTEEFVKILRYENEVLQLEEDERFEGRVVWNGSRGTKDLQDLSIFITNVTYNHSGDYECHVYRLLFFENYEHNTSVVKKIHIEVVDKANRDMASIVSEIMMYVLIVVLTIWLVAEMIYCYKKIAAATETAAQENASEYLAITSESKENCTGVQVAE

SEQ ID NO: 11695 - protein, 218 aa, Homo Sapiens; identical to SEQ ID NO: 11694

SEQ ID NO: 11696 - protein, 268 aa, Homo Sapiens
MGRLLALVVGAALVSSACGGCVEVDSETEAVYGMTFKILCISCKRRSETNAETFTEWTFRQKGTEEFVKILRYENEVLQLEEDERFEGRVVWNGSRGTKDLQDLSIFITNVTYNHSGDYECHVYRLLFFENYEHNTSVVKKIHIEVVDKGESGAACPFTVTHRRARWRDRWQAVDRTGWLCAWPANRPQQRAEGEGSSPSCPLQLWPLFLSSPRRGQSMPVPHRRSGYRTQLCHLCCMTSGRCLLSLSQRVVLGLPGIIIRCVSRGVV

SEQ ID NO: 11697 - protein, 147 aa, Homo Sapiens
MGRLLALVVGAALVSSACGGCVEVDSETEAVYGMTFKILCISCKRRSETNAETFTEWTFRQKGTEEFVKKIHIEVVDKANRDMASIVSEIMMYVLIVVLTIWLVAEMIYCYKKIAAATETAAQENASEYLAITSESKENCTGVQVAE

SEQ ID NO: 11698 - protein, 185 aa, Homo Sapiens
MTFKILCISCKRRSETNAETFTEWTFRQKGTEEFVKILRYENEVLQLEEDERFEGRVVWNGSRGTKDLQDLSIFITNVTYNHSGDYECHVYRLLFFENYEHNTSVVKKIHIEVVDKANRDMASIVSEIMMYVLIVVLTIWLVAEMIYCYKKIAAATETAAQENASEYLAITSESKENCTGVQVAE

SEQ ID NO: 11699 - protein, 235 aa, Homo Sapiens
MTFKILCISCKRRSETNAETFTEWTFRQKGTEEFVKILRYENEVLQLEEDERFEGRVVWNGSRGTKDLQDLSIFITNVTYNHSGDYECHVYRLLFFENYEHNTSVVKKIHIEVVDKGESGAACPFTVTHRRARWRDRWQAVDRTGWLCAWPANRPQQRAEGEGSSPSCPLQLWPLFLSSPRRGQSMPVPHRRSGYRTQLCHLCCMTSGRCLLSLSQRVVLGLPGIIIRCVSRGVV

SEQ ID NO: 11700 - protein, 93 aa, Homo Sapiens
MPAFNRLFPLASLVLIYWVSVCFPVCVEVPSETEAVQGNPMKLRCISCMKREEVEATTVVEWFYRPEGGKDFLIYEYRNGHQEVESPFQGRLQ

SEQ ID NO: 11701 - protein, 141 aa, Homo Sapiens
MPAFNRLFPLASLVLIYWVSVCFPVCVEVPSETEAVQGNPMKLRCISCMKREEVEATTVVEWFYRPEGGKDFLIYEYRNGHQEVESPFQGRLQWNGSKDLQDVSITVLNVTLNDSGLYTCNVSREFEFEAHRPFVKTTRLI

SEQ ID NO: 11702 - protein, 215 aa, Homo Sapiens
MPAFNRLFPLASLVLIYWVSVCFPVCVEVPSETEAVQGNPMKLRCISCMKREEVEATTVVEWFYRPEGGKDFLIYEYRNGHQEVESPFQGRLQWNGSKDLQDVSITVLNVTLNDSGLYTCNVSREFEFEAHRPFVKTTRLIPLRVTEEAGEDFTSVVSEIMMYILLVFLTLWLLIEMIYCYRKVSKAEEAAQENASDYLAIPSENKENSAVPVEE

SEQ ID NO: 11703 - protein, 215 aa, Homo Sapiens; identical to SEQ ID NO: 11702

SEQ ID NO: 11704 - protein, 215 aa, Homo Sapiens; identical to SEQ ID NO: 11702

SEQ ID NO: 11705 - protein, 147 aa, Homo Sapiens
MELALRRSPVPRWLLLLPLLLGLNAGAVIDWPTEEGKEVWDYVTVRKDAYMFWWLYYATNSCKNFSELPLVMWLQGGPGGSSTGFGNFEEIGPFSEGPSSATLRGLPWVIPGSPLLIRCSPGDLTCTACLFSKTKVWQRCLRLQSKY

SEQ ID NO: 11706 - protein, 147 aa, Homo Sapiens; identical to SEQ ID NO: 11705

SEQ ID NO: 11707 - protein, 452 aa, Homo Sapiens
MELALRRSPVPRWLLLLPLLLGLNAGAVIDWPTEEGKEVWDYVTVRKDAYMFWWLYYATNSCKNFSELPLVMWLQGGPGGSSTGFGNFEEIGPLDSDLKPRKTTWLQAASLLFVDNPVGTGFSYVNGSGAYAKDLAMVASDMMVLLKTFFSCHKEFQTVPFYIFSESYGGKMAAGIGLELYKAIQRGTIKCNFAGVALGDSWISPVDSVLSWGPYLYSMSLLEDKGLAEVSKVAEQVLNAVNKGLYREATELWGKAEMIIEQNTDGVNFYNILTKSTPTSTMESSLEFTQSHLVCLCQRHVRHLQRDALSQLMNGPIRKKLKIIPEDQSWGGQATNVFVNMEEDFMKPVISIVDELLEAGINVTVYNGQLDLIVDTMGQEAWVRKLKWPELPKFSQLKWKALYSDPKSLETSAFVKSYKNLAFYWILKAGHMVPSDQGDMALKMMRLVTQQE

SEQ ID NO: 11708 - protein, 296 aa, Homo Sapiens
MELALRRSPVPRWLLLLPLLLGLNAGAVIDWPTEEGKEVWDYVTVRKDAYMFWWLYYATNSCKNFSELPLVMWLQGGPGGSSTGFGNFEEIGPLDSDLKPRKTTWLQAASLLFVDNPVGTGFSYVNGSGAYAKDLAMVASDMMVLLKTFFSCHKEFQTVPFYIFSESYGGKMAAGIGLELYKAIQRGTIKCNFAGVALGDSWISPVDSVLSWGPYLYSMSLLEDKGLAEVSKVAEQVLNAVNKGLYREATELWGKAEMIIEQNTDGVNFYNILTKSTPTSTMESSLEFTQSHLVWF

SEQ ID NO: 11709 - protein, 176 aa, Homo Sapiens
MELALRRSPVPRWLLLLPLLLGLNAGAVIDWPTEEGKEVWDYVTVRKDAYMFWWLYYATNSCKNFSELPLVMWLQLQAASLLFVDNPVGTGFSYVNGSGAYAKDLAMVASDMMVLLKTFFSCHKEFQTVPFYIFSESYGGKMAAGIGLELYKAIQRGTIKCNFAGVALGDSWISPV

SEQ ID NO: 11710 - protein, 69 aa, Homo Sapiens
MELALRRSPVPRWLLLLPLLLGLNAGSMGLCDGPQGCLHVLVALLCHQLLQELLRTAPGHVASGRSRRF

SEQ ID NO: 11711 - protein, 95 aa, Homo Sapiens
MVASDMMVLLKTFFSCHKEFQTVPFYIFSESYGGKMAAGIGLELYKAIQRGTIKCNFAGVALGDSWISPVDSVLSWGPYLYSMSLLEDKGLAEVS

SEQ ID NO: 11712 - protein, 135 aa, Homo Sapiens
  misc_feature (1)..(1): Xaa can be any naturally occurring amino acid
XTMESSLEFTQSHLGQATNVFVNMEEDFMKPVISIVDELLEAGINVTVYNGQLDLIVDTMGQEAWVRKLKWPELPKFSQLKWKALYSDPKSLETSAFVKSYKNLAFYWILKAGHMVPSDQGDMALKMMRLVTQQE

SEQ ID NO: 11713 - protein, 92 aa, Homo Sapiens
MKLMVLVFTIGLTLLLGVQAMPANRLSCYRKILKDHNCHNLPEGVADLTQIDVNVQDHFWDGKGCEMICYCNFSELLCCPKCHHIFILLRNL

SEQ ID NO: 11714 - protein, 98 aa, Homo Sapiens
MKLMVLVFTIGLTLLLGVQAMPANRLSCYRKILKDHNCHNLPEGVADLTQIDVNVQDHFWDGKGCEMICYCNFSELLCCPKDVFFGPKISFVIPCNNQ

SEQ ID NO: 11715 - protein, 121 aa, Homo Sapiens
MAPRPLLLLLLLLGGSAARPAPPRARRHSDGTFTSELSRLREGARLQRLLQGLVGKRSEQDAENSMAWTRLSAGLLCPSGSNMPILQAWMPLDGTWSPWLPPGPMVSEPAGAAAEGTLRPR

SEQ ID NO: 11716 - protein, 347 aa, Homo Sapiens
MGAAAVRWHLCVLLALGTRGRLAGGSGLPGSVDVDECSEGTDDCHIDAICQNTPKSYKCLCKPGYKGEGKQCEDIDECENDYYNGGCVHECINIPGNYRCTCFDGFMLAHDGHNCLDVDECQDNNGGCQQICVNAMGSYECQCHSGFFLSDNQHTCIHRSNEGMNCMNKDHGCAHICRETPKGGVACDCRPGFDLAQNQKDCTLTCNYGNGGCQHSCEDTDTGPTCGCHQKYALHSDGRTCIEKDEAAIERSQFNATSVADVDKRVKRRLLMETCAVNNGGCDRTCKDTATGVRCSCPVGFTLQPDGKTCKGQHVELCGCPCLYWPGQEPPCACIAGPRAGLNGGHV

SEQ ID NO: 11717 - protein, 988 aa, Homo Sapiens
MGAAAVRWHLCVLLALGTRGRLAGGSGLPGSVDVDECSEGTDDCHIDAICQNTPKSYKCLCKPGYKGEGKQCEDIDECENDYYNGGCVHECINIPGNYRCTCFDGFMLAHDGHNCLDVDECQDNNGGCQQICVNAMGSYECQCHSGFFLSDNQHTCIHRSNEGMNCMNKDHGCAHICRETPKGGVACDCRPGFDLAQNQKDCTLTCNYGNGGCQHSCEDTDTGPTCGCHQKYALHSDGRTCIETCAVNNGGCDRTCKDTATGVRCSCPVGFTLQPDGKTCKDINECLVNNGGCDHFCRNTVGSFECGCRKGYKLLTDERTCQDIDECSFERTCDHICINSPGSFQCLCHRGYILYGTTHCGDVDECSMSNGSCDQGCVNTKGSYECVCPPGRRLHWNGKDCVETGKCLSRAKTSPRAQLSCSKAGGVESCFLSCPAHTLFVPDSENSYVLSCGVPGPQGKALQKRNGTSSGLGPSCSDAPTTPIKQKARFKIRDAKCHLRPHSQARAKETARQPLLDHCHVTFVTLKCDSSKKRRRGRKSPSKEVSHITAEFEIETKMEEASDTCEADCLRKRAEQSLQAAIKTLRKSIGRQQFYVQVSGTEYEVAQRPAKALEGQGACGAGQVLQDSKCVACGPGTHFGGELGQCVSCMPGTYQDMEGQLSCTPCPSSDGLGLPGARNVSECGGQCSPGFFSADGFKPCQACPVGTYQPEPGRTGCFPCGGGLLTKHEGTTSFQDCEAKVHCSPGHHYNTTTHRCIRCPVGTYQPEFGQNHCITCPGNTSTDFDGSTNVTHCKNQHCGGELGDYTGYIESPNYPGDYPANAECVWHIAPPPKRRILIVVPEIFLPIEDECGDVLVMRKSASPTSITTYETCQTYERPIAFTSRSRKLWIQFKSNEGNSGKGFQVPYVTYDEDYQQLIEDIVRDGRLYASENHQEILKDKKLIKALFDVLAHPQNYFKYTAQESKEMFPRSFIKLLRSKVSRFLRPYK

SEQ ID NO: 11718 - protein, 363 aa, Homo Sapiens [sequence omitted]

SEQ ID NO: 11719 - protein, 175 aa, Homo Sapiens
  misc_feature (1)..(1): Xaa can be any naturally occurring amino acid
XRETPKGGVACDCRPGFDLAQNQKDCTLTCNYGNGGCQHSCEDTDTGPTCGCHQKYALHSDGRTCIEKDEAAIERSQFNATSVADVDKRVKRRLLMETCAVNNGGCDRTCKDTATGVRCSCPVGFTLQPDGKTCKDINECLVNNGGCDHFCRNTVGSFECGCRKGYKLLTDERTC

SEQ ID NO: 11720 - protein, 999 aa, Homo Sapiens
MGVAGRNRPGAAWAVLLLLLLLPPLLLLAGAVPPGRGRAAGPQEDVDECAQGLDDCHADALCQNTPTSYKCSCKPGYQGEGRQCEDIDECGNELNGGCVHDCLNIPGNYRCTCFDGFMLAHDGHNCLDVDECLENNGGCQHTCVNVMGSYECCCKEGFFLSDNQHTCIHRSEEGLSCMNKDHGCSHICKEAPRGSVACECRPGFELAKNQRDCILTCNHGNGGCQHSCDDTADGPECSCHPQYKMHTDGRSCLEREDTVLEVTESNTTSVVDGDKRVKRRLLMETCAVNNGGCDRTCKDTSTGVHCSCPVGFTLQLDGKTCKDIDECQTRNGGCDHFCKNIVGSFDCGCKKGFKLLTDEKSCQDVDECSLDRTCDHSCINHPGTFACACNRGYTLYGFTHCGDTNECSINNGGCQQVCVNTVGSYECQCHPGYKLHWNKKDCVEVKGLLPTSVSPRVSLHCGKSGGGDGCFLRCHSGIHLSSDVTTIRTSVTFKLNEGKCSLKNAELFPEGLRPALPEKHSSVKESFRYVNLTCSSGKQVPGAPGRPSTPKEMFITVEFELETNQKEVTASCDLSCIVKRTEKRLRKAIRTLRKAVHREQFHLQLSGMNLDVAKKPPRTSERQAESCGVGQGHAENQCVSCRAGTYYDGARERCILCPNGTFQNEEGQMTCEPCPRPGNSGALKTPEAWNMSECGGLCQPGEYSADGFAPCQLCALGTFQPEAGRTSCFPCGGGLATKHQGATSFQDCETRVQCSPGHFYNTTTHRCIRCPVGTYQPEFGKNNCVSCPGNTTTDFDGSTNITQCKNRRCGGELGDFTGYIESPNYPGNYPANTECTWTINPPPKRRILIVVPEIFLPIEDDCGDYLVMRKTSSSNSVTTYETCQTYERPIAFTSRSKKLWIQFKSNEGNSARGFQVPYVTYDEDYQELIEDIVRDGRLYASENHQEILKDKKLIKALFDVLAHPQNYFKYTAQESREMFPRSFIRLLRSKVSRFLRPYK

SEQ ID NO: 11721 - protein, 807 aa, Homo Sapiens
MGVAGRNRPGAAWAVLLLLLLLPPLLLLAGAVPPGRGRAAGPQEDVDECAQGLDDCHADALCQNTPTSYKCSCKPGYQGEGRQCEDIDECGNELNGGCVHDCLNIPGNYRCTCFDGFMLAHDGHNCLDVDECLENNGGCQHTCVNVMGSYECCCKEGFFLSDNQHTCIHRSEEGLSCMNKDHGCSHICKEAPRGSVACECRPGFELAKNQRDCILTCNHGNGGCQHSCDDTADGPECSCHPQYKMHTDGRSCLEREDTVLEVTESNTTSVVDGDKRVKRRLLMETCAVNNGGCDRTCKDTSTGVHCSCPVGFTLQLDGKTCKDIDECQTRNGGCDHFCKNIVGSFDCGCKKGFKLLTDEKSCQDVDECSLDRTCDHSCINHPGTFACACNRGYTLYGFTHCGDTNECSINNGGCQQVCVNTVGSYECQCHPGYKLHWNKKDCVASCDLSCIVKRTEKRLRKAIRTLRKAVHREQFHLQLSGMNLDVAKKPPRTSERQAESCGVGQGHAENQCVSCRAGTYYDGARERCILCPNGTFQNEEGQMTCEPCPRPGNSGALKTPEAWNMSECGGLCQPGEYSADGFAPCQLCALGTFQPEAGRTSCFPCGGGLATKHQGATSFQDCETRVQCSPGHFYNTTTHRCIRCPVGTYQPEFGKNNCVSCPGNTTTDFDGSTNITQCKTSSNSVTTYETCQTYERPIAFTSRSKKLWIQFKSNEGNSARGFQVPYVTYDEDYQELIEDIVRDGRLYASENHQEILKDKKLIKALFDVLAHPQNYFKYTAQESREMFPRSFIRLLRSKVSRFLRPYK

SEQ ID NO: 11722 - protein, 971 aa, Homo Sapiens
MGVAGRNRPGAAWAVLLLLLLLPPLLLLAGAVPPGRGRAAGPQEDVDECAQGLDDCHADALCQNTPTSYKCSCKPGYQGEGRQCEDIDECGNELNGGCVHDCLNIPGNYRCTCFDGFMLAHDGHNCLDVDECLENNGGCQHTCVNVMGSYECCCKEGFFLSDNQHTCIHRSEEGLSCMNKDHGCSHICKEAPRGSVACECRPGFELAKNQRDCILTCNHGNGGCQHSCDDTADGPECSCHPQYKMHTDGRSCLEREDTVLEVTESNTTSVVDGDKRVKRRLLMETCAVNNGGCDRTCKDTSTGVHCSCPVGFTLQLDGKTCKDIDECQTRNGGCDHFCKNIVGSFDCGCKKGFKLLTDEKSCQDVDECSLDRTCDHSCINHPGTFACACNRGYTLYGFTHCGDTNECSINNGGCQQVCVNTVGSYECQCHPGYKLHWNKKDCVEVKGLLPTSVSPRVSLHCGKSGGGDGCFLRCHSGIHLSSGLQGAYSVTCGSSSPLRNKQQKSNDSAFGDVTTIRTSVTFKLNEGKCSLKNAELFPEGLRPALPEKHSSVKESFRYVNLTCSSGKQVPGAPGRPSTPKEMFITVEFELETNQKEVTASCDLSCIVKRTEKRLRKAIRTLRKAVHREQFHLQLSGMNLDVAKKPPRTSERQAESCGVGQGHAENQCGLCQPGEYSADGFAPCQLCALGTFQPEAGRTSCFPCGGGLATKHQGATSFQDCETRVQCSPGHFYNTTTHRCIRCPVGTYQPEFGKNNCVSCPGNTTTDFDGSTNITQCKNRRCGGELGDFTGYIESPNYPGNYPANTECTWTINPPPKRRILIVVPEIFLPIEDDCGDYLVMRKTSSSNSVTTYETCQTYERPIAFTSRSKKLWIQFKSNEGNSARGFQVPYVTYDEDYQELIEDIVRDGRLYASENHQEILKDKKLIKALFDVLAHPQNYFKYTAQESREMFPRSFIRLLRSKVSRFLRPYK

SEQ ID NO: 11723 - protein, 172 aa, Homo Sapiens
  misc_feature (1)..(1): Xaa can be any naturally occurring amino acid
XCSCHPQYKMHTDGRSCLEREDTVLEVTESNTTSVVDGDKRVKRRLLMETCAVNNGGCDRTCKDTSTGVHCSCPVGFTLQLDGKTCKDIDECQTRNGGCDHFCKNIVGSFDCGCKKGFKLLTDEKSCQDVDECSLDRTCDHSCINHPGTFACACNRGYTLYGFTHCGEVKGL

SEQ ID NO: 11724 - protein, 112 aa, Homo Sapiens
  misc_feature (1)..(1): Xaa can be any naturally occurring amino acid
XGDFTGYIESPNYPGNYPANTECTWTINPPPKRRILIVVPEIFLPIEDDCGDYLVMRKTSSSNSVTTYETCQTYERPIAFTSRSKKLWIQFKSNEGNSARGFQVPYVTYDDA

SEQ ID NO: 11725 - protein, 192 aa, Homo Sapiens
  misc_feature (1)..(1): Xaa can be any naturally occurring amino acid
XKRRLLMETCAVNNGGCDRTCKDTSTGVHCSCPVGFTLQLDGKTCKDIDECQTRNGGCDHFCKNIVGSFDCGCKKGFKLLTDEKSCQDVDECSLDRTCDHSCINHPGTFACACNRGYTLYGFTHCGDTNECSINNGGCQQVCVNTVGSYECQCHPGYKLHWNKKDCVVKGLLPTSVSPRVSLHCGKSGGGDG

SEQ ID NO: 11726 - protein, 119 aa, Homo Sapiens
  misc_feature (1)..(1): Xaa can be any naturally occurring amino acid
XYIESPNYPGNYPANTECTWTINPPPKRRILIVVPEIFLPIEDDCGDYLVMRKTSSSNSVTTYETCQTYERPIAFTSRSKKLWIQFKSNEGNSARGFQVPYVTYDGKHSLQHMERASLL

SEQ ID NO: 11727 - protein, 993 aa, Homo Sapiens
MGSGRVPGLCLLVLLVHARAAQYSKAAQDVDECVEGTDNCHIDAICQNTPRSYKCICKSGYTGDGKHCKDVDECEREDNAGCVHDCVNIPGNYRCTCYDGFHLAHDGHNCLDVDECAEGNGGCQQSCVNMMGSYECHCREGFFLSDNQHTCIQRPEEGMNCMNKNHGCAHICRETPKGGIACECRPGFELTKNQRDCKLTCNYGNGGCQHTCDDTEQGPRCGCHIKFVLHTDGKTCIETCAVNNGGCDSKCHDAATGVHCTCPVGFMLQPDRKTCKDIDECRLNNGGCDHICRNTVGSFECSCKKGYKLLINERNCQDIDECSFDRTCDHICVNTPGSFQCLCHRGYLLYGITHCGDVDECSINRGGCRFGCINTPGSYQCTCPAGQGRLHWNGKDCTEPLKCQGSPGASKAMLSCNRSGKKDTCALTCPSRARFLPESENGFTVSCGTPSPRAAPARAGHNGNSTNSNHCHEAAVLSIKQRASFKIKDAKCRLHLRNKGKTEEAGRITGPGGAPCSECQVTFIHLKCDSSRKGKGRRARTPPGKEVTRLTLELEAEVRAEETTASCGLPCLRQRMERRLKGSLKMLRKSINQDRFLLRLAGLDYELAHKPGLVAGERAEPMESCRPGQHRAGTKCVSCPQGTYYHGQTEQCVPCPAGTFQEREGQLSCDLCPGSDAHGPLGATNVTTCAGQCPPGQHSVDGFKPCQPCPRGTYQPEAGRTLCFPCGGGLTTKHEGAISFQDCDTKVQCSPGHYYNTSIHRCIRCAMGSYQPDFRQNFCSRCPGNTSTDFDGSTSVAQCKNRQCGGELGEFTGYIESPNYPGNYPAGVECIWNINPPPKRKILIVVPEIFLPSEDECGDVLVMRKNSSPSSITTYETCQTYERPIAFTARSRKLWINFKTSEANSARGFQIPYVTYDEDYEQLVEDIVRDGRLYASENHQEILKDKKLIKAFFEVLAHPQNYFKYTEKHKEMLPKSFIKLLRSKVSSFLRPYK

SEQ ID NO: 11728 - protein, 310 aa, Homo Sapiens
MRRAALWLWLCALALSLQPALPQIVATNLPPEDQDGSGDDSDNFSGSGAGALQDITLSQQTPSTWKDTQLLTAIPTSPEPTGLEATAASTSTLPAGEGPKEGEAVVLPEVEPGLTAREQEATPRPRETTQLPTTHLASTTTATTAQEPATSHPHRDMQPGHHETSTPAGPSQADLHTPHTEDGGPSATERAAEDGASSQLPAAEGSGEQDFTFETSGENTAVVAVEPDRRNQSPVDQGATGASQGLLDRKEVLGGVIAGGLVGLIFAVCLVGFMLYRMKKKDEGSYSLEEPKQANGGAYQKPTKQEEFYA

SEQ ID NO: 11729 - protein, 310 aa, Homo Sapiens; identical to SEQ ID NO: 11728

SEQ ID NO: 11730 - protein, 169 aa, Homo Sapiens
MRRAALWLWLCALALSLQPALPQIVATNLPPEDQDGSGDDSDNFSGSGAGALQDITLSQQTPSTWKDTQLLTAIPTSPEPTGLEATAASTSTLPAGEGPKEGEAVVLPEVEPGLTAREQEATPRPRETTQLPTTHLASTTTATTAQEPATSHPHRDMQPVHFVSWGGLI

SEQ ID NO: 11731 - protein, 28 aa, Homo Sapiens
MRRAALWLWLCALALSLQPALPSLSHGR

SEQ ID NO: 11732 - protein, 215 aa, Homo Sapiens
PRWPGEPGQGCVGGAGERLQGPRACRGRLEQIVATNLPPEDQDGSGDDSDNFSGSGAGALQDITLSQQTPSTWKDTQLLTAIPTSPEPTGLEATAASTSTLPAGEGPKEGEAVVLPEVEPGLTAREQEATPRPRETTQLPTTHLASTTTATTAQEPATSHPHRDMQPGHHETSTPAGPSQADLHTPHTEDGGPSATERAAEDGASSQLPAAEGSG

SEQ ID NO: 11733 - protein, 211 aa, Homo Sapiens
MAVVPLLLLGGLWSAVGASSLGVVTCGSVVKLLNTRHNVRLHSHDVRYGSGSGQQSVTGVTSVDDSNSYWRIRGKSATVCERGTPIKCGQPIRLTHVNTGRNLHSHHFTSPLSGNQEVSAFGEEGEGDYLDDWTVLCNGPYWVRDGEVRFKHSSTEVLLSVTGEQYGRPISGQKEVHGMAQPSQNNYWKAMEGIFMKPSELLKAEAHHAEL

SEQ ID NO: 11734 - protein, 104 aa, Homo Sapiens
SLGVVTCGSVVKLLNTRHNVRLHSHDVRYGSGSGQQSVTGVTSVDDSNSYWRIRGKSATVCERGTPIKCGQPIRLTHVNTGRNLHSHHFTSPLSGNQLLCKVIL

SEQ ID NO: 11735 - protein, 50 aa, Homo Sapiens
  misc_feature (1)..(1): Xaa can be any naturally occurring amino acid
XRNLHSHHFTSPLSGNQENNMVDLSVGKKRCMAWPSQVRTTTGKPWKASS

SEQ ID NO: 11736 - protein, 221 aa, Homo Sapiens
MWSAGRGGAAWPVLLGLLLALLVPGGGAAKTGAELVTCGSVLKLLNTHHRVRLHSHDIKYGSGSGQQSVTGVEASDDANSYWRIRGGSEGGCPRGSPVRCGQAVRLTHVLTGKNLHTHHFPSPLSNNQEVSAFGEDGEGDDLDLWTVRCSGQHWEREAAVRFQHVGTSVFLSVTGEQYGSPIRGQHEVHGMPSANTHNTWKAMEGIFIKPSVEPSAGHDEL

SEQ ID NO: 11737 - protein, 254 aa, Homo Sapiens
MVWPWVAMASRWGPLIGLAPCCLWLLGAVLLMDASARPANHSSTRERVANREENEILPPDHLNGVKLEMDGHLNRGFHQEVFLGKDLGGFDEDAEPRRSRRKLMVIFSKVDVNTDRKISAKEMQRWIMEKTAEHFQEAMEESKTHFRAVDPDGDGHVSWDEYKVKFLASKGHSEKEVADAIRLNEELKVDEESCAPLSTGSPGEPEGPLVPGGQPPCRPAADGGGVPVVPPPRAQPGNAQVHGEGDRPGPGPGR

SEQ ID NO: 11738 - protein, 348 aa, Homo Sapiens
MVWPWVAMASRWGPLIGLAPCCLWLLGAVLLMDASARPANHSSTRERVANREENEILPPDHLNGVKLEMDGHLNRGFHQEVFLGKDLGGFDEDAEPRRSRRKLMVIFSKVDVNTDRKISAKEMQRWIMEKTAEHFQEAMEESKTHFRAVDPDGDGHVSWDEYKVKFLASKGHSEKEVADAIRLNEELKVDEETQEVLENLKDRWYQADSPPADLLLTEEEFLSFLHPEHSRGMLRFMVKEIVRDLDQDGDKQLSVPEFISLPVGTVENQQGQDIDDNWVKDRKKEFEELIDSNHDGIVTAEELENVPTLPLQPIGTLNSHFVRLAAELGGGKATLTCAPLARRATWTP

SEQ ID NO: 11739 - protein, 362 aa, Homo Sapiens
MVWPWVAMASRWGPLIGLAPCCLWLLGAVLLMDASARPANHSSTRERVANREENEILPPDHLNGVKLEMDGHLNRGFHQEVFLGKDLGGFDEDAEPRRSRRKLMVIFSKVDVNTDRKISAKEMQRWIMEKTAEHFQEAMEESKTHFRAVDPDGDGHVSWDEYKVKFLASKGHSEKEVADAIRLNEELKVDEETQEVLENLKDRWYQADSPPADLLLTEEEFLSFLHPEHSRGMLRFMVKEIVRDLDQDGDKQLSVPEFISLPVGTVENQQGQDIDDNWVKDRKKEFEELIDSNHDGIVTAEELESYMDPMNEYNALNEAKQMIAVADENQNHHLEPEEVLKYSEFFTGSKLVDYARSVHEEF

SEQ ID NO: 11740 - protein, 243 aa, Homo Sapiens
  misc_feature (1)..(1): Xaa can be any naturally occurring amino acid
XLEMDGHLNRGFHQEVFLGKDLGGFDEDAEPRRSRRKLMVIFSKVDVNTDRKISAKEMQRWIMEKTAEHFQEAMEESKTHFRAVDPDGDGHVSWDEYKVKFLASKGHSEKEVADAIRLNEELKVDEESSTSRNFLDLRAGVCRPRYPQAAPLSAQEVLENLKDRWYQADSPPADLLLTEEEFLSFLHPEHSRGMLRFMVKEIVRDLDQDGDKQLSVPEFISLPVGTVENQQGQDIDDNWVKDR

SEQ ID NO: 11741 - protein, 65 aa, Homo Sapiens
MAVSTVFSTSSLGIGLFVAVGSVSPSGKEDLGFPTPPSSPLAEVTTLTSYLDKLSTSLDWEPLGD

SEQ ID NO: 11742 - protein, 65 aa, Homo Sapiens; identical to SEQ ID NO: 11741

SEQ ID NO: 11743 - protein, 28 aa, Homo Sapiens
MAVSTVFSTSSLKLNQPQKYLKMKSWPC

SEQ ID NO: 11744 - protein, 88 aa, Homo Sapiens
MAVSTVFSTSSLMLALSRHSLLSPLLSVTSFRRFYRGDSPTDSQKDMIEIPLPPWQERTDESIETKRARLLYESRKRGMLENCILLRS

SEQ ID NO: 11745 - protein, 166 aa, Homo Sapiens
MAVSTVFSTSSLMLALSRHSLLSPLLSVTSFRRFYRGDSPTDSQKDMIEIPLPPWQERTDESIETKRARLLYESRKRGMLENCILLSLFAKEHLQHMTEKQLNLYDRLINEPSNDWDIYYWATEAKPAPEIFENEVMALLRDFAKNKNKEQRLRAPDLEYLFEKPR

SEQ ID NO: 11746 - protein, 133 aa, Homo Sapiens
MAVSTVFSTSSLMLALSRHSLLSPLLSVTSFRRFYRGDSPTDSQKDMIEIPLPPWQERTDESIETKRARLLYESRKRGMLENCILLSLFAKEHLQHMTEKQLNLYDRLINEPSNDWDIYYWATGSSDSPASAS

SEQ ID NO: 11747 - protein, 141 aa, Homo Sapiens
MAVSTVFSTSSLMLALSRHSLLSPLLSVTSFRRFYRGDSPTDSQKDMIEIPLPPWQERTDESIETKRARLLYESRKRGMLENCILLSLFAKEHLQHMTEKQLNLYDRLINEPSNDWDIYYWATGTGYDKQHNVKIGQFRLI

SEQ ID NO: 11748 - protein, 129 aa, Homo Sapiens
MAVSTVFSTSSLMLALSRHSLLSPLLSVTSFRRFYRGDSPTDSQKDMIEIPLPPWQERTDESIETKRARLLYESRKRGMLENCILLSLFAKEHLQHMTEKQLNLYDRLINEPSNDWDIYYWATGWSAMA

SEQ ID NO: 11749 - protein, 108 aa, Homo Sapiens
MTPSRLPWLLSWVSATAWRAARSPLLCHSLRKTSSSQGGKSELVKQSLKKPKLPEGRFDAPEDSHLEKEPLEKFPDDVNPVTKEKGGPRGPEPTRYGDWERKGRCIDF

SEQ ID NO: 11750 - protein, 280 aa, Homo Sapiens
MAAVVALSLRRRLPATTLGGACLQASRGAQTAAATAPRIKKFAIYRWDPDKAGDKPHMQTYEVDLNKCGPMVLDALIKIKNEVDSTLTFRRSCREGICGSCAMNINGGNTLACTRRIDTNLNKVSKIYPLPHMYVIKDLVPDLSNFYAQYKSIEPYLKKKDESQEGKQQYLQSIEEREKLDGLYECILCACCSTSCPSYWWNGDKYLGPAVLMQAYRWMIDSRDDFTEERLAKLQDPFSLYRCHTIMNCTRTCPKGLNPGKAIAEIKKMMATYKEKKASV

SEQ ID NO: 11751 - protein, 200 aa, Homo Sapiens
MFNLTLVHYKASRGAQTAAATAPRIKKFAIYRWDPDKAGDKPHMQTYEVDLNKCGPMVLDALIKIKNEVDSTLTFRRSCREGICGSCAMNINGGNTLACTRRIDTNLNKVSKIYPLPHMYVIKDLVPDLSNFYAQYKSIEPYLKKKDESQEGKQQYLQSIEEREKLDGLYECILCACCSTSCPSYWWNGDKYLGPAVLMQ

SEQ ID NO: 11752 - protein, 123 aa, Homo Sapiens
MQTYEVDLNKCGPMVLDALIKIKNEVDSTLTFRRSCREGICGSCAMNINGGNTLACTRRIDTNLNKVSKIYPLPHMYVIKDLVPDLSNFYAQYKSIEPYLKKKDESQEGKQQYLQSIEEREKL

SEQ ID NO: 11753 - protein, 120 aa, Homo Sapiens
MAVLWRLSAVCGALGGRAGSKAASLHWTSERVVSVLLLGLLPAAYLNPCSAMDYSLAAALTLHGHWGLGQVVTDYVHGDALQKAAKAGLLALSALTFAGLCYFNYHDVGICKAVAMLWKL

SEQ ID NO: 11754 - protein, 72 aa, Homo Sapiens
MAVLWRLSAVCGALGGRALLLRTPVVRPAHISAFLQDRPIPEWCGVQHIHLSPSHHCWSAVVRSRLTATSTF

SEQ ID NO: 11755 - protein, 131 aa, Homo Sapiens
MAVLWRLSAVCGALGGRALLLRTPVVRPAHISAFLQDRPIPEWCGVQHIHLSPSHHSGSKAASLHWTSERVVSVLLLGLLPAAYLNPCSAMDYSLAAALTLHGALDKLLLTMFMGMPCRKLPRQGFWHFQL

SEQ ID NO: 11756 - protein, 104 aa, Homo Sapiens
MAVLWRLSAVCGALGGRALLLRTPVVRPAHISAFLQDRPIPEWCGVQHIHLSPSHHSGSKAASLHWTSERVVSVLLLGLLPAAYLNPCSAMDYSLAAALTLHGH

SEQ ID NO: 11757 - protein, 159 aa, Homo Sapiens
MAVLWRLSAVCGALGGRALLLRTPVVRPAHISAFLQDRPIPEWCGVQHIHLSPSHHSGSKAASLHWTSERVVSVLLLGLLPAAYLNPCSAMDYSLAAALTLHGHWGLGQVVTDYVHGDALQKAAKAGLLALSALTFAGLCYFNYHDVGICKAVAMLWKL

SEQ ID NO: 11758 - protein, 143 aa, Homo Sapiens
MAVLWRLSAVCGALGGRALLLRTPVVRPAHISAFLQDRPIPEWCGVQHIHLSPSHHSGSKAASLHWTSERVVSVLLLGLLPAAYLNPCSAMDYSLAAALTLHGHWLECNGAILARHDLGSARSQLTATSAFRVQAILLPQPPK

SEQ ID NO: 11759 - protein, 143 aa, Homo Sapiens; identical to SEQ ID NO: 11758

SEQ ID NO: 11760 - protein, 85 aa, Homo Sapiens
MAVLWRLSAVCGALGGRALLLRTPVVRPAHISAFLQDRPIPEWCGVQHIHLSPSHHWALDKLLLTMFMGMPCRKLPRQGFWHFQL

SEQ ID NO: 11761 - protein, 55 aa, Homo Sapiens
  misc_feature (1)..(1): Xaa can be any naturally occurring amino acid
XGSKAASLHWTSERVVSVLLLGLLPAAYLNPCSAMDYSLAAALTLHGHWKIKNNE

SEQ ID NO: 11762 - protein, 101 aa, Homo Sapiens
  misc_feature (1)..(1): Xaa can be any naturally occurring amino acid
XWRLSAVCGALGGRALLLRTPVVRPAHISAFLQDRPIPEWCGVQHIHLSPSHHSGSKAASLHWTSERVVSVLLLGLLPAAYLNPCSAMDYSLAAALTLHGH

SEQ ID NO: 11763 - protein, 353 aa, Homo Sapiens
MEFRKTMDIDHILDWQPPEVIQKYMPGGLCGYDRDGCPVWYDIIGPLDPKGLLFSVTKQDLLKTKMRDCERILHECDLQTERLGKKIETIVMIFDCEGLGLKHFWKPLVEVYQEFFGLLEENYPETLKFMLIVKATKLFPVGYNLMKPFLSEDTRRKIIVLGNNWKEGLLKLISPEELPAQFGGTLTDPDGNPKCLTKINYGGEIPKSMYVRDQVKTQYEHSVQINRGSSHQVEYEILFPGCVLRWQFSSDGADIGFGVFLKTKMGERQRAGEMTDVLPSQRYNAHMVPEDGNLTCSEAGVYVESESGKSCCHLPVIICSHELQNSHSNSQVMAYQMVRKCKLSRPLPLPASN

SEQ ID NO: 11764 - protein, 341 aa, Homo Sapiens
MEFRKTMDIDHILDWQPPEVIQKYMPGGLCGYDRDGCPVWYDIIGPLDPKGLLFSVTKQDLLKTKMRDCERILHECDLQTERLGKKIETIVMIFDCEGLGLKHFWKPLVEVYQEFFGLLEENYPETLKFMLIVKATKLFPVGYNLMKPFLSEDTRRKIIVLGNNWKEGLLKLISPEELPAQFGGTLTDPDGNPKCLTKINYGGEIPKSMYVRDQVKTQYEHSVQINRGSSHQVEYEILFPGCVLRWQFSSDGADIGFGVFLKTKMGERQRAGEMTDVLPSQRYNAHMVPEDGNLTCSEAGVYVLRFDNTYSFVHAKKVSFTVEVLLPDEGMQKYDKELTPV

SEQ ID NO: 11765 - protein, 400 aa, Homo Sapiens
MSGRVGDLSPKQAETLAKFRENVQDVLPALPNPDDYFLLRWLRARNFDLQKSEALLRKYMEFRKTMDIDHILDWQPPEVIQKYMPGGLCGYDRDGCPVWYDIIGPLDPKGLLFSVTKQDLLKTKMRDCERILHECDLQTERLGKKIETIVMIFDCEGLGLKHFWKPLVEVYQEFFGLLEENYPETLKFMLIVKATKLFPVGYNLMKPFLSEDTRRKIIVLGNNWKEGLLKLISPEELPAQFGGTLTDPDGNPKCLTKINYGGEIPKSMYVRDQVKTQYEHSVQINRGSSHQVEYEILFPGCVLRWQFSSDGADIGFGVFLKTKMGERQRAGEMTDVLPSQRYNAHMVPEDGNLTCSEAGVYVLRFDNTYSFVHAKKVSFTVEVLLPDEGMQKYDKELTPV

SEQ ID NO: 11766 - protein, 51 aa, Homo Sapiens
MSGRVGDLSPKQAETLAKMESLSSRLECCGAISAHCSLCLPGSSNSPASAS

SEQ ID NO: 11767 - protein, 323 aa, Homo Sapiens
MVIQKYMPGGLCGYDRDGCPVWYDIIGPLDPKGLLFSVTKQDLLKTKMRDCERILHECDLQTERLGKKIETIVMIFDCEGLGLKHFWKPLVEVYQEFFGLLEENYPETLKFMLIVKATKLFPVGYNLMKPFLSEDTRRKIIVLGNNWKEGLLKLISPEELPAQFGGTLTDPDGNPKCLTKINYGGEIPKSMYVRDQVKTQYEHSVQINRGSSHQVEYEILFPGCVLRWQFSSDGADIGFGVFLKTKMGERQRAGEMTDVLPSQRYNAHMVPEDGNLTCSEAGVYVLRFDNTYSFVHAKKVSFTVEVLLPDEGMQKYDKELTPV

SEQ ID NO: 11768 - protein, 323 aa, Homo Sapiens; identical to SEQ ID NO: 11767

SEQ ID NO: 11769 - protein, 231 aa, Homo Sapiens
  misc_feature (1)..(1): Xaa can be any naturally occurring amino acid
XKTSRMCFLPCPTLMIISFYAGSEYMEFRKTMDIDHILDWQPPEVIQKYMPGGLCGYDRDGCPVWYDIIGPLDPKGLLFSVTKQDLLKTKMRDCERILHECDLQTERLGKKIETIVMIFDCEGLGLKHFWKPLVEVYQEFFGLLEENYPETLKFMLIVKATKLFPVGYNLMKPFLSEDTRRKIIVLGNNWKEGLLKLISPEELPAQFGGTLTDPDGNPKCLTKINYGGEIP

SEQ ID NO: 11770 - protein, 1059 aa, Homo Sapiens
ARVRDPRTYDRRYWCDAEYDAYRREHSAFGDRPEKRDNNWRYDPRFTGSFDDDPDPHRDPYGEEVDRRSVHSEHSARSLHSAHSLASRRSSLSSHSHQSQIYRSHNVAAGSYEAPLPPGSFHGDFAYGTYRSNFSSGPGFPEYGYPADTVWPAMEQVSSRPTSPEKFSVPHVCARFGPGGQLIKVIPNLPSEGQPALVEVHSMEALLQHTSEQEEMRAFPGPLAKDDTHKVDVINFAQNKAMKCLQNENLIDKESASLLWNFIVLLCRQNGTVVGTDIAELLLRDHRTVWLPGKSPNEANLIDFTNEAVEQVEEEESGEAQLSFLTGGPAAAASSLERETERFRELLLYGRKKDALESAMKNGLWGHALLLASKMDSRTHARVMTRFANSLPINDPLQTVYQLMSGRMPAASTCCGDEKWGDWRPHLAMVLSNLNNNMDVESRTMATMGDTLASRGLLDAAHFCYLMAQAGFGVYTKKTTKLVLIGSNHSLPFLKFATNEAIQRTEAYEYAQSLGAETCPLPSFQVFKFIYSCRLAEMGLATQAFHYCEAIAKSILTQPHLYSPVLISQLVQMASQLRLFDPQLKEKPEEESLAAPTWLVHLQQVERQIKEGAGVWHQDGALPQQCPGTPSSEMEQLDRPGLSQPGALGIANPLLAVPAPSPEHSSPSVRLLPSAPQTLPDGPLASPARVPMFPVPLPPGPLEPGPGCVTPGPALGFLEPSGPGLPPGVPPLQERRHLLQEARSPDPGIVPQEAPVGNSLSELSEENFDGKFANLTPSRTVPDSEAPPGWDRADSGPTQPPLSLSPAPETKRPGQAAKKETKEPKKGESWFFRWLPGKKKTEAYLPDDKNKSIVWDEKKNQWVNLNEPEEEKKAPPPPPTSMPKTVQAAPPALPGPPGAPVNMYSRRAAGTRARYVDVLNPSGTQRSEPALAPADFVAPLAPLPIPSNLFVPTPDAEEPQLPDGTGREGPAAARGLANPEPAPEPKVLSSAASLPGSELPSSRPEGSQGGEAPGDLPAAGGPPSGAMPFYNPAQLAQACATSGSSRLGRIGQRKHLVLN

SEQ ID NO: 11771 - protein, 385 aa, Homo Sapiens
MDLLPTSILLASLWICSHLHPPGVSVDLPPTSILLVSLWICSHLHPPGVSVDRPPPPSSWCLCGSPPTSILLVSLWICSPPPSSWCLCGSAPTSILLVSLWIWRLWGLTEGESWFFRWLPGKKKTEAYLPDDKNKSIVWDEKKNQWVNLNEPEEEKKAPPPPPTSMPKTVQAAPPALPGPPGAPVNMYSRRAAGTRARYVDVLNPSGTQRSEPALAPADFVAPLAPLPIPSNLFVPTPVSSVRPQGRSGRNDGLLALSSPDAEEPQLPDGTGREGPAAARGLANPEPAPEPKVLSSAASLPGSELPSSRPEGSQGGELSRCSSMSSLSREVSQHFNQAPGDLPAAGGPPSGAMPFYNPAQLAQACATSGSSRLGRIGQRKHLVLN

SEQ ID NO: 11772 - protein, 2134 aa, Homo Sapiens
MPGLDRPLSRQNPHDGVVTPAASPSLPQPGLQMPGQWGPVQGGPQPSGQHRSPCPEGPVPSGVPCATSVPHFPTPSILHQGPGHEQHSPLVAPPAALPSDGRDEVSHLQSGSHLANNSDPESTFRQNPRIVNHWASPELRQNPGVKNEHRPASALVNPLARGDSPENRTHHPLGAGAGSGCAPLEADSGASGALAMFFQGGETENEENLSSEKAGLSGQADFDDFCSSPGLGRPPAPTHVGAGSLCQALLPGPSNEAAGDVWGDTASTGVPDASGSQYENVENLEFVQNQEVLPSEPLNLDPSSPSDQFRYGPLPGPAVPRHGAVCHTGAPDATLHTVHPDSVSSSYSSRSHGRLSGSARPQELVGTFIQQEVGKPEDEASGSFFKQIDSSPVGGETDETTVSQNYRGSVSQPSTPSPPKPTGIFQTSANSSFEPVKSHLVGVKPFEADRANVVGEVRETCVRQKQCRPAAALPDASPGNLEQPPDNMETLCAPQVCPLPLNSTTEAVHMLPHAGAPPLDTVYPAPEKRPSARTQGPVKCESPATTLWAQSELPDFGGNVLLAPAAPALYVCAKPQPPVVQPPEEAMSGQQSRNPSSAAPVQSRGGIGASENLENPPKMGEEEALQSQASSGYASLLSSPPTESLQNPPVLIAQPDHSYNLAQPINFSVSLSNSHEKNQSWREALVGDRPAVSSWALGGDSGENTSLSGIPTSSVLSLSLPSSVAQSNFPQGSGASEMVSNQPANLLVQPPSQPVPENLVPESQKDRKAGSALPGFANSPAGSTSVVLVPPAHGTLVPDGNKANHSSHQEDTYGALDFTLSRTLENPVNVYNPSHSDSLASQQSVASHPRQSGPGAPNLDRFYQQVTKDAQGQPGLERAQQELVPPQQQASPPQLPKAMFSELSNPESLPAQGQAQNSAQSPASLVLVDAGQQLPPRPPQSSSVSLVSSGSGQAAVPSEQPWPQPVPALAPGPPPQDLAAYYYYRPLYDAYQPQYSLPYPPEPGAASLYYQDVYSLYEPRYRPYDGAASAYAQNYRYPEPERPSSRASHSSERPPPRQGYPEGYYSSKSGWSSQSDYYASYYSSQYDYGDPGHWDRYHYSARVRDPRTYDRRYWCDAEYDAYRREHSAFGDRPEKRDNNWRYDPRFTGSFDDDPDPHRDPYGEEVDRRSVHSEHSARSLHSAHSLASRRSSLSSHSHQSQIYRSHNVAAGSYEAPLPPGSFHGDFAYGTYRSNFSSGPGFPEYGYPADTVWPAMEQVSSRPTSPEKFSVPHVCARFGPGGQLIKVIPNLPSEGQPALVEVHSMEALLQHTSEQEEMRAFPGPLAKDDTHKVDVINFAQNKAMKCLQNENLIDKESASLLWNFIVLLCRQNGTVVGTDIAELLLRDHRTVWLPGKSPNEANLIDFTNEAVEQVEEEESGEAQLSFLTGGPAAAASSLERETERFRELLLYGRKKDALESAMKNGLWGHALLLASKMDSRTHARVMTRFANSLPINDPLQTVYQLMSGRMPAASTCCGDEKWGDWRPHLAMVLSNLNNNMDVESRTMATMGDTLASRGLLDAAHFCYLMAQAGFGVYTKKTTKLVLIGSNHSLPFLKFATNEAIQRTEAYEYAQSLGAETCPLPSFQVFKFIYSCRLAEMGLATQAFHYCEAIAKSILTQPHLYSPVLISQLVQMASQLRLFDPQLKEKPEEESLAAPTWLVHLQQVERQIKEGAGVWHQDGALPQQCPGTPSSEMEQLDRPGLSQPGALGIANPLLAVPAPSPEHSSPSVRLLPSAPQTLPDGPLASPARVPMFPVPLPPGPLEPGPGCVTPGPALGFLEPSGPGLPPGVPPLQERRHLLQEARSPDPGIVPQEAPVGNSLSELSEENFDGKFANLTPSRTVPDSEAPPGWDRADSGPTQPPLSLSPAPETKRPGQAAKKETKEPKKGESWFFRWLPGKKKTEAYLPDDKNKSIVWDEKKNQWVNLNEPEEEKKAPPPPPTSMPKTVQAAPPALPGPPGAPVNMYSRRAAGTRARYVDVLNPSGTQRSEPALAPADFVAPLAPLPIPSNLFVPTPDAEEPQLPDGTGREGPAAARGLANPEPAPEPKAPGDLPAAGGPPSGAMPFYNPAQLAQACATSGSSRLGRIGQRKHLVLN

SEQ ID NO: 11773 - protein, 2154 aa, Homo Sapiens
MPGLDRPLSRQNPHDGVVTPAASPSLPQPGLQMPGQWGPVQGGPQPSGQHRSPCPEGPVPSGVPCATSVPHFPTPSILHQGPGHEQHSPLVAPPAALPSDGRDEVSHLQSGSHLANNSDPESTFRQNPRIVNHWASPELRQNPGVKNEHRPASALVNPLARGDSPENRTHHPLGAGAGSGCAPLEADSGASGALAMFFQGGETENEENLSSEKAGLSGQADFDDFCSSPGLGRPPAPTHVGAGSLCQALLPGPSNEAAGDVWGDTASTGVPDASGSQYENVENLEFVQNQEVLPSEPLNLDPSSPSDQFRYGPLPGPAVPRHGAVCHTGAPDATLHTVHPDSVSSSYSSRSHGRLSGSARPQELVGTFIQQEVGKPEDEASGSFFKQIDSSPVGGETDETTVSQNYRGSVSQPSTPSPPKPTGIFQTSANSSFEPVKSHLVGVKPFEADRANVVGEVRETCVRQKQCRPAAALPDASPGNLEQPPDNMETLCAPQVCPLPLNSTTEAVHMLPHAGAPPLDTVYPAPEKRPSARTQGPVKCESPATTLWAQSELPDFGGNVLLAPAAPALYVCAKPQPPVVQPPEEAMSGQQSRNPSSAAPVQSRGGIGASENLENPPKMGEEEALQSQASSGYASLLSSPPTESLQNPPVLIAQPDHSYNLAQPINFSVSLSNSHEKNQSWREALVGDRPAVSSWALGGDSGENTSLSGIPTSSVLSLSLPSSVAQSNFPQGSGASEMVSNQPANLLVQPPSQPVPENLVPESQKDRKAGSALPGFANSPAGSTSVVLVPPAHGTLVPDGNKANHSSHQEDTYGALDFTLSRTLENPVNVYNPSHSDSLASQQSVASHPRQSGPGAPNLDRFYQQVTKDAQGQPGLERAQQELVPPQQQASPPQLPKAMFSELSNPESLPAQGQAQNSAQSPASLVLVDAGQQLPPRPPQSSSVSLVSSGSGQAAVPSEQPWPQPVPALAPGPPPQDLAAYYYYRPLYDAYQPQYSLPYPPEPGAASLYYQDVYSLYEPRYRPYDGAASAYAQNYRYPEPERPSSRASHSSERPPPRQGYPEGYYSSKSGWSSQSDYYASYYSSQYDYGDPGHWDRYHYSARVRDPRTYDRRYWCDAEYDAYRREHSAFGDRPEKRDNNWRYDPRFTGSFDDDPDPHRDPYGEEVDRRSVHSEHSARSLHSAHSLASRRSSLSSHSHQSQIYRSHNVAAGSYEAPLPPGSFHGDFAYGTYRSNFSSGPGFPEYGYPADTVWPAMEQVSSRPTSPEKFSVPHVCARFGPGGQLIKVIPNLPSEGQPALVEVHSMEALLQHTSEQEEMRAFPGPLAKDDTHKVDVINFAQNKAMKCLQNENLIDKESASLLWNFIVLLCRQNGTVVGTDIAELLLRDHRTVWLPGKSPNEANLIDFTNEAVEQVEEEESGEAQLSFLTGGPAAAASSLERETERFRELLLYGRKKDALESAMKNGLWGHALLLASKMDSRTHARVMTRFANSLPINDPLQTVYQLMSGRMPAASTCCGDEKWGDWRPHLAMVLSNLNNNMDVESRTMATMGDTLASRGLLDAAHFCYLMAQAGFGVYTKKTTKLVLIGSNHSLPFLKFATNEAIQRTEAYEYAQSLGAETCPLPSFQVFKFIYSCRLAEMGLATQAFHYCEAIAKSILTQPHLYSPVLISQLVQMASQLRLFDPQLKEKPEEESLAAPTWLVHLQQVERQIKEGAGVWHQDGALPQQCPGTPSSEMEQLDRPGLSQPGALGIANPLLAVPAPSPEHSSPSVRLLPSAPQTLPDGPLASPARVPMFPVPLPPGPLEPGPGCVTPGPALGFLEPSGPGLPPGVPPLQERRHLLQEARSPDPGIVPQEAPVGNSLSELSEENFDGKFANLTPSRTVPDSEAPPGWDRADSGPTQPPLSLSPAPETKRPGQAAKKETKEPKKGESWFFRWLPGKKKTEAYLPDDKNKSIVWDEKKNQWVNLNEPEEEKKAPPPPPTSMPKTVQAAPPALPGPPGAPVNMYSRRAAGTRARYVDVLNPSGTQRSEPALAPADFVAPLAPLPIPSNLFVPTPDAEEPQLPDGTGREGPAAARGLANPEPAPEPKLSRCSSMSSLSREVSQHFNQAPGDLPAAGGPPSGAMPFYNPAQLAQACATSGSSRLGRIGQRKHLVLN

SEQ ID NO: 11774 - protein, 2357 aa, Homo Sapiens
MQPPPQTVPSGMAGPPPAGNPRSVFWASSPYRRRANNNAAVAPTTCPLQPVTDPFAFSRQALQSTPLGSSSKSSPPVLQGPAPAGFSQHPGLLVPHTHARDSSQGPCEPLPGPLTQPRAHASPFSGALTPSAPPGPEMNRSAEVGPSSEPEVQTLPYLPHYIPGVDPETSHGGHPHGNMPGLDRPLSRQNPHDGVVTPAASPSLPQPGLQMPGQWGPVQGGPQPSGQHRSPCPEGPVPSGVPCATSVPHFPTPSILHQGPGHEQHSPLVAPPAALPSDGRDEVSHLQSGSHLANNSDPESTFRQNPRIVNHWASPELRQNPGVKNEHRPASALVNPLARGDSPENRTHHPLGAGAGSGCAPLEADSGASGALAMFFQGGETENEENLSSEKAGLSGQADFDDFCSSPGLGRPPAPTHVGAGSLCQALLPGPSNEAAGDVWGDTASTGVPDASGSQYENVENLEFVQNQEVLPSEPLNLDPSSPSDQFRYGPLPGPAVPRHGAVCHTGAPDATLHTVHPDSVSSSYSSRSHGRLSGSARPQELVGTFIQQEVGKPEDEASGSFFKQIDSSPVGGETDETTVSQNYRGSVSQPSTPSPPKPTGIFQTSANSSFEPVKSHLVGVKPFEADRANVVGEVRETCVRQKQCRPAAALPDASPGNLEQPPDNMETLCAPQVCPLPLNSTTEAVHMLPHAGAPPLDTVYPAPEKRPSARTQGPVKCESPATTLWAQSELPDFGGNVLLAPAAPALYVCAKPQPPVVQPPEEAMSGQQSRNPSSAAPVQSRGGIGASENLENPPKMGEEEALQSQASSGYASLLSSPPTESLQNPPVLIAQPDHSYNLAQPINFSVSLSNSHEKNQSWREALVGDRPAVSSWALGGDSGENTSLSGIPTSSVLSLSLPSSVAQSNFPQGSGASEMVSNQPANLLVQPPSQPVPENLVPESQKDRKAGSALPGFANSPAGSTSVVLVPPAHGTLVPDGNKANHSSHQEDTYGALDFTLSRTLENPVNVYNPSHSDSLASQQSVASHPRQSGPGAPNLDRFYQQVTKDAQGQPGLERAQQELVPPQQQASPPQLPKAMFSELSNPESLPAQGQAQNSAQSPASLVLVDAGQQLPPRPPQSSSVSLVSSGSGQAAVPSEQPWPQPVPALAPGPPPQDLAAYYYYRPLYDAYQPQYSLPYPPEPGAASLYYQDVYSLYEPRYRPYDGAASAYAQNYRYPEPERPSSRASHSSERPPPRQGYPEGYYSSKSGWSSQSDYYASYYSSQYDYGDPGHWDRYHYSARVRDPRTYDRRYWCDAEYDAYRREHSAFGDRPEKRDNNWRYDPRFTGSFDDDPDPHRDPYGEEVDRRSVHSEHSARSLHSAHSLASRRSSLSSHSHQSQIYRSHNVAAGSYEAPLPPGSFHGDFAYGTYRSNFSSGPGFPEYGYPADTVWPAMEQVSSRPTSPEKFSVPHVCARFGPGGQLIKVIPNLPSEGQPALVEVHSMEALLQHTSEQEEMRAFPGPLAKDDTHKVDVINFAQNKAMKCLQNENLIDKESASLLWNFIVLLCRQNGTVVGTDIAELLLRDHRTVWLPGKSPNEANLIDFTNEAVEQVEEEESGEAQLSFLTGGPAAAASSLERETERFRELLLYGRKKDALESAMKNGLWGHALLLASKMDSRTHARVMTRFANSLPINDPLQTVYQLMSGRMPAASTCCGDEKWGDWRPHLAMVLSNLNNNMDVESRTMATMGDTLASRGLLDAAHFCYLMAQAGFGVYTKKTTKLVLIGSNHSLPFLKFATNEAIQRTEAYEYAQSLGAETCPLPSFQVFKFIYSCRLAEMGLATQAFHYCEAIAKSILTQPHLYSPVLISQLVQMASQLRLFDPQLKEKPEEESLAAPTWLVHLQQVERQIKEGAGVWHQDGALPQQCPGTPSSEMEQLDRPGLSQPGALGIANPLLAVPAPSPEHSSPSVRLLPSAPQTLPDGPLASPARVPMFPVPLPPGPLEPGPGCVTPGPALGFLEPSGPGLPPGVPPLQERRHLLQEARSPDPGIVPQEAPVGNSLSELSEENFDGKFANLTPSRTVPDSEAPPGWDRADSGPTQPPLSLSPAPETKRPGQAAKKETKEPKKGESWFFRWLPGKKKTEAYLPDDKNKSIVWDEKKNQWVNLNEPEEEKKAPPPPPTSMPKTVQAAPPALPGPPGAPVNMYSRRAAGTRARYVDVLNPSGTQRSEPALAPADFVAPLAPLPIPSNLFVPTPDAEEPQLPDGTGREGPAAARGLANPEPAPEPKVLSSAASLPGSELPSSRPEGSQGGELSRCSSMSSLSREVSQHFNQAPGDLPAAGGPPSGAMPFYNPAQLAQACATSGSSRLGRIGQRKHLVLN

SEQ ID NO: 11775 - protein, 2334 aa, Homo Sapiens
MQPPPQTVPSGMAGPPPAGNPRSVFWASSPYRRRANNNAAVAPTTCPLQPVTDPFAFSRQALQSTPLGSSSKSSPPVLQGPAPAGFSQHPGLLVPHTHARDSSQGPCEPLPGPLTQPRAHASPFSGALTPSAPPGPEMNRSAEVGPSSEPEVQTLPYLPHYIPGVDPETSHGGHPHGNMPGLDRPLSRQNPHDGVVTPAASPSLPQPGLQMPGQWGPVQGGPQPSGQHRSPCPEGPVPSGVPCATSVPHFPTPSILHQGPGHEQHSPLVAPPAALPSDGRDEVSHLQSGSHLANNSDPESTFRQNPRIVNHWASPELRQNPGVKNEHRPASALVNPLARGDSPENRTHHPLGAGAGSGCAPLEADSGASGALAMFFQGGETENEENLSSEKAGLSGQADFDDFCSSPGLGRPPAPTHVGAGSLCQALLPGPSNEAAGDVWGDTASTGVPDASGSQYENVENLEFVQNQEVLPSEPLNLDPSSPSDQFRYGPLPGPAVPRHGAVCHTGAPDATLHTVHPDSVSSSYSSRSHGRLSGSARPQELVGTFIQQEVGKPEDEASGSFFKQIDSSPVGGETDETTVSQNYRGSVSQPSTPSPPKPTGIFQTSANSSFEPVKSHLVGVKPFEADRANVVGEVRETCVRQKQCRPAAALPDASPGNLEQPPDNMETLCAPQVCPLPLNSTTEAVHMLPHAGAPPLDTVYPAPEKRPSARTQGPVKCESPATTLWAQSELPDFGGNVLLAPAAPALYVCAKPQPPVVQPPEEAMSGQQSRNPSSAAPVQSRGGIGASENLENPPKMGEEEALQSQASSGYASLLSSPPTESLQNPPVLIAQPDHSYNLAQPINFSVSLSNSHEKNQSWREALVGDRPAVSSWALGGDSGENTSLSGIPTSSVLSLSLPSSVAQSNFPQGSGASEMVSNQPANLLVQPPSQPVPENLVPESQKDRKAGSALPGFANSPAGSTSVVLVPPAHGTLVPDGNKANHSSHQEDTYGALDFTLSRTLENPVNVYNPSHSDSLASQQSVASHPRQSGPGAPNLDRFYQQVTKDAQGQPGLERAQQELVPPQQQASPPQLPKAMFSELSNPESLPAQGQAQNSAQSPASLVLVDAGQQLPPRPPQSSSVSLVSSGSGQAAVPSEQPWPQPVPALAPGPPPQDLAAYYYYRPLYDAYQPQYSLPYPPEPGAASLYYQDVYSLYEPRYRPYDGAASAYAQNYRYPEPERPSSRASHSSERPPPRQGYPEGYYSSKSGWSSQSDYYASYYSSQYDYGDPGHWDRYHYSARVRDPRTYDRRYWCDAEYDAYRREHSAFGDRPEKRDNNWRYDPRFTGSFDDDPDPHRDPYGEEVDRRSVHSEHSARSLHSAHSLASRRSSLSSHSHQSQIYRSHNVAAGSYEAPLPPGSFHGDFAYGTYRSNFSSGPGFPEYGYPADTVWPAMEQVSSRPTSPEKFSVPHVCARFGPGGQLIKVIPNLPSEGQPALVEVHSMEALLQHTSEQEEMRAFPGPLAKDDTHKVDVINFAQNKAMKCLQNENLIDKESASLLWNFIVLLCRQNGTVVGTDIAELLLRDHRTVWLPGKSPNEANLIDFTNEAVEQVEEEESGEAQLSFLTGGPAAAASSLERETERFRELLLYGRKKDALESAMKNGLWGHALLLASKMDSRTHARVMTRFANSLPINDPLQTVYQLMSGRMPAASTCCGDEKWGDWRPHLAMVLSNLNNNMDVESRTMATMGDTLASRGLLDAAHFCYLMAQAGFGVYTKKTTKLVLIGSNHSLPFLKFATNEAIQRTEAYEYAQSLGAETCPLPSFQVFKFIYSCRLAEMGLATQAFHYCEAIAKSILTQPHLYSPVLISQLVQMASQLRLFDPQLKEKPEEESLAAPTWLVHLQQVERQIKEGAGVWHQDGALPQQCPGTPSSEMEQLDRPGLSQPGALGIANPLLAVPAPSPEHSSPSVRLLPSAPQTLPDGPLASPARVPMFPVPLPPGPLEPGPGCVTPGPALGFLEPSGPGLPPGVPPLQERRHLLQEARSPDPGIVPQEAPVGNSLSELSEENFDGKFANLTPSRTVPDSEAPPGWDRADSGPTQPPLSLSPAPETKRPGQAAKKETKEPKKGESWFFRWLPGKKKTEAYLPDDKNKSIVWDEKKNQWVNLNEPEEEKKAPPPPPTSMPKTVQAAPPALPGPPGAPVNMYSRRAAGTRARYVDVLNPSGTQRSEPALAPADFVAPLAPLPIPSNLFVPTPVSSVRPQGRSGRNDGLLALSSPDAEEPQLPDGTGREGPAAARGLANPEPAPEPKAPGDLPAAGGPPSGAMPFYNPAQLAQACATSGSSRLGRIGQRKHLVLN

SEQ ID NO: 11776 - protein, 751 aa, Homo Sapiens
PAAAASSLERETERFRELLLYGRKKDALESAMKNGLWGHALLLASKMDSRTHARVMTRFANSLPINDPLQTVYQLMSGRMPAASTCCGDEKWGDWRPHLAMVLSNLNNNMDVESRTMATMGDTLASRGLLDAAHFCYLMAQAGFGVYTKKTTKLVLIGSNHSLPFLKFATNEAIQRTEAYEYAQSLGAETCPLPSFQVFKFIYSCRLAEMGLATQAFHYCEAIAKSILTQPHLYSPVLISQLVQMASQLRLFDPQLKEKPEEESLAAPTWLVHLQQVERQIKEGAGVWHQDGALPQQCPGTPSSEMEQLDRPGLSQPGALGIANPLLAVPAPSPEHSSPSVRLLPSAPQTLPDGPLASPARVPMFPVPLPPGPLEPGPGCVTPGPALGFLEPSGPGLPPGVPPLQERRHLLQEARSPDPGIVPQEAPVGNSLSELSEENFDGKFANLTPSRTVPDSEAPPGWDRADSGPTQPPLSLSPAPETKRPGQAAKKETKEPKKGESWFFRWLPGKKKTEAYLPDDKNKSIVWDEKKNQWVNLNEPEEEKKAPPPPPTSMPKTVQAAPPALPGPPGAPVNMYSRRAAGTRARYVDVLNPSGTQRSEPALAPADFVAPLAPLPIPSNLFVPTPDAEEPQLPDGTGREGPAAARGLANPEPAPEPKVLSSAASLPGSELPSSRPEGSQGGELSRCSSMSSLSREVSQHFNQAPGDLPAAGGPPSGAMPFYNPAQLAQACATSGSSRLGRIGQRKHLVLN

SEQ ID NO: 11777 - protein, 1060 aa, Homo Sapiens
MELWAPQRLPQTRGKATAPSKDPDRGFRRDGHHRPVPHSWHNGERFHQWQDNRGSPQPQQEPRADHQQQPHYASRPGDWHQPVSGVDYYEGGYRNQLYSRPGYENSYQSYQSPTMREEYAYGSYYYHGHPQWLQEERVPRQRSPYIWHEDYREQKYLDEHHYENQHSPFGTNSETHFQSNSRNPCKDSPASNSGQEWPGELFPGSLLAEAQKNKPSLASESNLLQQRESGLSSSSYELSQYIRDAPERDDPPASAAWSPVQADVSSAGPKAPMKFYIPHVPVSFGPGGQLVHVGPSSPTDGQAALVELHSMEVILNDSEEQEEMRSFSGPLIREDVHKVDIMTFCQQKAAQSCKSETLGSRDSALLWQLLVLLCRQNGSMVGSDIAELLMQDCKKLEKYKRQPPVANLINLTDEDWPVLSSGTPNLLTGEIPPSVETPAQIVEKFTRLLYYGRKKEALEWAMKNHLWGHALFLSSKMDPQTYSWVMSGFTSTLALNDPLQTLFQLMSGRIPQAATCCGEKQWGDWRPHLAVILSNQAGDPELYQRAIVAIGDTLAGKGLVEAAHFCYLMAHVPFGHYTVKTDHLVLLGSSHSQEFLKFATTEAIQRTEIFEYCQMLGRPKSFIPSFQVYKLLYASRLADYGLVSQALHYCEAIGAAVLSQGESSHPVLLVELIKLAEKLKLSDPLVLERRSGDRDLEPDWLAQLRRQLEQKVAGDIGDPHPTRSDISGAGGTTTENTFYQDFSGCQGYSEAPGYRSALWLTPEQTCLLQPSPQQPFPLQPGSYPAGGGAGQTGTPRPFYSVPETHLPGTGSSVAVTEATGGTVWEEMLQTHLGPGENTVSQETSQPPDGQEVISKPQTPLAARPRSISESSASSAKEDEKESSDEADKNSPRNTAQRGKLGDGKEHTKSSGFGWFSWFRSKPTKNASPAGDEDSSDSPDSEETPRASSPHQAGLGLSLTPSPESPPLPDVSAFSRGRGGGEGRGSASSGGAAAGAGVGGLSGPESVSFELCSNPGVLLPPPALKGAVPLYNPSQVPQLPTATSLNRPNRLAQRRYPTQPC

SEQ ID NO: 11778 - protein, 625 aa, Homo Sapiens
MELWAPQRLPQTRGKATAPSKDPDRGFRRDGHHRPVPHSWHNGERFHQWQDNRGSPQPQQEPRADHQQQPHYASRPGDWHQPVSGVDYYEGGYRNQLYSRPGYENSYQSYQSPTMREEYAYGSYYYHGHPQWLQEERVPRQRSPYIWHEDYREQKYLDEHHYENQHSPFGTNSETHFQSNSRNPCKDSPASNSGQEWPGELFPGSLLAEAQKNKPSLASESNLLQQRESGLSSSSYELSQYIRDAPERDDPPASAAWSPVQAEDVSSAGPKAPMKFYIPHVPVSFGPGGQLVHVGPSSPTDGQAALVELHSMEVILNDSEEQEEMRSFSGPLIREDVHKVDIMTFCQQKAAQSCKSETLGSRDSALLWQLLVLLCRQNGSMVGSDIAELLMQDCKKLEKYKRQPPVANLINLTDEDWPVLSSGTPNLLTGEIPPSVETPAQIVEKFTRLLYYGRKKEALEWAMKNHLWGHALFLSSKMDPQTYSWVMSGFTSTLALNDPLQTLFQLMSGRIPQAATCCGEKQWGDWRPHLAVILSNQAGDPELYQRAIVAIGDTLAGKGLVEAAHFCYLMAHVPFGHYTVKTDHLVLLGSSHRYATWEKGNSKDIFQGTVLALVGFYGSIFHFLM

SEQ ID NO: 11779 - protein, 316 aa, Homo Sapiens
MELWAPQRLPQTRGKATAPSKDPDRGFRRDGHHRPVPHSWHNGERFHQWQDNRGSPQPQQEPRADHQQQPHYASRPGDWHQPVSGVDYYEGGYRNQLYSRPGYENSYQSYQSPTMREEYAYGSYYYHGHPQWLQEERVPRQRSPYIWHEDYREQKYLDEHHYENQHSPFGTNSETHFQSNSRNPCKDSPASNSGQEWPGELFPGSLLAEAQKNKPSLASESNLLQQRESGLSSSSYELSQYIRDAPERDDPPASAAWSPVQADVSSAGPKAPMKFYIPHVPVSFGPGGQLVHVGPSSPTDGQAALVELHSMEGRCT

SEQ ID NO: 11780 - protein, 175 aa, Homo Sapiens
  misc_feature (1)..(1): Xaa can be any naturally occurring amino acid
XLGSRDSALLWQLLVLLCRQNGSMVGSDIAELLMQDCKKLEKYKRQPPVANLINLTDEDWPVLSSGTPNLLTGEIPPSVETPAQIVEKFTRLLYYGRKKCCGEKQWGDWRPHLAVILSNQAGDPELYQRAIVAIGDTLAGKGLVEAAHFCYLMAHVPFGHYTVKTDHLVLLGSSH

SEQ ID NO: 11781 - protein, 107 aa, Homo Sapiens
MSVIFFACVVRVRDGLPLSASTDFYHTQDFLEWRRRLKSLALRLAQYPGRGSAEGCDFSIHFSSFGDVACMAICSCQCPAAMAFCFLETLWWEFTASYDTTCIGLAS

SEQ ID NO: 11782 - protein, 142 aa, Homo Sapiens
MSVIFFACVVRVRDGLPLSASTDFYHTQDFLEWRRRLKSLALRLAQYPGRGSAEGCDFSIHFSSFGDVACMAICSCQCPAAMAFCFLETLWWEFTASYDTTCIGLASRPYAFLEFDSIIQKVKWHFNYVSSSQMECSLEKIQ

SEQ ID NO: 11783 - protein, 228 aa, Homo Sapiens
MSVIFFACVVRVRDGLPLSASTDFYHTQDFLEWRRRLKSLALRLAQYPGRGSAEGCDFSIHFSSFGDVACMAICSCQCPAAMAFCFLETLWWEFTASYDTTCIGLASRPYAFLEFDSIIQKVKWHFNYVSSSQMECSLEKIQEELKLQPPAVLTLEDTDVANGVMNGHTPMHLEPAPNFRMEPVTALGILSLILNIMCAALNLIRGVHLAEHSLQDPRSWFCWLDQTS

SEQ ID NO: 11784 - protein, 236 aa, Homo Sapiens
MSVIFFACVVRVRDGLPLSASTDFYHTQDFLEWRRRLKSLALRLAQYPGRGSAEGCDFSIHFSSFGDVACMAICSCQCPAAMAFCFLETLWWEFTASYDTTCIGLASRPYAFLEFDSIIQKVKWHFNYVSSSQMECSLEKIQEELKLQPPAVLTLEDTDVANGVMNGHTPMHLEPAPNFRMEPVTALGILSLILNIMCAALNLIRGVHLAEHSLQVAHEEIGNILAFLVPFVACIF

SEQ ID NO: 11785 - protein, 303 aa, Homo Sapiens
MSVIFFACVVRVRDGLPLSASTDFYHTQDFLEWRRRLKSLALRLAQYPGRGSAEGCDFSIHFSSFGDVACMAICSCQCPAAMAFCFLETLWWEFTASYDTTCIGLASRPYAFLEFDSIIQKVKWHFNYVSSSQMECSLEKIQEELKLQPPAVLTLEDTDVANGVMNGHTPMHLEPAPNFRMEPVTALGILSLILNIMCAALNLIRGVHLAEHSLQVAHEEIGNILAFLVPFVACIFQCYLYLFYSPARTMKVVLMLLFICLGNMYLHGLRNLWQILFHIGVAFLSSYQILTRQLQEKQSDCGV

SEQ ID NO: 11786 - protein, 250 aa, Homo Sapiens
MSVIFFACVVRVRDGLPLSASTDFYHTQDFLEWRRRLKSLALRLAQYPGRGSAEGCDFSIHFSSFGDVACMAICSCQCPAAMAFCFLETLWWEFTASYDTTCIGLASRPYAFLEFDSIIQKVKWHFNYVSSSQMECSLEKIQEELKLQPPAVLTLEDTDVANGVMNGHTPMHLEPAPNFRMEPVTALGILSLILNIMCAALNLIRGVHLAEHSLQVAHEEIGNILAFLVPFVACIFQDPRSWFCWLDQTS

SEQ ID NO: 11787 - protein, 250 aa, Homo Sapiens; identical to SEQ ID NO: 11786

SEQ ID NO: 11788 - protein, 61 aa, Homo Sapiens
MSVIFFACVVRVRDGLPLSASTDFYHTQDFLEWRRRLKSLALRLAQYPGRGSAEGCDFSIQ

SEQ ID NO: 11789 - protein, 72 aa, Homo Sapiens
MSVIFFACVVRVRDGLPLSASTDFYHTQDFLEWRRRLKSLALRLAQYPGRGSAEGCDFSIQDKVLPCCPGWS

SEQ ID NO: 11790 - protein, 72 aa, Homo Sapiens; identical to SEQ ID NO: 11789

SEQ ID NO: 11791 - protein, 143 aa, Homo Sapiens
MSVIFFACVVRVRDGLPLSASTDFYHTQDFLEWRRRLKSLALRLAQYPGRGSAEGCDFSIQHFKGSGRKTVSGIGRTEETIYLQQTATGLFKAKQVQNSVFLLSGTWPAWLSAPASVQQPWPSASWRPCGGNSQLPMTLPALA

SEQ ID NO: 11792 - protein, 75 aa, Homo Sapiens
MSVIFFACVVRVRDGLPLSASTDFYHTQDFLEWRRRLKSLALRLAQYPGRGSAEGCDFSIQLLDILKEAEERQSQ

SEQ ID NO: 11793 - protein, 225 aa, Homo Sapiens
  misc_feature (1)..(1): Xaa can be any naturally occurring amino acid
XAAMAFCFLETLWWEFTASYDTTCIGLASRPYAFLEFDSIIQKVKWHFNYVSSSQMECSLEKIQEELKLQPPAVLTLEDTDVANGVMNGHTPMHLEPAPNFRMEPVTALGILSLILNIMCAALNLIRGVHLAEHSLQVAHEEIGNILAFLVPFVACIFQCYLYLFYSPARTMKVVLMLLFICLGNMYLHGLRNLWQILFHIGVAFLSSYQILTRQLQEKQSDCGV

SEQ ID NO: 11794 - protein, 286 aa, Homo Sapiens
FGGKLVTFENVRMPSHQGAEQQQQQHHVFISQVVTEKEFLSRSDQLQQAVQSQGFINYCQKKIDASQTEFEKNVWSFLKVNFEDDSRGKYLELLGYRKEDLGKKALKDSDQVAQSDGEESPAAEEQLLGEHIKEEKEESEFLPSSGGTFNISVSGDIDGLITQALLTGNFESAVDLCLHDNRMADAIILAIAGGQELLARTQKKYFAKSQSKITRLITAVVMKNWKEIVESCDLKNWREALAAVLTYAKPDEFSALCDLLGTRLENEGDSLLQTQACLCYICAGNV

SEQ ID NO: 11795 - protein, 11 aa, Homo Sapiens
MKLKEVDRTAM

SEQ ID NO: 11796 - protein, 27 aa, Homo Sapiens
MKLKEVDRTAMQAWSPAQNHPIYLATG

SEQ ID NO: 11797 - protein, 65 aa, Homo Sapiens
MKLKEVDRTAMQAWSPAQNHPIYLATGTSAQQLDATFSTNASLEIFELDLSDPSLDMKSCATFSS

SEQ ID NO: 11798 - protein, 66 aa, Homo Sapiens
MKLKEVDRTAMQAWSPAQNHPIYLATGTSAQQLDATFSTNASLEIFELDLSDPSLDMKSCATFSSS

SEQ ID NO: 11799 - protein, 81 aa, Homo Sapiens
MKLKEVDRTAMQAWSPAQNHPIYLATGTSAQQLDATFSTNASLEIFELDLSDPSLDMKSCATFSSSHRYHKLIWGPYKMDS

SEQ ID NO: 11800 - protein, 92 aa, Homo Sapiens
MKLKEVDRTAMQAWSPAQNHPIYLATGTSAQQLDATFSTNASLEIFELDLSDPSLDMKSCATFSSSHRYHKLIWGPYKMDSKGDVSGVLIAD

SEQ ID NO: 11801 - protein, 165 aa, Homo Sapiens
MKLKEVDRTAMQAWSPAQNHPIYLATGTSAQQLDATFSTNASLEIFELDLSDPSLDMKSCATFSSSHRYHKLIWGPYKMDSKGDVSGVLIAGGENGNIILYDPSKIIAGDKEVVIAQNDKHTGPVRALDVNIFQTNLVASGANESEIYIWDLNNFATPMTPGAKT

SEQ ID NO: 11802 - protein, 166 aa, Homo Sapiens
MKLKEVDRTAMQAWSPAQNHPIYLATGTSAQQLDATFSTNASLEIFELDLSDPSLDMKSCATFSSSHRYHKLIWGPYKMDSKGDVSGVLIAGGENGNIILYDPSKIIAGDKEVVIAQNDKHTGPVRALDVNIFQTNLVASGANESEIYIWDLNNFATPMTPGAKTQ

SEQ ID NO: 11803 - protein, 1106 aa, Homo Sapiens
MKLKEVDRTAMQAWSPAQNHPIYLATGTSAQQLDATFSTNASLEIFELDLSDPSLDMKSCATFSSSHRYHKLIWGPYKMDSKGDVSGVLIAGGENGNIILYDPSKIIAGDKEVVIAQNDKHTGPVRALDVNIFQTNLVASGANESEIYIWDLNNFATPMTPGAKTQPPEDISCIAWNRQVQHILASASPSGRATVWDLRKNEPIIKVSDHSNRMHCSGLAWHPDVATQMVLASEDDRLPVIQMWDLRFASSPLRVLENHARGILAIAWSMADPELLLSCGKDAKILCSNPNTGEVLYELPTNTQWCFDIQWCPRNPAVLSAASFDGRISVYSIMGGSTDGLRQKQVDKLSSSFGNLDPFGTGQPLPPLQIPQQTAQHSIVLPLKKPPKWIRRPVGASFSFGGKLVTFENVRMPSHQGAEQQQQQHHVFISQVVTEKEFLSRSDQLQQAVQSQGFINYCQKKIDASQTEFEKNVWSFLKVNFEDDSRGKYLELLGYRKEDLGKKIALALNKVDGANVALKDSDQVAQSDGEESPAAEEQLLGEHIKEEKEESEFLPSSGGTFNISVSGDIDGLITQALLTGNFESAVDLCLHDNRMADAIILAIAGGQELLARTQKKYFAKSQSKITRLITAVVMKNWKEIVESCDLKNWREALAAVLTYAKPDEFSALCDLLGTRLENEGDSLLQTQACLCYICAGNVEKLVACWTKAQDGSHPLSLQDLIEKVVILRKAVQLTQAMDTSTVGVLLAAKMSQYANLLAAQGSIAAALAFLPDNTNQPNIMQLRDRLCRAQGEPVAGHESPKIPYEKQQLPKGRPGPVAGHHQMPRVQTQQYYPHGENPPPPGFIMHGNVNPNAAGQLPTSPGHMHTQVPPYPQPQRPQNGWNDPPALNRVPKKKKMPENFMPPVPITSPIMNPLGDPQSQMLQQQPSAPVPLSSQSSFPQPHLPGGQPFHGVQQPLGQTGMPPSFSKPNIEGAPGAPIGNTFQHVQSLPTKKITKKPIPDEHLILKTTFEDLIQRCLSSATDPQTKRKLDDASKRLEFLYDKLREQTLSPTITSGLHNIARSIETRNYSEGLTMHTHIVSTSNFSETSAFMPVLKVVLTQANKLGV

SEQ ID NO: 11804 - protein, 1181 aa, Homo Sapiens
MKLKEVDRTAMQAWSPAQNHPIYLATGTSAQQLDATFSTNASLEIFELDLSDPSLDMKSCATFSSSHRYHKLIWGPYKMDSKGDVSGVLIAGGENGNIILYDPSKIIAGDKEVVIAQNDKHTGPVRALDVNIFQTNLVASGANESEIYIWDLNNFATPMTPGAKTQPPEDISCIAWNRQVQHILASASPSGRATVWDLRKNEPIIKVSDHSNRMHCSGLAWHPDVATQMVLASEDDRLPVIQMWDLRFASSPLRVLENHARGILAIAWSMADPELLLSCGKDAKILCSNPNTGEVLYELPTNTQWCFDIQWCPRNPAVLSAASFDGRISVYSIMGGSTDGLRQKQVDKLSSSFGNLDPFGTGQPLPPLQIPQQTAQHSIVLPLKKPPKWIRRPVGASFSFGGKLVTFENVRMPSHQGAEQQQQQHHVFISQVVTEKEFLSRSDQLQQAVQSQGFINYCQKKIDASQTEFEKNVWSFLKVNFEDDSRGKYLELLGYRKEDLGKKHIKEEKEESEFLPSSGGTFNISVSGDIDGLITQALLTGNFESAVDLCLHDNRMADAIILAIAGGQELLARTQKKYFAKSQSKITRLITAVVMKNWKEIVESCDLKNWREALAAVLTYAKPDEFSALCDLLGTRLENEGDSLLQTQACLCYICAGNVEKLVACWTKAQDGSHPLSLQDLIEKVVILRKAVQLTQAMDTSTVGVLLAAKMSQYANLLAAQGSIAAALAFLPDNTNQPNIMQLRDRLCRAQGEPVAGHESPKIPYEKQQLPKGRPGPVAGHHQMPRVQTQQYYPHGENPPPPGFIMHGNVNPNAAGQLPTSPGHMHTQVPPYPQPQPYQPAQPYPFGTGGSAMYRPQQPVAPPTSNAYPNTPYISSASSYTGQSQLYAAQHQASSPTSSPATSFPPPPSSGASFQHGGPGAPPSSSAYALPPGTTGTLPAASELPASQRTGPQNGWNDPPALNRVPKKKKMPENFMPPVPITSPIMNPLGDPQSQMLQQQPSAPVPLSSQSSFPQPHLPGGQPFHGVQQPLGQTGMPPSFSKPNIEGAPGAPIGNTFQHVQSLPTKKITKKPIPDEHLILKTTFEDLIQRCLSSATDPQTKRKLDDASKRLEFLYDKLREQTLSPTITSGLHNIARSIETRNYSEGLTMHTHIVSTSNFSETSAFMPVLKVVLTQANKLGV

SEQ ID NO: 11805 - protein, 1220 aa, Homo Sapiens
MKLKEVDRTAMQAWSPAQNHPIYLATGTSAQQLDATFSTNASLEIFELDLSDPSLDMKSCATFSSSHRYHKLIWGPYKMDSKGDVSGVLIAGGENGNIILYDPSKIIAGDKEVVIAQNDKHTGPVRALDVNIFQTNLVASGANESEIYIWDLNNFATPMTPGAKTQPPEDISCIAWNRQVQHILASASPSGRATVWDLRKNEPIIKVSDHSNRMHCSGLAWHPDVATQMVLASEDDRLPVIQMWDLRFASSPLRVLENHARGILAIAWSMADPELLLSCGKDAKILCSNPNTGEVLYELPTNTQWCFDIQWCPRNPAVLSAASFDGRISVYSIMGGSTDGLRQKQVDKLSSSFGNLDPFGTGQPLPPLQIPQQTAQHSIVLPLKKPPKWIRRPVGASFSFGGKLVTFENVRMPSHQGAEQQQQQHHVFISQVVTEKEFLSRSDQLQQAVQSQGFINYCQKKIDASQTEFEKNVWSFLKVNFEDDSRGKYLELLGYRKEDLGKKIALALNKVDGANVALKDSDQVAQSDGEESPAAEEQLLGEHIKEEKEESEFLPSSGGTFNISVSGDIDGLITQALLTGNFESAVDLCLHDNRMADAIILAIAGGQELLARTQKKYFAKSQSKITRLITAVVMKNWKEIVESCDLKNWREALAAVLTYAKPDEFSALCDLLGTRLENEGDSLLQTQACLCYICAGNVEKLVACWTKAQDGSHPLSLQDLIEKVVILRKAVQLTQAMDTSTVGVLLAAKMSQYANLLAAQGSIAAALAFLPDNTNQPNIMQLRDRLCRAQGEPVAGHESPKIPYEKQQLPKGRPGPVAGHHQMPRVQTQQYYPHGENPPPPGFIMHGNVNPNAAGQLPTSPGHMHTQVPPYPQPQPYQPAQPYPFGTGGSAMYRPQQPVAPPTSNAYPNTPYISSASSYTGQSQLYAAQHQASSPTSSPATSFPPPPSSGASFQHGGPGAPPSSSAYALPPGTTGTLPAASELPASQRTGPQNGWNDPPALNRVPKKKKMPENFMPPVPITSPIMNPLGDPQSQMLQQQPSAPVPLSSQSSFPQPHLPGGQPFHGVQQPLGQTGMPPSFSKPNIEGAPGAPIGNTFQHVQSLPTKKITKKPIPDEHLILKTTFEDLIQRCLSSATDPQTKRKLDDASKRLEFLYDKLREQTLSPTITSGLHNIARSIETRNYSEGLTMHTHIVSTSNFSETSAFMPVLKVVLTQANKLGV

SEQ ID NO: 11806 - protein, 1220 aa, Homo Sapiens; identical to SEQ ID NO: 11805

SEQ ID NO: 11807 - protein, 1220 aa, Homo Sapiens; identical to SEQ ID NO: 11805

SEQ ID NO: 11808 - protein, 1251 aa, Homo Sapiens
MKLKEVDRTAMQAWSPAQNHPIYLATGTSAQQLDATFSTNASLEIFELDLSDPSLDMKSCATFSSSHRYHKLIWGPYKMDSKGDVSGVLIAGGENGNIILYDPSKIIAGDKEVVIAQNDKHTGPVRALDVNIFQTNLVASGANESEIYIWDLNNFATPMTPGAKTQPPEDISCIAWNRQVQHILASASPSGRATVWDLRKNEPIIKVSDHSNRMHCSGLAWHPDVATQMVLASEDDRLPVIQMWDLRFASSPLRVLENHARGILAIAWSMADPELLLSCGKDAKILCSNPNTGEVLYELPTNTQWCFDIQWCPRNPAVLSAASFDGRISVYSIMGGSTDGLRQKQVDKLSSSFGNLDPFGTGQPLPPLQIPQQTAQHSIVLPLKKPPKWIRRPVGASFSFGGKLVTFENVRMPSHQGAEQQQQQHHVFISQVVTEKEFLSRSDQLQQAVQSQGFINYCQKKIDASQTEFEKNVWSFLKVNFEDDSRGKYLELLGYRKEDLGKKIALALNKVDGANVALKDSDQVAQSDGEESPAAEEQLLGEHIKEEKEESEFLPSSGGTFNISVSGDIDGLITQALLTGNFESAVDLCLHDNRMADAIILAIAGGQELLARTQKKYFAKSQSKITRLITAVVMKNWKEIVESCDLKNWREALAAVLTYAKPDEFSALCDLLGTRLENEGDSLLQTQACLCYICAGNVEKLVACWTKAQDGSHPLSLQDLIEKVVILRKAVQLTQAMDTSTVGVLLAAKMSQYANLLAAQGSIAAALAFLPDNTNQPNIMQLRDRLCRAQGEPVAGHESPKIPYEKQQLPKGRPGPVAGHHQMPRVQTQQYYPHVRIAPTVTTWSNKTPTALPSHPPAASPSDTQGENPPPPGFIMHGNVNPNAAGQLPTSPGHMHTQVPPYPQPQPYQPAQPYPFGTGGSAMYRPQQPVAPPTSNAYPNTPYISSASSYTGQSQLYAAQHQASSPTSSPATSFPPPPSSGASFQHGGPGAPPSSSAYALPPGTTGTLPAASELPASQRTGPQNGWNDPPALNRVPKKKKMPENFMPPVPITSPIMNPLGDPQSQMLQQQPSAPVPLSSQSSFPQPHLPGGQPFHGVQQPLGQTGMPPSFSKPNIEGAPGAPIGNTFQHVQSLPTKKITKKPIPDEHLILKTTFEDLIQRCLSSATDPQTKRKLDDASKRLEFLYDKLREQTLSPTITSGLHNIARSIETRNYSEGLTMHTHIVSTSNFSETSAFMPVLKVVLTQANKLGV

SEQ ID NO: 11809 - protein, 1067 aa, Homo Sapiens
MKLKEVDRTAMQAWSPAQNHPIYLATGTSAQQLDATFSTNASLEIFELDLSDPSLDMKSCATFSSSHRYHKLIWGPYKMDSKGDVSGVLIAGGENGNIILYDPSKIIAGDKEVVIAQNDKHTGPVRALDVNIFQTNLVASGANESEIYIWDLNNFATPMTPGAKTQPPEDISCIAWNRQVQHILASASPSGRATVWDLRKNEPIIKVSDHSNRMHCSGLAWHPDVATQMVLASEDDRLPVIQMWDLRFASSPLRVLENHARGILAIAWSMADPELLLSCGKDAKILCSNPNTGEVLYELPTNTQWCFDIQWCPRNPAVLSAASFDGRISVYSIMGGSTDGLRQKQVDKLSSSFGNLDPFGTGQPLPPLQIPQQTAQHSIVLPLKKPPKWIRRPVGASFSFGGKLVTFENVRMPSHQGAEQQQQQHHVFISQVVTEKEFLSRSDQLQQAVQSQGFINYCQKKIDASQTEFEKNVWSFLKVNFEDDSRGKYLELLGYRKEDLGKKHIKEEKEESEFLPSSGGTFNISVSGDIDGLITQALLTGNFESAVDLCLHDNRMADAIILAIAGGQELLARTQKKYFAKSQSKITRLITAVVMKNWKEIVESCDLKNWREALAAVLTYAKPDEFSALCDLLGTRLENEGDSLLQTQACLCYICAGNVEKLVACWTKAQDGSHPLSLQDLIEKVVILRKAVQLTQAMDTSTVGVLLAAKMSQYANLLAAQGSIAAALAFLPDNTNQPNIMQLRDRLCRAQGEPVAGHESPKIPYEKQQLPKGRPGPVAGHHQMPRVQTQQYYPHGENPPPPGFIMHGNVNPNAAGQLPTSPGHMHTQVPPYPQPQRPQNGWNDPPALNRVPKKKKMPENFMPPVPITSPIMNPLGDPQSQMLQQQPSAPVPLSSQSSFPQPHLPGGQPFHGVQQPLGQTGMPPSFSKPNIEGAPGAPIGNTFQHVQSLPTKKITKKPIPDEHLILKTTFEDLIQRCLSSATDPQTKRKLDDASKRLEFLYDKLREQTLSPTITSGLHNIARSIETRNYSEGLTMHTHIVSTSNFSETSAFMPVLKVVLTQANKLGV

SEQ ID NO: 11810 - protein, 1106 aa, Homo Sapiens; identical to SEQ ID NO: 11803

SEQ ID NO: 11811 - protein, 1067 aa, Homo Sapiens; identical to SEQ ID NO: 11809

SEQ ID NO: 11812 - protein, 1166 aa, Homo Sapiens
MKLKEVDRTAMQAWSPAQNHPIYLATGTSAQQLDATFSTNASLEIFELDLSDPSLDMKSCATFSSSHRYHKLIWGPYKMDSKGDVSGVLIAGGENGNIILYDPSKIIAGDKEVVIAQNDKHTGPVRALDVNIFQTNLVASGANESEIYIWDLNNFATPMTPGAKTQPPEDISCIAWNRQVQHILASASPSGRATVWDLRKNEPIIKVSDHSNRMHCSGLAWHPDVATQMVLASEDDRLPVIQMWDLRFASSPLRVLENHARGILAIAWSMADPELLLSCGKDAKILCSNPNTGEVLYELPTNTQWCFDIQWCPRNPAVLSAASFDGRISVYSIMGGSTDGLRQKQVDKLSSSFGNLDPFGTGQPLPPLQIPQQTAQHSIVLPLKKPPKWIRRPVGASFSFGGKLVTFENVRMPSHQGAEQQQQQHHVFISQVVTEKEFLSRSDQLQQAVQSQGFINYCQKKIDASQTEFEKNVWSFLKVNFEDDSRGKYLELLGYRKEDLGKKHIKEEKEESEFLPSSGGTFNISVSGDIDGLITQALLTGNFESAVDLCLHDNRMADAIILAIAGGQELLARTQKKYFAKSQSKITRLITAVVMKNWKEIVESCDLKNWREALAAVLTYAKPDEFSALCDLLGTRLENEGDSLLQTQACLCYICAGNVEKLVACWTKAQDGSHPLSLQDLIEKVVILRKAVQLTQAMDTSTVGVLLAAKMSQYANLLAAQGSIAAALAFLPDNTNQPNIMQLRDRLCRAQGEPVAGHESPKIPYEKQQLPKGRPGPVAGHHQMPRVQTQQYYPHGENPPPPGFIMHGNVNPNAAGQLPTSPGHMHTQVPPYPQPQPYQPAQPYPFGTGGSAMYRPQQPVAPPTSNAYPNTPYISSASSYTGQSQLYAAQHQASSPTSSPATSFPPPPSSGASFQHGGPGAPPSSSAYALPPGTTGPQNGWNDPPALNRVPKKKKMPENFMPPVPITSPIMNPLGDPQSQMLQQQPSAPVPLSSQSSFPQPHLPGGQPFHGVQQPLGQTGMPPSFSKPNIEGAPGAPIGNTFQHVQSLPTKKITKKPIPDEHLILKTTFEDLIQRCLSSATDPQTKRKLDDASKRLEFLYDKLREQTLSPTITSGLHNIARSIETRNYSEGLTMHTHIVSTSNFSETSAFMPVLKVVLTQANKLGV

SEQ ID NO: 11813 - protein, 1205 aa, Homo Sapiens
MKLKEVDRTAMQAWSPAQNHPIYLATGTSAQQLDATFSTNASLEIFELDLSDPSLDMKSCATFSSSHRYHKLIWGPYKMDSKGDVSGVLIAGGENGNIILYDPSKIIAGDKEVVIAQNDKHTGPVRALDVNIFQTNLVASGANESEIYIWDLNNFATPMTPGAKTQPPEDISCIAWNRQVQHILASASPSGRATVWDLRKNEPIIKVSDHSNRMHCSGLAWHPDVATQMVLASEDDRLPVIQMWDLRFASSPLRVLENHARGILAIAWSMADPELLLSCGKDAKILCSNPNTGEVLYELPTNTQWCFDIQWCPRNPAVLSAASFDGRISVYSIMGGSTDGLRQKQVDKLSSSFGNLDPFGTGQPLPPLQIPQQTAQHSIVLPLKKPPKWIRRPVGASFSFGGKLVTFENVRMPSHQGAEQQQQQHHVFISQVVTEKEFLSRSDQLQQAVQSQGFINYCQKKIDASQTEFEKNVWSFLKVNFEDDSRGKYLELLGYRKEDLGKKIALALNKVDGANVALKDSDQVAQSDGEESPAAEEQLLGEHIKEEKEESEFLPSSGGTFNISVSGDIDGLITQALLTGNFESAVDLCLHDNRMADAIILAIAGGQELLARTQKKYFAKSQSKITRLITAVVMKNWKEIVESCDLKNWREALAAVLTYAKPDEFSALCDLLGTRLENEGDSLLQTQACLCYICAGNVEKLVACWTKAQDGSHPLSLQDLIEKVVILRKAVQLTQAMDTSTVGVLLAAKMSQYANLLAAQGSIAAALAFLPDNTNQPNIMQLRDRLCRAQGEPVAGHESPKIPYEKQQLPKGRPGPVAGHHQMPRVQTQQYYPHGENPPPPGFIMHGNVNPNAAGQLPTSPGHMHTQVPPYPQPQPYQPAQPYPFGTGGSAMYRPQQPVAPPTSNAYPNTPYISSASSYTGQSQLYAAQHQASSPTSSPATSFPPPPSSGASFQHGGPGAPPSSSAYALPPGTTGPQNGWNDPPALNRVPKKKKMPENFMPPVPITSPIMNPLGDPQSQMLQQQPSAPVPLSSQSSFPQPHLPGGQPFHGVQQPLGQTGMPPSFSKPNIEGAPGAPIGNTFQHVQSLPTKKITKKPIPDEHLILKTTFEDLIQRCLSSATDPQTKRKLDDASKRLEFLYDKLREQTLSPTITSGLHNIARSIETRNYSEGLTMHTHIVSTSNFSETSAFMPVLKVVLTQANKLGV

SEQ ID NO: 11814 - protein, 877 aa, Homo Sapiens
MKLKEVDRTAMQAWSPAQNHPIYLATGTSAQQLDATFSTNASLEIFELDLSDPSLDMKSCATFSSSHRYHKLIWGPYKMDSKGDVSGVLIAGGENGNIILYDPSKIIAGDKEVVIAQNDKHTGPVRALDVNIFQTNLVASGANESEIYIWDLNNFATPMTPGAKTQPPEDISCIAWNRQVQHILASASPSGRATVWDLRKNEPIIKVSDHSNRMHCSGLAWHPDVATQMVLASEDDRLPVIQMWDLRFASSPLRVLENHARGILAIAWSMADPELLLSCGKDAKILCSNPNTGEVLYELPTNTQWCFDIQWCPRNPAVLSAASFDGRISVYSIMGGSTDGLRQKQVDKLSSSFGNLDPFGTGQPLPPLQIPQQTAQHSIVLPLKKPPKWIRRPVGASFSFGGKLVTFENVRMPSHQGAEQQQQQHHVFISQVVTEKEFLSRSDQLQQAVQSQGFINYCQKKIDASQTEFEKNVWSFLKVNFEDDSRGKYLELLGYRKEDLGKKIALALNKVDGANVALKDSDQVAQSDGEESPAAEEQLLGEHIKEEKEESEFLPSSGGTFNISVSGDIDGLITQALLTGNFESAVDLCLHDNRMADAIILAIAGGQELLARTQKKYFAKSQSKITRLITAVVMKNWKEIVESCDLKNWREALAAVLTYAKPDEFSALCDLLGTRLENEGDSLLQTQACLCYICAGNVEKLVACWTKAQDGSHPLSLQDLIEKVVILRKAVQLTQAMDTSTVGVLLAAKMSQYANLLAAQGSIAAALAFLPDNTNQPNIMQLRDRLCRAQGEPVAGHESPKIPYEKQQLPKGRPGPVAGHHQMPRVQTQQYYPHGENPPPPGFIMHGNVNPNAAGQLPTSPGHMHTQVPPYPQPQRK

SEQ ID NO: 11815 - protein, 68 aa, Homo Sapiens
MKLKEVDRTAMQAWSPAQNHPIYLATGTSAQQLDATFSTNASLEIFELDLSDPSLDMKSCATFSSSHS

SEQ ID NO: 11816 - protein, 1200 aa, Homo Sapiens
MLGESDERCTNAGSGCRRSSPGTSAQQLDATFSTNASLEIFELDLSDPSLDMKSCATFSSSHRYHKLIWGPYKMDSKGDVSGVLIAGGENGNIILYDPSKIIAGDKEVVIAQNDKHTGPVRALDVNIFQTNLVASGANESEIYIWDLNNFATPMTPGAKTQPPEDISCIAWNRQVQHILASASPSGRATVWDLRKNEPIIKVSDHSNRMHCSGLAWHPDVATQMVLASEDDRLPVIQMWDLRFASSPLRVLENHARGILAIAWSMADPELLLSCGKDAKILCSNPNTGEVLYELPTNTQWCFDIQWCPRNPAVLSAASFDGRISVYSIMGGSTDGLRQKQVDKLSSSFGNLDPFGTGQPLPPLQIPQQTAQHSIVLPLKKPPKWIRRPVGASFSFGGKLVTFENVRMPSHQGAEQQQQQHHVFISQVVTEKEFLSRSDQLQQAVQSQGFINYCQKKIDASQTEFEKNVWSFLKVNFEDDSRGKYLELLGYRKEDLGKKIALALNKVDGANVALKDSDQVAQSDGEESPAAEEQLLGEHIKEEKEESEFLPSSGGTFNISVSGDIDGLITQALLTGNFESAVDLCLHDNRMADAIILAIAGGQELLARTQKKYFAKSQSKITRLITAVVMKNWKEIVESCDLKNWREALAAVLTYAKPDEFSALCDLLGTRLENEGDSLLQTQACLCYICAGNVEKLVACWTKAQDGSHPLSLQDLIEKVVILRKAVQLTQAMDTSTVGVLLAAKMSQYANLLAAQGSIAAALAFLPDNTNQPNIMQLRDRLCRAQGEPVAGHESPKIPYEKQQLPKGRPGPVAGHHQMPRVQTQQYYPHGENPPPPGFIMHGNVNPNAAGQLPTSPGHMHTQVPPYPQPQPYQPAQPYPFGTGGSAMYRPQQPVAPPTSNAYPNTPYISSASSYTGQSQLYAAQHQASSPTSSPATSFPPPPSSGASFQHGGPGAPPSSSAYALPPGTTGPQNGWNDPPALNRVPKKKKMPENFMPPVPITSPIMNPLGDPQSQMLQQQPSAPVPLSSQSSFPQPHLPGGQPFHGVQQPLGQTGMPPSFSKPNIEGAPGAPIGNTFQHVQSLPTKKITKKPIPDEHLILKTTFEDLIQRCLSSATDPQTKRKLDDASKRLEFLYDKLREQTLSPTITSGLHNIARSIETRNYSEGLTMHTHIVSTSNFSETSAFMPVLKVVLTQANKLGV

SEQ ID NO: 11817 - protein, 969 aa, Homo Sapiens
MVKLVLLSIVLLKVTVPKLSNDLLQLDFMPIHRGILAIAWSMADPELLLSCGKDAKILCSNPNTGEVLYELPTNTQWCFDIQWCPRNPAVLSAASFDGRISVYSIMGGSTDGLRQKQVDKLSSSFGNLDPFGTGQPLPPLQIPQQTAQHSIVLPLKKPPKWIRRPVGASFSFGGKLVTFENVRMPSHQGAEQQQQQHHVFISQVVTEKEFLSRSDQLQQAVQSQGFINYCQKKIDASQTEFEKNVWSFLKVNFEDDSRGKYLELLGYRKEDLGKKHIKEEKEESEFLPSSGGTFNISVSGDIDGLITQALLTGNFESAVDLCLHDNRMADAIILAIAGGQELLARTQKKYFAKSQSKITRLITAVVMKNWKEIVESCDLKNWREALAAVLTYAKPDEFSALCDLLGTRLENEGDSLLQTQACLCYICAGNVEKLVACWTKAQDGSHPLSLQDLIEKVVILRKAVQLTQAMDTSTVGVLLAAKMSQYANLLAAQGSIAAALAFLPDNTNQPNIMQLRDRLCRAQGEPVAGHESPKIPYEKQQLPKGRPGPVAGHHQMPRVQTQQYYPHVRIAPTVTTWSNKTPTALPSHPPAASPSDTQGENPPPPGFIMHGNVNPNAAGQLPTSPGHMHTQVPPYPQPQPYQPAQPYPFGTGGSAMYRPQQPVAPPTSNAYPNTPYISSASSYTGQSQLYAAQHQASSPTSSPATSFPPPPSSGASFQHGGPGAPPSSSAYALPPGTTGPQNGWNDPPALNRVPKKKKMPENFMPPVPITSPIMNPLGDPQSQMLQQQPSAPVPLSSQSSFPQPHLPGGQPFHGVQQPLGQTGMPPSFSKPNIEGAPGAPIGNTFQHVQSLPTKKITKKPIPDEHLILKTTFEDLIQRCLSSATDPQTKRKLDDASKRLEFLYDKLREQTLSPTITSGLHNIARSIETRNYSEGLTMHTHIVSTSNFSETSAFMPVLKVVLTQANKLGV

SEQ ID NO: 11818 - protein, 235 aa, Homo Sapiens
TQDPAAEGPRQQDEVKGSRSYSHAGMEPCPESPHLPSNRYHKLIWGPYKMDSKGDVSGVLIAGGENGNIILYDPSKIIAGDKEVVIAQNDKHTGPVRALDVNIFQTNLVASGANESEIYIWDLNNFATPMTPGAKTQPPEDISCIAWNRQVQHILASASPSGRATVWDLRKNEPIIKVSDHSNRMHCSGLAWHPDVATQMVLASEDDRLPVIQMWDLRFASSPLRVLENHARYRA

SEQ ID NO: 11819 - protein, 237 aa, Homo Sapiens
  misc_feature (1)..(1): Xaa can be any naturally occurring amino acid
XAVQSQGFINYCQKKIDASQTEFEKNVWSFLKVNFEDDSRGKYLELLGYRKEDLGKKHIKEEKEESEFLPSSGGTFNISVSGDIDGLITQALLTGNFESAVDLCLHDNRMADAIILAIAGGQELLARTQKKYFAKSQSKITRLITAVVMKNWKEIVESCDLKNWREALAAVLTYAKPDEFSALCGNVEKLVACWTKAQDGSHPLSLQDLIEKVVILRKAVQLTQAMDTSTVGVLLAA

SEQ ID NO: 11820 - protein, 443 aa, Homo Sapiens
  misc_feature (1)..(1): Xaa can be any naturally occurring amino acid
XFGTGQPLPPLQIPQQTAQHSIVLPLKKPPKWIRRPVGASFSFGGKLVTFENVRMPSHQGAEQQQQQHHVFISQVVTEKEFLSRSDQLQQAVQSQGFINYCQKKIDASQTEFEKNVWSFLKVNFEDDSRGKYLELLGYRKEDLGKKIALALNKVDGANVHIKEEKEESEFLPSSGGTFNISVSGDIDGLITQALLTGNFESAVDLCLHDNRMADAIILAIAGGQELLARTQKKYFAKSQSKITRLITAVVMKNWKEIVESCDLKNWREALAAVLTYAKPDEFSALCDLLGTRLENEGDSLLQTQACLCYICAGNVEKLVACWTKAQDGSHPLSLQDLIEKVVILRKAVQLTQAMDTSTVGVLLAAKMSQYANLLAAQGSIAAALAFLPDNTNQPNIMQLRDRLCRAQGEPVAGHESPKIPYEKQQLPKGRPGPVAGHHQMPRV

SEQ ID NO: 11821 - protein, 383 aa, Homo Sapiens
  misc_feature (1)..(1): Xaa can be any naturally occurring amino acid
XNAAGQLPTSPGHMHTQVPPYPQPQPYQPAQPYPFGTGGSAMYRPQQPVAPPTSNAYPNTPYISSASSYTGQSQLYAAQHQASSPTSSPATSFPPPPSSGASFQHGGPGAPPSSSAYALPPGTTGTLPAASELPASQRTENQSIQDQAPMLEGPQNGWNDPPALNRVPKKKKMPENFMPPVPITSPIMNPLGDPQSQMLQQQPSAPVPLSSQSSFPQPHLPGGQPFHGVQQPLGQTGMPPSFSKPNIEGAPGAPIGNTFQHVQSLPTKKITKKPIPDEHLILKTTFEDLIQRCLSSATDPQTKRKLDDASKRLEFLYDKLREQTLSPTITSGLHNIARSIETRNYSEGLTMHTHIVSTSNFSETSAFMPVLKVVLTQANKLGV

SEQ ID NO: 11822 - protein, 181 aa, Homo Sapiens
  misc_feature (1)..(1): Xaa can be any naturally occurring amino acid
XPVPITSPIMNPLGDPQSQMLQQQPSAPVPLSSQSSFPQPHLPGGQPFHGVQQPLGQTGMPPSFSKPNIEGAPGAPIGNTFQHVQSLPTKKITKKPIPDEHLILKTTFEDLIQRCLSSATDPLSPTITSGLHNIARSIETRNYSEGLTMHTHIVSTSNFSETSAFMPVLKVVLTQANKLGV

SEQ ID NO: 11823 - protein, 219 aa, Homo Sapiens
  misc_feature (1)..(1): Xaa can be any naturally occurring amino acid
XQMPRVQTQQYYPHVRIAPTVTTWSNKTPTALPSHPPAASPSDTQGENPPPPGFIMHGNVNPNAAGQLPTSPGHMHTQVPPYPQPQRPQNGWNDPPALNRVPKKKKMPENFMPPVPITSPIMNPLGDPQSQMLQQQPSAPVPLSSQSSFPQPHLPGGQPFHGVQQPLGQTGMPPSFSKPNIEGAPGAPIGNTFQHVQSLPTKKITKKPIPDEHLILKTT

SEQ ID NO: 11824 - protein, 275 aa, Homo Sapiens
GTISSEIKSARGSHHLSIYAENSLKSDGYHKRTDRKSRIIAKNVSTSKPEFEFTTLDFPELQGAENNMSEIQKQPKWGPVHSVSTDISLLREVVKPAAVLSKGEIVVKNNPNESVTANAATNSPSCTRADPKNVSIPSSEALSSDPSYNKEKHIIHPTQKSKASQGSDLEQNEASRKNKKKKEKSTSKYEVLTVQEPPRIEDAEEFPNLAVASERRDRIETPKFQSKQQPQDNFKNNVKKSQLPVQLDLGGMLTALEKKQHSQHAKQSSKPVVVS

SEQ ID NO: 11825 - protein, 786 aa, Homo Sapiens
MAFGASTFPPQYLSSEITLHPYAYSPYTLDSTQNVYSVPGSQYLYNQPSCYRGFQTVKHRNENTCPLPQEMKALFKKKTYDEKKTYDQQKFDSERADGTISSEIKSARGSHHLSIYAENSLKSDGYHKRTDRKSRIIAKNVSTSKPEFEFTTLDFPELQGAENNMSEIQKQPKWGPVHSVSTDISLLREVVKPAAVLSKGEIVVKNNPNESVTANAATNSPSCTRELSWTPMGYVVRQTLSTELSAAPKNVTSMINLKTIASSADPKNVSIPSSEALSSDPSYNKEKHIIHPTQKSKASQGSDLEQNEASRKNKKKKEKSTSKYEVLTVQEPPRIEDAEEFPNLAVASERRDRIETPKFQSKQQPQDNFKNNVKKSQLPVQLDLGGMLTALEKKQHSQHAKQSSKPVVVSVGAVPVLSKECASGERGRRMSQMKTPHNPLDSSAPLMKKGKQREIPKAKKPTSLKKIILKERQERKQRLQENAVSPAFTSDDTQDGESGGDDQFPEQAELSGPEGMDELISTPSVEDKSEEPPGTELQRDTEASHLAPNHTTFPKIHSRRFRDYCSQMLSKEVDACVTDLLKELVRFQDRMYQKDPVKAKTKRRLVLGLREVLKHLKLKKLKCVIISPNCEKIQSKGGLDDTLHTIIDYACEQNIPFVFALNRKALGRSLNKAVPVSVVGIFSYDGAQDQFHKMVELTVAARQAYKTMLENVQQELVGEPRPQAPPSLPTQGPSCPAEDGPPALKEKEEPHYIEIWKKHLEAYSGCTLELEESLEASTSQMMNLNL

SEQ ID NO: 11826 - protein, 854 aa, Homo Sapiens
MASEGPREPESEGIKLSADVKPFVPRFAGLNVAWLESSEACVFPSSAATYYPFVQEPPVTEQKIYTEDMAFGASTFPPQYLSSEITLHPYAYSPYTLDSTQNVYSVPGSQYLYNQPSCYRGFQTVKHRNENTCPLPQEMKALFKKKTYDEKKTYDQQKFDSERADGTISSEIKSARGSHHLSIYAENSLKSDGYHKRTDRKSRIIAKNVSTSKPEFEFTTLDFPELQGAENNMSEIQKQPKWGPVHSVSTDISLLREVVKPAAVLSKGEIVVKNNPNESVTANAATNSPSCTRELSWTPMGYVVRQTLSTELSAAPKNVTSMINLKTIASSADPKNVSIPSSEALSSDPSYNKEKHIIHPTQKSKASQGSDLEQNEASRKNKKKKEKSTSKYEVLTVQEPPRIEDAEEFPNLAVASERRDRIETPKFQSKQQPQDNFKNNVKKSQLPVQLDLGGMLTALEKKQHSQHAKQSSKPVVVSVGAVPVLSKECASGERGRRMSQMKTPHNPLDSSAPLMKKGKQREIPKAKKPTSLKKIILKERQERKQRLQENAVSPAFTSDDTQDGESGGDDQFPEQAELSGPEGMDELISTPSVEDKSEEPPGTELQRDTEASHLAPNHTTFPKIHSRRFRDYCSQMLSKEVDACVTDLLKELVRFQDRMYQKDPVKAKTKRRLVLGLREVLKHLKLKKLKCVIISPNCEKIQSKGGLDDTLHTIIDYACEQNIPFVFALNRKALGRSLNKAVPVSVVGIFSYDGAQDQFHKMVELTVAARQAYKTMLENVQQELVGEPRPQAPPSLPTQGPSCPAEDGPPALKEKEEPHYIEIWKKHLEAYSGCTLELEESLEASTSQMMNLNL

SEQ ID NO: 11827 - protein, 60 aa, Homo Sapiens
MPLPILLHVQEQILKMLVYHLLKLYLRILPTTKKNTLFILPKSLKHHKVVTLNKMKPQER

SEQ ID NO: 11828 - protein, 781 aa, Homo Sapiens
MVRVLRSMCLPQLCSHILSVCSGTTSDRNVYSVPGSQYLYNQPSCYRGFQTVKHRNENTCPLPQEMKALFKKKTYDEKKTYDQQKFDSERADGTISSEIKSARGSHHLSIYAENSLKSDGYHKRTDRKSRIIAKNVSTSKPEFEFTTLDFPELQGAENNMSEIQKQPKWGPVHSVSTDISLLREVVKPAAVLSKGEIVVKNNPNESVTANAATNSPSCTRELSWTPMGYVVRQTLSTELSAAPKNVTSMINLKTIASSADPKNVSIPSSEALSSDPSYNKEKHIIHPTQKSKASQGSDLEQNEASRKNKKKKEKSTSKYEVLTVQEPPRIEDAEEFPNLAVASERRDRIETPKFQSKQQPQDNFKNNVKKSQLPVQLDLGGMLTALEKKQHSQHAKQSSKPVVVSVGAVPVLSKECASGERGRRMSQMKTPHNPLDSSAPLMKKGKQREIPKAKKPTSLKKIILKERQERKQRLQENAVSPAFTSDDTQDGESGGDDQFPEQAELSGPEGMDELISTPSVEDKSEEPPGTELQRDTEASHLAPNHTTFPKIHSRRFRDYCSQMLSKEVDACVTDLLKELVRFQDRMYQKDPVKAKTKRRLVLGLREVLKHLKLKKLKCVIISPNCEKIQSKGGLDDTLHTIIDYACEQNIPFVFALNRKALGRSLNKAVPVSVVGIFSYDGAQDQFHKMVELTVAARQAYKTMLENVQQELVGEPRPQAPPSLPTQGPSCPAEDGPPALKEKEEPHYIEIWKKHLEAYSGCTLELEESLEASTSQMMNLNL

SEQ ID NO: 11829 - protein, 43 aa, Homo Sapiens
MQTCPLAFPGHVSQALGTLLFLAASLSAQNEAACPRAGERHLQ

SEQ ID NO: 11830 - protein, 44 aa, Homo Sapiens
MQTCPLAFPGHVSQALGTLLFLAASLSAQNEGWDSPICTEGVVS

SEQ ID NO: 11831 - protein, 85 aa, Homo Sapiens
MQTCPLAFPGHVSQALGTLLFLAASLSAQNEGWDSPICTEGVVSVSWGENTVMSCNISNAFSHVNIKLRAHGQESAIFNEVAPGY

SEQ ID NO: 11832 - protein, 147 aa, Homo Sapiens
MQTCPLAFPGHVSQALGTLLFLAASLSAQNEGWDSPICTEGVVSVSWGENTVMSCNISNAFSHVNIKLRAHGQESAIFNEVAPGYFSRDGWQLQVQGGVAQLVIKGARDSHAGLYMWHLVGHQRNNRQVTLEVSEPRGLKDRASAQL

SEQ ID NO: 11833 - protein, 170 aa, Homo Sapiens
MQTCPLAFPGHVSQALGTLLFLAASLSAQNEGWDSPICTEGVVSVSWGENTVMSCNISNAFSHVNIKLRAHGQESAIFNEVAPGYFSRDGWQLQVQGGVAQLVIKGARDSHAGLYMWHLVGHQRNNRQVTLEVSEPRGLKDRASAQLLGPGTSRGAEPQSAPDTGFWPVP

SEQ ID NO: 11834 - protein, 149 aa, Homo Sapiens
MQTCPLAFPGHVSQALGTLLFLAASLSAQNEGWDSPICTEGVVSVSWGENTVMSCNISNAFSHVNIKLRAHGQESAIFNEVAPGYFSRDGWQLQVQGGVAQLVIKGARDSHAGLYMWHLVGHQRNNRQVTLEVSGAAVPSNAGRRSSSS

SEQ ID NO: 11835 - protein, 178 aa, Homo Sapiens
MQTCPLAFPGHVSQALGTLLFLAASLSAQNEGWDSPICTEGVVSVSWGENTVMSCNISNAFSHVNIKLRAHGQESAIFNEVAPGYFSRDGWQLQVQGGVAQLVIKGARDSHAGLYMWHLVGHQRNNRQVTLEVSGAEPQSAPDTGFWPVPAVVTAVFILLVALVMFAWYRCRCSQQRR

SEQ ID NO: 11836 - protein, 248 aa, Homo Sapiens
MQTCPLAFPGHVSQALGTLLFLAASLSAQNEGWDSPICTEGVVSVSWGENTVMSCNISNAFSHVNIKLRAHGQESAIFNEVAPGYFSRDGWQLQVQGGVAQLVIKGARDSHAGLYMWHLVGHQRNNRQVTLEVSGAEPQSAPDTGFWPVPAVVTAVFILLVALVMFAWYRCRCSQQRREKKFFLLEPQMKVAALRAGAQQGLSRASAELWTPDSEPTPRPLALVFKPSPLGALELLSPQPLFPYAADP

SEQ ID NO: 11837 - protein, 794 aa, Homo Sapiens
MRVRIGLTLLLCAVLLSLASASSDEEGSQDESLDSKTTLTSDESVKDHTTAGRVVAGQIFLDSEESELESSIQEEEDSLKSQEGESVTEDISFLESPNPENKDYEEPKKVRKPALTAIEGTAHGEPCHFPFLFLDKEYDECTSDGREDGRLWCATTYDYKADEKWGFCETEEEAAKRRQMQEAEMMYQTGMKILNGSNKKSQKREAYRYLQKAASMNHTKALERVSYALLFGDYLPQNIQAAREMFEKLTEEGSPKGQTALGFLYASGLGVNSSQAKALVYYTFGALGGNLIAHMVLGYRYWAGIGVLQSCESALTHYRLVANHVASDISLTGGSVVQRIRLPDEVENPGMNSGMLEEDLIQYYQFLAEKGDVQAQVGLGQLHLHGGRGVEQNHQRAFDYFNLAANAGNSHAMAFLGKMYSEGSDIVPQSNETALHYFKKAADMGNPVGQSGLGMAYLYGRGVQVNYDLALKYFQKAAEQGWVDGQLQLGSMYYNGIGVKRDYKQALKYFNLASQGGHILAFYNLAQMHASGTGVMRSCHTAVELFKNVCERGRWSERLMTAYNSYKDGDYNAAVIQYLLLAEQGYEVAQSNAAFILDQREASIVGENETYPRALLHWNRAASQGYTVARIKLGDYHFYGFGTDVDYETAFIHYRLASEQQHSAQAMFNLGYMHEKGLGIKQDIHLAKRFYDMAAEASPDAQVPVFLALCKLGVVYFLQYIRETNIRDMFTQLDMDQLLGPEWDLYLMTIIALLLGTVIAYRQRQHQDMPAPRPPGPRPAPPQQEGPPEQQPPQ

SEQ ID NO: 11838 - protein, 301 aa, Homo Sapiens
MRVRIGLTLLLCAVLLSLASASSDEEGSQDESLDSKTTLTSDESVKDHTTAGRVVAGQIFLDSEESELESSIQEEEDSLKSQEGESVTEDISFLESPNPENKDYEEPKKVRKPALTAIEGTAHGEPCHFPFLFLDKEYDECTSDGREDGRLWCATTYDYKADEKWGFCETEEEAAKRRQMQEAEMMYQTGMKILNGSNKKSQKREAYRYLQKAASMNHTKALERVSYALLFGDYLPQNIQAAREMFEKLTEEGSPKGQTALGFLYASGLGVNSSQAKALVYYTFGALGGNLIAHMVLVSRL

SEQ ID NO: 11839 - protein, 163 aa, Homo Sapiens
MRVRIGLTLLLCAVLLSLASASSDEEGSQDESLDSKTTLTSDESVKDHTTAGRVVAGQIFLDSEESELESSIQEEEDSLKSQEGESVTEDISFLESPNPENKDYEEPKKVRKPDKEYDECTSDGREDGRLWCATTYDYKADEKWGFCETEEEAAKRRQMQEAE

SEQ ID NO: 11840 - protein, 88 aa, Homo Sapiens
FNLLQLDPDCRGCCQEEAQFETKKYSSIVSKQECHHSNCMQELFLKFVDENWEGSLKSKYVRGSDPVLKLLDDNGNIAEELSILKWNT

SEQ ID NO: 11841 - protein, 164 aa, Homo Sapiens
MVAMAAGPSGCLVPAFGLRLLLATVLQAVSAFGAEFSSEACRELGFSSNLLCSSCDLLGQFNLLQLDPDCRGCCQEEAQFETKKLYAGAILEVCGKLGRFPQVQAFVRSDKPKLFRGLQIKYVRGSDPVLKLLDDNGNIAEELSILKWNTDSVEEFLSEKLERI

SEQ ID NO: 11842 - protein, 123 aa, Homo Sapiens
MVAMAAGPSGCLVPAFGLRLLLATVLQAVSAFGAEFSSEACRELGFSSNLLCSSCDLLGQFNLLQLDPDCRGCCQEEAQFETKKLYAGAILEVCGKLGRFPQVQVCPWFRPCIKAFGRQWEHC

SEQ ID NO: 11843 - protein, 164 aa, Homo Sapiens; identical to SEQ ID NO: 11841

SEQ ID NO: 11844 - protein, 123 aa, Homo Sapiens; identical to SEQ ID NO: 11842

SEQ ID NO: 11845 - protein, 144 aa, Homo Sapiens
MVAMAAGPSGCLVPAFGLRLLLATVLQAVSAFGAEFSSEACRELGFSSNLLCSSCDLLGQFNLLQLDPDCRGCCQEEAQFETKKYSSIVSKQECHHSNCMQELFLKFVDENWEGSLKSKLLLGVINPNCSEDCKSSMSVVQTLY

SEQ ID NO: 11846 - protein, 31 aa, Homo Sapiens
  misc_feature (1)..(1): Xaa can be any naturally occurring amino acid
XGLRLLLATVLQAVSVDHLRSCHRESRSDCS

SEQ ID NO: 11847 - protein, 144 aa, Homo Sapiens
MSLLLPPLALLLLLAALVAPATAATAYRPDWNRLSGLTRARVETCGGQLNRLKEVKAFVTQDIPFYHNLVMKHLPGADPELVLLGRRYEELERIPLSEMTREEINALVQELGFYRKAAPDAQVPPEYVWAPAKPPEETSDHADL

SEQ ID NO: 11848 - protein, 144 aa, Homo Sapiens; identical to SEQ ID NO: 11847

SEQ ID NO: 11849 - protein, 144 aa, Homo Sapiens; identical to SEQ ID NO: 11847

SEQ ID NO: 11850 - protein, 588 aa, Homo Sapiens
MGRARPGQRGPPSPGPAAQPPAPPRRRARSLALLGALLAAAAAAAVRVCARHAEAQAAARQELALKTLGTDGLFLFSSLDTDGDMYISPEEFKPIAEKLTGSCSVTQTGVQWCSHSSLQPQLPWLNSSCLSLLRSTPAASCEEEELPPDPSEETLTIEARFQPLLPETMTKSKDGFLGVSRLALSGLRNWTAAASPSAVFATRHFQPFLPPPGQELGEPWWIIPSELSMFTGYLSNNRFYPPPPKGKEVIIHRLLSMFHPRPFVKTRFAPQGAVACLTAISDFYYTVMFRIHAEFQLSEPPDFPFWFSPAQFTGHIILSKDATHVRDFRLFVPNHRSLNVDMEWLYGASESSNMEVDIGYIPQMELEATGPSVPSVILDEDGSMIDSHLPSGEPLQFVFEEIKWQQELSWEEAARRLEVAMYPFKKVSYLPFTEAFDRAKAENKLVHSILLWGALDDQSCGSGRTLRETVLESSPILTLLNESFISTWSLVKELEELQNNQENSSHQKLAGLHLEKYSFPVEMMICLPNGTVVHHINANYFLDITSVKPEEIESNLFSFSSTFEDPSTATYMQFLKEGLRRGLPLLQP

SEQ ID NO: 11851 - protein, 555 aa, Homo Sapiens
MGRARPGQRGPPSPGPAAQPPAPPRRRARSLALLGALLAAAAAAAVRVCARHAEAQAAARQELALKTLGTDGLFLFSSLDTDGDMYISPEEFKPIAEKLTGSTPAASCEEEELPPDPSEETLTIEARFQPLLPETMTKSKDGFLGVSRLALSGLRNWTAAASPSAVFATRHFQPFLPPPGQELGEPWWIIPSELSMFTGYLSNNRFYPPPPKGKEVIIHRLLSMFHPRPFVKTRFAPQGAVACLTAISDFYYTVMFRIHAEFQLSEPPDFPFWFSPAQFTGHIILSKDATHVRDFRLFVPNHRSLNVDMEWLYGASESSNMEVDIGYIPQMELEATGPSVPSVILDEDGSMIDSHLPSGEPLQFVFEEIKWQQELSWEEAARRLEVAMYPFKKVSYLPFTEAFDRAKAENKLVHSILLWGALDDQSCGSGRTLRETVLESSPILTLLNESFISTWSLVKELEELQNNQENSSHQKLAGLHLEKYSFPVEMMICLPNGTVVHHINANYFLDITSVKPEEIESNLFSFSSTFEDPSTATYMQFLKEGLRRGLPLLQP

SEQ ID NO: 11852 - protein, 556 aa, Homo Sapiens
MGRARPGQRGPPSPGPAAQPPAPPRRRARSLALLGALLAAAAAAAVRVCARHAEAQAAARQELALKTLGTDGLFLFSSLDTDGDMYISPEEFKPIAEKLTGSTPAASCEEEELPPDPSEETLTIEARFQPLLPETMTKSKDGFLGVSRLALSGLRNWTAAASPSAVFATRHFQPFLPPPGQELGEPWWIIPSELSMFTGYLSNNRFYPPPPKGKEVIIHRLLSMFHPRPFVKTRFAPQGAVACLTAISDFYYTVMFRIHAEFQLSEPPDFPFWFSPAQFTGHIILSKDATHVRDFRLFVPNHRSLNVDMEWLYGASESSNMEVDIGYIPQMELEATGPSVPSVILDEDGSMIDSHLPSGEPLQFVFEEIKWQQELSWEEAARRLEVAMYPFKKVSYLPFTEAFDRAKAENKLVHSILLWGALDDQSCHCSGRTLRETVLESSPILTLLNESFISTWSLVKELEELQNNQENSSHQKLAGLHLEKYSFPVEMMICLPNGTVVHHINANYFLDITSVKPEEIESNLFSFSSTFEDPSTATYMQFLKEGLRRGLPLLQP

SEQ ID NO: 11853 - protein, 66 aa, Homo Sapiens
MMICLPNGTVVHHINANYFLDITSVKPEEIESNLFSFSSTFEDPSTATYMQFLKEGLRRGLPLLQP

SEQ ID NO: 11854 - protein, 668 aa, Homo Sapiens
MAVYRAALGASLAAARLLPLGRCSPSPAPRSTLSGAAMEPAPRWLAGLRFDNRALRALPVEAPPPGPEGAPSAPRPVPGACFTRVQPTPLRQPRLVALSEPALALLGLGAPPAREAEAEAALFFSGNALLPGAEPAAHCYCGHQFGQFAGQLGDGAAMYLGEVCTATGERWELQLKGAGPTPFSRQADGRKVLRSSIREFLCSEAMFHLGVPTTRAGACVTSESTVVRDVFYDGNPKYEQCTVVLRVASTFIRFGSFEIFKSADEHTGRAGPSVGRNDIRVQLLDYVISSFYPEIQAAHASDSVQRNAAFFREVTRRTARMVAEWQCVGFCHGVLNTDNMSILGLTIDYGPFGFLDRYDPDHVCNASDNTGRYAYSKQPEVCRWNLRKLAEALQPELPLELGEAILAEEFDAEFQRHYLQKMRRKLGLVQVELEEDGALVSKLLETMHLTGADFTNTFYLLSSFPVELESPGLAEFLARLMEQCASLEELRLAFRPQMDPRQLSMMLMLAQSNPQLFALMGTRAGIARELERVEQQSRLEQLSAAELQSRNQGHWADWLQAYRARLDKDLEGAGDAAAWQAEHVRVMHANNPKYVLRNYIAQNAIEAAERGDFSEVRRVLKLLETPYHCEAGAATDAEATEADGADGRQRSYSSKPPLWAAELCVTSS

SEQ ID NO: 11855 - protein, 668 aa, Homo Sapiens; identical to SEQ ID NO: 11854

SEQ ID NO: 11856 - protein, 208 aa, Homo Sapiens
MWRSLGLALALCLLPSGGTESQDQSSLCKQPPAWSIRDQDPMLNSNGSVTVVALLQASYLCILQASKLEDLRVKLKKEGYSNISYIVVNHQGISSRLKYTHLKNKVSEHIPVYQQEENQTDVWTLLNGSKDDFLIYDRCGRLVYHLGLPFSFLTFPYVEEAIKIAYCEKKCGNCSLTTLKDEDFCKRVSLATVDKTVETPSPHYHHEH

SEQ ID NO: 11857 - protein, 371 aa, Homo Sapiens
MWRSLGLALALCLLPSGGTESQDQSSLCKQPPAWSIRDQDPMLNSNGSVTVVALLQASYLCILQASKLEDLRVKLKKEGYSNISYIVVNHQGISSRLKYTHLKNKVSEHIPVYQQEENQTDVWTLLNGSKDDFLIYDRCGRLVYHLGLPFSFLTFPYVEEAIKIAYCEKKCGNCSLTTLKDEDFCKRVSLATVDKTVETPSPHYHHEHHHNHGHQHLGSSELSENQQPGAPNAPTHPAPPGLHHHHKHKGQHRQGHPENRDMPASEDLQDLQKKLCRKRCINQLLCKLPTDSELAPRSCCHCRHLIFEKTGSAITQCKENLPSLCSQGLRAEENITESCQRLPPAAQISQQLIPTEASASRKNQAKKEPSN

SEQ ID NO: 11858 - protein, 371 aa, Homo Sapiens; identical to SEQ ID NO: 11857

SEQ ID NO: 11859 - protein, 371 aa, Homo Sapiens; identical to SEQ ID NO: 11857

SEQ ID NO: 11860 - protein, 308 aa, Homo Sapiens
MWRSLGLALALCLLPSGGTESQDQSSLCKQPPAWSIRDQDPMLNSNGSVTVVALLQASYLCILQASKLEDLRVKLKKEGYSNISYIVVNHQGISSRLKYTHLKNKVSEHIPVYQQEENQTDVWTLLNGSKDDFLIYDRCGRLVYHLGLPFSFLTFPYVEEAIKIAYCEKKCGNCSLTTLKDEDFCKRVSLATVDKTVETPSPHYHHEHHHNHGHQHLGSSELSENQQPGAPNAPTHPAPPGLHHHHKHKGQHRQGHPENRDMPASEDLQDLQKKLCRKRCINQLLCKLPTDSELAPRSCCHCRHLIFE

SEQ ID NO: 11861 - protein, 170 aa, Homo Sapiens
MWRSLGLALALCLLPSGGTESQDQSSLCKQPPAWSIRDQDPMLNSNGSVTVVALLQASYLCILQASKLSKMKTFVNVYLWLLWIKQLKLHRLITIMSIITIMDISTLAAVSFQRISNQEHQMLLLILLLQAFITTISTRVSIGRVTQRTEICQQVKIYKIYKRSSVERDV

SEQ ID NO: 11862 - protein, 19 aa, Homo Sapiens
MGWLTRIVCLFWGVLLTAR

SEQ ID NO: 11863 - protein, 37 aa, Homo Sapiens
MGWLTRIVCLFWGVLLTARANYQNGKNNVPRLKLSYK

SEQ ID NO: 11864 - protein, 149 aa, Homo Sapiens
MGWLTRIVCLFWGVLLTARANYQNGKNNVPRLKLSYKEMLESNNVITFNGLANSSSYHTFLLDEERSRLYVGAKDHIFSFDLVNIKDFQKIVWPVSYTRRDECKWAGKDILKECANFIKVLKAYNQTHLYACGTGAFHPICTYIEIGHH

SEQ ID NO: 11865 - protein, 771 aa, Homo Sapiens [sequence omitted]

SEQ ID NO: 11866 - protein, 771 aa, Homo Sapiens [sequence omitted]

SEQ ID NO: 11867 - protein, 214 aa, Homo Sapiens
MGRAGAAAVIPGLALLWAVGLGSAAPSPPRLRLSFQELQAWHGLQTFSLERTCCYQALLVDEERGRLFVGAENHVASLNLDNISKRAKKLAWPAPVEWREECNWAGKDIGTECMNFVKLLHAYNRTHLLACGTGAFHPTCAFVEVGHRAEEPVLRLDPGRIEDGKGKSPYDPRHRAASVLVGEELYSGVAADLMGRDFTIFRSLGQRPSLRTEP

SEQ ID NO: 11868 - protein, 748 aa, Homo Sapiens
MGRAGAAAVIPGLALLWAVGLGSAAPSPPRLRLSFQELQAWHGLQTFSLERTCCYQALLVDEERGRLFVGAENHVASLNLDNISKRAKKLAWPAPVEWREECNWAGKDIGTECMNFVKLLHAYNRTHLLACGTGAFHPTCAFVEVGHRAEEPVLRLDPGRIEDGKGKSPYDPRHRAASVLVGEELYSGVAADLMGRDFTIFRSLGQRPSLRTEPHDSRWLNEPKFVKVFWIPESENPDDDKIYFFFRETAVEAAPALGRLSVSRVGQICRNDVGGQRSLVNKWTTFLKARLVCSVPGVEGDTHFDQLQDVFLLSSRDHRTPLLYAVFSTSSIFQGSAVCVYSMNDVRRAFLGPFAHKEGPMHQWVSYQGRVPYPRPGMCPSKTFGTFSSTKDFPDDVIQFARNHPLMYNSVLPTGGRPLFLQVGANYTFTQIAADRVAAADGHYDVLFIGTDVGTVLKVISVPKGSRPSAEGLLLEELHVFEDSAAVTSMQISSKRHQLYVASRSAVAQIALHRCAAHGRVCTECCLARDPYCAWDGVACTRFQPSAKRRFRRQDVRNGDPSTLCSGDSSRPALLEHKVFGVEGSSAFLECEPRSLQARVEWTFQRAGVTAHTQVLAEERTERTARGLLLRRLRRRDSGVYLCAAVEQGFTQPLRRLSLHVLSATQAERLARAEEAAPAAPPGPKLWYRDFLQLVEPGGGGSANSLRMCRPQPALQSLPLESRRKGRNRRTHAPEPRAERGPRSATHW

SEQ ID NO: 11869 - protein, 754 aa, Homo Sapiens
MGRAGAAAVIPGLALLWAVGLGSAAPSPPRLRLSFQELQAWHGLQTFSLERTCCYQALLVDEERGRLFVGAENHVASLNLDNISKRAKKLAWPAPVEWREECNWAGKDIGTECMNFVKLLHAYNRTHLLACGTGAFHPTCAFVEVGHRAEEPVLRLDPGRIEDGKGKSPYDPRHRAASVLVGEELYSGVAADLMGRDFTIFRSLGQRPSLRTEPHDSRWLNEPKFVKVFWIPESENPDDDKIYFFFRETAVEAAPALGRLSVSRVGQICRNDVGGQRSLVNKWTTFLKARLVCSVPGVEGDTHFDQLRPFPAEDVFLLSSRDHRTPLLYAVFSTSSSIFQGSAVCVYSMNDVRRAFLGPFAHKEGPMHQWVSYQGRVPYPRPGMCPSKTFGTFSSTKDFPDDVIQFARNHPLMYNSVLPTGGRPLFLQVGANYTFTQIAADRVAAADGHYDVLFIGTDVGTVLKVISVPKGSRPSAEGLLLEELHVFEDSAAVTSMQISSKRHQLYVASRSAVAQIALHRCAAHGRVCTECCLARDPYCAWDGVACTRFQPSAKRRFRRQDVRNGDPSTLCSGDSSRPALLEHKVFGVEGSSAFLECEPRSLQARVEWTFQRAGVTAHTQVLAEERTERTARGLLLRRLRRRDSGVYLCAAVEQGFTQPLRRLSLHVLSATQAERLARAEEAAPAAPPGPKLWYRDFLQLVEPGGGGSANSLRMCRPQPALQSLPLESRRKGRNRRTHAPEPRAERGPRSATHW

SEQ ID NO: 11870 - protein, 749 aa, Homo Sapiens
MGRAGAAAVIPGLALLWAVGLGSAAPSPPRLRLSFQELQAWHGLQTFSLERTCCYQALLVDEERGRLFVGAENHVASLNLDNISKRAKKLAWPAPVEWREECNWAGKDIGTECMNFVKLLHAYNRTHLLACGTGAFHPTCAFVEVGHRAEEPVLRLDPGRIEDGKGKSPYDPRHRAASVLVGEELYSGVAADLMGRDFTIFRSLGQRPSLRTEPHDSRWLNEPKFVKVFWIPESENPDDDKIYFFFRETAVEAAPALGRLSVSRVGQICRNDVGGQRSLVNKWTTFLKARLVCSVPGVEGDTHFDQLQDVFLLSSRDHRTPLLYAVFSTSSSIFQGSAVCVYSMNDVRRAFLGPFAHKEGPMHQWVSYQGRVPYPRPGMCPSKTFGTFSSTKDFPDDVIQFARNHPLMYNSVLPTGGRPLFLQVGANYTFTQIAADRVAAADGHYDVLFIGTDVGTVLKVISVPKGSRPSAEGLLLEELHVFEDSAAVTSMQISSKRHQLYVASRSAVAQIALHRCAAHGRVCTECCLARDPYCAWDGVACTRFQPSAKRRFRRQDVRNGDPSTLCSGDSSRPALLEHKVFGVEGSSAFLECEPRSLQARVEWTFQRAGVTAHTQVLAEERTERTARGLLLRRLRRRDSGVYLCAAVEQGFTQPLRRLSLHVLSATQAERLARAEEAAPAAPPGPKLWYRDFLQLVEPGGGGSANSLRMCRPQPALQSLPLESRRKGRNRRTHAPEPRAERGPRSATHW

SEQ ID NO: 11871 - protein, 749 aa, Homo Sapiens; identical to SEQ ID NO: 11870

SEQ ID NO: 11872 - protein, 406 aa, Homo Sapiens
MNDVRRAFLGPFAHKEGPMHQWVSYQGRVPYPRPGMCPSKTFGTFSSTKDFPDDVIQFARNHPLMYNSVLPTGGRPLFLQVGANYTFTQIAADRVAAADGHYDVLFIGTDVGTVLKVISVPKGSRPSAEGLLLEELHVFEDSAAVTSMQISSKRHQLYVASRSAVAQIALHRCAAHGRVCTECCLARDPYCAWDGVACTRFQPSAKRRFRRQDVRNGDPSTLCSGDSSRPALLEHKVFGVEGSSAFLECEPRSLQARVEWTFQRAGVTAHTQVLAEERTERTARGLLLRRLRRRDSGVYLCAAVEQGFTQPLRRLSLHVLSATQAERLARAEEAAPAAPPGPKLWYRDFLQLVEPGGGGSANSLRMCRPQPALQSLPLESRRKGRNRRTHAPEPRAERGPRSATHW

SEQ ID NO: 11873 - protein, 406 aa, Homo Sapiens; identical to SEQ ID NO: 11872

SEQ ID NO: 11874 - protein, 751 aa, Homo Sapiens
MAFRTICVLVGVFICSICVKGSSQPQARVYLTFDELRETKTSEYFSLSHHPLDYRILLMDEDQDRIYVGSKDHILSLNINNISQEALSVFWPASTIKVEECKMAGKDPTHGCGNFVRVIQTFNRTHLYVCGSGAFSPVCTYLNRGRRSEDQVFMIDSKCESGKGRCSFNPNVNTVSVMINEELFSGMYIDFMGTDAAIFRSLTKRNAVRTDQHNSKWLSEPMFVDAHVIPDGTDPNDAKVYFFFKEKLTDNNRSTKQIHSMIARICPNDTGGLRSLVNKWTTFLKARLVCSVTDEDGPETHFDELEDVFLLETDNPRTTLVYGIFTTSSSVFKGSAVCVYHLSDIQTVFNGPFAHKEGPNHQLISYQGRIPYPRPGTCPGGAFTPNMRTTKEFPDDVVTFIRNHPLMYNSIYPIHKRPLIVRIGTDYKYTKIAVDRVNAADGRYHVLFLGTDRGTVQKVVVLPTNNSVSGELILEELEVFKNHAPITTMKISSKKQQLYVSSNEGVSQVSLHRCHIYGTACADCCLARDPYCAWDGHSCSRFYPTGKRRSRRQDVRHGNPLTQCRGFNLKAYRNAAEIVQYGVKNNTTFLECAPKSPQASIKWLLQKDKDRRKEVKLNERIIATSQGLLIRSVQGSDQGLYHCIATENSFKQTIAKINFKVLDSEMVAVVTDKWSPWTWASSVRALPFHPKDIMGAFSHSEMQMINQYCKDTRQQHQQGDESQKMRGDYGKLKALINSRKSRNRRNQLPES

SEQ ID NO: 11875 - protein, 751 aa, Homo Sapiens; identical to SEQ ID NO: 11874

SEQ ID NO: 11876 - protein, 63 aa, Homo Sapiens
MAFRTICVLVGVFICSICVKGSSQPQARVYLTFDEPTLYNAVCYICGYKKKCGVNLVLSNHLL

SEQ ID NO: 11877 - protein, 63 aa, Homo Sapiens; identical to SEQ ID NO: 11876

SEQ ID NO: 11878 - protein, 40 aa, Homo Sapiens
MAFRTICVLVGVFICSICVKGSSQPQARVYLTFDGPSFHD

SEQ ID NO: 11879 - protein, 39 aa, Homo Sapiens
MASAGHIITLLLWGYLLELWTGGHTADTTHPRLRLSHKE

SEQ ID NO: 11880 - protein, 775 aa, Homo Sapiens
MASAGHIITLLLWGYLLELWTGGHTADTTHPRLRLSHKELLNLNRTSIFHSPFGFLDLHTMLLDEYQERLFVGGRDLVYSLSLERISDGYKEIHWPSTALKMEECIMKGKDAGECANYVRVLHHYNRTHLLTCGTGAFDPVCAFIRVGYHLEDPLFHLESPRSERGRGRCPFDPSSSFISTLIGSELFAGLYSDYWSRDAAIFRSMGRLAHIRTEHDDERLLKEPKFVGSYMIPDNEDRDDNKVYFFFTEKALEAENNAHAIYTRVGRLCVNDVGGQRILVNKWSTFLKARLVCSVPGMNGIDTYFDELEDVFLLPTRDHKNPVIFGLFNTTSNIFRGHAICVYHMSSIRAAFNGPYAHKEGPEYHWSVYEGKVPYPRPGSCASKVNGGRYGTTKDYPDDAIRFARSHPLMYQAIKPAHKKPILVKTDGKYNLKQIAVDRVEAEDGQYDVLFIGTDNGIVLKVITIYNQEMESMEEVILEELQIFKDPVPIISMEISSKRQQLYIGSASAVAQVRFHHCDMYGSACADCCLARDPYCAWDGISCSRYYPTGTHAKRRFRRQDVRHGNAAQQCFGQQFVGDALDKTEEHLAYGIENNSTLLECTPRSLQAKVIWFVQKGRETRKEEVKTDDRVVKMDLGLLFLRLHKSDAGTYFCQTVEHSFVHTVRKITLEVVEEEKVEDMFNKDDEEDRHHRMPCPAQSSISQGAKPWYKEFLQLIGYSNFQRVEEYCEKVWCTDRKRKKLKMSPSKWKYANPQEKKLRSKPEHYRLPRHTLDS

SEQ ID NO: 11881 - protein, 630 aa, Homo Sapiens
MASAGHIITLLLWGYLLELWTGGHTADTTHPRLRLSHKELLNLNRTSIFHSPFGFLDLHTMLLDEYQERLFVGGRDLVYSLSLERISDGYKEIHWPSTALKMEECIMKGKDAGECANYVRVLHHYNRTHLLTCGTGAFDPVCAFIRVGYHLEDPLFHLESPRSERGRGRCPFDPSSSFISTLIGSELFAGLYSDYWSRDAAIFRSMGRLAHIRTEHDDERLLKEPKFVGSYMIPDNEDRDDNKVYFFFTEKALEAENNAHAIYTRVGRLCVNDVGGQRILVNKWSTFLKARLVCSVPGMNGIDTYFDELEDVFLLPTRDHKNPVIFGLFNTTSNIFRGHAICVYHMSSIRAAFNGPYAHKEGPEYHWSVYEGKVPYPRPGSCASKVNGGRYGTTKDYPDDAIRFARSHPLMYQAIKPAHKKPILVKTDGKYNLKQIAVDRVEAEDGQYDVLFIGTDNGIVLKVITIYNQEMESMEEVILEELQIFKDPVPIISMEISSKRQQLYIGSASAVAQVRFHHCDMYGSACADCCLARDPYCAWDGISCSRYYPTGTHAKRRFRRQDVRHGNAAQQCFGQQFVGDALDKTEEHLAYGIENNSTLLECTPRSLQAKVIWFVQKGRETRKEEVKAMS

SEQ ID NO: 11882 - protein, 775 aa, Homo Sapiens; identical to SEQ ID NO: 11880

SEQ ID NO: 11883 - protein, 715 aa, Homo Sapiens
MLLDEYQERLFVGGRDLVYSLSLERISDGYKEIHWPSTALKMEECIMKGKDAGECANYVRVLHHYNRTHLLTCGTGAFDPVCAFIRVGYHLEDPLFHLESPRSERGRGRCPFDPSSSFISTLIGSELFAGLYSDYWSRDAAIFRSMGRLAHIRTEHDDERLLKEPKFVGSYMIPDNEDRDDNKVYFFFTEKALEAENNAHAIYTRVGRLCVNDVGGQRILVNKWSTFLKARLVCSVPGMNGIDTYFDELEDVFLLPTRDHKNPVIFGLFNTTSNIFRGHAICVYHMSSIRAAFNGPYAHKEGPEYHWSVYEGKVPYPRPGSCASKVNGGRYGTTKDYPDDAIRFARSHPLMYQAIKPAHKKPILVKTDGKYNLKQIAVDRVEAEDGQYDVLFIGTDNGIVLKVITIYNQEMESMEEVILEELQIFKDPVPIISMEISSKRQQLYIGSASAVAQVRFHHCDMYGSACADCCLARDPYCAWDGISCSRYYPTGTHAKRRFRRQDVRHGNAAQQCFGQQFVGDALDKTEEHLAYGIENNSTLLECTPRSLQAKVIWFVQKGRETRKEEVKTDDRVVKMDLGLLFLRLHKSDAGTYFCQTVEHSFVHTVRKITLEVVEEEKVEDMFNKDDEEDRHHRMPCPAQSSISQGAKPWYKEFLQLIGYSNFQRVEEYCEKVWCTDRKRKKLKMSPSKWKYANPQEKKLRSKPEHYRLPRHTLDS

SEQ ID NO: 11884 - protein, 147 aa, Homo Sapiens
GTAHFFNFLLNTTDYRILLKDEDHDRMYVGSKDYVLSLDLHDINREPLIIHWAASPQRIEECVLSGKDVNPSLWPQGECGNFVRLIQPWNRTHLYVCGTGAYNPMCTYVNRGRRAQDYIFYLEPERLESGKGKCPYDPKLDTASALI

SEQ ID NO: 11885 - protein, 785 aa, Homo Sapiens
MLVAGLLLWASLLTGAWPSFPTQDHLPATPRVRLSFKELKATGTAHFFNFLLNTTDYRILLKDEDHDRMYVGSKDYVLSLDLHDINREPLIIHWAASPQRIEECVLSGKDVNGECGNFVRLIQPWNRTHLYVCGTGAYNPMCTYVNRGRRAQATPWTQTQAVRGRGSRATDGALRPMPTAPRQDYIFYLEPERLESGKGKCPYDPKLDTASALINEELYAGVYIDFMGTDAAIFRTLGKQTAMRTDQYNSRWLNDPSFIHAELIPDSAERNDDKLYFFFRERSAEAPQSPAVYARIGRICLNDDGGHCCLVNKWSTFLKARLVCSVPGEDGIETHFDELQDVFVQQTQDVRNPVIYAVFTSSGSVFRGSAVCVYSMADIRMVFNGPFAHKEGPNYQWMPFSGKMPYPRPGTCPGGTFTPSMKSTKDYPDEVINFMRSHPLMYQAVYPLQRRPLVVRTGAPYRLTTIAVDQVDAADGRYEVLFLGTDRGTVQKVIVLPKDDQELEELMLEEVEVFKDPAPVKTMTISSKRQQLYVASAVGVTHLSLHRCQAYGAACADCCLARDPYCAWDGQACSRYTASSKRRSRRQDVRHGNPIRQCRGFNSNANKNAVESVQYGVAGSAAFLECQPRSPQATVKWLFQRDPGDRRREIRAEDRFLRTEQGLLLRALQLSDRGLYSCTATENNFKHVVTRVQLHVLGRDAVHAALFPPLSMSAPPPPGAGPPTPPYQELAQLLAQPEVGLIHQYCQGYWRHVPPSPREAPGAPRSPEPQDQKKPRNRRHHPPDT

SEQ ID NO: 11886 - protein, 264 aa, Homo Sapiens
MLVAGLLLWASLLTGAWPSFPTQDHLPATPRVRLSFKELKATGTAHFFNFLLNTTDYRILLKDEDHDRMYVGSKDYVLSLDLHDINREPLIIHWAASPQRIEECVLSGKDVNGECGNFVRLIQPWNRTHLYVCGTGAYNPMCTYVNRGRRAQDYIFYLEPERLESGKGKCPYDPKLDTASALINEELYAGVYIDFMGTDAAIFRTLGKQTAMRTDQYNSRWLNDPSFIHAELIPDSAERNDDKLYFFFRERSAEAPQSPAVYAR

SEQ ID NO: 11887 - protein, 754 aa, Homo Sapiens
MLVAGLLLWASLLTGAWPSFPTQDHLPATPRVRLSFKELKATGTAHFFNFLLNTTDYRILLKDEDHDRMYVGSKDYVLSLDLHDINREPLIIHWAASPQRIEECVLSGKDVNGECGNFVRLIQPWNRTHLYVCGTGAYNPMCTYVNRGRRAQDYIFYLEPERLESGKGKCPYDPKLDTASALINEELYAGVYIDFMGTDAAIFRTLGKQTAMRTDQYNSRWLNDPSFIHAELIPDSAERNDDKLYFFFRERSAEAPQSPAVYARIGRICLNDDGGHCCLVNKWSTFLKARLVCSVPGEDGIETHFDELQDVFVQQTQDVRNPVIYAVFTSSGSVFRGSAVCVYSMADIRMVFNGPFAHKEGPNYQWMPFSGKMPYPRPGTCPGGTFTPSMKSTKDYPDEVINFMRSHPLMYQAVYPLQRRPLVVRTGAPYRLTTIAVDQVDAADGRYEVLFLGTDRGTVQKVIVLPKDDQELEELMLEEVEVFKDPAPVKTMTISSKRQQLYVASAVGVTHLSLHRCQAYGAACADCCLARDPYCAWDGQACSRYTASSKRRSRRQDVRHGNPIRQCRGFNSNANKNAVESVQYGVAGSAAFLECQPRSPQATVKWLFQRDPGDRRREIRAEDRFLRTEQGLLLRALQLSDRGLYSCTATENNFKHVVTRVQLHVLGRDAVHAALFPPLSMSAPPPPGAGPPTPPYQELAQLLAQPEVGLIHQYCQGYWRHVPPSPREAPGAPRSPEPQDQKKPRNRRHHPPDT

SEQ ID NO: 11888 - protein, 380 aa, Homo Sapiens
MLVAGLLLWASLLTGAWPSFPTQDHLPATPRVRLSFKELKATGTAHFFNFLLNTTDYRILLKDEDHDRMYVGSKDYVLSLDLHDINREPLIIHWAASPQRIEECVLSGKDVNGECGNFVRLIQPWNRTHLYVCGTGAYNPMCTYVNRGRRAQDYIFYLEPERLESGKGKCPYDPKLDTASALINEELYAGVYIDFMGTDAAIFRTLGKQTAMRTDQYNSRWLNDPSFIHAELIPDSAERNDDKLYFFFRERSAEAPQSPAVYARIGRICLNDDGGHCCLVNKWSTFLKARLVCSVPGEDGIETHFDELQDVFVQQTQDVRNPVIYAVFTSSGSVFRGSAVCVYSMADIRMVFNGPFAHKEGPNYQWMPFSGKMPYPRPGT

SEQ ID NO: 11889 - protein, 92 aa, Homo Sapiens
MLVAGLLLWASLLTGAWPSFPTQDHLPATPRVRLSFKELKATGTAHFFNFLLNTTDYRILLKDEDHDRMYVGSKDYVLSLDLHDINREPLIV

SEQ ID NO: 11890 - protein, 686 aa, Homo Sapiens
MYVGSKDYVLSLDLHDINREPLIIHWAASPQRIEECVLSGKDVNGECGNFVRLIQPWNRTHLYVCGTGAYNPMCTYVNRGRRAQDYIFYLEPERLESGKGKCPYDPKLDTASALINEELYAGVYIDFMGTDAAIFRTLGKQTAMRTDQYNSRWLNDPSFIHAELIPDSAERNDDKLYFFFRERSAEAPQSPAVYARIGRICLNDDGGHCCLVNKWSTFLKARLVCSVPGEDGIETHFDELQDVFVQQTQDVRNPVIYAVFTSSGSVFRGSAVCVYSMADIRMVFNGPFAHKEGPNYQWMPFSGKMPYPRPGTCPGGTFTPSMKSTKDYPDEVINFMRSHPLMYQAVYPLQRRPLVVRTGAPYRLTTIAVDQVDAADGRYEVLFLGTDRGTVQKVIVLPKDDQELEELMLEEVEVFKDPAPVKTMTISSKRQQLYVASAVGVTHLSLHRCQAYGAACADCCLARDPYCAWDGQACSRYTASSKRRSRRQDVRHGNPIRQCRGFNSNANKNAVESVQYGVAGSAAFLECQPRSPQATVKWLFQRDPGDRRREIRAEDRFLRTEQGLLLRALQLSDRGLYSCTATENNFKHVVTRVQLHVLGRDAVHAALFPPLSMSAPPPPGAGPPTPPYQELAQLLAQPEVGLIHQYCQGYWRHVPPSPREAPGAPRSPEPQDQKKPRNRRHHPPDT

SEQ ID NO: 11891 - protein, 782 aa, Homo Sapiens
MAPSAWAICWLLGGLLLHGGSSGPSPGPSVPRLRLSYRDLLSANRSAIFLGPQGSLNLQAMYLDEYRDRLFLGGLDALYSLRLDQAWPDPREVLWPPQPGQREECVRKGRDPLTECANFVRVLQPHNRTHLLACGTGAFQPTCALITVGHRGEHVLHLEPGSVESGRGRCPHEPSRPFASTFIDGELYTGLTADFLGREAMIFRSGGPRPALRSDSDQSLLHDPRFVMAARIPENSDQDNDKVYFFFSETVPSPDGGSNHVTVSRVGRVCVNDAGGQRVLVNKWSTFLKARLVCSVPGPGGAETHFDQLEDVFLLWPKAGKSLEVYALFSTVSAVFQGFAVCVYHMADIWEVFNGPFAHRDGPQHQWGPYGGKVPFPRPGVCPSKMTAQPGRPFGSTKDYPDEVLQFARAHPLMFWPVRPRHGRPVLVKTHLAQQLHQIVVDRVEAEDGTYDVIFLGTDSGSVLKVIALQAGGSAEPEEVVLEELQVFKVPTPITEMEISVKRQMLYVGSRLGVAQLRLHQCETYGTACAECCLARDPYCAWDGASCTHYRPSLGKRRFRRQDIRHGNPALQCLGQSQEEEAVGLVAATMVYGTEHNSTFLECLPKSPQAAVRWLLQRPGDEGPDQVKTDERVLHTERGLLFRRLSRFDAGTYTCTTLEHGFSQTVVRLALVVIVASQLDNLFPPEPKPEEPPARGGLASTPPKAWYKDILQLIGFANLPRVDEYCERVWCRGTTECSGCFRSRSRGKQARGKSWAGLELGKKMKSRVHAEHNRTPREVEAT

SEQ ID NO: 11892 - protein, 186 aa, Homo Sapiens
MAPSAWAICWLLGGLLLHGGSSGPSPGPSVPRLRLSYRGAMVRKPSSTMWMETFSRYLLSANRSAIFLGPQGSLNLQAMYLDEYRDRLFLGGLDALYSLRLDQAWPDPREVLWPPQPGQREECVRKGRDPLTECANFVRVLQPHNRTHLLACGTGAFQPTCALITVGHRGEHVLHLEPGSVESGRG

SEQ ID NO: 11893 - protein, 99 aa, Homo Sapiens
  misc_feature (1)..(1): Xaa can be any naturally occurring amino acid
XSSGPSPGPSVPRLRLSYRDRVRQLRAGATASQPDPPASLWHWGLPAHLCPHHSWPPWGACAPPGAWQCGKWPGAVPSRAQPSLCQHLHRRGAVHGSHC

SEQ ID NO: 11894 - protein, 100 aa, Homo Sapiens
MALPALGLDPWSLLGLFLFQLLQLLLPTTTAGGGGQGPMPRVRYYAGDERRALSFFHQKGLQDFDTLLLSGDGNTLYVGAREAILALDIQDPGVPRLKNM

SEQ ID NO: 11895 - protein, 236 aa, Homo Sapiens
MALPALGLDPWSLLGLFLFQLLQLLLPTTTAGGGGQGPMPRVRYYAGDERRALSFFHQKGLQDFDTLLLSGDGNTLYVGAREAILALDIQDPGVPRLKNMIPWPASDRKKSECAFKKKSNEELQDSYLLPISEDKVMEGKGQSPFDPAHKHTAVLVDGMLYSGTMNNFLGSEPILMRTLGSQPVLKTDNFLRWLHHDASFVAAIPSTQVVYFFFEETASEFDFFERLHTSRVARVC

SEQ ID NO: 11896 - protein, 761 aa, Homo Sapiens
MALPALGLDPWSLLGLFLFQLLQLLLPTTTAGGGGQGPMPRVRYYAGDERRALSFFHQKGLQDFDTLLLSGDGNTLYVGAREAILALDIQDPGVPRLKNMIPWPASDRKKSECAFKKKSNETQCFNFIRVLVSYNVTHLYTCGTFAFSPACTFIELQDSYLLPISEDKVMEGKGQSPFDPAHKHTAVLVDGMLYSGTMNNFLGSEPILMRTLGSQPVLKTDNFLRWLHHDASFVAAIPSTQVVYFFFEETASEFDFFERLHTSRVARVCKNDVGGEKLLQKKWTTFLKAQLLCTQPGQLPFNVIRHAVLLPADSPTAPHIYAVFTSQWQVGGTRSSAVCAFSLLDIERVFKGKYKELNKETSRWTTYRGPETNPRPGSCSVGPSSDKALTFMKDHFLMDEQVVGTPLLVKSGVEYTRLAVETAQGLDGHSHLVMYLGTTTGSLHKAVVSGDSSAHLVEEIQLFPDPEPVRNLQLAPTQGAVFVGFSGGVWRVPRANCSVYESCVDCVLARDPHCAWDPESRTCCLLSAPNLNSWKQDMERGNPEWACASGPMSRSLRPQSRPQIIKEVLAVPNSILELPCPHLSALASYYWSHGPAAVPEASSTVYNGSLLLIVQDGVGGLYQCWATENGFSYPVISYWVDSQDQTLALDPELAGIPREHVKVPLTRVSGGAALAAQQSYWPHFVTVTVLFALVLSGALIILVASPLRALRARGKVQGCETLRPGEKAPLSREQHLQSPKECRTSASDVDADNNCLGTEVA

SEQ ID NO: 11897 - protein, 761 aa, Homo Sapiens; identical to SEQ ID NO: 11896

SEQ ID NO: 11898 - protein, 761 aa, Homo Sapiens; identical to SEQ ID NO: 11896

SEQ ID NO: 11899 - protein, 321 aa, Homo Sapiens
MALPALGLDPWSLLGLFLFQLLQLLLPTTTAGGGGQGPMPRVRYYAGDERRALSFFHQKGLQDFDTLLLSGDGNTLYVGAREAILALDIQDPGVPRLKNMIPWPASDRKKSECAFKKKSNETQCFNFIRVLVSYNVTHLYTCGTFAFSPACTFIELQDSYLLPISEDKVMEGKGQSPFDPAHKHTAVLVDGMLYSGTMNNFLGSEPILMRTLGSQPVLKTDNFLRWLHHDASFVAAIPSTQVVYFFFEETASEFDFFERLHTSRVARVCKNDVGGEKLLQKKWTTFLKAQLLCTQPGQLPFNVIRHAVLLPADSPTAPHIY

SEQ ID NO: 11900 - protein, 629 aa, Homo Sapiens
MIPWPASDRKKSECAFKKKSNEELQDSYLLPISEDKVMEGKGQSPFDPAHKHTAVLVDGMLYSGTMNNFLGSEPILMRTLGSQPVLKTDNFLRWLHHDASFVAAIPSTQVVYFFFEETASEFDFFERLHTSRVARVCKNDVGGEKLLQKKWTTFLKAQLLCTQPGQLPFNVIRHAVLLPADSPTAPHIYAVFTSQWQVGGTRSSAVCAFSLLDIERVFKGKYKELNKETSRWTTYRGPETNPRPGSCSVGPSSDKALTFMKDHFLMDEQVVGTPLLVKSGVEYTRLAVETAQGLDGHSHLVMYLGTTTGSLHKAVVSGDSSAHLVEEIQLFPDPEPVRNLQLAPTQGAVFVGFSGGVWRVPRANCSVYESCVDCVLARDPHCAWDPESRTCCLLSAPNLNSWKQDMERGNPEWACASGPMSRSLRPQSRPQIIKEVLAVPNSILELPCPHLSALASYYWSHGPAAVPEASSTVYNGSLLLIVQDGVGGLYQCWATENGFSYPVISYWVDSQDQTLALDPELAGIPREHVKVPLTRVSGGAALAAQQSYWPHFVTVTVLFALVLSGALIILVASPLRALRARGKVQGCETLRPGEKAPLSREQHLQSPKECRTSASDVDADNNCLGTEVA

SEQ ID NO: 11901 - protein, 220 aa, Homo Sapiens
MIPWPASDRKKSECAFKKKSNETQCFNFIRVLVSYNVTHLYTCGTFAFSPACTFIELQDSYLLPISEDKVMEGKGQSPFDPAHKHTAVLVDGMLYSGTMNNFLGSEPILMRTLGSQPVLKTDNFLRWLHHDASFVAAIPSTQVVYFFFEETASEFDFFERLHTSRVARVCKNDVGGEKLLQKKWTTFLKAQLLCTQPGQLPFNVIRHAVLLPADSPTAPH

SEQ ID NO: 11902 - protein, 723 aa, Homo Sapiens
MPRVRYYAGDERRALSFFHQKGLQDFDTLLLSGDGNTLYVGAREAILALDIQDPGVPRLKNMIPWPASDRKKSECAFKKKSNETQCFNFIRVLVSYNVTHLYTCGTFAFSPACTFIELQDSYLLPISEDKVMEGKGQSPFDPAHKHTAVLVDGMLYSGTMNNFLGSEPILMRTLGSQPVLKTDNFLRWLHHDASFVAAIPSTQVVYFFFEETASEFDFFERLHTSRVARVCKNDVGGEKLLQKKWTTFLKAQLLCTQPGQLPFNVIRHAVLLPADSPTAPHIYAVFTSQWQVGGTRSSAVCAFSLLDIERVFKGKYKELNKETSRWTTYRGPETNPRPGSCSVGPSSDKALTFMKDHFLMDEQVVGTPLLVKSGVEYTRLAVETAQGLDGHSHLVMYLGTTTGSLHKAVVSGDSSAHLVEEIQLFPDPEPVRNLQLAPTQGAVFVGFSGGVWRVPRANCSVYESCVDCVLARDPHCAWDPESRTCCLLSAPNLNSWKQDMERGNPEWACASGPMSRSLRPQSRPQIIKEVLAVPNSILELPCPHLSALASYYWSHGPAAVPEASSTVYNGSLLLIVQDGVGGLYQCWATENGFSYPVISYWVDSQDQTLALDPELAGIPREHVKVPLTRVSGGAALAAQQSYWPHFVTVTVLFALVLSGALIILVASPLRALRARGKVQGCETLRPGEKAPLSREQHLQSPKECRTSASDVDADNNCLGTEVA

SEQ ID NO: 11903 - protein, 51 aa, Homo Sapiens
MAGPCTWVLERPSLHSVATSASCQAGSTRSCFGVQTQRRNSSAASRARTHR

SEQ ID NO: 11904 - protein, 115 aa, Homo Sapiens
MAGPCTWVLERPSLHSVATSASCQAGSTRSCFGVQTQRRNSSAASRARTHSATVKTTSRSSCRSAAVTCSPVAQQPSAPCVPTSTWRTSPWQGTRRGMSSWKMARAVVPSTRISS

SEQ ID NO: 11905 - protein, 91 aa, Homo Sapiens
MLRTAMGLRSWLAAPWGALPPRPPLLLLLLLLLLLQPPPPTWALSPRISLPLGSEERPFLRFEAEHISNYTALLLSRDGRTLYVGAREALF

SEQ ID NO: 11906 - protein, 114 aa, Homo Sapiens
MLRTAMGLRSWLAAPWGALPPRPPLLLLLLLLLLLQPPPPTWALSPRISLPLGSEERPFLRFEAEHISNYTALLLSRDGRTLYVGAREALFALSSNLSFLPGGEYQELLWGADA

SEQ ID NO: 11907 - protein, 121 aa, Homo Sapiens
MLRTAMGLRSWLAAPWGALPPRPPLLLLLLLLLLLQPPPPTWALSPRISLPLGSEERPFLRFEAEHISNYTALLLSRDGRTLYVGAREALFALSSNLSFLPGGEYQELLWGADAEKKQQCS

SEQ ID NO: 11908 - protein, 837 aa, Homo Sapiens
MLRTAMGLRSWLAAPWGALPPRPPLLLLLLLLLLLQPPPPTWALSPRISLPLGSEERPFLRFEAEHISNYTALLLSRDGRTLYVGAREALFALSSNLSFLPGGEYQELLWGADAEKKQQCSFKGKDPQRDCQNYIKILLPLSGSHLFTCGTAAFSPMCTYINMENFTLARDEKGNVLLEDGKGRCPFDPNFKSTALVVDGELYTGTVSSFQGNDPAISRSQSLRPTKTESSLNWLQDPAFVASAYIPESLGSLQGDDDKIYFFFSETGQEFEFFENTIVSRIARICKGDEGGERVLQQRWTSFLKAQLLCSRPDDGFPFNVLQDVFTLSPSPQDWRDTLFYGVFTSQWHRGTTEGSAVCVFTMKDVQRVFSGLYKEVNRETQQWYTVTHPVPTPRPGACITNSARERKINSSLQLPDRVLNFLKDHFLMDGQVRSRMLLLQPQARYQRVAVHRVPGLHHTYDVLFLGTGDGRLHKAVSVGPRVHIIEELQIFSSGQPVQNLLLDTHRGLLYAASHSGVVQVPMANCSLYRSCGDCLLARDPYCAWSGSSCKHVSLYQPQLATRPWIQDIEGASAKDLCSASSVVSPSFVPTGEKPCEQVQFQPNTVNTLACPLLSNLATRLWLRNGAPVNASASCHVLPTGDLLLVGTQQLGEFQCWSLEEGFQQLVASYCPEVVEDGVADQTDEGGSVPVIISTSRVSAPAGGKASWGADRSYWKEFLVMCTLFVLAVLLPVLFLLYRHRNSMKVFLKQGECASVHPKTCPVVLPPETRPLNGLGPPSTPLDHRGYQSLSDSPPGSRVFTESEKRPLSIQDSFVEVSPVCPRPRVRLGSEIRDSVV

SEQ ID NO: 11909 - protein, 837 aa, Homo Sapiens; identical to SEQ ID NO: 11908

SEQ ID NO: 11910 - protein, 63 aa, Homo Sapiens
MLRTAMGLRSWLAAPWGALPPRPPLLLLLLLLLLLQPPPPTWALSPRISLPLGWGYVKTLHRL

SEQ ID NO: 11911 - protein, 461 aa, Homo Sapiens
  misc_feature (1)..(1): Xaa can be any naturally occurring amino acid
XARICKGDEGGERVLQQRWTSFLKAQLLCSRPDDGFPFNVLQDVFTLSPSPQDWRDTLFYGVFTSQWHRGTTEGSAVCVFTMKDVQRVFSGLYKEVNRETQQWYTVTHPVPTPRPGACITNSARERKINSSLQLPDRVLNFLKDHFLMDGQVRSRMLLLQPQARYQRVAVHRVPGLHHTYDVLFLGTGDGRLHKAVSVGPRVHIIEELQIFSSGQPVQNLLLDTHRGLLYAASHSGVVQVPMANCSLYRSCGDCLLARDPYCAWSGSSCKHVSLYQPQLATRPWIQDIEGASAKDLCSASSVVSPSFVPTGEKPCEQVQFQPNTVNTLACPLLSNLATRLWLRNGAPVNASASCHVLPTGDLLLVGTQQLGEFQCWSLEEGFQQLVASYCPEVVEDGVADQTDEGGSVPVIISTSRVSAPAGGKASWGADRSWARTQLLDLSSLYQAVATREDSASSGEIS

SEQ ID NO: 11912 - protein, 120 aa, Homo Sapiens
  misc_feature (1)..(1): Xaa can be any naturally occurring amino acid
XHIIEELQIFSSGQPVQNLLLDTHRGLLYAASHSGVVQVPMANCSLYRSCGDCLLARDPYCAWSGSSCKHVSLYQPQLATRILSGPQAVDPGHRGSQRQGPLQRVFGCVPVFCTNRGEAM

SEQ ID NO: 11913 - protein, 253 aa, Homo Sapiens
  misc_feature (1)..(1): Xaa can be any naturally occurring amino acid
XRSRMLLLQPQARYQRVAVHRVPGLHHTYDVLFLGTGDGRLHKAVSVGPRVHIIEELQIFSSGQPVQNLLLDTHRVSRPTRNPGRGLLYAASHSGVVQVPMANCSLYRSCGDCLLARDPYCAWSGSSCKHVSLYQPQLATRPWIQDIEGASAKDLCSASSVVSPSFVPTGEKPCEQVQFQPNTVNTLACPLLSNLATRLWLRNGAPVNASASCHVLPTGDLLLVGTQQLGEFQCWSLEEGFQQLVASYCPEVV

SEQ ID NO: 11914 - protein, 140 aa, Homo Sapiens
MAPHWAVWLLAARLWGLGIGAEVWWNLVPRKTVSSGELATVVRRFSQTGIQDFLTLTLTEPTGLLYVGAREALFAFSMEALELQGAISWEAPVEKKTECIQKGKNNQTECFNFIRFLQPYNASHLYVCGTYAFQPKCTYV

SEQ ID NO: 11915 - protein, 201 aa, Homo Sapiens
MAPHWAVWLLAARLWGLGIGAEVWWNLVPRKTVSSGELATVVRRFSQTGIQDFLTLTLTEPTGLLYVGAREALFAFSMEALELQGAISWEAPVEKKTECIQKGKNNQTECFNFIRFLQPYNASHLYVCGTYAFQPKCTYVNMLTFTLEHGEFEDGKGKCPYDPAKGHAGLLVDGELYSATLNNFLGTEPIILRNMGPHHSM

SEQ ID NO: 11916 - protein, 833 aa, Homo Sapiens
MAPHWAVWLLAARLWGLGIGAEVWWNLVPRKTVSSGELATVVRRFSQTGIQDFLTLTLTEPTGLLYVGAREALFAFSMEALELQGAISWEAPVEKKTECIQKGKNNQTECFNFIRFLQPYNASHLYVCGTYAFQPKCTYVNMLTFTLEHGEFEDGKGKCPYDPAKGHAGLLVDGELYSATLNNFLGTEPIILRNMGPHHSMKTEYLAFWLNEPHFVGSAYVPESVGSFTGDDDKVYFFFRERAVESDCYAEQVVARVARVCKGDMGGARTLQRKWTTFLKARLACSAPNWQLYFNQLQAMHTLQDTSWHNTTFFGVFQAQWGDMYLSAICEYQLEEIQRVFEGPYKEYHEEAQKWDRYTDPVPSPRPGSCINNWHRRHGYTSSLELPDNILNFVKKHPLMEEQVGPRWSRPLLVKKGTNFTHLVADRVTGLDGATYTVLFIGTGDGWLLKAVSLGPWVHLIEELQLFDQEPMRSLVLSQSKKLLFAGSRSQLVQLPVADCMKYRSCADCVLARDPYCAWSVNTSRCVAVGGHSGSLLIQHVMTSDTSGICNLRGSKKVRPTPKNITVVAGTDLVLPCHLSSNLAHARWTFGGRDLPAEQPGSFLYDARLQALVVMAAQPRHAGAYHCFSEEQGARLAAEGYLVAVVAGPSVTLEARAPLENLGLVWLAVVALGAVCLVLLLLVLSLRRRLREELEKGAKATERTLVYPLELPKEPTSPPFRPCPEPDEKLWDPVGYYYSDGSLKIVPGHARCQPGGGPPSPPPGIPGQPLPSPTRLHLGGGRNSNANGYVRLQLGGEDRGGLGHPLPELADELRRKLQQRQPLPDSNPEESSV

SEQ ID NO: 11917 - protein, 59 aa, Homo Sapiens
MRMCTPIRGLLMALAVMFGTAMAFAPIPRITWEHREVHLVQFHEPDIYNYSALLLSEDK

SEQ ID NO: 11918 - protein, 66 aa, Homo Sapiens
MRMCTPIRGLLMALAVMFGTAMAFAPIPRITWEHREVHLVQFHEPDIYNYSALLLSEDKDTLYIGA

SEQ ID NO: 11919 - protein, 76 aa, Homo Sapiens
MRMCTPIRGLLMALAVMFGTAMAFAPIPRITWEHREVHLVQFHEPDIYNYSALLLSEDKDTLYIGAREAVFAVNAL

SEQ ID NO: 11920 - protein, 146 aa, Homo Sapiens
MRMCTPIRGLLMALAVMFGTAMAFAPIPRITWEHREVHLVQFHEPDIYNYSALLLSEDKDTLYIGAREAVFAVNALNISEKQHEVYWKVSEDKKAKCAEKGKSKQTECLNYIRVLQPLSATSLYVCGTNAFQPACDHLNLTSFKFL

SEQ ID NO: 11921 - protein, 862 aa, Homo Sapiens
MRMCTPIRGLLMALAVMFGTAMAFAPIPRITWEHREVHLVQFHEPDIYNYSALLLSEDKDTLYIGAREAVFAVNALNISEKQHEVYWKVSEDKKAKCAEKGKSKQTECLNYIRVLQPLSATSLYVCGTNAFQPACDHLNLTSFKFLGKNEDGKGRCPFDPAHSYTSVMVDGELYSGTSYNFLGSEPIISRNSSHSPLRTEYAIPWLNEPSFVFADVIRKSPDSPDGEDDRVYFFFTEVSVEYEFVFRVLIPRIARVCKGDQGGLRTLQKKWTSFLKARLICSRPDSGLVFNVLRDVFVLRSPGLKVPVFYALFTPQLNNVGLSAVCAYNLSTAEEVFSHGKYMQSTTVEQSHTKWVRYNGPVPKPRPGACIDSEARAANYTSSLNLPDKTLQFVKDHPLMDDSVTPIDNRPRLIKKDVNYTQIVVDRTQALDGTVYDVMFVSTDRGALHKAISLEHAVHIIEETQLFQDFEPVQTLLLSSKKGNRFVYAGSNSGVVQAPLAFCGKHGTCEDCVLARDPYCAWSPPTATCVALHQTESPSRGLIQEMSGDASVCPDKSKGSYRQHFFKHGGTAELKCSQKSNLARVFWKFQNGVLKAESPKYGLMGRKNLLIFNLSEGDSGVYQCLSEERVKNKTVFQVVAKHVLEVKVVPKPVVAPTLSVVQTEGSRIATKVLVASTQGSSPPTPAVQATSSGAITLPPKPAPTGTSCEPKIVINTVPQLHSEKTMYLKSSDNRLLMSLFLFFFVLFLCLFFYNCYKGYLPRQCLKFRSALLIGKKKPKSDFCDREQSLKETLVEPGSFSQQNGEHPKPALDTGYETEQDTITSKVPTDREDSQRIDDLSARDKPFDVKCELKFADSDADGD

SEQ ID NO: 11922 - protein, 738 aa, Homo Sapiens
MRMCTPIRGLLMALAVMFGTAMAFAPIPRITWEHREVHLVQFHEPDIYNYSALLLSEDKDTLYIGAREAVFAVNALNISEKQHEVYWKVSEDKKAKCAEKGKSKQTECLNYIRVLQPLSATSLYVCGTNAFQPACDHLNLTSFKFLGKNEDGKGRCPFDPAHSYTSVMVDGELYSGTSYNFLGSEPIISRNSSHSPLRTEYAIPWLNEPSFVFADVIRKSPDSPDGEDDRVYFFFTEVSVEYEFVFRVLIPRIARVCKGDQGGLRTLQKKWTSFLKARLICSRPDSGLVFNVLRDVFVLRSPGLKVPVFYALFTPQLNNVGLSAVCAYNLSTAEEVFSHGKYMQSTTVEQSHTKWVRYNGPVPKPRPGACIDSEARAANYTSSLNLPDKTLQFVKDHPLMDDSVTPIDNRPRLIKKDVNYTQIVVDRTQALDGTVYDVMFVSTDRGALHKAISLEHAVHIIEETQLFQDFEPVQTLLLSSKKGNRFVYAGSNSGVVQAPLAFCGKHGTCEDCVLARDPYCAWSPPTATCVALHQTESPSRGLIQEMSGDASVCPASSPKPLPPPGSSSLSCLGHVGDRRLSSPWTPWPASGAGPDSSSRVSLLPPFLSDQAQHVHALGNFYLFCQATGPADIRFVWEKNGRALETCVPVQTHALPDGRAHALSWLQDAIRESAEYRCSVLSSAGNKTSKVQVAVMRPEVTHQERWTRELSAWRAVAGEHDRMMQSWRKAWESCSKDTL

SEQ ID NO: 11923 - protein, 738 aa, Homo Sapiens; identical to SEQ ID NO: 11922

SEQ ID NO: 11924 - protein, 862 aa, Homo Sapiens; identical to SEQ ID NO: 11921

SEQ ID NO: 11925 - protein, 862 aa, Homo Sapiens; identical to SEQ ID NO: 11921

SEQ ID NO: 11926 - protein, 548 aa, Homo Sapiens
MRMCTPIRGLLMALAVMFGTAMAFAPIPRITWEHREVHLVQFHEPDIYNYSALLLSEDKDTLYIGAREAVFAVNALNISEKQHEVYWKVSEDKKAKCAEKGKSKQTECLNYIRVLQPLSATSLYVCGTNAFQPACDHLNLTSFKFLGKNEDGKGRCPFDPAHSYTSVMVDGELYSGTSYNFLGSEPIISRNSSHSPLRTEYAIPWLNEPSFVFADVIRKSPDSPDGEDDRVYFFFTEVSVEYEFVFRVLIPRIARVCKGDQGGLRTLQKKWTSFLKARLICSRPDSGLVFNVLRDVFVLRSPGLKVPVFYALFTPQLNNVGLSAVCAYNLSTAEEVFSHGKYMQSTTVEQSHTKWVRYNGPVPKPRPGACIDSEARAANYTSSLNLPDKTLQFVKDHPLMDDSVTPIDNRPRLIKKDVNYTQIVVDRTQALDGTVYDVMFVSTDRGALHKAISLEHAVHIIEETQLFQDFEPVQTLLLSSKKVLQTFALSGRRMGELWRPVSLCRPMHCPMAGPMHSAGCRTPSGKALSIAALSSPQQGTRLRRCRLL

SEQ ID NO: 11927 - protein, 738 aa, Homo Sapiens; identical to SEQ ID NO: 11922

SEQ ID NO: 11928 - protein, 862 aa, Homo Sapiens; identical to SEQ ID NO: 11921

SEQ ID NO: 11929 - protein, 548 aa, Homo Sapiens; identical to SEQ ID NO: 11926

SEQ ID NO: 11930 - protein, 123 aa, Homo Sapiens
MWTQRWKRSVSPGPADIRFVWEKNGRALETCVPVQTHALPDGRAHALSWLQDAIRESAEYRCSVLSSAGNKTSKVQVAVMRPEVTHQERWTRELSAWRAVAGEHDRMMQSWRKAWESCSKDTL

SEQ ID NO: 11931 - protein, 49 aa, Homo Sapiens
MPASAARPRPGPGQPTASPFPLLLLAVLSGPVSGRVPRSVPRTSLPISD

SEQ ID NO: 11932 - protein, 770 aa, Homo Sapiens
MPASAARPRPGPGQPTASPFPLLLLAVLSGPVSGRVPRSVPRTSLPISEADSCLTRFAVPHTYNYSVLLVDPASHTLYVGARDTIFALSLPFSGERPRRIDWMVPEAHRQNCRKKGKKEDECHNFVQILAIANASHLLTCGTFAFDPKCGVIDVSRFQQVERLESGRGKCPFEPAQRSAAVMAGGVLYAATVKNYLGTEPIITRAVGRAEDWIRTDTLPSWLNAPAFVAAVALSPAEWGDEDGDDEIYFFFTETSRAFDSYERIKVPRVARVCAGDLGGRKTLQQRWTTFLKADLLCPGPEHGRASSVLQDVAVLRPELGAGTPIFYGIFSSQWEGATISAVCAFRPQDIRTVLNGPFRELKHDCNRGLPVVDNDVPQPRPGECITNNMKLRHFGSSLSLPDRVLTFIRDHPLMDRPVFPADGHPLLVTTDTAYLRVVAHRVTSLSGKEYDVLYLGTEDGHLHRAVRIGAQLSVLEDLALFPEPQPVENMKLYHSWLLVGSRTEVTQVNTTNCGRLQSCSECILAQDPVCAWSFRLDECVAHAGEHRGLVQDIESADVSSLCPKEPGERPVVFEVPVATAAHVVLPCSPSSAWASCVWHQPSGVTALTPRRDGLEVVVTPGAMGAYACECQEGGAAHVVAAYSLVWGSQRDAPSRAHTVGAGLAGFFLGILAASLTLILIGRRQQRRRQRELLARDKVGLDLGAPPSGTTSYSQDPPSPSPEDERLPLALAKRGSGFGGFSPPFLLDPCPSPAHIRLTGAPLATCDETSI

SEQ ID NO: 11933 - protein, 160 aa, Homo Sapiens
MPASAARPRPGPGQPTASPFPLLLLAVLSGPVSGRVPRSVPRTSLPISEADSCLTRFAVPHTYNYSVLLVDPASHTLYVGARDTIFALSLPFSGERPRRIDWMVPEAHRQNCRKKGKKEDECHNFVQILAIANASHLLTCGTFAFDPKCGVIGGSSMLPL

SEQ ID NO: 11934 - protein, 165 aa, Homo Sapiens
MPASAARPRPGPGQPTASPFPLLLLAVLSGPVSGRVPRSVPRTSLPISEADSCLTRFAVPHTYNYSVLLVDPASHTLYVGARDTIFALSLPFSGERPRRIDWMVPEAHRQNCRKKGKKEDVSRFQQVERLESGRGKCPFEPAQRSAAVMAGGVLYAATVKNYLGT

SEQ ID NO: 11935 - protein, 737 aa, Homo Sapiens
MPASAARPRPGPGQPTASPFPLLLLAVLSGPVSGRVPRSVPRTSLPISEADSCLTRFAVPHTYNYSVLLVDPASHTLYVGARDTIFALSLPFSGERPRRIDWMVPEAHRQNCRKKGKKEDVSRFQQVERLESGRGKCPFEPAQRSAAVMAGGVLYAATVKNYLGTEPIITRAVGRAEDWIRTDTLPSWLNAPAFVAAVALSPAEWGDEDGDDEIYFFFTETSRAFDSYERIKVPRVARVCAGDLGGRKTLQQRWTTFLKADLLCPGPEHGRASSVLQDVAVLRPELGAGTPIFYGIFSSQWEGATISAVCAFRPQDIRTVLNGPFRELKHDCNRGLPVVDNDVPQPRPGECITNNMKLRHFGSSLSLPDRVLTFIRDHPLMDRPVFPADGHPLLVTTDTAYLRVVAHRVTSLSGKEYDVLYLGTEDGHLHRAVRIGAQLSVLEDLALFPEPQPVENMKLYHSWLLVGSRTEVTQVNTTNCGRLQSCSECILAQDPVCAWSFRLDECVAHAGEHRGLVQDIESADVSSLCPKEPGERPVVFEVPVATAAHVVLPCSPSSAWASCVWHQPSGVTALTPRRDGLEVVVTPGAMGAYACECQEGGAAHVVAAYSLVWGSQRDAPSRAHTVGAGLAGFFLGILAASLTLILIGRRQQRRRQRELLARDKVGLDLGAPPSGTTSYSQDPPSPSPEDERLPLALAKRGSGFGGFSPPFLLDPCPSPAHIRLTGAPLATCDETSI

SEQ ID NO: 11936 - protein, 178 aa, Homo Sapiens
MPASAARPRPGPGQPTASPFPLLLLAVLSGPVSGRVPRSVPRTSLPISEADSCLTRFAVPHTYNYSVLLVDPASHTLYVGARDTIFALSLPFSGERPRRIDWMVPEAHRQNCRKKGKKEGDLGGRKTLQQRWTTFLKADLLCPGPEHGRASSVLQDVAVLRPELGAGTPIFYGIFSSQ

SEQ ID NO: 11937 - protein, 615 aa, Homo Sapiens
MPASAARPRPGPGQPTASPFPLLLLAVLSGPVSGRVPRSVPRTSLPISEADSCLTRFAVPHTYNYSVLLVDPASHTLYVGARDTIFALSLPFSGERPRRIDWMVPEAHRQNCRKKGKKEGDLGGRKTLQQRWTTFLKADLLCPGPEHGRASSVLQDVAVLRPELGAGTPIFYGIFSSQWEGATISAVCAFRPQDIRTVLNGPFRELKHDCNRGLPVVDNDVPQPRPGECITNNMKLRHFGSSLSLPDRVLTFIRDHPLMDRPVFPADGHPLLVTTDTAYLRVVAHRVTSLSGKEYDVLYLGTEDGHLHRAVRIGAQLSVLEDLALFPEPQPVENMKLYHSWLLVGSRTEVTQVNTTNCGRLQSCSECILAQDPVCAWSFRLDECVAHAGEHRGLVQDIESADVSSLCPKEPGERPVVFEVPVATAAHVVLPCSPSSAWASCVWHQPSGVTALTPRRDGLEVVVTPGAMGAYACECQEGGAAHVVAAYSLVWGSQRDAPSRAHTVGAGLAGFFLGILAASLTLILIGRRQQRRRQRELLARDKVGLDLGAPPSGTTSYSQDPPSPSPEDERLPLALAKRGSGFGGFSPPFLLDPCPSPAHIRLTGAPLATCDETSI

SEQ ID NO: 11938 - protein, 127 aa, Homo Sapiens
MPASAARPRPGPGQPTASPFPLLLLAVLSGPVSGRVPRSVPRTSLPISEADSCLTRFAVPHTYNYSVLLVDPASHTLYVGARDTIFALSLPFSGERPRRIDWMVPEAHRQNCRKKGKKEGGSSMLPL

SEQ ID NO: 11939 - protein, 68 aa, Homo Sapiens
MPASAARPRPGPGQPTASPFPLLLLAVLSGPVSGRVPRSVPRTSLPISVFRRKNRGGGYDPLKRCGRS

SEQ ID NO: 11940 - protein, 127 aa, Homo Sapiens
MGSMSPPSAWPCVLDGPETRQDLCQPPKPCVHSHAHMEECLSAGLQCPHPHLLLVHSCFIPASGLGVPSQLPHPIWSSSPAPCGDLFVKSLGTGQPGEVRLHHSPPLPSCVALVNQPPHSPWSFSRV

SEQ ID NO: 11941 - protein, 170 aa, Homo Sapiens
MWGRLWPLLLSILTATAVPGPSLRRPSRELDATPRMTIPYEELSGTRHFKGQAQNYSTLLLEEASARLLVGARGALFSLSANDIGDGAHKEIHWEASPEMQSKCHQKGKNNQTECFNHVRFLQRLNSTHLYACGTHAFQPLCAAIDAEAFTLPTSFEEGKEKCPYDPARG

SEQ ID NO: 11942 - protein, 843 aa, Homo Sapiens
MWGRLWPLLLSILTATAVPGPSLRRPSRELDATPRMTIPYEELSGTRHFKGQAQNYSTLLLEEASARLLVGARGALFSLSANDIGDGAHKEIHWEASPEMQSKCHQKGKNNQTECFNHVRFLQRLNSTHLYACGTHAFQPLCAAIDAEAFTLPTSFEEGKEKCPYDPARGFTGLIIDGGLYTATRYEFRSIPDIRRSRHPHSLRTEETPMHWLNDAEFVFSVLVRESKASAVGDDDKVYYFFTERATEEGSGSFTQSRSSHRVARVARVCKGDLGGKKILQKKWTSFLKARLICHIPLYETLRGVCSLDAETSSRTHFYAAFTLSTQWKTLEASAICRYDLAEIQAVFAGPYMEYQDGSRRWGRYEGGVPEPRPGSCITDSLRSQGYNSSQDLPSLVLDFVKLHPLMARPVVPTRGRPLLLKRNIRYTHLTGTPVTTPAGPTYDLLFLGTADGWIHKAVVLGSGMHIIEETQVFRESQSVENLVISLLQHSLYVGAPSGVIQLPLSSCSRYRSCYDCILARDPYCGWDPGTHACAAATTIANRSQGSRTALIQDIERGNRGCESSRDTGPPPPLKTRSVLRGDDVLLPCDQPSNLARALWLLNGSMGLSDGQGGYRVGVDGLLVTDAQPEHSGNYGCYAEENGLRTLLASYSLTVRPATPAPAPKAPATPGAQLAPDVRLLYVLAIAALGGLCLILASSLLYVACLREGRRGRRRKYSLGRASRAGGSAVQLQTVSGQCPGEEDEGDDEGAGGLEGSCLQIIPGEGAPAPPPPPPPPPPAELTNGLVALPSRLRRMNGNSYVLLRQSNNGVPAGPCSFAEELSRILEKRKHTQLVEQLDESSV

SEQ ID NO: 11943 - protein, 838 aa, Homo Sapiens
MWGRLWPLLLSILTATAVPGPSLRRPSRELDATPRMTIPYEELSGTRHFKGQAQNYSTLLLEEASARLLVGARGALFSLSANDIGDGAHKEIHWEASPEMQSKCHQKGKNNQTECFNHVRFLQRLNSTHLYACGTHAFQPLCAAIDAEAFTLPTSFEEGKEKCPYDPARGFTGLIIDGGLYTATRYEFRSIPDIRRSRHPHSLRTEETPMHWLNDAEFVFSVLVRESKASAVGDDDKVYYFFTERATEEGSGSFTQSRSSHRVARVARVCKGDLGGKKILQKKWTSFLKARLICHIPLYETLRGVCSLDAETSSRTHFYAAFTLSTQWKTLEASAICRYDLAEIQAVFAGPYMEYQDGSRRWGRYEGGVPEPRPGSCITDSLRSQGYNSSQDLPSLVLDFVKLHPLMARPVVPTRGRPLLLKRNIRYTHLTGTPVTTPAGPTYDLLFLGTADGWIHKAVVLGSGMHIIEETQVFRESQSVENLVISLLQHSLYVGAPSGVIQLPLSSCSRYRSCYDCILARDPYCGWDPGTHACAAATTIANRTALIQDIERGNRGCESSRDTGPPPPLKTRSVLRGDDVLLPCDQPSNLARALWLLNGSMGLSDGQGGYRVGVDGLLVTDAQPEHSGNYGCYAEENGLRTLLASYSLTVRPATPAPAPKAPATPGAQLAPDVRLLYVLAIAALGGLCLILASSLLYVACLREGRRGRRRKYSLGRASRAGGSAVQLQTVSGQCPGEEDEGDDEGAGGLEGSCLQIIPGEGAPAPPPPPPPPPPAELTNGLVALPSRLRRMNGNSYVLLRQSNNGVPAGPCSFAEELSRILEKRKHTQLVEQLDESSV

SEQ ID NO: 11944 - protein, 702 aa, Homo Sapiens
MWGRLWPLLLSILTATAVPGPSLRRPSRELDATPRMTIPYEELSGTRHFKGQAQNYSTLLLEEASARLLVGARGALFSLSANDIGDGAHKEIHWEASPEMQSKCHQKGKNNQTECFNHVRFLQRLNSTHLYACGTHAFQPLCAAIDAEAFTLPTSFEEGKEKCPYDPARGFTGLIIDGGLYTATRYEFRSIPDIRRSRHPHSLRTEETPMHWLNDAEFVFSVLVRESKASAVGDDDKVYYFFTERATEEGSGSFTQSRSSHRVARVARVCKGDLGGKKILQKKWTSFLKARLICHIPLYETLRGVCSLDAETSSRTHFYAAFTLSTQWKTLEASAICRYDLAEIQAVFAGPYMEYQDGSRRWGRYEGGVPEPRPGSCITDSLRSQGYNSSQDLPSLVLDFVKLHPLMARPVVPTRGRPLLLKRNIRYTHLTGTPVTTPAGPTYDLLFLGTADGWIHKAVVLGSGMHIIEETQVFRESQSVENLVISLLQHSLYVGAPSGVIQLPLSSCSRYRSCYDCILARDPYCGWDPGTHACAAATTIANRSQGSRTALIQDIERGNRGCESSRDTGRALQVHMGSMSPPSAWPCVLDGPETRQDLCQPPKPCVHSHAHMEECLSAGLQCPHPHLLLVHSCFIPASGLGVPSQLPHPIWSSSPAPCGDLFVKSLGTGQPGEVRLHHSPPLPSCVALVNQPPHSPWSFSRV

SEQ ID NO: 11945 - protein, 522 aa, Homo Sapiens
MWGRLWPLLLSILTATAVPGPSLRRPSRELDATPRMTIPYEELSGTRHFKGQAQNYSTLLLEEASARLLVGARGALFSLSANDIGDGAHKEIHWEASPEMQSKCHQKGKNNQTECFNHVRFLQRLNSTHLYACGTHAFQPLCAAIDAEAFTLPTSFEEGKEKCPYDPARGFTGLIIDGGLYTATRYEFRSIPDIRRSRHPHSLRTEETPMHWLNDAEFVFSVLVRESKASAVGDDDKVYYFFTERATEEGSGSFTQSRSSHRVARVARVCKGDLGGKKILQKKWTSFLKARLICHIPLYETLRGVCSLDAETSSRTHFYAAFTLSTQWKTLEASAICRYDLAEIQAVFAGPYMEYQDGSRRWGRYEGGVPEPRPGSCITDSLRSQGYNSSQDLPSLVLDFVKLHPLMARPVVPTRGRPLLLKRNIRYTHLTGTPVTTPAGPTYDLLFLGTADGWIHKAVVLGSGMHIIEETQVFRESQSVENLVISLLQHSLYVGAPSGVIQLPLSSCSRYRSCYDCILARD

SEQ ID NO: 11946 - protein, 838 aa, Homo Sapiens; identical to SEQ ID NO: 11943

SEQ ID NO: 11947 - protein, 132 aa, Homo Sapiens
  misc_feature (1)..(1): Xaa can be any naturally occurring amino acid
XREGRRGRRRKYSLGRASRAGGSAVQLQTVSGRALQVHMGSMSPPSAWPCVLDGPETRQDLCQPPKPCVHSHAHMEECLSAGLQCPHPHLLLVHSCFIPASGLGVPSQLPHPIWSSSPAPCGDLFVKSLGTG

SEQ ID NO: 11948 - protein, 254 aa, Homo Sapiens
MKGTCVIAWLFSSLGLWRLAHPEAQGTTQCQRTEHPVISYKEIGPWLREFRAKNAVDFSQLTFDPGQKELVVGARNYLFRLQLEDLSLIQAVEWECDEATKKACYSKGKSKEECQNYIRVLLVGGDRLFTCGTNAFTPVCTNRSLSNLTEIHDQISGMARCPYSPQHNSTALLTAGGELYAATAMDFPGRDPAIYRSLGILPPLRTAQYNSKWLNEPNFVSSYDIGNFTYFFFRENAVEHDCGKTVFSRAARVC

SEQ ID NO: 11949 - protein, 1074 aa, Homo Sapiens
MKGTCVIAWLFSSLGLWRLAHPEAQGTTQCQRTEHPVISYKEIGPWLREFRAKNAVDFSQLTFDPGQKELVVGARNYLFRLQLEDLSLIQAVEWECDEATKKACYSKGKSKEECQNYIRVLLVGGDRLFTCGTNAFTPVCTNRSLSNLTEIHDQISGMARCPYSPQHNSTALLTAGGELYAATAMDFPGRDPAIYRSLGILPPLRTAQYNSKWLNEPNFVSSYDIGNFTYFFFRENAVEHDCGKTVFSRAARVCKNDIGGRFLLEDTWTTFMKARLNCSRPGEVPFYYNELQSTFFLPELDLIYGIFTTNVNSIAASAVCVFNLSAIAQAFSGPFKYQENSRSAWLPYPNPNPHFQCGTVDQGLYVNLTERNLQDAQKFILMHEVVQPVTTVPSFMEDNSRFSHVAVDVVQGREALVHIIYLATDYGTIKKVRVPLNQTSSSCLLEEIELFPERRREPIRSLQILHSQSVLFVGLREHVVKIPLKRCQFYRTRSTCIGAQDPYCGWDVVMKKCTSLEESLSMTQWEQSISACPTRNLTVDGHFGVWSPWTPCTHTDGSAVGSCLCRTRSCDSPAPQCGGWQCEGPGMEIANCSRNGGWTPWTSWSPCSTTCGIGFQVRQRSCSNPTPRHGGRVCVGQNREERYCNEHLLCPPHMFWTGWGPWERCTAQCGGGIQARRRICENGPDCAGCNVEYQSCNTNPCPELKKTTPWTPWTPVNISDNGGHYEQRFRYTCKARLADPNLLEVGRQRIEMRYCSSDGTSGCSTDGLSGDFLRAGRYSAHTVNGAWSAWTSWSQCSRDCSRGIRNRKRVCNNPEPKYGGMPCLGPSLEYQECNILPCPVDGVWSCWSPWTKCSATCGGGHYMRTRSCSNPAPAYGGDICLGLHTEEALCNTQPCPESWSEWSDWSECEASGVQVRARQCILLFPMGSQCSGNTTESRPCVFDSNFIPEVSVARSSSVEEKRCGEFNMFHMIAVGLSSSILGCLLTLLVYTYCQRYQQQSHDATVIHPVSPAPLNTSITNHINKLDKYDSVEAIKAFNKNNLILEERNKYFNPHLTGKTYSNAYFTDLNNYDEY

SEQ ID NO: 11950 - protein, 409 aa, Homo Sapiens
MKNASPETREGVIRESYLKGHDQLVPVTLLAIAVILAFVMGAVFSGITVYCVCDHRRKDVAVVQRKEKELTHSRRGSMSSVTKLSGLFGDTQSKDPKPEAILTPLMHNGKLATPGNTAKMLIKADQHHLDLTALPTPESTPTLQQKRKPSRGSREWERNQNLINACTKDMPPMGSPVIPTDLPLRASPSHIPSVVVLPITQQGYQHEYVDQPKMSEVAQMALEDQAATLEYKTIKEHLSSKSPNHGVNLVENLDSLPPKVPQREASLGPPGASLSQTGLSKRLEMHHSSSYGVDYKRSYPTNSLTRSHQATTLKRNNTNSSNSSHLSRNQSFGRGDNPPPAPQRVDSIQVHSSQPSGQAVTVSRQPSLNAYNSLTRSGLKRTPSLKPDVPPKPSFAPLSTSMKPNDACT

SEQ ID NO: 11951 - protein, 457 aa, Homo Sapiens
MKTGHSSSLLPSTTTSDSTAQEGYESRGGMLDWKHLLDSPDSTDPLGAVSSHNHQDKKGVIRESYLKGHDQLVPVTLLAIAVILAFVMGAVFSGITVYCVCDHRRKDVAVVQRKEKELTHSRRGSMSSVTKLSGLFGDTQSKDPKPEAILTPLMHNGKLATPGNTAKMLIKADQHHLDLTALPTPESTPTLQQKRKPSRGSREWERNQNLINACTKDMPPMGSPVIPTDLPLRASPSHIPSVVVLPITQQGYQHEYVDQPKMSEVAQMALEDQAATLEYKTIKEHLSSKSPNHGVNLVENLDSLPPKVPQREASLGPPGASLSQTGLSKRLEMHHSSSYGVDYKRSYPTNSLTRSHQATTLKRNNTNSSNSSHLSRNQSFGRGDNPPPAPQRVDSIQVHSSQPSGQAVTVSRQPSLNAYNSLTRSGLKRTPSLKPDVPPKPSFAPLSTSMKPNDACT

SEQ ID NO: 11952 - protein, 114 aa, Homo Sapiens
MRSEALLLYFTLLHFAGAGFPEDSEPISISHGNYTKQYPVFVGHKPGRNTTQRHRLDIQMIMIMNGTLYIAARDHIYTVDIDTSHTEEIYCSKKLTWKSRQADVDTCRMKGKHK

SEQ ID NO: 11953 - protein, 159 aa, Homo Sapiens
MRSEALLLYFTLLHFAGAGFPEDSEPISISHGNYTKQYPVFVGHKPGRNTTQRHRLDIQMIMIMNGTLYIAARDHIYTVDIDTSHTEEIYCSKKLTWKSRQADVDTCRMKGKHKDECHNFIKVLLKKNDDALFVCGTNAFNPSCRNYKMDTLEPFGDEF

SEQ ID NO: 11954 - protein, 1047 aa, Homo Sapiens
MRSEALLLYFTLLHFAGAGFPEDSEPISISHGNYTKQYPVFVGHKPGRNTTQRHRLDIQMIMIMNGTLYIAARDHIYTVDIDTSHTEEIYCSKKLTWKSRQADVDTCRMKGKHKDECHNFIKVLLKKNDDALFVCGTNAFNPSCRNYKMDTLEPFGDEFSGMARCPYDAKHANVALFADGKLYSATVTDFLAIDAVIYRSLGESPTLRTVKHDSKWLKEPYFVQAVDYGDYIYFFFREIAVEYNTMGKVVFPRVAQVCKNDMGGSQRVLEKQWTSFLKARLNCSVPGDSHFYFNILQAVTDVIRINGRDVVLATFSTPYNSIPGSAVCAYDMLDIASVFTGRFKEQKSPDSTWTPVPDERVPKPRPGCCAGSSSLERYATSNEFPDDTLNFIKTHPLMDEAVPSIFNRPWFLRTMVRYRLTKIAVDTAAGPYQNHTVVFLGSEKGIILKFLARIGNSGFLNDSLFLEEMSVYNSEKCSYDGVEDKRIMGMQLDRASSSLYVAFSTCVIKVPLGRCERHGKCKKTCIASRDPYCGWIKEGGACSHLSPNSRLTFEQDIERGNTDGLGDCHNSFVALNDISTPLPDNEMSYNTVYGHSSSLLPSTTTSDSTAQEGYESRGGMLDWKHLLDSPDSTDPLGAVSSHNHQDKKGVIRESYLKGHDQLVPVTLLAIAVILAFVMGAVFSGITVYCVCDHRRKDVAVVQRKEKELTHSRRGSMSSVTKLSGLFGDTQSKDPKPEAILTPLMHNGKLATPGNTAKMLIKADQHHLDLTALPTPESTPTLQQKRKPSRGSREWERNQNLINACTKDMPPMGSPVIPTDLPLRASPSHIPSVVVLPITQQGYQHEYVDQPKMSEVAQMALEDQAATLEYKTIKEHLSSKSPNHGVNLVENLDSLPPKVPQREASLGPPGASLSQTGLSKRLEMHHSSSYGVDYKRSYPTNSLTRSHQATTLKRNNTNSSNSSHLSRNQSFGRGDNPPPAPQRVDSIQVHSSQPSGQAVTVSRQPSLNAYNSLTRSGLKRTPSLKPDVPPKPSFAPLSTSMKPNDACT

SEQ ID NO: 11955 - protein, 1030 aa, Homo Sapiens
MRSEALLLYFTLLHFAGAGFPEDSEPISISHGNYTKQYPVFVGHKPGRNTTQRHRLDIQMIMIMNGTLYIAARDHIYTVDIDTSHTEEIYCSKKLTWKSRQADVDTCRMKGKHKDECHNFIKVLLKKNDDALFVCGTNAFNPSCRNYKMDTLEPFGDEFSGMARCPYDAKHANVALFADGKLYSATVTDFLAIDAVIYRSLGESPTLRTVKHDSKWLKEPYFVQAVDYGDYIYFFFREIAVEYNTMGKVVFPRVAQVCKNDMGGSQRVLEKQWTSFLKARLNCSVPGDSHFYFNILQAVTDVIRINGRDVVLATFSTPYNSIPGSAVCAYDMLDIASVFTGRFKEQKSPDSTWTPVPDERVPKPRPGCCAGSSSLERYATSNEFPDDTLNFIKTHPLMDEAVPSIFNRPWFLRTMVRYRLTKIAVDTAAGPYQNHTVVFLGSEKGIILKFLARIGNSGFLNDSLFLEEMSVYNSEKCSYDGVEDKRIMGMQLDRASSSLYVAFSTCVIKVPLGRCERHGKCKKTCIASRDPYCGWIKEGGACSHLSPNSRLTFEQDIERGNTDGLGDCHNSFVALNGHSSSLLPSTTTSDSTAQEGYESRGGMLDWKHLLDSPDSTDPLGAVSSHNHQDKKGVIRESYLKGHDQLVPVTLLAIAVILAFVMGAVFSGITVYCVCDHRRKDVAVVQRKEKELTHSRRGSMSSVTKLSGLFGDTQSKDPKPEAILTPLMHNGKLATPGNTAKMLIKADQHHLDLTALPTPESTPTLQQKRKPSRGSREWERNQNLINACTKDMPPMGSPVIPTDLPLRASPSHIPSVVVLPITQQGYQHEYVDQPKMSEVAQMALEDQAATLEYKTIKEHLSSKSPNHGVNLVENLDSLPPKVPQREASLGPPGASLSQTGLSKRLEMHHSSSYGVDYKRSYPTNSLTRSHQATTLKRNNTNSSNSSHLSRNQSFGRGDNPPPAPQRVDSIQVHSSQPSGQAVTVSRQPSLNAYNSLTRSGLKRTPSLKPDVPPKPSFAPLSTSMKPNDACT

SEQ ID NO: 11956 - protein, 1030 aa, Homo Sapiens; identical to SEQ ID NO: 11955

SEQ ID NO: 11957 - protein, 545 aa, Homo Sapiens
  misc_feature (1)..(1): Xaa can be any naturally occurring amino acid
XYQNHTVVFLGSEKGIILKFLARIGNSGFLNDSLFLEEMSVYNSEKCSYDGVEDKRIMGMQLDRASSSLYVAFSTCVIKVPLGRCERHGKCKKTCIASRDPYCGWIKEGGACSHLSPNSRLTFEQDIERGNTDGLGDCHNSFVALNGVIRESYLKGHDQLVPVTLLAIAVILAFVMGAVFSGITVYCVCDHRRKDVAVVQRKEKELTHSRRGSMSSVTKLSGLFGDTQSKDPKPEAILTPLMHNGKLATPGNTAKMLIKADQHHLDLTALPTPESTPTLQQKRKPSRGSREWERNQNLINACTKDMPPMGSPVIPTDLPLRASPSHIPSVVVLPITQQGYQHEYVDQPKMSEVAQMALEDQAATLEYKTIKEHLSSKSPNHGVNLVENLDSLPPKVPQREASLGPPGASLSQTGLSKRLEMHHSSSYGVDYKRSYPTNSLTRSHQATTLKRNNTNSSNSSHLSRNQSFGRGDNPPPAPQRVDSIQVHSSQPSGQAVTVSRQPSLNAYNSLTRSGLKRTPSLKPDVPPKPSFAPLSTSMKPNDACT

SEQ ID NO: 11958 - protein, 930 aa, Homo Sapiens
MPRAPHFMPLLLLLLLLSLPHTQAAFPQDPLPLLISDLQGTSPLSWFRGLEDDAVAAELGLDFQRFLTLNRTLLVAARDHVFSFDLQAEEEGEGLVPNKYLTWRSQDVENCAVRGKLTDECYNYIRVLVPWDSQTLLACGTNSFSPVCRSYGITSLQQEGEELSGQARCPFDATQSNVAIFAEGSLYSATAADFQASDAVVYRSLGPQPPLRSAKYDSKWLREPHFVQALEHGDHVYFFFREVSVEDARLGRVQFSRVARVCKRDMGGSPRALDRHWTSFLKLRLNCSVPGDSTFYFDVLQALTGPVNLHGRSALFGVFTTQTNSIPGSAVCAFYLDEIERGFEGKFKEQRSLDGAWTPVSEDRVPSPRPGSCAGVGGAALFSSSRDLPDDVLTFIKAHPLLDPAVPPVTHQPLLTLTSRALLTQVAVDGMAGPHSNITVMFLGSNDGTVLKVLTPGGRSGGPEPILLEEIDAYSPARCSGKRTAQTARRIIGLELDTEGHRLFVAFSGCIVYLPLSRCARHGACQRSCLASQDPYCGWHSSRGCVDIRGSGGTDVDQAGNQESMEHGDCQDGATGSQSGPGDSAYGVRRDLPPASASRSVPIPLLLASVAAAFALGASVSGLLVSCACRRAHRRRGKDIETPGLPRPLSLRSLARLHGGGPEPPPPSKDGDAVQTPQLYTTFLPPPEGVPPPELACLPTPESTPELPVKHLRAAGDPWEWNQNRNNAKEGPGRSRGGHAAGGPAPRVLVRPPPPGCPGQAVEVTTLEELLRYLHGPQPPRKGAEPPAPLTSRALPPEPAPALLGGPSPRPHECASPLRLDVPPEGRCASAPARPALSAPAPRLGVGGGRRLPFSGHRAPPALLTRVPSGGPSRYSGGPGKHLLYLGRPEGYRGRALKRVDVEKPQLSLKPPLVGPSSRQAVPNGGRFNF

SEQ ID NO: 11959 - protein, 930 aa, Homo Sapiens; identical to SEQ ID NO: 11958

SEQ ID NO: 11960 - protein, 962 aa, Homo Sapiens
MPRAPHFMPLLLLLLLLSLPHTQAAFPQDPLPLLISDLQGTSPLSWFRGLEDDAVAAELGLDFQRFLTLNRTLLVAARDHVFSFDLQAEEEGEGLVPNKYLTWRSQDVENCAVRGKLTDECYNYIRVLVPWDSQTLLACGTNSFSPVCRSYGITSLQQEGEELSGQARCPFDATQSNVAIFAEGSLYSATAADFQASDAVVYRSLGPQPPLRSAKYDSKWLREPHFVQALEHGDHVYFFFREVSVEDARLGRVQFSRVARVCKRDMGGSPRALDRHWTSFLKLRLNCSVPGDSTFYFDVLQALTGPVNLHGRSALFGVFTTQTNSIPGSAVCAFYLDEIERGFEGKFKEQRSLDGAWTPVSEDRVPSPRPGSCAGVGGAALFSSSRDLPDDVLTFIKAHPLLDPAVPPVTHQPLLTLTSRALLTQVAVDGMAGPHSNITVMFLGSNDGTVLKVLTPGGRSGGPEPILLEEIDAYSPARCSGKRTAQTARRIIGLELDTEGHRLFVAFSGCIVYLPLSRCARHGACQRSCLASQDPYCGWHSSRGCVDIRGSGGTDVDQAGNQESMEHGDCQDGATGSQSGPGDSAYVLPGPGPSPGTPSPPSDAHPRPQSSTLGVHTRGVRRDLPPASASRSVPIPLLLASVAAAFALGASVSGLLVSCACRRAHRRRGKDIETPGLPRPLSLRSLARLHGGGPEPPPPSKDGDAVQTPQLYTTFLPPPEGVPPPELACLPTPESTPELPVKHLRAAGDPWEWNQNRNNAKEGPGRSRGGHAAGGPAPRVLVRPPPPGCPGQAVEVTTLEELLRYLHGPQPPRKGAEPPAPLTSRALPPEPAPALLGGPSPRPHECASPLRLDVPPEGRCASAPARPALSAPAPRLGVGGGRRLPFSGHRAPPALLTRVPSGGPSRYSGGPGKHLLYLGRPEGYRGRALKRVDVEKPQLSLKPPLVGPSSRQAVPNGGRFNF

SEQ ID NO: 11961 - protein, 537 aa, Homo Sapiens [sequence omitted]

SEQ ID NO: 11962 - protein, 537 aa, Homo Sapiens
MPRAPHFMPLLLLLLLLSLPHTQAAFPQDPLPLLISDLQGTSPLSWFRGLEDDAVAAELGLDFQRFLTLNRTLLVAARDHVFSFDLQAEEEGEGLVPNKYLTWRSQDVENCAVRGKLTDECYNYIRVLVPWDSQTLLACGTNSFSPVCRSYGITSLQQEGEELSGQARCPFDATQSNVAIFAEGSLYSATAADFQASDAVVYRSLGPQPPLRSAKYDSKWLREPHFVQALEHGDHVYFFFREVSVEDARLGRVQFSRVARVCKRDMGGSPRALDRHWTSFLKLRLNCSVPGDSTFYFDVLQALTGPVNLHGRSALFGVFTTQTNSIPGSAVCAFYLDEIERGFEGKFKEQRSLDGAWTPVSEDRVPSPRPGSCPAHSSPLGRSLQVLRGSREAPPVPGPARGLPGPRPEKGGRREAPVVPEASPRRALLPPGRPERRPFQLLKGAAHGLQRGERPSPLGHELDALQDVSPPPRPAPPAFPTRRVSRGPFSPRVYLLTVFPPVLDRRVGGEKPVSSVSQHFRGSWRTPTPRSLPAKLP

SEQ ID NO: 11963 - protein, 922 aa, Homo Sapiens
MPRAPHFMPLLLLLLLLSLPHTQAAFPQDPLPLLISDLQGTSPLSWFRGLEDDAVAAELGLDFQRFLTLNRTLLVAARDHVFSFDLQAEEEGEGLVPNKYLTWRSQDVENCAVRGKLTDECYNYIRVLVPWDSQTLLACGTNSFSPVCRSYGITSLQQEGEELSGQARCPFDATQSNVAIFAEPHFVQALEHGDHVYFFFREVSVEDARLGRVQFSRVARVCKRDMGGSPRALDRHWTSFLKLRLNCSVPGDSTFYFDVLQALTGPVNLHGRSALFGVFTTQTNSIPGSAVCAFYLDEIERGFEGKFKEQRSLDGAWTPVSEDRVPSPRPGSCAGVGGAALFSSSRDLPDDVLTFIKAHPLLDPAVPPVTHQPLLTLTSRALLTQVAVDGMAGPHSNITVMFLGSNDGTVLKVLTPGGRSGGPEPILLEEIDAYSPARCSGKRTAQTARRIIGLELDTEGHRLFVAFSGCIVYLPLSRCARHGACQRSCLASQDPYCGWHSSRGCVDIRGSGGTDVDQAGNQESMEHGDCQDGATGSQSGPGDSAYVLPGPGPSPGTPSPPSDAHPRPQSSTLGVHTRGVRRDLPPASASRSVPIPLLLASVAAAFALGASVSGLLVSCACRRAHRRRGKDIETPGLPRPLSLRSLARLHGGGPEPPPPSKDGDAVQTPQLYTTFLPPPEGVPPPELACLPTPESTPELPVKHLRAAGDPWEWNQNRNNAKEGPGRSRGGHAAGGPAPRVLVRPPPPGCPGQAVEVTTLEELLRYLHGPQPPRKGAEPPAPLTSRALPPEPAPALLGGPSPRPHECASPLRLDVPPEGRCASAPARPALSAPAPRLGVGGGRRLPFSGHRAPPALLTRVPSGGPSRYSGGPGKHLLYLGRPEGYRGRALKRVDVEKPQLSLKPPLVGPSSRQAVPNGGRFNF

SEQ ID NO: 11964 - protein, 22 aa, Homo Sapiens
MRVFLLCAYILLLMVSQLRAVS

SEQ ID NO: 11965 - protein, 148 aa, Homo Sapiens
MRVFLLCAYILLLMVSQLRAVSFPEDDEPLNTVDYHYSRQYPVFRGRPSGNESQHRLDFQLMLKIRDTLYIAGRDQVYTVNLNEMPKTEVIPNKKLTWRSRQQDRENCAMKGKHKDECHNFIKVFVPRNDEMVFVCGTNAFNPMCRYY

SEQ ID NO: 11966 - protein, 219 aa, Homo Sapiens
MRVFLLCAYILLLMVSQLRAVSFPEDDEPLNTVDYHYSRQYPVFRGRPSGNESQHRLDFQLMLKIRDTLYIAGRDQVYTVNLNEMPKTEVIPNKKLTWRSRQQDRENCAMKGKHKDECHNFIKVFVPRNDEMVFVCGTNAFNPMCRYYRLSTLEYDGEEISGLARCPFDARQTNVALFADGKLYSATVADFLASDAVIYRSMGDGSALRTIKYDSKWIK

SEQ ID NO: 11967 - protein, 1073 aa, Homo Sapiens
MRVFLLCAYILLLMVSQLRAVSFPEDDEPLNTVDYHYSRQYPVFRGRPSGNESQHRLDFQLMLKIRDTLYIAGRDQVYTVNLNEMPKTEVIPNKKLTWRSRQQDRENCAMKGKHKDECHNFIKVFVPRNDEMVFVCGTNAFNPMCRYYRLSTLEYDGEEISGLARCPFDARQTNVALFADGKLYSATVADFLASDAVIYRSMGDGSALRTIKYDSKWIKEPHFLHAIEYGNYVYFFFREIAVEHNNLGKAVYSRVARICKNDMGGSQRVLEKHWTSFLKARLNCSVPGDSFFYFDVLQSITDIIQINGIPTVVGVFTTQLNSIPGSAVCAFSMDDIEKVFKGRFKEQKTPDSVWTAVPEDKVPKPRPGCCAKHGLAEAYKTSIDFPDETLSFIKSHPLMDSAVPPIADEPWFTKTRVRYRLTAISVDHSAGPYQNYTVIFVGSEAGMVLKVLAKTSPFSLNDSVLLEEIEAYNHAKCSAENEEDKKVISLQLDKDHHALYVAFSSCIIRIPLSRCERYGSCKKSCIASRDPYCGWLSQGSCGRVTPGMLAEGYEQDTEFGNTAHLGDCHEILPTSTTPDYKIFGGPTSDMEVSSSSVTTMASIPEITPKVIDTWRPKLTSSRKFVVQDDPNTSDFTDPLSGIPKGVRWEVQSGESNQMVHMNVLITCVFAAFVLGAFIAGVAVYCYRDMFVRKNRKIHKDAESAQSCTDSSGSFAKLNGLFDSPVKEYQQNIDSPKLYSNLLTSRKELPPNGDTKSMVMDHRGQPPELAALPTPESTPVLHQKTLQAMKSHSEKAHGHGASRKETPQFFPSSPPPHSPLSHGHIPSAIVLPNATHDYNTSFSNSNAHKAEKKLQNIDHPLTKSSSKRDHRRSVDSRNTLNDLLKHLNDPNSNPKAIMGDIQMAHQNLMLDPMGSMSEVPPKVPNREASLYSPPSTLPRNSPTKRVDVPTTPGVPMTSLERQRGYHKNSSQRHSISAMPKNLNSPNGVLLSRQPSMNRGGYMPTPTGAKVDYIQGTPVSVHLQPSLSRQSSYTSNGTLPRTGLKRTPSLKPDVPPKPSFVPQTPSVRPLNKYTY

SEQ ID NO: 11968 - protein, 597 aa, Homo Sapiens
MRVFLLCAYILLLMVSQLRAVSFPEDDEPLNTVDYHYSRQYPVFRGRPSGNESQHRLDFQLMLKIRDTLYIAGRDQVYTVNLNEMPKTEVIPNKKLTWRSRQQDRENCAMKGKHKDECHNFIKVFVPRNDEMVFVCGTNAFNPMCRYYRLSTLEYDGEEISGLARCPFDARQTNVALFADGKLYSATVADFLASDAVIYRSMGDGSALRTIKYDSKWIKEPHFLHAIEYGNYVYFFFREIAVEHNNLGKAVYSRVARICKNDMGGSQRVLEKHWTSFLKARLNCSVPGDSFFYFDVLQSITDIIQINGIPTVVGVFTTQLNSIPGSAVCAFSMDDIEKVFKGRFKEQKTPDSVWTAVPEDKVPKPRPGCCAKHGLAEAYKTSIDFPDETLSFIKSHPLMDSAVPPIADEPWFTKTRVRYRLTAISVDHSAGPYQNYTVIFVGSEAGMVLKVLAKTSPFSLNDSVLLEEIEAYNHAKCSAENEEDKKVISLQLDKDHHALYVAFSSCIIRIPLSRCERYGSCKKSCIASRDPYCGWLSQGSCGRVTPGMLAEGYEQDTEFGNTAHLGDCHDMEVSSSSVTTMVYDGKSSLESPTRWST

SEQ ID NO: 11969 - protein, 1011 aa, Homo Sapiens
MRVFLLCAYILLLMVSQLRAVSFPEDDEPLNTVDYHYSRQYPVFRGRPSGNESQHRLDFQLMLKIRDTLYIAGRDQVYTVNLNEMPKTEVIPNKKLTWRSRQQDRENCAMKGKHKDECHNFIKVFVPRNDEMVFVCGTNAFNPMCRYYRLSTLEYDGEEISGLARCPFDARQTNVALFADGKLYSATVADFLASDAVIYRSMGDGSALRTIKYDSKWIKEPHFLHAIEYGNYVYFFFREIAVEHNNLGKAVYSRVARICKNDMGGSQRVLEKHWTSFLKARLNCSVPGDSFFYFDVLQSITDIIQINGIPTVVGVFTTQLNSIPGSAVCAFSMDDIEKVFKGRFKEQKTPDSVWTAVPEDKVPKPRPGCCAKHGLAEAYKTSIDFPDETLSFIKSHPLMDSAVPPIADEPWFTKTRVRYRLTAISVDHSAGPYQNYTVIFVGSEAGMVLKVLAKTSPFSLNDSVLLEEIEAYNHAKCSAENEEDKKVISLQLDKDHHALYVAFSSCIIRIPLSRCERYGSCKKSCIASRDPYCGWLSQGSCGRVTPGMLLLTEDFFAFHNHSAEGYEQDTEFGNTAHLGDCHGVRWEVQSGESNQMVHMNVLITCVFAAFVLGAFIAGVAVYCYRDMFVRKNRKIHKDAESAQSCTDSSGSFAKLNGLFDSPVKEYQQNIDSPKLYSNLLTSRKELPPNGDTKSMVMDHRGQPPELAALPTPESTPVLHQKTLQAMKSHSEKAHGHGASRKETPQFFPSSPPPHSPLSHGHIPSAIVLPNATHDYNTSFSNSNAHKAEKKLQNIDHPLTKSSSKRDHRRSVDSRNTLNDLLKHLNDPNSNPKAIMGDIQMAHQNLMLDPMGSMSEVPPKVPNREASLYSPPSTLPRNSPTKRVDVPTTPGVPMTSLERQRGYHKNSSQRHSISAMPKNLNSPNGVLLSRQPSMNRGGYMPTPTGAKVDYIQGTPVSVHLQPSLSRQSSYTSNGTLPRTGLKRTPSLKPDVPPKPSFVPQTPSVRPLNKYTY

SEQ ID NO: 11970 - protein, 1017 aa, Homo Sapiens
MRVFLLCAYILLLMVSQLRAVSFPEDDEPLNTVDYHYSRQYPVFRGRPSGNESQHRLDFQLMLKIRDTLYIAGRDQVYTVNLNEMPKTEVIPNKKLTWRSRQQDRENCAMKGKHKDECHNFIKVFVPRNDEMVFVCGTNAFNPMCRYYRLSTLEYDGEEISGLARCPFDARQTNVALFADGKLYSATVADFLASDAVIYRSMGDGSALRTIKYDSKWIKEPHFLHAIEYGNYVYFFFREIAVEHNNLGKAVYSRVARICKNDMGGSQRVLEKHWTSFLKARLNCSVPGDSFFYFDVLQSITDIIQINGIPTVVGVFTTQLNSIPGSAVCAFSMDDIEKVFKGRFKEQKTPDSVWTAVPEDKVPKPRPGCCAKHGLAEAYKTSIDFPDETLSFIKSHPLMDSAVPPIADEPWFTKTRVRYRLTAISVDHSAGPYQNYTVIFVGSEAGMVLKVLAKTSPFSLNDSVLLEEIEAYNHAKCSAENEEDKKVISLQLDKDHHALYVAFSSCIIRIPLSRCERYGSCKKSCIASRDPYCGWLSQGSCGRVTPGMLAEGYEQDTEFGNTAHLGDCHEILPTSTTPDYKIFGGPTSGVRWEVQSGESNQMVHMNVLITCVFAAFVLGAFIAGVAVYCYRDMFVRKNRKIHKDAESAQSCTDSSGSFAKLNGLFDSPVKEYQQNIDSPKLYSNLLTSRKELPPNGDTKSMVMDHRGQPPELAALPTPESTPVLHQKTLQAMKSHSEKAHGHGASRKETPQFFPSSPPPHSPLSHGHIPSAIVLPNATHDYNTSFSNSNAHKAEKKLQNIDHPLTKSSSKRDHRRSVDSRNTLNDLLKHLNDPNSNPKAIMGDIQMAHQNLMLDPMGSMSEVPPKVPNREASLYSPPSTLPRNSPTKRVDVPTTPGVPMTSLERQRGYHKNSSQRHSISAMPKNLNSPNGVLLSRQPSMNRGGYMPTPTGAKVDYIQGTPVSVHLQPSLSRQSSYTSNGTLPRTGLKRTPSLKPDVPPKPSFVPQTPSVRPLNKYTY

SEQ ID NO: 11971 - protein, 476 aa, Homo Sapiens
MRVFLLCAYILLLMVSQLRAVSFPEDDEPLNTVDYHYSRQYPVFRGRPSGNESQHRLDFQLMLKIRDTLYIAGRDQVYTVNLNEMPKTEVIPNKKLTWRSRQQDRENCAMKGKHKDECHNFIKVFVPRNDEMVFVCGTNAFNPMCRYYRLSTLEYDGEEISGLARCPFDARQTNVALFADGKLYSATVADFLASDAVIYRSMGDGSALRTIKYDSKWIKEPHFLHAIEYGNYVYFFFREIAVEHNNLGKAVYSRVARICKNDMGGSQRVLEKHWTSFLKARLNCSVPGDSFFYFDVLQSITDIIQINGIPTVVGVFTTQLNSIPGSAVCAFSMDDIEKVFKGRFKEQKTPDSVWTAVPEDKVPKPRPGCCAKHGLAEAYKTSIDFPDETLSFIKSHPLMDSAVPPIADEPWFTKTRVRYRLTAISVDHSAGPYQNYTVIFVGSEAGMVLKVLAKTSPFSLNDSVLLEEIEAYNHAK

SEQ ID NO: 11972 - protein, 998 aa, Homo Sapiens
MRVFLLCAYILLLMVSQLRAVSFPEDDEPLNTVDYHYSRQYPVFRGRPSGNESQHRLDFQLMLKIRDTLYIAGRDQVYTVNLNEMPKTEVIPNKKLTWRSRQQDRENCAMKGKHKDECHNFIKVFVPRNDEMVFVCGTNAFNPMCRYYRLSTLEYDGEEISGLARCPFDARQTNVALFADGKLYSATVADFLASDAVIYRSMGDGSALRTIKYDSKWIKEPHFLHAIEYGNYVYFFFREIAVEHNNLGKAVYSRVARICKNDMGGSQRVLEKHWTSFLKARLNCSVPGDSFFYFDVLQSITDIIQINGIPTVVGVFTTQLNSIPGSAVCAFSMDDIEKVFKGRFKEQKTPDSVWTAVPEDKVPKPRPGCCAKHGLAEAYKTSIDFPDETLSFIKSHPLMDSAVPPIADEPWFTKTRVRYRLTAISVDHSAGPYQNYTVIFVGSEAGMVLKVLAKTSPFSLNDSVLLEEIEAYNHAKCSAENEEDKKVISLQLDKDHHALYVAFSSCIIRIPLSRCERYGSCKKSCIASRDPYCGWLSQGSCGRVTPGMLAEGYEQDTEFGNTAHLGDCHGVRWEVQSGESNQMVHMNVLITCVFAAFVLGAFIAGVAVYCYRDMFVRKNRKIHKDAESAQSCTDSSGSFAKLNGLFDSPVKEYQQNIDSPKLYSNLLTSRKELPPNGDTKSMVMDHRGQPPELAALPTPESTPVLHQKTLQAMKSHSEKAHGHGASRKETPQFFPSSPPPHSPLSHGHIPSAIVLPNATHDYNTSFSNSNAHKAEKKLQNIDHPLTKSSSKRDHRRSVDSRNTLNDLLKHLNDPNSNPKAIMGDIQMAHQNLMLDPMGSMSEVPPKVPNREASLYSPPSTLPRNSPTKRVDVPTTPGVPMTSLERQRGYHKNSSQRHSISAMPKNLNSPNGVLLSRQPSMNRGGYMPTPTGAKVDYIQGTPVSVHLQPSLSRQSSYTSNGTLPRTGLKRTPSLKPDVPPKPSFVPQTPSVRPLNKYTY

SEQ ID NO: 11973 - protein, 1073 aa, Homo Sapiens; identical to SEQ ID NO: 11967

SEQ ID NO: 11974 - protein, 597 aa, Homo Sapiens; identical to SEQ ID NO: 11968

SEQ ID NO: 11975 - protein, 1011 aa, Homo Sapiens; identical to SEQ ID NO: 11969

SEQ ID NO: 11976 - protein, 54 aa, Homo Sapiens
  misc_feature (1)..(1): Xaa can be any naturally occurring amino acid
XLLTEDFFAFHNHSAEGYEQDTEFGNTAHLGDCHEILPTSTTPDYKIFGGPTSG

SEQ ID NO: 11977 - protein, 198 aa, Homo Sapiens
  misc_feature (1)..(1): Xaa can be any naturally occurring amino acid
XLTEDFFAFHNHSAEGYEQDTEFGNTAHLGDCHEILPTSTTPDYKIFGGPTSDMEVSSSSVTTMASIPEITPKVIDTWRPKLTSSRKFVVQDDPNTSDFTDPLSGIPKGVRWEVQSGESNQMVHMNVLITCVFAAFVLGAFIAGVAVYCYRDMFVRKNRKIHKDAESAQSCTDSSGSFAKLNGLFDSPVKEYQQNIDS

SEQ ID NO: 11978 - protein, 462 aa, Homo Sapiens
MKPNIIFVLSLLLILEKQAAVMGQKGGSKGRLPSEFSQFPHGQKGQHYSGQKGKQQTESKGSFSIQYTYHVDANDHDQSRKSQQYDLNALHKTTKSQRHLGGSQQLLHNKQEGRDHDKSKGHFHRVVIHHKGGKAHRGTQNPSQDQGNSPSGKGISSQYSNTEERLWVHGLSKEQTSVSGAQKGRKQGGSQSSYVLQTEELVANKQQRETKNSHQNKGHYQNVVEVREEHSSKVQTSLCPAHQDKLQHGSKDIFSTQDELLVYNKNQHQTKNLNQDQQHGRKANKISYQSSSTEERRLHYGENGVQKDVSQSSIYSQTEEKAQGKSQKQITIPSQEQEHSQKANKISYQSSSTEERRLHYGENGVQKDVSQRSIYSQTEKLVAGKSQIQAPNPKQEPWHGENAKGESGQSTNREQDLLSHEQKGRHQHGSHGGLDIVIIEQEDDSDRHLAQHLNNDRNPLFT

SEQ ID NO: 11979 - protein, 582 aa, Homo Sapiens
MKSIILFVLSLLLILEKQAAVMGQKGGSKGQLPSGSSQFPHGQKGQHYFGQKDQQHTKSKGSFSIQHTYHVDINDHDWTRKSQQYDLNALHKATKSKQHLGGSQQLLNYKQEGRDHDKSKGHFHMIVIHHKGGQAHHGTQNPSQDQGNSPSGKGLSSQCSNTEKRLWVHGLSKEQASASGAQKGRTQGGSQSSYVLQTEELVVNKQQRETKNSHQNKGHYQNVVDVREEHSSKLQTSLHPAHQDRLQHGPKDIFTTQDELLVYNKNQHQTKNLSQDQEHGRKAHKISYPSSRTEERQLHHGEKSVQKDVSKGSISIQTEEKIHGKSQNQVTIHSQDQEHGHKENKISYQSSSTEERHLNCGEKGIQKGVSKGSISIQTEEQIHGKSQNQVRIPSQAQEYGHKENKISYQSSSTEERRLNSGEKDVQKGVSKGSISIQTEEKIHGKSQNQVTIPSQDQEHGHKENKMSYQSSSTEERRLNYGGKSTQKDVSQSSISFQIEKLVEGKSQIQTPNPNQDQWSGQNAKGKSGQSADSKQDLLSHEQKGRYKQESSESHNIVITEHEVAQDDHLTQQYNEDRNPIST

SEQ ID NO: 11980 - protein, 57 aa, Homo Sapiens
MADTPRDAGLKQAPASRNEKAPVDFGYVGIDSILEQMRRKAMKQGFEFNIMVVERLG

SEQ ID NO: 11981 - protein, 104 aa, Homo Sapiens
MADTPRDAGLKQAPASRNEKAPVDFGYVGIDSILEQMRRKAMKQGFEFNIMVVGQSGLGKSTLINTLFKSKISRKSVQPTSEERIPKTIEIKSITHDIEEKGVR

SEQ ID NO: 11982 - protein, 108 aa, Homo Sapiens
MADTPRDAGLKQAPASRNEKAPVDFGYVGIDSILEQMRRKAMKQGFEFNIMVVGQSGLGKSTLINTLFKSKISRKSVQPTSEERIPKTIEIKSITHDIEEKGVRMKLT

SEQ ID NO: 11983 - protein, 116 aa, Homo Sapiens
MADTPRDAGLKQAPASRNEKAPVDFGYVGIDSILEQMRRKAMKQGFEFNIMVVGQSGLGKSTLINTLFKSKISRKSVQPTSEERIPKTIEIKSITHDIEEKGVRMKLTVIDTPGFG

SEQ ID NO: 11984 - protein, 127 aa, Homo Sapiens
MADTPRDAGLKQAPASRNEKAPVDFGYVGIDSILEQMRRKAMKQGFEFNIMVVGQSGLGKSTLINTLFKSKISRKSVQPTSEERIPKTIEIKSITHDIEEKGVRMKLTVIDTPGFGDHINNENCWQP

SEQ ID NO: 11985 - protein, 135 aa, Homo Sapiens
MADTPRDAGLKQAPASRNEKAPVDFGYVGIDSILEQMRRKAMKQGFEFNIMVVGQSGLGKSTLINTLFKSKISRKSVQPTSEERIPKTIEIKSITHDIEEKGVRMKLTVIDTPGFGDHINNENCWQPIMKFINDQ

SEQ ID NO: 11986 - protein, 144 aa, Homo Sapiens
MADTPRDAGLKQAPASRNEKAPVDFGYVGIDSILEQMRRKAMKQGFEFNIMVVGQSGLGKSTLINTLFKSKISRKSVQPTSEERIPKTIEIKSITHDIEEKGVRMKLTVIDTPGFGDHINNENCWQPIMKFINDQYEKYLQEEV

SEQ ID NO: 11987 - protein, 151 aa, Homo Sapiens
MADTPRDAGLKQAPASRNEKAPVDFGYVGIDSILEQMRRKAMKQGFEFNIMVVGQSGLGKSTLINTLFKSKISRKSVQPTSEERIPKTIEIKSITHDIEEKGVRMKLTVIDTPGFGDHINNENCWQPIMKFINDQYEKYLQEEVNINRKKR

SEQ ID NO: 11988 - protein, 157 aa, Homo Sapiens
MADTPRDAGLKQAPASRNEKAPVDFGYVGIDSILEQMRRKAMKQGFEFNIMVVGQSGLGKSTLINTLFKSKISRKSVQPTSEERIPKTIEIKSITHDIEEKGVRMKLTVIDTPGFGDHINNENCWQPIMKFINDQYEKYLQEEVNINRKKRIPDTRV

SEQ ID NO: 11989 - protein, 165 aa, Homo Sapiens
MADTPRDAGLKQAPASRNEKAPVDFGYVGIDSILEQMRRKAMKQGFEFNIMVVGQSGLGKSTLINTLFKSKISRKSVQPTSEERIPKTIEIKSITHDIEEKGVRMKLTVIDTPGFGDHINNENCWQPIMKFINDQYEKYLQEEVNINRKKRIPDTRVHCCLYFIP

SEQ ID NO: 11990 - protein, 195 aa, Homo Sapiens
MADTPRDAGLKQAPASRNEKAPVDFGYVGIDSILEQMRRKAMKQGFEFNIMVVGQSGLGKSTLINTLFKSKISRKSVQPTSEERIPKTIEIKSITHDIEEKGVRMKLTVIDTPGFGDHINNENCWQPIMKFINDQYEKYLQEEVNINRKKRIPDTRVHCCLYFIPATGHSLRPLDIEFMKRLSKVVNIVPVIAKA

SEQ ID NO: 11991 - protein, 209 aa, Homo Sapiens
MADTPRDAGLKQAPASRNEKAPVDFGYVGIDSILEQMRRKAMKQGFEFNIMVVGQSGLGKSTLINTLFKSKISRKSVQPTSEERIPKTIEIKSITHDIEEKGVRMKLTVIDTPGFGDHINNENCWQPIMKFINDQYEKYLQEEVNINRKKRIPDTRVHCCLYFIPATGHSLRPLDIEFMKRLSKVVNIVPVIAKADTLTLEERVHFKQR

SEQ ID NO: 11992 - protein, 209 aa, Homo Sapiens; identical to SEQ ID NO: 11991

SEQ ID NO: 11993 - protein, 335 aa, Homo Sapiens
MADTPRDAGLKQAPASRNEKAPVDFGYVGIDSILEQMRRKAMKQGFEFNIMVVGQSGLGKSTLINTLFKSKISRKSVQPTSEERIPKTIEIKSITHDIEEKGVRMKLTVIDTPGFGDHINNENCWQPIMKFINDQYEKYLQEEVNINRKKRIPDTRVHCCLYFIPATGHSLRPLDIEFMKRLSKVVNIVPVIAKADTLTLEERVHFKQRITADLLSNGIDVYPQKEFDEDSEDRLVNEKFREMIPFAVVGSDHEYQVNGKRILGRKTKWGTIEVENTTHCEFAYLRDLLIRTHMQNIKDITSSIHFEAYRVKRLNEGSSAMANGMEEKEPEAPEM

SEQ ID NO: 11994 - protein, 335 aa, Homo Sapiens; identical to SEQ ID NO: 11993

SEQ ID NO: 11995 - protein, 335 aa, Homo Sapiens; identical to SEQ ID NO: 11993

SEQ ID NO: 11996 - protein, 362 aa, Homo Sapiens
MAGAGCTGTWSWLWGTATEAAPSCVGDMADTPRDAGLKQAPASRNEKAPVDFGYVGIDSILEQMRRKAMKQGFEFNIMVVGQSGLGKSTLINTLFKSKISRKSVQPTSEERIPKTIEIKSITHDIEEKGVRMKLTVIDTPGFGDHINNENCWQPIMKFINDQYEKYLQEEVNINRKKRIPDTRVHCCLYFIPATGHSLRPLDIEFMKRLSKVVNIVPVIAKADTLTLEERVHFKQRITADLLSNGIDVYPQKEFDEDSEDRLVNEKFREMIPFAVVGSDHEYQVNGKRILGRKTKWGTIEVENTTHCEFAYLRDLLIRTHMQNIKDITSSIHFEAYRVKRLNEGSSAMANGMEEKEPEAPEM

SEQ ID NO: 11997 - protein, 35 aa, Homo Sapiens
MEPPASKVPEVPTAPATDAAPKRVEIQMPKPAEAP

SEQ ID NO: 11998 - protein, 422 aa, Homo Sapiens
MEPPASKVPEVPTAPATDAAPKRVEIQMPKPAEAPTAPSPAQTLENSEPAPVSQLQSRLEPKPQPPVAEATPRSQEATEAAPSCVGDMADTPRDAGLKQAPASRNEKAPVDFGYVGIDSILEQMRRKAMKQGFEFNIMVVGQSGLGKSTLINTLFKSKISRKSVQPTSEERIPKTIEIKSITHDIEEKGVRMKLTVIDTPGFGDHINNENCWQPIMKFINDQYEKYLQEEVNINRKKRIPDTRVHCCLYFIPATGHSLRPLDIEFMKRLSKVVNIVPVIAKADTLTLEERVHFKQRITADLLSNGIDVYPQKEFDEDSEDRLVNEKFREMIPFAVVGSDHEYQVNGKRILGRKTKWGTIEVENTTHCEFAYLRDLLIRTHMQNIKDITSSIHFEAYRVKRLNEGSSAMANGMEEKEPEAPEM

SEQ ID NO: 11999 - protein, 422 aa, Homo Sapiens; identical to SEQ ID NO: 11998

SEQ ID NO: 12000 - protein, 422 aa, Homo Sapiens; identical to SEQ ID NO: 11998

SEQ ID NO: 12001 - protein, 422 aa, Homo Sapiens; identical to SEQ ID NO: 11998

SEQ ID NO: 12002 - protein, 568 aa, Homo Sapiens
MERDRISALKRSFEVEEVETPNSTPPRRVQTPLLRATVASSTQKFQDLGVKNSEPSARHVDSLSQRSPKASLRRVELSGPKAAEPVSRRTELSIDISSKQVENAGAIGPSRFGLKRAEVLGHKTPEPAPRRTEITIVKPQESAHRRMEPPASKVPEVPTAPATDAAPKRVEIQMPKPAEAPTAPSPAQTLENSEPAPVSQLQSRLEPKPQPPVAEATPRSQEATEAAPSCVGDMADTPRDAGLKQAPASRNEKAPVDFGYVGIDSILEQMRRKAMKQGFEFNIMVVGQSGLGKSTLINTLFKSKISRKSVQPTSEERIPKTIEIKSITHDIEEKGVRMKLTVIDTPGFGDHINNENCWQPIMKFINDQYEKYLQEEVNINRKKRIPDTRVHCCLYFIPATGHSLRPLDIEFMKRLSKVVNIVPVIAKADTLTLEERVHFKQRITADLLSNGIDVYPQKEFDEDSEDRLVNEKFREMIPFAVVGSDHEYQVNGKRILGRKTKWGTIEVENTTHCEFAYLRDLLIRTHMQNIKDITSSIHFEAYRVKRLNEGSSAMANGMEEKEPEAPEM

SEQ ID NO: 12003 - protein, 568 aa, Homo Sapiens; identical to SEQ ID NO: 12002

SEQ ID NO: 12004 - protein, 159 aa, Homo Sapiens
MGSFRTSKMPKPAEAPTAPSPAQTLENSEPAPVSQLQSRLEPKPQPPVAEATPRSQEATEAAPSCVGDMADTPRDAGLKQAPASRNEKAPVDFGYVGIDSILEQMRRKAMKQGFEFNIMVVGQSGLGKSTLINTLFKSKISRKSVQPTSEERIPKTIEI

SEQ ID NO: 12005 - protein, 474 aa, Homo Sapiens
MGSSFWEGLQVAVGLPQGCWPQGLDSGEPAEGGQLEAAPVCIVTRQSKETAGPTLGRGGWRQGSLRRGKGTSCRCRQLSPGHGPGRLTGCGECHRLPCRGLVSGFTGLRGQEEDDLAFCLATIGSDRQATEAAPSCVGDMADTPRDAGLKQAPASRNEKAPVDFGYVGIDSILEQMRRKAMKQGFEFNIMVVGQSGLGKSTLINTLFKSKISRKSVQPTSEERIPKTIEIKSITHDIEEKGVRMKLTVIDTPGFGDHINNENCWQPIMKFINDQYEKYLQEEVNINRKKRIPDTRVHCCLYFIPATGHSLRPLDIEFMKRLSKVVNIVPVIAKADTLTLEERVHFKQRITADLLSNGIDVYPQKEFDEDSEDRLVNEKFREMIPFAVVGSDHEYQVNGKRILGRKTKWGTIEVENTTHCEFAYLRDLLIRTHMQNIKDITSSIHFEAYRVKRLNEGSSAMANGMEEKEPEAPEM

SEQ ID NO: 12006 - protein, 23 aa, Homo Sapiens
MHLAAEHCVCDSPPSSWNHPPQV

SEQ ID NO: 12007 - protein, 125 aa, Homo Sapiens
MIICPTRPFTALKRSFEVEEVETPNSTPPRRVQTPLLRATVASSTQKFQDLGVKNSEPSARHVDSLSQRSPKASLRRVELSGPKAAEPVSRRTELSIDISSKQVENAGAIGPSRFGLKRAEVLGH

SEQ ID NO: 12008 - protein, 90 aa, Homo Sapiens
MKDFGSRQEFDSVENAGAIGPSRFGLKRAEVLGHKTPEPAPRRTEITIVKPQESAHRRMEPPASKPEVGAAHLRGAHPQDHRDQVHHARY

SEQ ID NO: 12009 - protein, 134 aa, Homo Sapiens
MKDFGSRQEFDSVENAGAIGPSRFGLKRAEVLGHKTPEPAPRRTEITIVKPQESAHRRMEPPASKVPEVPTAPATDAAPKRVEIQMPKPAEAPTAPSPAQTLENSEPAPVSQLQSRLEPKPQPPVAEATPRSQE

SEQ ID NO: 12010 - protein, 567 aa, Homo Sapiens
MKKSYSALKRSFEVEEVETPNSTPPRRVQTPLLRATVASSTQKFQDLGVKNSEPSARHVDSLSQRSPKASLRRVELSGPKAAEPVSRRTELSIDISSKQVENAGAIGPSRFGLKRAEVLGHKTPEPAPRRTEITIVKPQESAHRRMEPPASKVPEVPTAPATDAAPKRVEIQMPKPAEAPTAPSPAQTLENSEPAPVSQLQSRLEPKPQPPVAEATPRSQEATEAAPSCVGDMADTPRDAGLKQAPASRNEKAPVDFGYVGIDSILEQMRRKAMKQGFEFNIMVVGQSGLGKSTLINTLFKSKISRKSVQPTSEERIPKTIEIKSITHDIEEKGVRMKLTVIDTPGFGDHINNENCWQPIMKFINDQYEKYLQEEVNINRKKRIPDTRVHCCLYFIPATGHSLRPLDIEFMKRLSKVVNIVPVIAKADTLTLEERVHFKQRITADLLSNGIDVYPQKEFDEDSEDRLVNEKFREMIPFAVVGSDHEYQVNGKRILGRKTKWGTIEVENTTHCEFAYLRDLLIRTHMQNIKDITSSIHFEAYRVKRLNEGSSAMANGMEEKEPEAPEM

SEQ ID NO: 12011 - protein, 44 aa, Homo Sapiens
MKKSYSDLLLDPCISNLASLHCARFSGARHRRICSCLVIFDSAR

SEQ ID NO: 12012 - protein, 586 aa, Homo Sapiens
MKKSYSGGTRTSSGRLRRLGDSSGPALKRSFEVEEVETPNSTPPRRVQTPLLRATVASSTQKFQDLGVKNSEPSARHVDSLSQRSPKASLRRVELSGPKAAEPVSRRTELSIDISSKQVENAGAIGPSRFGLKRAEVLGHKTPEPAPRRTEITIVKPQESAHRRMEPPASKVPEVPTAPATDAAPKRVEIQMPKPAEAPTAPSPAQTLENSEPAPVSQLQSRLEPKPQPPVAEATPRSQEATEAAPSCVGDMADTPRDAGLKQAPASRNEKAPVDFGYVGIDSILEQMRRKAMKQGFEFNIMVVGQSGLGKSTLINTLFKSKISRKSVQPTSEERIPKTIEIKSITHDIEEKGVRMKLTVIDTPGFGDHINNENCWQPIMKFINDQYEKYLQEEVNINRKKRIPDTRVHCCLYFIPATGHSLRPLDIEFMKRLSKVVNIVPVIAKADTLTLEERVHFKQRITADLLSNGIDVYPQKEFDEDSEDRLVNEKFREMIPFAVVGSDHEYQVNGKRILGRKTKWGTIEVENTTHCEFAYLRDLLIRTHMQNIKDITSSIHFEAYRVKRLNEGSSAMANGMEEKEPEAPEM

SEQ ID NO: 12013 - protein, 151 aa, Homo Sapiens
MLWPEEEPWGGRCACVTEACPADAGPLTSRRGSLKRSFEVEEVETPNSTPPRRVQTPLLRATVASSTQKFQDLGVKNSEPSARHVDSLSQRSPKASLRRVELSGPKAAEPVSRRTELSIDISSKQVENAGAIGPSRFGLKRAEVLGHKTPE

SEQ ID NO: 12014 - protein, 189 aa, Homo Sapiens
MPKPAEAPTAPSPAQTLENSEPAPVSQLQSRLEPKPQPPVAEATPRSQEATEAAPSCVGDMADTPRDAGLKQAPASRNEKAPVDFGYVGIDSILEQMRRKAMKQGFEFNIMVVGESSPCMPLNQCRKPASAPRAAHKPLGLVFPSVKWGSNPDLKDGLPVTLRVHACAWEEPTASSGSSEGPVLHIQGP

SEQ ID NO: 12015 - protein, 579 aa, Homo Sapiens
MSDPAVNAQLDGIISDFEALKRSFEVEEVETPNSTPPRRVQTPLLRATVASSTQKFQDLGVKNSEPSARHVDSLSQRSPKASLRRVELSGPKAAEPVSRRTELSIDISSKQVENAGAIGPSRFGLKRAEVLGHKTPEPAPRRTEITIVKPQESAHRRMEPPASKVPEVPTAPATDAAPKRVEIQMPKPAEAPTAPSPAQTLENSEPAPVSQLQSRLEPKPQPPVAEATPRSQEATEAAPSCVGDMADTPRDAGLKQAPASRNEKAPVDFGYVGIDSILEQMRRKAMKQGFEFNIMVVGQSGLGKSTLINTLFKSKISRKSVQPTSEERIPKTIEIKSITHDIEEKGVRMKLTVIDTPGFGDHINNENCWQPIMKFINDQYEKYLQEEVNINRKKRIPDTRVHCCLYFIPATGHSLRPLDIEFMKRLSKVVNIVPVIAKADTLTLEERVHFKQRITADLLSNGIDVYPQKEFDEDSEDRLVNEKFREMIPFAVVGSDHEYQVNGKRILGRKTKWGTIEVENTTHCEFAYLRDLLIRTHMQNIKDITSSIHFEAYRVKRLNEGSSAMANGMEEKEPEAPEM

SEQ ID NO: 12016 - protein, 152 aa, Homo Sapiens
MTSMSAGTINTLKRSFEVEEVETPNSTPPRRVQTPLLRATVASSTQKFQDLGVKNSEPSARHVDSLSQRSPKASLRRVELSGPKAAEPVSRRTELSIDISSKQVENAGAIGPSRFGLKRAEVLGHKTPEPAPRRTEITIVKPQESAHRRMEP

SEQ ID NO: 12017 - protein, 105 aa, Homo Sapiens
MLSLGTKADTHDEILEGLNFNLTEIPEAQIHEGFQELLRTLNQPDSQLQLTTGNGLFLSEGLKLVDKFLEDVKKLYHSEAFTVNFGDTEEAKKQINDYVEKGTQG

SEQ ID NO: 12018 - protein, 22 aa, Homo Sapiens
MPSSVSWGILLLAGLCCLVPVS

SEQ ID NO: 12019 - protein, 92 aa, Homo Sapiens
MPSSVSWGILLLAGLCCLVPVSLAEDPQGDAAQKTDTSHHDQDHPTFNKITPNLAEFAFSLYRQLAHQSNSTNIFFSPVSIATAFAMLSLGT

SEQ ID NO: 12020 - protein, 117 aa, Homo Sapiens
MPSSVSWGILLLAGLCCLVPVSLAEDPQGDAAQKTDTSHHDQDHPTFNKITPNLAEFAFSLYRQLAHQSNSTNIFFSPVSIATAFAMLSLGTKADTHDEILEGLNFNLTEIPEAQIH

SEQ ID NO: 12021 - protein, 144 aa, Homo Sapiens
MPSSVSWGILLLAGLCCLVPVSLAEDPQGDAAQKTDTSHHDQDHPTFNKITPNLAEFAFSLYRQLAHQSNSTNIFFSPVSIATAFAMLSLGTKADTHDEILEGLNFNLTEIPEAQIHEGFQELLRTLNQPDSQLQLTTGNGLFL

SEQ ID NO: 12022 - protein, 156 aa, Homo Sapiens
MPSSVSWGILLLAGLCCLVPVSLAEDPQGDAAQKTDTSHHDQDHPTFNKITPNLAEFAFSLYRQLAHQSNSTNIFFSPVSIATAFAMLSLGTKADTHDEILEGLNFNLTEIPEAQIHEGFQELLRTLNQPDSQLQLTTGNGLFLSEGLKLVDKFLE

SEQ ID NO: 12023 - protein, 418 aa, Homo Sapiens
MPSSVSWGILLLAGLCCLVPVSLAEDPQGDAAQKTDTSHHDQDHPTFNKITPNLAEFAFSLYRQLAHQSNSTNIFFSPVSIATAFAMLSLGTKADTHDEILEGLNFNLTEIPEAQIHEGFQELLRTLNQPDSQLQLTTGNGLFLSEGLKLVDKFLEDVKKLYHSEAFTVNFGDTEEAKKQINDYVEKGTQGKIVDLVKELDRDTVFALVNYIFFKGKWERPFEVKDTEEEDFHVDQVTTVKVPMMKRLGMFNIQHCKKLSSWVLLMKYLGNATAIFFLPDEGKLQHLENELTHDIITKFLENEDRRSASLHLPKLSITGTYDLKSVLGQLGITKVFSNGADLSGVTEEAPLKLSKAVHKAVLTIDEKGTEAAGAMFLEAIPMSIPPEVKFNKPFVFLMIEQNTKSPLFMGKVVNPTQK

SEQ ID NO: 12024 - protein, 418 aa, Homo Sapiens; identical to SEQ ID NO: 12023

SEQ ID NO: 12025 - protein, 359 aa, Homo Sapiens
MPSSVSWGILLLAGLCCLVPVSLAEDPQGDAAQKTDTSHHDQDHPTFNKITPNLAEFAFSLYRQLAHQSNSTNIFFSPVSIATAFAMLSLGTKADTHDEILEGLNFNLTEIPEAQIHEGFQELLRTLNQPDSQLQLTTGNGLFLSEGLKLVDKFLEDVKKLYHSEAFTVNFGDTEEAKKQINDYVEKGTQGKIVDLVKELDRDTVFALVNYIFFKGKWERPFEVKDTEEEDFHVDQVTTVKVPMMKRLGMFNIQHCKKLSSWVLLMKYLGNATAIFFLPDEGKLQHLENELTHDIITKFLENEDRRSASLHLPKLSITGTYDLKSVLGQLGITKVFSNGADLSGVTEEAPLKLSKVRSP

SEQ ID NO: 12026 - protein, 418 aa, Homo Sapiens; identical to SEQ ID NO: 12023

SEQ ID NO: 12027 - protein, 418 aa, Homo Sapiens; identical to SEQ ID NO: 12023

SEQ ID NO: 12028 - protein, 418 aa, Homo Sapiens; identical to SEQ ID NO: 12023

SEQ ID NO: 12029 - protein, 418 aa, Homo Sapiens; identical to SEQ ID NO: 12023

SEQ ID NO: 12030 - protein, 418 aa, Homo Sapiens; identical to SEQ ID NO: 12023

SEQ ID NO: 12031 - protein, 418 aa, Homo Sapiens; identical to SEQ ID NO: 12023

SEQ ID NO: 12032 - protein, 306 aa, Homo Sapiens
MPSSVSWGILLLAGLCCLVPVSLAEDPQGDAAQKTDTSHHDQDHPTFNKITPNLAEFAFSLYRQLAHQSNSTNIFFSPVSIATAFAMLSLGTKADTHDEILEGLNFNLTEIPEAQIHEGFQELLRTLNQPDSQLQLTTGNGLFLSEGLKLVDKFLEDVKKLYHSEAFTVNFGDTEEAKKQINDYVEKGTQGKIVDLVKELDRDTVFALVNYIFFKGKWERPFEVKDTEEEDFHVDQVTTVKVPMMKRLGMFNIQHCKKLSSWVLLMKYLGNATAIFFLPDEGKLQHLENELTHDIITKFLENEDRR

SEQ ID NO: 12033 - protein, 418 aa, Homo Sapiens; identical to SEQ ID NO: 12023

SEQ ID NO: 12034 - protein, 444 aa, Homo Sapiens
MKVVPSLLLSVLLAQVWLVPGLAPSPQSPETPAPQNQTSRVVQAPKEEEEDEQEASEEKASEEEKAWLMASRQQLAKETSNFGFSLLRKISMRHDGNMVFSPFGMSLAMTGLMLGATGPTETQIKRGLHLQALKPTKPGLLPSLFKGLRETLSRNLELGLTQGSFAFIHKDFDVKETFFNLSKRYFDTECVPMNFRNASQAKRLMNHYINKETRGKIPKLFDEINPETKLILVDYILFKGKWLTPFDPVFTEVDTFHLDKYKTIKVPMMYGAGKFASTFDKNFRCHVLKLPYQGNATMLVVLMEKMGDHLALEDYLTTDLVETWLRNMKTRNMEVFFPKFKLDQKYEMHELLRQMGIRRIFSPFADLSELSATGRNLQVSRVLQRTVIEVDERGTEAVAGILSEITAYSMPPVIKVDRPFHFMIYEETSGMLLFLGRVVNPTLL

SEQ ID NO: 12035 - protein, 444 aa, Homo Sapiens; identical to SEQ ID NO: 12034

SEQ ID NO: 12036 - protein, 444 aa, Homo Sapiens; identical to SEQ ID NO: 12034

SEQ ID NO: 12037 - protein, 484 aa, Homo Sapiens
MSRSTQELLGYHCRLQDKLQEQEGSLAAEGRHSLASAADHMKVVPSLLLSVLLAQVWLVPGLAPSPQSPETPAPQNQTSRVVQAPKEEEEDEQEASEEKASEEEKAWLMASRQQLAKETSNFGFSLLRKISMRHDGNMVFSPFGMSLAMTGLMLGATGPTETQIKRGLHLQALKPTKPGLLPSLFKGLRETLSRNLELGLTQGSFAFIHKDFDVKETFFNLSKRYFDTECVPMNFRNASQAKRLMNHYINKETRGKIPKLFDEINPETKLILVDYILFKGKWLTPFDPVFTEVDTFHLDKYKTIKVPMMYGAGKFASTFDKNFRCHVLKLPYQGNATMLVVLMEKMGDHLALEDYLTTDLVETWLRNMKTRNMEVFFPKFKLDQKYEMHELLRQMGIRRIFSPFADLSELSATGRNLQVSRVLQRTVIEVDERGTEAVAGILSEITAYSMPPVIKVDRPFHFMIYEETSGMLLFLGRVVNPTLL

SEQ ID NO: 12038 - protein, 422 aa, Homo Sapiens
MGPAWLWLLGTGILASVHCQPLLAHGDKSLQGPQPPRHQLSEPAPAYHRITPTITNFALRLYKELAADAPGNIFFSPVSISTTLALLSLGAQANTSALILEGLGFNLTETPEADIHQGFRSLLHTLALPSPKLELKVGNSLFLDKRLKPRQHYLDSIKELYGAFAFSANFTDSVTTGRQINDYLRRQTYGQVVDCLPEFSQDTFMVLANYIFFKAKWKHPFSRYQTQKQESFFVDERTSLQVPMMHQKEMHRFLYDQDLACTVLQIEYRGNALALLVLPDPGKMKQVEAALQPQTLRKWGQLLLPSLLDLHLPRFSISGTYNLEDILPQIGLTNILNLEADFSGVTGQLNKTISKVSHKAMVDMSEKGTEAGAASGLLSQPPSLNTMSDPHAHFNRPFLLLLWEVTTQSLLFLGKVVNPVAG

SEQ ID NO: 12039 - protein, 414 aa, Homo Sapiens
MNPTLGLAIFLAVLLTVKGLLKPSFSPRNYKALSEVQGWKQRMAAKELARQNMDLGFKLLKKLAFYNPGRNIFLSPLSISTAFSMLCLGAQDSTLDEIKQGFNFRKMPEKDLHEGFHYIIHELTQKTQDLKLSIGNTLFIDQRLQPQRKFLEDAKNFYSAETILTNFQNLEMAQKQINDFISQKTHGKINNLIENIDPGTVMLLANYIFFRARWKHEFDPNVTKEEDFFLEKNSSVKVPMMFRSGIYQVGYDDKLSCTILEIPYQKNITAIFILPDEGKLKHLEKGLQVDTFSRWKTLLSRRVVDVSVPRLHMTGTFDLKKTLSYIGVSKIFEEHGDLTKIAPHRSLKVGEAVHKAELKMDERGTEGAAGTGAQTLPMETPLVVKIDKPYLLLIYSEKIPSVLFLGKIVNPIGK

SEQ ID NO: 12040 - protein, 414 aa, Homo Sapiens; identical to SEQ ID NO: 12039

SEQ ID NO: 12041 - protein, 423 aa, Homo Sapiens
MERMLPLLALGLLAAGFCPAVLCHPNSPLDEENLTQENQDRGTHVDLGLASANVDFAFSLYKQLVLKAPDKNVIFSPLSISTALAFLSLGAHNTTLTEILKGLKFNLTETSEAEIHQSFQHLLRTLNQSSDELQLSMGNAMFVKEQLSLLDRFTEDAKRLYGSEAFATDFQDSAAAKKLINDYVKNGTRGKITDLIKDLDSQTMMVLVNYIFFKAKWEMPFDPQDTHQSRFYLSKKKWVMVPMMSLHHLTIPYFRDEELSCTVVELKYTGNASALFILPDQDKMEEVEAMLLPETLKRWRDSLEFREIGELYLPKFSISRDYNLNDILLQLGIEEAFTSKADLSGITGARNLAVSQVVHKAVLDVFEEGTEASAATAVKITLLSALVETRTIVRFNRPFLMIIVPTDTQNIFFMSKVTNPKQA

SEQ ID NO: 12042 - protein, 423 aa, Homo Sapiens; identical to SEQ ID NO: 12041

SEQ ID NO: 12043 - protein, 423 aa, Homo Sapiens; identical to SEQ ID NO: 12041

SEQ ID NO: 12044 - protein, 305 aa, Homo Sapiens
MERMLPLLALGLLAAGFCPAVLCHPNSPLDEENLTQENQDRGTHVDLGLASANVDFAFSLYKQLVLKAPDKNVIFSPLSISTALAFLSLGAHNTTLTEILKGLKFNLTETSEAEIHQSFQHLLRTLNQSSDELQLSMGNAMFVKEQLSLLDRFTEDAKRLYGSEAFATDFQDSAAAKKLINDYVKNGTRGKITDLIKDLDSQTMMVLVNYIFFKAKWEMPFDPQDTHQSRFYLSKKKWVMVPMMSLHHLTIPYFRDEELSCTVVELKYTGNASALFILPDQDKMEEVEAMLLPETLKRWRDSLEF

SEQ ID NO: 12045 - protein, 216 aa, Homo Sapiens
MERMLPLLALGLLAAGFCPAVLCHPNSPLDEENLTQENQDRGTHVDLGLASANVDFAFSLYKQLVLKAPDKNVIFSPLSISTALAFLSLGAHNTTLTEILKGLKFNLTETSEAEIHQSFQHLLRTLNQSSDELQLSMGNAMFVKEQLSLLDRFTEDAKRLYGSEAFATDFQDSAAAKKLINDYVKNGTRGKITDLIKDLDSQTMMVLVNYIFFKER

SEQ ID NO: 12046 - protein, 205 aa, Homo Sapiens
MPFDPQDTHQSRFYLSKKKWVMVPMMSLHHLTIPYFRDEELSCTVVELKYTGNASALFILPDQDKMEEVEAMLLPETLKRWRDSLEFREIGELYLPKFSISRDYNLNDILLQLGIEEAFTSKADLSGITGARNLAVSQVVHKAVLDVFEEGTEASAATAVKITLLSALVETRTIVRFNRPFLMIIVPTDTQNIFFMSKVTNPKQA

SEQ ID NO: 12047 - protein, 46 aa, Homo Sapiens
  misc_feature (1)..(1): Xaa can be any naturally occurring amino acid
XTVVELKYTGNASALFILPDQDKMEEVEAMLLPETLKRWRDSLEFR

SEQ ID NO: 12048 - protein, 427 aa, Homo Sapiens
MHLIDYLLLLLVGLLALSHGQLHVEHDGESCSNSSHQQILETGEGSPSLKIAPANADFAFRFYYLIASETPGKNIFFSPLSISAAYAMLSLGACSHSRSQILEGLGFNLTELSESDVHRGFQHLLHTLNLPGHGLETRVGSALFLSHNLKFLAKFLNDTMAVYEAKLFHTNFYDTVGTIQLINDHVKKETRGKIVDLVSELKKDVLMVLVNYIYFKALWEKPFISSRTTPKDFYVDENTTVRVPMMLQDQEHHWYLHDRYLPCSVLRMDYKGDATVFFILPNQGKMREIEEVLTPEMLMRWNNLLRKRNFYKKLELHLPKFSISGSYVLDQILPRLGFTDLFSKWADLSGITKQQKLEASKSFHKATLDVDEAGTEAAAATSFAIKFFSAQTNRHILRFNRPFLVVIFSTSTQSVLFLGKVVDPTKP

SEQ ID NO: 12049 - protein, 427 aa, Homo Sapiens; identical to SEQ ID NO: 12048

SEQ ID NO: 12050 - protein, 427 aa, Homo Sapiens; identical to SEQ ID NO: 12048

SEQ ID NO: 12051 - protein, 24 aa, Homo Sapiens
MQLFLLLCLVLLSPQGASLHRHHP

SEQ ID NO: 12052 - protein, 86 aa, Homo Sapiens
MQLFLLLCLVLLSPQGASLHRHHPREMKKRVEDLHVGATVAPSSRRDFTFDLYRALASAAPSQSIFFSPVSISMSLAMLSLGAGSS

SEQ ID NO: 12053 - protein, 90 aa, Homo Sapiens
MQLFLLLCLVLLSPQGASLHRHHPREMKKRVEDLHVGATVAPSSRRDFTFDLYRALASAAPSQSIFFSPVSISMSLAMLSLGAGSSTKMQ

SEQ ID NO: 12054 - protein, 144 aa, Homo Sapiens
MQLFLLLCLVLLSPQGASLHRHHPREMKKRVEDLHVGATVAPSSRRDFTFDLYRALASAAPSQSIFFSPVSISMSLAMLSLGAGSSTKMQILEGLGLNLQKSSEKELHRGFQQLLQELNQPRDGFQLSLGNALFTDLVVDLQDT

SEQ ID NO: 12055 - protein, 157 aa, Homo Sapiens
MQLFLLLCLVLLSPQGASLHRHHPREMKKRVEDLHVGATVAPSSRRDFTFDLYRALASAAPSQSIFFSPVSISMSLAMLSLGAGSSTKMQILEGLGLNLQKSSEKELHRGFQQLLQELNQPRDGFQLSLGNALFTDLVVDLQDTFVSAMKTLYLADT

SEQ ID NO: 12056 - protein, 172 aa, Homo Sapiens
MQLFLLLCLVLLSPQGASLHRHHPREMKKRVEDLHVGATVAPSSRRDFTFDLYRALASAAPSQSIFFSPVSISMSLAMLSLGAGSSTKMQILEGLGLNLQKSSEKELHRGFQQLLQELNQPRDGFQLSLGNALFTDLVVDLQDTFVSAMKTLYLADTFPTNFRDSAGAMKQI

SEQ ID NO: 12057 - protein, 231 aa, Homo Sapiens
MQLFLLLCLVLLSPQGASLHRHHPREMKKRVEDLHVGATVAPSSRRDFTFDLYRALASAAPSQSIFFSPVSISMSLAMLSLGAGSSTKMQILEGLGLNLQKSSEKELHRGFQQLLQELNQPRDGFQLSLGNALFTDLVVDLQDTFVSAMKTLYLADTFPTNFRDSAGAMKQINDYVAKQTKGKIVDLLKNLDSNAVVIMVNYIFFKAKWETSFNHKGTQEQDFYVTSETVV

SEQ ID NO: 12058 - protein, 406 aa, Homo Sapiens
MQLFLLLCLVLLSPQGASLHRHHPREMKKRVEDLHVGATVAPSSRRDFTFDLYRALASAAPSQSIFFSPVSISMSLAMLSLGAGSSTKMQILEGLGLNLQKSSEKELHRGFQQLLQELNQPRDGFQLSLGNALFTDLVVDLQDTFVSAMKTLYLADTFPTNFRDSAGAMKQINDYVAKQTKGKIVDLLKNLDSNAVVIMVNYIFFKAKWETSFNHKGTQEQDFYVTSETVVRVPMMSREDQYHYLLDRNLSCRVVGVPYQGNATALFILPSEGKMQQVENGLSEKTLRKWLKMFKKRQLELYLPKFSIEGSYQLEKVLPSLGISNVFTSHADLSGISNHSNIQVSEMVHKAVVEVDESGTRAAAATGTIFTFRSARLNSQRLVFNRPFLMFIVDNNILFLGKVNRP

SEQ ID NO: 12059 - protein, 406 aa, Homo Sapiens; identical to SEQ ID NO: 12058

SEQ ID NO: 12060 - protein, 406 aa, Homo Sapiens; identical to SEQ ID NO: 12058

SEQ ID NO: 12061 - protein, 406 aa, Homo Sapiens; identical to SEQ ID NO: 12058

SEQ ID NO: 12062 - protein, 301 aa, Homo Sapiens
MQLFLLLCLVLLSPQGASLHRHHPREMKKRVEDLHVGATVAPSSRRDFTFDLYRALASAAPSQSIFFSPVSISMSLAMLSLGAGSSTKMQILEGLGLNLQKSSEKELHRGFQQLLQELNQPRDGFQLSLGNALFTDLVVDLQDTFVSAMKTLYLADTFPTNFRDSAGAMKQINDYVAKQTKGKIVDLLKNLDSNAVVIMVNYIFFKAKWETSFNHKGTQEQDFYVTSETVVRVPMMSREDQYHYLLDRNLSCRVVGVPYQGNATALFILPSEGKMQQVENGLSEKTLRKWLKMFKKRYFQT

SEQ ID NO: 12063 - protein, 136 aa, Homo Sapiens
MPLLLYTCLLWLPTSGLWTVQAMDPNAAYVNMSNHHRGLASANVDFAFSLYKHLVALSPKKNIFISPVSISMALAMLSLGTCGHTRAQLLQGLGFNLTERSETEIHQGFQHLHQLFAKSDTSLEMTMGNALFLDGS

SEQ ID NO: 12064 - protein, 278 aa, Homo Sapiens
MPLLLYTCLLWLPTSGLWTVQAMDPNAAYVNMSNHHRGLASANVDFAFSLYKHLVALSPKKNIFISPVSISMALAMLSLGTCGHTRAQLLQGLGFNLTERSETEIHQGFQHLHQLFAKSDTSLEMTMGNALFLDGSLELLESFSADIKHYYESEVLAMNFQDWATASRQINSYVKNKTQGKIVDLFSGLDSPAILVLVNYIFFKGIPTHPHLKAHPLWPGITAAKIQGTLLGKVFDSVKHIHIWESPSSPQSCWAHGHSPLTWQAPGRRTSMWTRQLW

SEQ ID NO: 12065 - protein, 405 aa, Homo Sapiens
MPLLLYTCLLWLPTSGLWTVQAMDPNAAYVNMSNHHRGLASANVDFAFSLYKHLVALSPKKNIFISPVSISMALAMLSLGTCGHTRAQLLQGLGFNLTERSETEIHQGFQHLHQLFAKSDTSLEMTMGNALFLDGSLELLESFSADIKHYYESEVLAMNFQDWATASRQINSYVKNKTQGKIVDLFSGLDSPAILVLVNYIFFKGTWTQPFDLASTREENFYVDETTVVKVPMMLQSSTISYLHDSELPCQLVQMNYVGNGTVFFILPDKGKMNTVIAALSRDTINRWSAGLTSSQVDLYIPKVTISGVYDLGDVLEEMGIADLFTNQANFSRITQDAQLKSSKVVHKAVLQLNEEGVDTAGSTGVTLNLTSKPIILRFNQPFIIMIFDHFTWSSLFLARVMNPV

SEQ ID NO: 12066 - protein, 415 aa, Homo Sapiens
MSPFLYLVLLVLGLHATIHCASPEGKVTACHSSQPNATLYKMSSINADFAFNLYRRFTVETPDKNIFFSPVSISAALVMLSFGACCSTQTEIVETLGFNLTDTPMVEIQHGFQHLICSLNFPKKELELQIGNALFIGKHLKPLAKFLNDVKTLYETEVFSTDFSNISAAKQEINSHVEMQTKGKVVGLIQDLKPNTIMVLVNYIHFKAQWANPFDPSKTEDSSSFLIDKTTTVQVPMMHQMEQYYHLVDMELNCTVLQMDYSKNALALFVLPKEGQMESVEAAMSSKTLKKWNRLLQKGWVDLFVPKFSISATYDLGATLLKMGIQHAYSENADFSGLTEDNGLKLSNAAHKAVLHIGEKGTEAAAVPEVELSDQPENTFLHPIIQIDRSFMLLILERSTRSILFLGKVVNPTEA

SEQ ID NO: 12067 - protein, 415 aa, Homo Sapiens; identical to SEQ ID NO: 12066

SEQ ID NO: 12068 - protein, 417 aa, Homo Sapiens
MASYLYGVLFAVGLCAPIYCVSPANAPSAYPRPSSTKSTPASQVYSLNTDFAFRLYRRLVLETPSQNIFFSPVSVSTSLAMLSLGAHSVTKTQILQGLGFNLTHTPESAIHQGFQHLVHSLTVPSKDLTLKMGSALFVKKELQLQANFLGNVKRLYEAEVFSTDFSNPSIAQARINSHVKKKTQGKVVDIIQGLDLLTAMVLVNHIFFKAKWEKPFHPEYTRKNFPFLVGEQVTVHVPMMHQKEQFAFGVDTELNCFVLQMDYKGDAVAFFVLPSKGKMRQLEQALSARTLRKWSHSLQKRWIEVFIPRFSISASYNLETILPKMGIQNVFDKNADFSGIAKRDSLQVSKATHKAVLDVSEEGTEATAATTTKFIVRSKDGPSYFTVSFNRTFLMMITNKATDGILFLGKVENPTKS

SEQ ID NO: 12069 - protein, 286 aa, Homo Sapiens
MGSALFVKKELQLQANFLGNVKRLYEAEVFSTDFSNPSIAQARINSHVKKKTQGKVVDIIQGLDLLTAMVLVNHIFFKAKWEKPFHPEYTRKNFPFLVGEQVTVHVPMMHQKEQFAFGVDTELNCFVLQMDYKGDAVAFFVLPSKGKMRQLEQALSARTLRKWSHSLQKRWIEVFIPRFSISASYNLETILPKMGIQNVFDKNADFSGIAKRDSLQVSKATHKAVLDVSEEGTEATAATTTKFIVRSKDGPSYFTVSFNRTFLMMITNKATDGILFLGKVENPTKS

SEQ ID NO: 12070 - protein, 337 aa, Homo Sapiens
MLSLGAHSVTKTQILQGLGFNLTHTPESAIHQGFQHLVHSLTVPSKDLTLKMGSALFVKKELQLQANFLGNVKRLYEAEVFSTDFSNPSIAQARINSHVKKKTQGKVVDIIQGLDLLTAMVLVNHIFFKAKWEKPFHPEYTRKNFPFLVGEQVTVHVPMMHQKEQFAFGVDTELNCFVLQMDYKGDAVAFFVLPSKGKMRQLEQALSARTLRKWSHSLQKRWIEVFIPRFSISASYNLETILPKMGIQNVFDKNADFSGIAKRDSLQVSKATHKAVLDVSEEGTEATAATTTKFIVRSKDGPSYFTVSFNRTFLMMITNKATDGILFLGKVENPTKS

SEQ ID NO: 12071 - protein, 335 aa, Homo Sapiens
MQGQGRRRGTCKDIFCSKMASYLYGVLFAVGLCAPIYCVSPANAPSAYPRPSSTKSTPASQVYSLNTDFAFRLYRRLVLETPSQNIFFSPARINSHVKKKTQGKVVDIIQGLDLLTAMVLVNHIFFKAKWEKPFHPEYTRKNFPFLVGEQVTVHVPMMHQKEQFAFGVDTELNCFVLQMDYKGDAVAFFVLPSKGKMRQLEQALSARTLRKWSHSLQKRWIEVFIPRFSISASYNLETILPKMGIQNVFDKNADFSGIAKRDSLQVSKATHKAVLDVSEEGTEATAATTTKFIVRSKDGPSYFTVSFNRTFLMMITNKATDGILFLGKVENPTKS

SEQ ID NO: 12072 - protein, 435 aa, Homo Sapiens
MQGQGRRRGTCKDIFCSKMASYLYGVLFAVGLCAPIYCVSPANAPSAYPRPSSTKSTPASQVYSLNTDFAFRLYRRLVLETPSQNIFFSPVSVSTSLAMLSLGAHSVTKTQILQGLGFNLTHTPESAIHQGFQHLVHSLTVPSKDLTLKMGSALFVKKELQLQANFLGNVKRLYEAEVFSTDFSNPSIAQARINSHVKKKTQGKVVDIIQGLDLLTAMVLVNHIFFKAKWEKPFHPEYTRKNFPFLVGEQVTVHVPMMHQKEQFAFGVDTELNCFVLQMDYKGDAVAFFVLPSKGKMRQLEQALSARTLRKWSHSLQKRWIEVFIPRFSISASYNLETILPKMGIQNVFDKNADFSGIAKRDSLQVSKATHKAVLDVSEEGTEATAATTTKFIVRSKDGPSYFTVSFNRTFLMMITNKATDGILFLGKVENPTKS

SEQ ID NO: 12073 - protein, 201 aa, Homo Sapiens
MRSAGGRGEIKVRRELQPSKQVSGLTNHARTGQEKRNLQRHILFQNGILPLWSTLCCWPLCSNLLCVPGQCPQCIPPPFLHKEHPCLTGVFPQHRLCLPPIPQAGFGDPESEHLLLPCECLHFPGHALPWGPLSHQDPDSPGPGLQPHTHTRVCHPPGLPAPGSLTDCSQQRPDLEDGKCPLRQEGAAAAGKFLGQCQEAV

SEQ ID NO: 12074 - protein, 334 aa, Homo Sapiens
MRSAGGRGEIKVRRELQPSKQVSGLTNHARTGQEKRNLQRLVLETPSQNIFFSPVSVSTSLAMLSLGAHSVTKTQILQGLGFNLTHTPESAIHQGFQHLVHSLTVPSKDLTLKMGSALFVKKELQLQANFLGNVKRLYEAEVFSTDFSNPSIAQARINSHVKKKTQGKVVDIIQGLDLLTAMVLVNHIFFKAKWEKPFHPEYTRKNFPFLVGEQVTVHVPMMHQKEQFAFGVDTELNCFVLQMDYKGDAVAFFVLPSKGKMRQLEQALSARTLRKWSHSLQKRWIEVFIPRFSISASYNLETILPKMGIQNVFDKNADFSGIAKRDSLQVSKVS

SEQ ID NO: 12075 - protein, 113 aa, Homo Sapiens
MEDLCVANTLFALNLFKHLAKASPTQNLFLSPWSISSTMAMVYMGSRGSTEDQMAKVLQFNEVGANAVTPMTPENFTSCGFMQQIQKGSYPDAILQAQAADKIHSSFRSLSSA

SEQ ID NO: 12076 - protein, 132 aa, Homo Sapiens
MEDLCVANTLFALNLFKHLAKASPTQNLFLSPWSISSTMAMVYMGSRGSTEDQMAKVLQFNEVGANAVTPMTPENFTSCGFMQQIQKGSYPDAILQAQAADKIHSSFRSLSSAINASTGNYLLESVNKLFGE

SEQ ID NO: 12077 - protein, 161 aa, Homo Sapiens
MEDLCVANTLFALNLFKHLAKASPTQNLFLSPWSISSTMAMVYMGSRGSTEDQMAKVLQFNEVGANAVTPMTPENFTSCGFMQQIQKGSYPDAILQAQAADKIHSSFRSLSSAINASTGNYLLESVNKLFGEKSASFREEYIRLCQKYYSSEPQAVDFLEC

SEQ ID NO: 12078 - protein, 415 aa, Homo Sapiens
MEDLCVANTLFALNLFKHLAKASPTQNLFLSPWSISSTMAMVYMGSRGSTEDQMAKVLQFNEVGANAVTPMTPENFTSCGFMQQIQKGSYPDAILQAQAADKIHSSFRSLSSAINASTGNYLLESVNKLFGEKSASFREEYIRLCQKYYSSEPQAVDFLECAEEARKKINSWVKTQTKGKIPNLLPEGSVDGDTRMVLVNAVYFKGKWKTPFEKKLNGLYPFRVNSAQRTPVQMMYLREKLNIGYIEDLKAQILELPYAGDVSMFLLLPDEIADVSTGLELLESEITYDKLNKWTSKDKMAEDEVEVYIPQFKLEEHYELRSILRSMGMEDAFNKGRANFSGMSERNDLFLSEVFHQAMVDVNEEGTEAAAGTGGVMTGRTGHGGPQFVADHPFLFLIMHKITNCILFFGRFSSP

SEQ ID NO: 12079 - protein, 415 aa, Homo Sapiens; identical to SEQ ID NO: 12078

SEQ ID NO: 12080 - protein, 259 aa, Homo Sapiens
MYSNVIGTVTSGKRKVYLLSLLLIGFWDCVTCHGSPVDICTAKPRDIPMNPMCIYRSPEKKATEDEGSEQKIPEATNRRVWELSKANSRFATTFYQHLADSKNDNDNIFLSPLSISTAFAMTKLGACNDTLQQLMEVFKFDTISEKTSDQIHFFFAKLNCRLYRKANKSSKLVSANRLFGDKSLTFNDLYVSDAFHKAFLEVNEEGSEAAASTAVVIAGRSLNPNRVTFKANRPFLVFIREVPLNTIIFMGRVANPCVK

SEQ ID NO: 12081 - protein, 464 aa, Homo Sapiens
MYSNVIGTVTSGKRKVYLLSLLLIGFWDCVTCHGSPVDICTAKPRDIPMNPMCIYRSPEKKATEDEGSEQKIPEATNRRVWELSKANSRFATTFYQHLADSKNDNDNIFLSPLSISTAFAMTKLGACNDTLQQLMEVFKFDTISEKTSDQIHFFFAKLNCRLYRKANKSSKLVSANRLFGDKSLTFNETYQDISELVYGAKLQPLDFKENAEQSRAAINKWVSNKTEGRITDVIPSEAINELTVLVLVNTIYFKGLWKSKFSPENTRKELFYKADGESCSASMMYQEGKFRYRRVAEGTQVLELPFKGDDITMVLILPKPEKSLAKVEKELTPEVLQEWLDELEEMMLVVHMPRFRIEDGFSLKEQLQDMGLVDLFSPEKSKLPGIVAEGRDDLYVSDAFHKAFLEVNEEGSEAAASTAVVIAGRSLNPNRVTFKANRPFLVFIREVPLNTIIFMGRVANPCVK

SEQ ID NO: 12082 - protein, 499 aa, Homo Sapiens
MKHSLNALLIFLIITSAWGGSKGPLDQLEKGGETAQSADPQWEQLNNKNLSMPLLPADFHKENTVTNDWIPEGEEDDDYLDLEKIFSEDDDYIDIVDSLSVSPTDSDVSAGNILQLFHGKSRIQRLNILNAKFAFNLYRVLKDQVNTFDNIFIAPVGISTAMGMISLGLKGETHEQVHSILHFKDFVNASSKYEITTIHNLFRKLTHRLFRRNFGYTLRSVNDLYIQKQFPILLDFKTKVREYYFAEAQIADFSDPAFISKTNNHIMKLTKGLIKDALENIDPATQMMILNCIYFKGSWVNKFPVEMTHNHNFRLNEREVVKVSMMQTKGNFLAANDQELDCDILQLEYVGGISMLIVVPHKMSGMKTLEAQLTPRVVERWQKSMTNRTREVLLPKFKLEKNYNLVESLKLMGIRMLFDKNGNMAGISDQRIAIDLFKHQGTITVNEEGTQATTVTTVGFMPLSTQVRFTVDRPFLFLIYEHRTSCLLFMGRVANPSRS

SEQ ID NO: 12083 - protein, 499 aa, Homo Sapiens; identical to SEQ ID NO: 12082

SEQ ID NO: 12084 - protein, 402 aa, Homo Sapiens [sequence omitted]

SEQ ID NO: 12085 - protein, 42 aa, Homo Sapiens
MNWHLPLFLLASVTLPSICSHFNPLSLEELGSNTGIQVFNQI

SEQ ID NO: 12086 - protein, 87 aa, Homo Sapiens
MNWHLPLFLLASVTLPSICSHFNPLSLEELGSNTGIQVFNQIVKSRPHDNIVISPHGIASVLGMLQLGADGRTKKQLAMVMRYGVNG

SEQ ID NO: 12087 - protein, 398 aa, Homo Sapiens
MNWHLPLFLLASVTLPSICSHFNPLSLEELGSNTGIQVFNQIVKSRPHDNIVISPHGIASVLGMLQLGADGRTKKQLAMVMRYGVNGVGKILKKINKAIVSKKNKDIVTVANAVFVKNASEIEVPFVTRNKDVFQCEVRNVNFEDPASACDSINAWVKNETRDMIDNLLSPDLIDGVLTRLVLVNAVYFKGLWKSRFQPENTKKRTFVAADGKSYQVPMLAQLSVFRCGSTSAPNDLWYNFIELPYHGESISMLIALPTESSTPLSAIIPHISTKTIDSWMSIMVPKRVQVILPKFTAVAQTDLKEPLKVLGITDMFDSSKANFAKITTGSENLHVSHILQKAKIEVSEDGTKASAATTAILIARSSPPWFIVDRPFLFFIRHNPTGAVLFMGQINKP

SEQ ID NO: 12088 - protein, 397 aa, Homo Sapiens
MNWHLPLFLLASVTLPSICSHFNPLSLEELGSNTGIQVFNQIVKSRPHDNIVISPHGIASVLGMLQLGADGRTKKQLAMVMRYGVNGVGKILKKINKAIVSKKNKDIVTVANAVFVKNASEIEVPFVTRNKDVFQCEVRNVNFEDPASACDSINAWVKNETRDMIDNLLSPDLIDGVLTRLVLVNAVYFKGLWKSRFQPENTKKRTFVAADGKSYQVPMLAQLSVFRCGSTSAPNDLWYNFIELPYHGESISMLIALPTESSTPLSAIIPHISTKTIDSWMSIMVPKRVQVILPKFTAVAQTDLKEPLKVLGITDMFDSSKANFAKITRSENLHVSHILQKAKIEVSEDGTKASAATTAILIARSSPPWFIVDRPFLFFIRHNPTGAVLFMGQINKP

SEQ ID NO: 12089 - protein, 397 aa, Homo Sapiens; identical to SEQ ID NO: 12088

SEQ ID NO: 12090 - protein, 276 aa, Homo Sapiens
MNWHLPLFLLASVTLPSICSHFNPLSLEELGSNTGIQVFNQIVKSRPHDNIVISPHGIASVLGMLQLGADGRTKKQLAMVMRYGVNGVGKILKKINKAIVSKKNKDIVTVANAVFVKNASEIEVPFVTRNKDVFQCEVRNVNFEDPASACDSINAWVKNETRDMIDNLLSPDLIDGVLTRLVLVNAVYFKGLWKSRFQPENTKKRTFVAADGKSYQVPMLAQLSVFRCGSTSAPNDLWYNFIELPYHGESISMLIALPTESSTPLSAIIPHISTKT

SEQ ID NO: 12091 - protein, 409 aa, Homo Sapiens
MSDCRSSLVEGTMNWHLPLFLLASVTLPSICSHFNPLSLEELGSNTGIQVFNQIVKSRPHDNIVISPHGIASVLGMLQLGADGRTKKQLAMVMRYGVNGVGKILKKINKAIVSKKNKDIVTVANAVFVKNASEIEVPFVTRNKDVFQCEVRNVNFEDPASACDSINAWVKNETRDMIDNLLSPDLIDGVLTRLVLVNAVYFKGLWKSRFQPENTKKRTFVAADGKSYQVPMLAQLSVFRCGSTSAPNDLWYNFIELPYHGESISMLIALPTESSTPLSAIIPHISTKTIDSWMSIMVPKRVQVILPKFTAVAQTDLKEPLKVLGITDMFDSSKANFAKITRSENLHVSHILQKAKIEVSEDGTKASAATTAILIARSSPPWFIVDRPFLFFIRHNPTGAVLFMGQINKP

SEQ ID NO: 12092 - protein, 48 aa, Homo Sapiens
MPPFLITLFLFHSCCLRANGHLREGMTLLKTEFALHLYQSVAACRNET

SEQ ID NO: 12093 - protein, 404 aa, Homo Sapiens
MPPFLITLFLFHSCCLRANGHLREGMTLLKTEFALHLYQSVAACRNETNFVISPAGVSLPLEILQFGAEGSTGQQLADALGYTVHDKRVKDFLHAVYATLPTSSQGTEMELACSLFVQVGTPLSPCFVEHVSWWANSSLEPADLSEPNSTAIQTSEGASRETAGGGPSEGPGGWPWEQVSAAFAQLVLVSTMSFQGTWRKRFSSTDTQILPFTCAYGLVLQVPMMHQTTEVNYGQFQDTAGHQVGVLELPYLGSAVSLFLVLPRDKDTPLSHIEPHLTASTIHLWTTSLRRARMDVFLPRFRIQNQFNLKSILNSWGVTDLFDPLKANLKGISGQDGFYVSEAIHKAKIEVLEEGTKASGATALLLLKRSRIPIFKADRPFIYFLREPNTGFVFSIGRVSNPLD

SEQ ID NO: 12094 - protein, 424 aa, Homo Sapiens
MPPFLITLFLFHSCCLRANGHLREGMTLLKTEFALHLYQSVAACRNETNFVISPAGVSLPLEILQFGAEGSTGQQLADALGYTVHDKRVKDFLHAVYATLPTSSQGTEMELACSLFVQVGTPLSPCFVEHVSWWANSSLEPADLSEPNSTAIQTSEGASRETAGGGPSEGPGGWPWEQVSAAFAQLVLVSTMSFQGTWRKRFSSTDTQILPFTCAYGLVLQVPMMHQTTEVNYGQFQDTAGHQVGVLELPYLGSAVSLFLVLPRDKDTPLSHIEPHLTASTIHLWTTSLRRARMDVFLPRFRIQNQFNLKSILNSWGVTDLFDPLKANLKGISGQDGFYVSEAIHKAKIEVLEEGTKASGATALLLLKRSRIPIFKADRPFIYFLREPNTGITVFFDRIQIIYQCLSSNKGSFVHYPLKNKHSF

SEQ ID NO: 12095 - protein, 404 aa, Homo Sapiens; identical to SEQ ID NO: 12093

SEQ ID NO: 12096 - protein, 91 aa, Homo Sapiens
MKGKLARSTKEIPDEISILLLGVAHFKGQWVTKFDSRKTSLEDFYLDEERTVRVPMMSDPKAVLRYGLDSDLSCKIAQLPLTGSMSIIFFL

SEQ ID NO: 12097 - protein, 99 aa, Homo Sapiens
MKGKLARSTKEIPDEISILLLGVAHFKGQWVTKFDSRKTSLEDFYLDEERTVRVPMMSDPKAVLRYGLDSDLSCKIAQLPLTGSMSIIFFLPLKVTQNL

SEQ ID NO: 12098 - protein, 128 aa, Homo Sapiens
MQALVLLLCIGALLGHSSCQNPASPPEEEEDPFFKVPVNKLAAAVSNFGYDLYRVRSSTSPTTNVLLSPLSVATALSALSLGAEQRTESIIHRALYYDLISSPDIHGTYKELLDTVTAPQKNLKSASR

SEQ ID NO: 12099 - protein, 87 aa, Homo Sapiens
MQALVLLLCIGALLGHSSCQNPASPPEEGSPDPDSTGALVEEEDPFFKVPVNKLAAAVSNFGYDLYRVRSSTSPTTNVLLSPLSVAT

SEQ ID NO: 12100 - protein, 111 aa, Homo Sapiens
MQALVLLLCIGALLGHSSCQNPASPPEEGSPDPDSTGALVEEEDPFFKVPVNKLAAAVSNFGYDLYRVRSSTSPTTNVLLSPLSVATALSALSLGAEQRTESIIHRALYYD

SEQ ID NO: 12101 - protein, 132 aa, Homo Sapiens
MQALVLLLCIGALLGHSSCQNPASPPEEGSPDPDSTGALVEEEDPFFKVPVNKLAAAVSNFGYDLYRVRSSTSPTTNVLLSPLSVATALSALSLGAEQRTESIIHRALYYDLISSPDIHGTYKELLDTVTAP

SEQ ID NO: 12102 - protein, 418 aa, Homo Sapiens
MQALVLLLCIGALLGHSSCQNPASPPEEGSPDPDSTGALVEEEDPFFKVPVNKLAAAVSNFGYDLYRVRSSTSPTTNVLLSPLSVATALSALSLGAEQRTESIIHRALYYDLISSPDIHGTYKELLDTVTAPQKNLKSASRIVFEKKLRIKSSFVAPLEKSYGTRPRVLTGNPRLDLQEINNWVQAQMKGKLARSTKEIPDEISILLLGVAHFKGQWVTKFDSRKTSLEDFYLDEERTVRVPMMSDPKAVLRYGLDSDLSCKIAQLPLTGSMSIIFFLPLKVTQNLTLIEESLTSEFIHDIDRELKTVQAVLTVPKLKLSYEGEVTKSLQEMKLQSLFDSPDFSKITGKPIKLTQVEHRAGFEWNEDGAGTTPSPGLQPAHLTFPLDYHLNQPFIFVLRDTDTGALLFIGKILDPRGP

SEQ ID NO: 12103 - protein, 114 aa, Homo Sapiens
MQALVLLLCIGALLGHSSCQNPASPPEEGSPDPDSTGALVEEEDPFFKVPVNKLAAAVSNFGYDLYRVRSSTSPTTNVLLSPLSVATALSALSLGLMPLTYFRKISKDENSLAT

SEQ ID NO: 12104 - protein, 138 aa, Homo Sapiens
MRSAFSFSVWRTSRWVTKFDSRKTSLEDFYLDEERTVRVPMMSDPKAVLRYGLDSDLSCKIAQLPLTGSMSIIFFLPLKVTQNLTLIEESLTSEFIHDIDRELKTVQAVLTVPKLKLSYEGEVTKSLQEMKLQSLFDS

SEQ ID NO: 12105 - protein, 491 aa, Homo Sapiens
MALLWGLLVLSWSCLQGPCSVFSPVSAMEPLGRQLTSGPNQEQVSPLTLLKLGNQEPGGQTALKSPPGVCSRDPTPEQTHRLARAMMAFTADLFSLVAQTSTCPNLILSPLSVALALSHLALGAQNHTLQRLQQVLHAGSGPCLPHLLSRLCQDLGPGAFRLAARMYLQKGFPIKEDFLEQSEQLFGAKPVSLTGKQEDDLANINQWVKEATEGKIQEFLSGLPEDTVLLLLNAIHFQGFWRNKFDPSLTQRDSFHLDEQFTVPVEMMQARTYPLRWFLLEQPEIQVAHFPFKNNMSFVVLVPTHFEWNVSQVLANLSWDTLHPPLVWERPTKVRLPKLYLKHQMDLVATLSQLGLQELFQAPDLRGISEQSLVVSGVQHQSTLELSEVGVEAAAATSIAMSRMSLSSFSVNRPFLFFIFEDTTGLPLFVGSVRNPNPSAPRELKEQQDSPGNKDFLQSLKGFPRGDKLFGPDLKLVPPMEEDYPQFGSPK

SEQ ID NO: 12106 - protein, 491 aa, Homo Sapiens; identical to SEQ ID NO: 12105

SEQ ID NO: 12107 - protein, 255 aa, Homo Sapiens
MALLWGLLVLSWSCLQGPCSVFSPVSAMEPLGRQLTSGPNQEQVSPLTLLKLGNQEPGGQTALKSPPGVCSRDPTPEQTHRLARAMMAFTADLFSLVAQTSTCPNLILSPLSVALALSHLALGAQNHTLQRLQQVLHAGSGPCLPHLLSRLCQDLGPGAFRLAARMYLQKGFPIKEDFLEQSEQLFGAKPVSLTGKQEDDLANINQWVKEATEGKIQEFLSGLPEDTVLLLLNAIHFQGFWRNKFDPSLTQRDSF

SEQ ID NO: 12108 - protein, 264 aa, Homo Sapiens
MALLWGLLVLSWSCLQGPCSVFSPVSAMEPLGRQLTSGPNQEQVSPLTLLKLGNQEPGGQTALKSPPGVCSRDPTPEQTHRLARAMMAFTADLFSLVAQTSTCPNLILSPLSVALALSHLALGFWRNKFDPSLTQRDSFHLDEQFTVPVEMMQARTYPLRWFLLEQPEIQVAHFPFKNNMSFVVLVPTHFEWNVSQVLANLSWDTLHPPLVWERPTKVRLPKLYLKHQMDLVATLSQLGLQELFQAPDLRGISEQSLVVSGVQH

SEQ ID NO: 12109 - protein, 427 aa, Homo Sapiens
MALLWGLLVLSWSCLQGPCSVFSPVSAMEPLGRQLTSGPNQEQVSPLTLLKLGNQVQPGAQNHTLQRLQQVLHAGSGPCLPHLLSRLCQDLGPGAFRLAARMYLQKGFPIKEDFLEQSEQLFGAKPVSLTGKQEDDLANINQWVKEATEGKIQEFLSGLPEDTVLLLLNAIHFQGFWRNKFDPSLTQRDSFHLDEQFTVPVEMMQARTYPLRWFLLEQPEIQVAHFPFKNNMSFVVLVPTHFEWNVSQVLANLSWDTLHPPLVWERPTKVRLPKLYLKHQMDLVATLSQLGLQELFQAPDLRGISEQSLVVSGVQHQSTLELSEVGVEAAAATSIAMSRMSLSSFSVNRPFLFFIFEDTTGLPLFVGSVRNPNPSAPRELKEQQDSPGNKDFLQSLKGFPRGDKLFGPDLKLVPPMEEDYPQFGSPK

SEQ ID NO: 12110 - protein, 86 aa, Homo Sapiens
AKWKTTFDPKKTRMEPFHFKNSVIKVPMMNSKKYPVAHFIDQTLKAKPWPRQTLYILGWKQDSQVSSCISTILNGKMWGSCSSPTI

SEQ ID NO: 12111 - protein, 133 aa, Homo Sapiens [sequence omitted]

SEQ ID NO: 12112 - protein, 160 aa, Homo Sapiens
MASRLTLLTLLLLLLAGDRASSNPNATSSSSQDPESLQDRGEGKVATTVISKMLFVEPILEVSSLPTTNSTTNSATKITANTTDEPTTQPTTEPTTQPTIQPTQPTTQLPTDSPTQPTTGSFCPGPVTLCSDLESHSTEAVLGDALVDFSLKLYHAFSAM

SEQ ID NO: 12113 - protein, 500 aa, Homo Sapiens
MASRLTLLTLLLLLLAGDRASSNPNATSSSSQDPESLQDRGEGKVATTVISKMLFVEPILEVSSLPTTNSTTNSATKITANTTDEPTTQPTTEPTTQPTIQPTQPTTQLPTDSPTQPTTGSFCPGPVTLCSDLESHSTEAVLGDALVDFSLKLYHAFSAMKKVETNMAFSPFSIASLLTQVLLGAGENTKTNLESILSYPKDFTCVHQALKGFTTKGVTSVSQIFHSPDLAIRDTFVNASRTLYSSSPRVLSNNSDANLELINTWVAKNTNNKISRLLDSLPSDTRLVLLNAIYLSAKWKTTFDPKKTRMEPFHFKNSVIKVPMMNSKKYPVAHFIDQTLKAKVGQLQLSHNLSLVILVPQNLKHRLEDMEQALSPSVFKAIMEKLEMSKFQPTLLTLPRIKVTTSQDMLSIMEKLEFFDFSYDLNLCGLTEDPDLQVSAMQHQTVLELTETGVEAAAASAISVARTLLVFEVQQPFLFVLWDQQHKFPVFMGRVYDPRA

SEQ ID NO: 12114 - protein, 463 aa, Homo Sapiens
MASRLTLLTLLLLLLAGDRASSNPNATSSSSQDPESLQDRGEGKVATTVISKMLFVEPILEVSSLPTTNSTTNSATKITANTTDEPTTQPTTEPTTQPTIQPTQPTTQLPTDSPTQPTTGSFCPGPVTLCSDLESHSTEAVLGDALVDFSLKLYHAFSAMKKVETNMAFSPFSIASLLTQVLLGAGENTKTNLESILSYPKDFTCVHQALKGFTTKGVTSVSQIFHSPDLAIRDTFVNASRTLYSSSPRVLSNNSDANLELINTWVAKNTNNKISRLLDSLPSDTRLVLLNAIYLSAKWKTTFDPKKTRMEPFHFKNSVIKVPMMNSKKYPVAHFIDQTLKAKAIMEKLEMSKFQPTLLTLPRIKVTTSQDMLSIMEKLEFFDFSYDLNLCGLTEDPDLQVSAMQHQTVLELTETGVEAAAASAISVARTLLVFEVQQPFLFVLWDQQHKFPVFMGRVYDPRA

SEQ ID NO: 12115 - protein, 505 aa, Homo Sapiens
MASRLTLLTLLLLLLAGFLEPQDRASSNPNATSSSSQDPESLQDRGEGKVATTVISKMLFVEPILEVSSLPTTNSTTNSATKITANTTDEPTTQPTTEPTTQPTIQPTQPTTQLPTDSPTQPTTGSFCPGPVTLCSDLESHSTEAVLGDALVDFSLKLYHAFSAMKKVETNMAFSPFSIASLLTQVLLGAGENTKTNLESILSYPKDFTCVHQALKGFTTKGVTSVSQIFHSPDLAIRDTFVNASRTLYSSSPRVLSNNSDANLELINTWVAKNTNNKISRLLDSLPSDTRLVLLNAIYLSAKWKTTFDPKKTRMEPFHFKNSVIKVPMMNSKKYPVAHFIDQTLKAKVGQLQLSHNLSLVILVPQNLKHRLEDMEQALSPSVFKAIMEKLEMSKFQPTLLTLPRIKVTTSQDMLSIMEKLEFFDFSYDLNLCGLTEDPDLQVSAMQHQTVLELTETGVEAAAASAISVARTLLVFEVQQPFLFVLWDQQHKFPVFMGRVYDPRA

SEQ ID NO: 12116 - protein, 43 aa, Homo Sapiens
MASRLTLLTLLLLLLAGGLGRTPKQTWRASSLTPRTSPVSTRP

SEQ ID NO: 12117 - protein, 43 aa, Homo Sapiens; identical to SEQ ID NO: 12116

SEQ ID NO: 12118 - protein, 122 aa, Homo Sapiens
MGAGPGRGGGPWAPRVGAGSEAGWLRRSADVAAQMASRLTLLTLLLLLLAGDRASSNPNATSSSSQDPESLQDRGEGKVATTVISKMLFVEPILEVSSLPTTNSTTNSATKITANTTDEPTT

SEQ ID NO: 12119 - protein, 543 aa, Homo Sapiens
MGAGPGRGGGPWAPRVGAGSEAGWLRRSADVAAQMASRLTLLTLLLLLLAGDRASSNPNATSSSSQDPESLQDRGEGKVATTVISKMLFVEPILEVSSLPTTNSTTNSATKITANTTDEPTTQPTTEPTTQPTIQPTQPTTQLPTDSPTQPTTGSFCPGPVTLCSDLESHSTEAVLGDALVDFSLKLYHAFSAMKKVETNMAFSPFSIASLLTQVLLGAGENTKTNLESILSYPKDFTCVHQALKGFTTKGVTSVSQIFHSPDLAIRDTFVNASRTLYSSSPRVLSNNSDANLELINTWVAKNTNNKISRLLDSLPSDTRLVLLNAIYLSEQPSHLFPLAKWKTTFDPKKTRMEPFHFKNSVIKVPMMNSKKYPVAHFIDQTLKAKVGQLQLSHNLSLVILVPQNLKHRLEDMEQALSPSVFKAIMEKLEMSKFQPTLLTLPRIKVTTSQDMLSIMEKLEFFDFSYDLNLCGLTEDPDLQVSAMQHQTVLELTETGVEAAAASAISVARTLLVFEVQQPFLFVLWDQQHKFPVFMGRVYDPRA

SEQ ID NO: 12120 - protein, 448 aa, Homo Sapiens
MLFVEPILEVSSLPTTNSTTNSATKITANTTDEPTTQPTTEPTTQPTIQPTQPTTQLPTDSPTQPTTGSFCPGPVTLCSDLESHSTEAVLGDALVDFSLKLYHAFSAMKKVETNMAFSPFSIASLLTQVLLGAGENTKTNLESILSYPKDFTCVHQALKGFTTKGVTSVSQIFHSPDLAIRDTFVNASRTLYSSSPRVLSNNSDANLELINTWVAKNTNNKISRLLDSLPSDTRLVLLNAIYLSAKWKTTFDPKKTRMEPFHFKNSVIKVPMMNSKKYPVAHFIDQTLKAKVGQLQLSHNLSLVILVPQNLKHRLEDMEQALSPSVFKAIMEKLEMSKFQPTLLTLPRIKVTTSQDMLSIMEKLEFFDFSYDLNLCGLTEDPDLQVSAMQHQTVLELTETGVEAAAASAISVARTLLVFEVQQPFLFVLWDQQHKFPVFMGRVYDPRA

SEQ ID NO: 12121 - protein, 150 aa, Homo Sapiens
MRSLLLLSAFCLLEAALAAEVKKPAAAAAPGTAEKLSPKAATLAERSAGLAFSLYQAMAKDQAVENILVSPVVVASSLGLVSLGGKATTASQAKAVLSAEQLRDEEVHAGLGELLRSLSNSTARNVTWKLGSRLYGPSSVSFADDFVRSS

SEQ ID NO: 12122 - protein, 165 aa, Homo Sapiens
MRSLLLLSAFCLLEAALAAEVKKPAAAAAPGTAEKLSPKAATLAERSAGLAFSLYQAMAKDQAVENILVSPVVVASSLGLVSLGGKATTASQAKAVLSAEQLRDEEVHAGLGELLRSLSNSTARNVTWKLGSRLYGPSSVSFADDFVRSSKQHYNCEHSKINFRD

SEQ ID NO: 12123 - protein, 167 aa, Homo Sapiens
MRSLLLLSAFCLLEAALAAEVKKPAAAAAPGTAEKLSPKAATLAERSAGLAFSLYQAMAKDQAVENILVSPVVVASSLGLVSLGGKATTASQAKAVLSAEQLRDEEVHAGLGELLRSLSNSTARNVTWKLGSRLYGPSSVSFADDFVRSSKQHYNCEHSKINFRDKR

SEQ ID NO: 12124 - protein, 203 aa, Homo Sapiens
MRSLLLLSAFCLLEAALAAEVKKPAAAAAPGTAEKLSPKAATLAERSAGLAFSLYQAMAKDQAVENILVSPVVVASSLGLVSLGGKATTASQAKAVLSAEQLRDEEVHAGLGELLRSLSNSTARNVTWKLGSRLYGPSSVSFADDFVRSSKQHYNCEHSKINFRDKRSALQSINEWAAQTTDGKLPEVTKDVERTDGALLVNA

SEQ ID NO: 12125 - protein, 247 aa, Homo Sapiens
MRSLLLLSAFCLLEAALAAEVKKPAAAAAPGTAEKLSPKAATLAERSAGLAFSLYQAMAKDQAVENILVSPVVVASSLGLVSLGGKATTASQAKAVLSAEQLRDEEVHAGLGELLRSLSNSTARNVTWKLGSRLYGPSSVSFADDFVRSSKQHYNCEHSKINFRDKRSALQSINEWAAQTTDGKLPEVTKDVERTDGALLVNAMFFKPHWDEKFHHKMVDNRGFMVTRSYTVGVMMMHRTGLYNYYD

SEQ ID NO: 12126 - protein, 249 aa, Homo Sapiens
MRSLLLLSAFCLLEAALAAEVKKPAAAAAPGTAEKLSPKAATLAERSAGLAFSLYQAMAKDQAVENILVSPVVVASSLGLVSLGGKATTASQAKAVLSAEQLRDEEVHAGLGELLRSLSNSTARNVTWKLGSRLYGPSSVSFADDFVRSSKQHYNCEHSKINFRDKRSALQSINEWAAQTTDGKLPEVTKDVERTDGALLVNAMFFKPHWDEKFHHKMVDNRGFMVTRSYTVGVMMMHRTGLYNYYDDE

SEQ ID NO: 12127 - protein, 418 aa, Homo Sapiens
MRSLLLLSAFCLLEAALAAEVKKPAAAAAPGTAEKLSPKAATLAERSAGLAFSLYQAMAKDQAVENILVSPVVVASSLGLVSLGGKATTASQAKAVLSAEQLRDEEVHAGLGELLRSLSNSTARNVTWKLGSRLYGPSSVSFADDFVRSSKQHYNCEHSKINFRDKRSALQSINEWAAQTTDGKLPEVTKDVERTDGALLVNAMFFKPHWDEKFHHKMVDNRGFMVTRSYTVGVMMMHRTGLYNYYDDEKEKLQIVEMPLAHKLSSLIILMPHHVEPLERLEKLLTKEQLKIWMGKMQKKAVAISLPKGVVEVTHDLQKHLAGLGLTEAIDKNKADLSRMSGKKDLYLASVFHATAFELDTDGNPFDQDIYGREELRSPKLFYADHPFIFLVRDTQSGSLLFIGRLVRPKGDKMRDEL

SEQ ID NO: 12128 - protein, 418 aa, Homo Sapiens; identical to SEQ ID NO: 12127

SEQ ID NO: 12129 - protein, 295 aa, Homo Sapiens
MRSLLLLSAFCLLEAALAAEVKKPAAAAAPGTAEKLSPKAATLAERSAGLAFSLYQAMAKDQAVENILVSPVVVASSLGLVSLGGKATTASQAKAVLSAEQLRDEEVHAGLGELLRSLSNSTARNVTWKLGSRLYGPSSVSFADDFVRSSKQHYNCEHSKINFRDKRSALQSINEWAAQTTDGKLPEVTKDVERTDGALLVNAMFFKPHWDEKFHHKMVDNRGFMVTRSYTVGVMMMHRTGLYNYYDDEKEKLQIVEMPLAHKLSSLIILMPHHVEPLERLEKLLTKEQLKIWMG

SEQ ID NO: 12130 - protein, 418 aa, Homo Sapiens; identical to SEQ ID NO: 12127

SEQ ID NO: 12131 - protein, 324 aa, Homo Sapiens
MRSLLLLSAFCLLEAALAAEVKKPAAAAAPGTAEKLSPKAATLAERSAGLAFSLYQAMAKDQAVENILVSPVVVASSLGLVSLGGKATTASQAKAVLSAEQLRDEEVHAGLGELLRSLSNSTARNVTWKLGSRLYGPSSVSFADDFVRSSKQHYNCEHSKINFRDKRSALQSINEWAAQTTDGKLPEVTKDVERTDGALLVNAMFFKPHWDEKFHHKMVDNRGFMVTRSYTVGVMMMHRTGLYNYYDDEKEKLQIVEMPLAHKLSSLIILMPHHVEPLERLEKLLTKEQLKIWMGKMQKKAVAISLPKGVVEVTHDLQVRGGPA

SEQ ID NO: 12132 - protein, 142 aa, Homo Sapiens
MRSLLLLSAFCLLEAALAAEVKKPAAAAAPGTAEKLSPKATTASQAKAVLSAEQLRDEEVHAGLGELLRSLSNSTARNVTWKLGSRLYGPSSVSFADDFVRSSKQHYNCEHSKINFRDKRSALQSINEWAAQTTDGKLPEVT

SEQ ID NO: 12133 - protein, 86 aa, Homo Sapiens [sequence omitted]

SEQ ID NO: 12134 - protein, 201 aa, Homo Sapiens
MVDNRGFMVTRSYTVGVMMMHRTGLYNYYDDEKEKLQIVEMPLAHKLSSLIILMPHHVEPLERLEKLLTKEQLKIWMGKMQKKAVAISLPKGVVEVTHDLQKHLAGLGLTEAIDKNKADLSRMSGKKDLYLASVFHATAFELDTDGNPFDQDIYGREELRSPKLFYADHPFIFLVRDTQSGSLLFIGRLVRPKGDKMRDEL

SEQ ID NO: 12135 - protein, 56 aa, Homo Sapiens
  misc_feature (1)..(1): Xaa can be any naturally occurring amino acid
XNPFDQDIYGREELRSPKLFYADHPFIFLVRDTQSGSLLFIGRLVRPKGDKMRDEL

SEQ ID NO: 12136 - protein, 160 aa, Homo Sapiens
MAFLGLFSLLVLQSMATGATFPEEAIADLSVNMYNRLRATGEDENILFSPLSIALAMGMMELGAQGSTQKEIRHSMGYDSLKNGEEFSFLKEFSNMVTAKESQYVMKIANSLFVQNGFHVNEEFLQMMKKYFNAAVNHVDFSQNVAVANYINKWVENNTN

SEQ ID NO: 12137 - protein, 245 aa, Homo Sapiens
MAFLGLFSLLVLQSMATGATFPEEAIADLSVNMYNRLRATGEDENILFSPLSIALAMGMMELGAQGSTQKEIRHSMGYDSLKNGEEFSFLKEFSNMVTAKESQYVMKIANSLFVQNGFHVNEEFLQMMKKYFNAAVNHVDFSQNVAVANYINKWVENNTNNLVKDLVSPRDFDAATYLALINAVYFKGNWKSQFRPENTRTFSFTKDDESEVQIPMMYQQGEFYYGEFSDGSNEAGGIYQVLEIP

SEQ ID NO: 12138 - protein, 410 aa, Homo Sapiens
MAFLGLFSLLVLQSMATGATFPEEAIADLSVNMYNRLRATGEDENILFSPLSIALAMGMMELGAQGSTQKEIRHSMGYDSLKNGEEFSFLKEFSNMVTAKESQYVMKIANSLFVQNGFHVNEEFLQMMKKYFNAAVNHVDFSQNVAVANYINKWVENNTNNLVKDLVSPRDFDAATYLALINAVYFKGNWKSQFRPENTRTFSFTKDDESEVQIPMMYQQGEFYYGEFSDGSNEAGGIYQVLEIPYEGDEISMMLVLSRQEVPLATLEPLVKAQLVEEWANSVKKQKVEVYLPRFTVEQEIDLKDVLKALGITEIFIKDANLTGLSDNKEIFLSKAIHKSFLEVNEEGSEAAAVSGMIAISRMAVLYPQVIVDHPFFFLIRNRRTGTILFMGRVMHPETMNTSGHDFEEL

SEQ ID NO: 12139 - protein, 410 aa, Homo Sapiens; identical to SEQ ID NO: 12138

SEQ ID NO: 12140 - protein, 119 aa, Homo Sapiens
  misc_feature (1)..(1): Xaa can be any naturally occurring amino acid
XSRFTVEQEIDLKDVLKALGITEIFIKDANLTGLSDNKEIFLSKAIHKSFLEVNEEGSEAAAVSGMIAISRMAVLYPQVIVDHPFFFLIRNRRTGTILFMGRVMHPETMNTSGHDFEEL

SEQ ID NO: 12141 - protein, 157 aa, Homo Sapiens
MDTIFLWSLLLLFFGSQASRCSAQKNTEFAVDLYQEVSLSHKDNIIFSPLGITLVLEMVQLGAKGKAQQQIRQTLKQQETSAEKKQEFTFNLANALYLQEGFTVKEQYLHGNKEFFQSAIKLVDFQDAKACAEMISTWVERKTDGKIKDMFSGEEFG

SEQ ID NO: 12142 - protein, 206 aa, Homo Sapiens
MDTIFLWSLLLLFFGSQASRCSAQKNTEFAVDLYQEVSLSHKDNIIFSPLGITLVLEMVQLGAKGKAQQQIRQTLKQQETSAGEEFFVLKSFFSAISEKKQEFTFNLANALYLQEGFTVKEQYLHGNKEFFQSAIKLVDFQDAKACAEMISTWVERKTDGKIKDMFSGEEFGPLTRLVLVNAIYFKGDWKQKFRKEDTQLINFTKK

SEQ ID NO: 12143 - protein, 405 aa, Homo Sapiens
MDTIFLWSLLLLFFGSQASRCSAQKNTEFAVDLYQEVSLSHKDNIIFSPLGITLVLEMVQLGAKGKAQQQIRQTLKQQETSAGEEFFVLKSFFSAISEKKQEFTFNLANALYLQEGFTVKEQYLHGNKEFFQSAIKLVDFQDAKACAEMISTWVERKTDGKIKDMFSGEEFGPLTRLVLVNAIYFKGDWKQKFRKEDTQLINFTKKNGSTVKIPMMKALLRTKYGYFSESSLNYQVLELSYKGDEFSLIIILPAEGMDIEEVEKLITAQQILKWLSEMQEEEVEISLPRFKVEQKVDFKDVLYSLNITEIFSGGCDLSGITDSSEVYVSQVTQKVFFEINEDGSEAATSTGIHIPVIMSLAQSQFIANHPFLFIMKHNPTESILFMGRVTNPDTQEIKGRDLDSL

SEQ ID NO: 12144 - protein, 405 aa, Homo Sapiens; identical to SEQ ID NO: 12143

SEQ ID NO: 12145 - protein, 405 aa, Homo Sapiens; identical to SEQ ID NO: 12143

SEQ ID NO: 12146 - protein, 405 aa, Homo Sapiens; identical to SEQ ID NO: 12143

SEQ ID NO: 12147 - protein, 415 aa, Homo Sapiens
MIQNLMREVKMDTIFLWSLLLLFFGSQASRCSAQKNTEFAVDLYQEVSLSHKDNIIFSPLGITLVLEMVQLGAKGKAQQQIRQTLKQQETSAGEEFFVLKSFFSAISEKKQEFTFNLANALYLQEGFTVKEQYLHGNKEFFQSAIKLVDFQDAKACAEMISTWVERKTDGKIKDMFSGEEFGPLTRLVLVNAIYFKGDWKQKFRKEDTQLINFTKKNGSTVKIPMMKALLRTKYGYFSESSLNYQVLELSYKGDEFSLIIILPAEGMDIEEVEKLITAQQILKWLSEMQEEEVEISLPRFKVEQKVDFKDVLYSLNITEIFSGGCDLSGITDSSEVYVSQVTQKVFFEINEDGSEAATSTGIHIPVIMSLAQSQFIANHPFLFIMKHNPTESILFMGRVTNPDTQEIKGRDLDSL

SEQ ID NO: 12148 - protein, 853 aa, Homo Sapiens
MGTPRAQHPPPPQLLFLILLSCPWIQGLPLKEEEILPEPGSETPTVASEALAELLHGALLRRGPEMGYLPGPPLGPEGGEEETTTTIITTTTVTTTVTSPVLCNNNISEGEGYVESPDLGSPVSRTLGLLDCTYSIHVYPGYGIEIQVQTLNLSQEEELLVLAGGGSPGLAPRLLANSSMLGEGQVLRSPTNRLLLHFQSPRVPRGGGFRIHYQAYLLSCGFPPRPAHGDVSVTDLHPGGTATFHCDSGYQLQGEETLICLNGTRPSWNGETPSCMASCGGTIHNATLGRIVSPEPGGAVGPNLTCRWVIEAAEGRRLHLHFERVSLDEDNDRLMVRSGGSPLSPVIYDSDMDDVPERGLISDAQSLYVELLSETPANPLLLSLRFEAFEEDRCFAPFLAHGNVTTTDPEYRPGALATFSCLPGYALEPPGPPNAIECVDPTEPHWNDTEPACKAMCGGELSEPAGVVLSPDWPQSYSPGQDCVWGVHVQEEKRILLQVEILNVREGDMLTLFDGDGPSARVLAQLRGPQPRRRLLSSGPDLTLQFQAPPGPPNPGLGQGFVLHFKEVPRNDTCPELPPPEWGWRTASHGDLIRGTVLTYQCEPGYELLGSDILTCQWDLSWSAAPPACQKIMTCADPGEIANGHRTASDAGFPVGSHVQYRCLPGYSLEGAAMLTCYSRDTGTPKWSDRVPKCALKYEPCLNPGVPENGYQTLYKHHYQAGESLRFFCYEGFELIGEVTITCVPGHPSQWTSQPPLCKVAYEELLDNRKLEVTQTTDPSRQLEGGNLALAILLPLGLVIVLGSGVYIYYTKLQGKSLFGFSGSHSYSPITVESDFSNPLYEAGDTREYEVSI

SEQ ID NO: 12149 - protein, 809 aa, Homo Sapiens
MGTPRAQHPPPPQLLFLILLSCPWIQGLPLKEEEILPEPGSETPTVASEALAELLHGALLRRGPEMGYLPGSDRDPTLATPPAGQTLAVPSLPRATEPGTGPLTTAVTPNGVRGAGPTAPELLTPPPGTTAPPPPSPASPGPPLGPEGGEEETTTTIITTTTVTTTVTSPAYLLSCGFPPRPAHGDVSVTDLHPGGTATFHCDSGYQLQGEETLICLNGTRPSWNGETPSCMASCGGTIHNATLGRIVSPEPGGAVGPNLTCRWVIEAAEGRRLHLHFERVSLDEDNDRLMVRSGGSPLSPVIYDSDMDDVPERGLISDAQSLYVELLSETPANPLLLSLRFEAFEEDRCFAPFLAHGNVTTTDPEYRPGALATFSCLPGYALEPPGPPNAIECVDPTEPHWNDTEPACKAMCGGELSEPAGVVLSPDWPQSYSPGQDCVWGVHVQEEKRILLQVEILNVREGDMLTLFDGDGPSARVLAQLRGPQPRRRLLSSGPDLTLQFQAPPGPPNPGLGQGFVLHFKEVPRNDTCPELPPPEWGWRTASHGDLIRGTVLTYQCEPGYELLGSDILTCQWDLSWSAAPPACQKIMTCADPGEIANGHRTASDAGFPVGSHVQYRCLPGYSLEGAAMLTCYSRDTGTPKWSDRVPKCALKYEPCLNPGVPENGYQTLYKHHYQAGESLRFFCYEGFELIGEVTITCVPGHPSQWTSQPPLCKVAYEELLDNRKLEVTQTTDPSRQLEGGNLALAILLPLGLVIVLGSGVYIYYTKLQGKSLFGFSGSHSYSPITVESDFSNPLYEAGDTREYEVSI

SEQ ID NO: 12150 - protein, 910 aa, Homo Sapiens
MGTPRAQHPPPPQLLFLILLSCPWIQGLPLKEEEILPEPGSETPTVASEALAELLHGALLRRGPEMGYLPGSDRDPTLATPPAGQTLAVPSLPRATEPGTGPLTTAVTPNGVRGAGPTAPELLTPPPGTTAPPPPSPASPGPPLGPEGGEEETTTTIITTTTVTTTVTSPVLCNNNISEGEGYVESPDLGSPVSRTLGLLDCTYSIHVYPGYGIEIQVQTLNLSQEEELLVLAGGGSPGLAPRLLANSSMLGEGQVLRSPTNRLLLHFQSPRVPRGGGFRIHYQAYLLSCGFPPRPAHGDVSVTDLHPGGTATFHCDSGYQLQGEETLICLNGTRPSWNGETPSCMASCGGTIHNATLGRIVSPEPGGAVGPNLTCRWVIEAAEGRRLHLHFERVSLDEDNDRLMVRSGGSPLSPVIYDSDMDDVPERGLISDAQSLYVELLSETPANPLLLSLRFEAFEEDRCFAPFLAHGNVTTTDPEYRPGALATFSCLPGYALEPPGPPNAIECVDPTEPHWNDTEPACKAMCGGELSEPAGVVLSPDWPQSYSPGQDCVWGVHVQEEKRILLQVEILNVREGDMLTLFDGDGPSARVLAQLRGPQPRRRLLSSGPDLTLQFQAPPGPPNPGLGQGFVLHFKEVPRNDTCPELPPPEWGWRTASHGDLIRGTVLTYQCEPGYELLGSDILTCQWDLSWSAAPPACQKIMTCADPGEIANGHRTASDAGFPVGSHVQYRCLPGYSLEGAAMLTCYSRDTGTPKWSDRVPKCALKYEPCLNPGVPENGYQTLYKHHYQAGESLRFFCYEGFELIGEVTITCVPGHPSQWTSQPPLCKVTQTTDPSRQLEGGNLALAILLPLGLVIVLGSGVYIYYTKLQGKSLFGFSGSHSYSPITVESDFSNPLYEAGDTREYEVSI

SEQ ID NO: 12151 - protein, 923 aa, Homo Sapiens
MGTPRAQHPPPPQLLFLILLSCPWIQGLPLKEEEILPEPGSETPTVASEALAELLHGALLRRGPEMGYLPGSDRDPTLATPPAGQTLAVPSLPRATEPGTGPLTTAVTPNGVRGAGPTAPELLTPPPGTTAPPPPSPASPGPPLGPEGGEEETTTTIITTTTVTTTVTSPVLCNNNISEGEGYVESPDLGSPVSRTLGLLDCTYSIHVYPGYGIEIQVQTLNLSQEEELLVLAGGGSPGLAPRLLANSSMLGEGQVLRSPTNRLLLHFQSPRVPRGGGFRIHYQAYLLSCGFPPRPAHGDVSVTDLHPGGTATFHCDSGYQLQGEETLICLNGTRPSWNGETPSCMASCGGTIHNATLGRIVSPEPGGAVGPNLTCRWVIEAAEGRRLHLHFERVSLDEDNDRLMVRSGGSPLSPVIYDSDMDDVPERGLISDAQSLYVELLSETPANPLLLSLRFEAFEEDRCFAPFLAHGNVTTTDPEYRPGALATFSCLPGYALEPPGPPNAIECVDPTEPHWNDTEPACKAMCGGELSEPAGVVLSPDWPQSYSPGQDCVWGVHVQEEKRILLQVEILNVREGDMLTLFDGDGPSARVLAQLRGPQPRRRLLSSGPDLTLQFQAPPGPPNPGLGQGFVLHFKEVPRNDTCPELPPPEWGWRTASHGDLIRGTVLTYQCEPGYELLGSDILTCQWDLSWSAAPPACQKIMTCADPGEIANGHRTASDAGFPVGSHVQYRCLPGYSLEGAAMLTCYSRDTGTPKWSDRVPKCALKYEPCLNPGVPENGYQTLYKHHYQAGESLRFFCYEGFELIGEVTITCVPGHPSQWTSQPPLCKVAYEELLDNRKLEVTQTTDPSRQLEGGNLALAILLPLGLVIVLGSGVYIYYTKLQGKSLFGFSGSHSYSPITVESDFSNPLYEAGDTREYEVSI

SEQ ID NO: 12152 - protein, 81 aa, Homo Sapiens
MGTPRAQHPPPPQLLFLILLSCPWIQGSDRDPTLATPPAGQTLAVPSLPRATEPGTGPLTTAVTPNGVRGAGPTAPELLTP

SEQ ID NO: 12153 - protein, 879 aa, Homo Sapiens
MGTPRAQHPPPPQLLFLILLSCPWIQGSDRDPTLATPPAGQTLAVPSLPRATEPGTGPLTTAVTPNGVRGAGPTAPELLTPPPGTTAPPPPSPASPGPPLGPEGGEEETTTTIITTTTVTTTVTSPVLCNNNISEGEGYVESPDLGSPVSRTLGLLDCTYSIHVYPGYGIEIQVQTLNLSQEEELLVLAGGGSPGLAPRLLANSSMLGEGQVLRSPTNRLLLHFQSPRVPRGGGFRIHYQAYLLSCGFPPRPAHGDVSVTDLHPGGTATFHCDSGYQLQGEETLICLNGTRPSWNGETPSCMASCGGTIHNATLGRIVSPEPGGAVGPNLTCRWVIEAAEGRRLHLHFERVSLDEDNDRLMVRSGGSPLSPVIYDSDMDDVPERGLISDAQSLYVELLSETPANPLLLSLRFEAFEEDRCFAPFLAHGNVTTTDPEYRPGALATFSCLPGYALEPPGPPNAIECVDPTEPHWNDTEPACKAMCGGELSEPAGVVLSPDWPQSYSPGQDCVWGVHVQEEKRILLQVEILNVREGDMLTLFDGDGPSARVLAQLRGPQPRRRLLSSGPDLTLQFQAPPGPPNPGLGQGFVLHFKEVPRNDTCPELPPPEWGWRTASHGDLIRGTVLTYQCEPGYELLGSDILTCQWDLSWSAAPPACQKIMTCADPGEIANGHRTASDAGFPVGSHVQYRCLPGYSLEGAAMLTCYSRDTGTPKWSDRVPKCALKYEPCLNPGVPENGYQTLYKHHYQAGESLRFFCYEGFELIGEVTITCVPGHPSQWTSQPPLCKVAYEELLDNRKLEVTQTTDPSRQLEGGNLALAILLPLGLVIVLGSGVYIYYTKLQGKSLFGFSGSHSYSPITVESDFSNPLYEAGDTREYEVSI

SEQ ID NO: 12154 - protein, 303 aa, Homo Sapiens
  misc_feature (1)..(1): Xaa can be any naturally occurring amino acid
XCLNGTRPSWNGETPSCMASCGGTIHNATLGRIVSPEPGGAVGPNLTCRWVIEAAEGRRLHLHFERVSLDEDNDRLMVRSGGSPLSPVIYDSDMDDVPERGLISDAQSLYVELLSETPANPLLLSLRFEAMCGGELSEPAGVVLSPDWPQSYSPGQDCVWGVHVQEEKRILLQVEILNVREGDMLTLFDGDGPSARVLAQLRGPQPRRRLLSSGPDLTLQFQAPPGPPNPGLGQGFVLHFKEVPRNDTCPELPPPEWGWRTASHGDLIRGTVLTYQCEPGYELLGSDILTCQWDLSWSAAPPA

SEQ ID NO: 12155 - protein, 314 aa, Homo Sapiens
MGIGRSEGGRRGAALGVLLALGAALLAVGSASEYDYVSFQSDIGPYQSGRFYTKPPQCVDIPADLRLCHNVGYKKMVLPNLLEHETMAEVKQQASSWVPLLNKNCHAGTQVFLCSLFAPVCLDRPIYPCRWLCEAVRDSCEPVMQFFGFYWPEMLKCDKFPEGDVCIAMTPPNATEASKPQGTTVCPPCDNELKSEAIIEHLCASEFALRMKIKEVKKENGDKKIVPKKKKPLKLGPIKKKDLKKLVLYLKNGADCPCHQLDNLSHHFLIMGRKVKSQYLLTAIHKWDKKNKEFKNFMKKMKNHECPTFQSVFK

SEQ ID NO: 12156 - protein, 178 aa, Homo Sapiens
MGWGNPIIAVFRTPFAPWLQFHWSAPFSAWLGTVLTHLHSSQQRSGTTVCPPCDNELKSEAIIEHLCASEFALRMKIKEVKKENGDKKIVPKKKKPLKLGPIKKKDLKKLVLYLKNGADCPCHQLDNLSHHFLIMGRKVKSQYLLTAIHKWDKKNKEFKNFMKKMKNHECPTFQSVFK

SEQ ID NO: 12157 - protein, 295 aa, Homo Sapiens
MLQGPGSLLLLFLASHCCLGSARGLFLFGQPDFSYKRSNCKPIPANLQLCHGIEYQNMRLPNLLGHETMKEVLEQAGAWIPLVMKQCHPDTKKFLCSLFAPVCLDDLDETIQPCHSLCVQVKDRCAPVMSAFGFPWPDMLECDRFPQDNDLCIPLASSDHLLPATEEAPKVCEACKNKNDDDNDIMETLCKNDFALKIKVKEITYINRDTKIILETKSKTIYKLNGVSERDLKKSVLWLKDSLQCTCEEMNDINAPYLVMGQKQGGELVITSVKRWQKGQREFKRISRSIRKLQC

SEQ ID NO: 12158 - protein, 346 aa, Homo Sapiens
MFLSILVALCLWLHLALGVRGAPCEAVRIPMCRHMPWNITRMPNHLHHSTQENAILAIEQYEELVDVNCSAVLRFFLCAMYAPICTLEFLHDPIKPCKSVCQRARDDCEPLMKMYNHSWPESLACDELPVYDRGVCISPEAIVTDLPEDVKWIDITPDMMVQERPLDVDCKRLSPDRCKCKKVKPTLATYLSKNYSYVIHAKIKAVQRSGCNEVTTVVDVKEIFKSSSPIPRTQVPLITNSSCQCPHILPHQDVLIMCYEWRSRMMLLENCLVEKWRDQLSKRSIQWEERLQEQRRTVQDKKKTAGRTSRSNPPKPKGKPPAPKPASPKKNIKTRSAQKRTNPKRV

SEQ ID NO: 12159 - protein, 137 aa, Homo Sapiens
MQLEQSIIPDIPAKDVKWIDITPDMMVQERPLDVDCKRLSPDRCKCKKVKPTLATYLSKNYSYVIHAKIKAVQRSGCNEVTTVVDVKEIFKSSSPIPRTQVPLITNSSCQCPHILPHQDVLIMCYEWRSRMMLLENC

SEQ ID NO: 12160 - protein, 317 aa, Homo Sapiens
MRAAAAGGGVRTAALALLLGALHWAPARCEEYDYYGWQAEPLHGRSYSKPPQCLDIPADLPLCHTVGYKRMRLPNLLEHESLAEVKQQASSWLPLLAKRCHSDTQVFLCSLFAPVCLDRPIYPCRSLCEAVRAGCAPLMEAYGFPWPEMLHCHKFPLDNDLCIAVQFGHLPATAPPVTKICAQCEMEHSADGLMEQMCSSDFVVKMRIKEIKIENGDRKLIGAQKKKKLLKPGPLKRKDTKRLVLHMKNGAGCPCPQLDSLAGSFLVMGRKVDGQLLLMAVYRWDKKNKEMKFAVKFMFSYPCSLYYPFFYGAAEPH

SEQ ID NO: 12161 - protein, 78 aa, Homo Sapiens
MGSGLPLVLLLTLLGSSHGTGPGMTLQLKLKESFLTNSSYESSFLELLEKLCLLLHLPSGTSVTLHHARSQHHVVCNT

SEQ ID NO: 12162 - protein, 55 aa, Homo Sapiens
MTLQLKLKESFLTNSSYESSFLELLEKLCLLLHLPSGTSVTLHHARSQHHVVCNT

SEQ ID NO: 12163 - protein, 263 aa, Homo Sapiens
MRPCQVPGAATGPRAMWLCPLALNLILMAASGAVCEVKDVCVGSPGIPGTPGSHGLPGRDGRDGLKGDPGPPGPMGPPGEMPCPPGNDGLPGAPGIPGECGEKGEPGERGPPGLPAHLDEELQATLHDFRHQILQTRGALSLQGSIMTVGEKVFSSNGQSITFDAIQEACARAGGRIAVPRNPEENEAIASFVKKYNTYAYVGLTEGPSPGDFRYSDGTPVNYTNWYRGEPAGRGKEQCVEMYTDGQWNDRNCLYSRLTICEF

SEQ ID NO: 12164 - protein, 158 aa, Homo Sapiens
MWLCPLALNLILMAASGAVCEVKDVCVGSPGIPGTPGSHGLPGRDGRDGLKGDPGPPGPMGPPGEMPCPPGNDGLPGAPGIPGECGEKGEPGERGPPGLPAHLDEELQATLHDFRHQILQTRGALSLQGSIMTVGEKVFSSNGQSITFDAIQEACARA

SEQ ID NO: 12165 - protein, 158 aa, Homo Sapiens; identical to SEQ ID NO: 12164

SEQ ID NO: 12166 - protein, 248 aa, Homo Sapiens
MWLCPLALNLILMAASGAVCEVKDVCVGSPGIPGTPGSHGLPGRDGRDGLKGDPGPPGPMGPPGEMPCPPGNDGLPGAPGIPGECGEKGEPGERGPPGLPAHLDEELQATLHDFRHQILQTRGALSLQGSIMTVGEKVFSSNGQSITFDAIQEACARAGGRIAVPRNPEENEAIASFVKKYNTYAYVGLTEGPSPGDFRYSDGTPVNYTNWYRGEPAGRGKEQCVEMYTDGQWNDRNCLYSRLTICEF

SEQ ID NO: 12167 - protein, 248 aa, Homo Sapiens; identical to SEQ ID NO: 12166

SEQ ID NO: 12168 - protein, 38 aa, Homo Sapiens
MRPCQVPGAATGPRAMWLCPLALTLILMAASGAACEVK

SEQ ID NO: 12169 - protein, 98 aa, Homo Sapiens
MWLCPLALTLILMAASGAACEVKDVCVGSPGIPGTPGSHGLPGRDGRDGVKGDPGPPGPMGPPGETPCPPGNNGLPGAPGVPGERGEKGEAGERGPPG

SEQ ID NO: 12170 - protein, 158 aa, Homo Sapiens
MWLCPLALTLILMAASGAACEVKDVCVGSPGIPGTPGSHGLPGRDGRDGVKGDPGPPGPMGPPGETPCPPGNNGLPGAPGVPGERGEKGEAGERGPPGLPAHLDEELQATLHDFRHQILQTRGALSLQGSIMTVGEKVFSSNGQSITFDAIQEACARA

SEQ ID NO: 12171 - protein, 248 aa, Homo Sapiens
MWLCPLALTLILMAASGAACEVKDVCVGSPGIPGTPGSHGLPGRDGRDGVKGDPGPPGPMGPPGETPCPPGNNGLPGAPGVPGERGEKGEAGERGPPGLPAHLDEELQATLHDFRHQILQTRGALSLQGSIMTVGEKVFSSNGQSITFDAIQEACARAGGRIAVPRNPEENEAIASFVKKYNTYAYVGLTEGPSPGDFRYSDGTPVNYTNWYRGEPAGRGKEQCVEMYTDGQWNDRNCLYSRLTICEF

SEQ ID NO: 12172 - protein, 248 aa, Homo Sapiens; identical to SEQ ID NO: 12171

SEQ ID NO: 12173 - protein, 381 aa, Homo Sapiens
MAESHLLQWLLLLLPTLCGPGTAAWTTSSLACAQGPEFWCQSLEQALQCRALGHCLQEVWGHVGADDLCQECEDIVHILNKMAKEAIFQDTMRKFLEQECNVLPLKLLMPQCNQVLDDYFPLVIDYFQNQTDSNGICMHLGLCKSRQPEPEQEPGMSDPLPKPLRDPLPDPLLDKLVLPVLPGALQARPGPHTQDLSEQQFPIPLPYCWLCRALIKRIQAMIPKGALAVAVAQVCRVVPLVAGGICQCLAERYSVILLDTLLGRMLPQLVCRLVLRCSMDDSAGPRSPTGEWLPRDSECHLCMSVTTQAGNSSEQAIPQAMLQACVGSWLDREKCKQFVEQHTPQLLTLVPRGWDAHTTCQALGVCGTMSSPLQCIHSPDL

SEQ ID NO: 12174 - protein, 381 aa, Homo Sapiens; identical to SEQ ID NO: 12173

SEQ ID NO: 12175 - protein, 393 aa, Homo Sapiens
MHQAGYPGCRGAMAESHLLQWLLLLLPTLCGPGTAAWTTSSLACAQGPEFWCQSLEQALQCRALGHCLQEVWGHVGADDLCQECEDIVHILNKMAKEAIFQDTMRKFLEQECNVLPLKLLMPQCNQVLDDYFPLVIDYFQNQTDSNGICMHLGLCKSRQPEPEQEPGMSDPLPKPLRDPLPDPLLDKLVLPVLPGALQARPGPHTQDLSEQQFPIPLPYCWLCRALIKRIQAMIPKGALAVAVAQVCRVVPLVAGGICQCLAERYSVILLDTLLGRMLPQLVCRLVLRCSMDDSAGPRSPTGEWLPRDSECHLCMSVTTQAGNSSEQAIPQAMLQACVGSWLDREKCKQFVEQHTPQLLTLVPRGWDAHTTCQALGVCGTMSSPLQCIHSPDL

SEQ ID NO: 12176 - protein, 92 aa, Homo Sapiens
  misc_feature (1)..(1): Xaa can be any naturally occurring amino acid
XEWLPRDSECHLCMSVTTQAGNSSEQAIPQAMLQACVGSWLDREKCKQFVEQHTPQLLTLVPRGWDAHTTCQALGVCGTMSSPLQCIHSPDL

SEQ ID NO: 12177 - protein, 374 aa, Homo Sapiens
  misc_feature (1)..(1): Xaa can be any naturally occurring amino acid
XHLLQWLLLLLPTLCGPGTAAWTTSSLACAQGPEFWCQSLEQALQCRALGHCLQEVWGHVGADDLCQECEDIVHILNKMAKEAIFQDTMRKFLEQECNVLPLKLLMPQCNQVLDDYFPLVIDYFQNQTDSNGICMHLGLCKSRQPEPEQEPGMSDPLPKPLRDPLPDPLLDKLVLPVLPGALQARPGPHTQDLSEQQFPIPLPYCWLCRALIKRIQAMIPKGALAVAVAQVCRVVPLVAGGICQCLAERYSVILLDTLLGRMLPQLVCRLVLRCSMDDSAGPREWLPRDSECHLCMSVTTQAGNSSEQAIPQAMLQACVGSWLDREKCKQFVEQHTPQLLTLVPRGWDAHTTCQALGVCGTMSSPLQCIHSPDL

SEQ ID NO: 12178 - protein, 218 aa, Homo Sapiens
MFLSTSKHGRQEAMLLFLLSALVLLTQPLGYLEAEMKTYSHRTMPSACTLVMCSSVESGLPGRDGRDGREGPRGEKGDPGLPGAAGQAGMPGQAGPVGPKGDNGSVGEPGPKGDTGPSGPPGPPGVPGPAGREGPLGKQGNIGPQGKPGPKGEAGPKGEVGAPGMQGSAGARGLAGPKGERGVPGERGVPGNTGAAGSAGAMGPQGSPGARGPPGLKG

SEQ ID NO: 12179 - protein, 375 aa, Homo Sapiens
MLLFLLSALVLLTQPLGYLEAEMKTYSHRTMPSACTLVMCSSVESGLPGRDGRDGREGPRGEKGDPGLPGAAGQAGMPGQAGPVGPKGDNGSVGEPGPKGDTGPSGPPGPPGVPGPAGREGPLGKQGNIGPQGKPGPKGEAGPKGEVGAPGMQGSAGARGLAGPKGERGVPGERGVPGNTGAAGSAGAMGPQGSPGARGPPGLKGDKGIPGDKGAKGESGLPDVASLRQQVEALQGQVQHLQAAFSQYKKVELFPNGQSVGEKIFKTAGFVKPFTEAQLLCTQAGGQLASPRSAAENAALQQLVVAKNEAAFLSMTDSKTEGKFTYPTGESLVYSNWAPGEPNDDGGSEDCVEIFTNGKWNDRACGEKRLVVCEF

SEQ ID NO: 12180 - protein, 88 aa, Homo Sapiens
MADTATTASAAAASAASASSDAPPFQLGKPRFQQTSFYGRFRHFLDIIDPRTLFVTEMESCTVPQAHCNPCLLGSETSQRGCAAAGGL

SEQ ID NO: 12181 - protein, 340 aa, Homo Sapiens
MADTATTASAAAASAASASSDAPPFQLGKPRFQQTSFYGRFRHFLDIIDPRTLFVTERRLREAVQLLEDYKHGTLRPGVTNEQLWSAQKIKQAILHPDTNEKIFMPFRMSGYIPFGTPIVVGLLLPNQTLASTVFWQWLNQSHNACVNYANRNATKPSPASKFIQGYLGAVISAVSIAVGLNVLVQKANKFTPATRLLIQRFVPFPAVASANICNVVLMRYGELEEGIDVLDSDGNLVGSSKIAARHALLETALTRVVLPMPILVLPPIVMSMLEKTALLQARPRLLLPVQSLVCLAAFGLALPLAISLFPQMSEIETSQLEPEIAQATSSRTVVYNKGL

SEQ ID NO: 12182 - protein, 253 aa, Homo Sapiens
MADTATTASAAAASAASASSDAPPFQLGKPRFQQTSFYGRFRHFLDIIDPRTLFVTERRLREAVQLLEDYKHGTLRPGVTNEQLWSAQKIKQAILHPDTNEKIFMPFRMSGYIPFGTPIVVGLLLPNQTLASTVFWQWLNQSHNACVNYANRNATKPSPASKFIQGYLGAVISAVSIAVGLNVLVQKANKFTPATRLLIQRFVPFPAVGRLSCRHAPGCSSLCKASCAWQPSAWPCRWPSASSRKCQRLKHPN

SEQ ID NO: 12183 - protein, 156 aa, Homo Sapiens
MADTATTASAAAASAASASSDAPPFQLGKPRFQQTSFYGRFRHFLDIIDPRTLFVTERRLREAVQLLEDYKHGTLRPGVTNEQLWSAQKIKQVIFLLGRQFRSSLAQPDTGIHCLLWLNQSHNACVNYANRNATKPSPASKFIQGYLGAVISAVSI

SEQ ID NO: 12184 - protein, 252 aa, Homo Sapiens
  misc_feature (1)..(1): Xaa can be any naturally occurring amino acid
XAASAASASSDAPPFQLGKPRFQQTSFYGRFRHFLDIIDPRTLFVTERRLREAVQLLEDYKHGTLRPGVTNEQLWSAQKIKQAILHPDTNEKIFMPFRMSGYIPFGTPIVVGLLLPNQTLASTVFWQWLNQSHNACVNYANRNATKPSPASKFIQGYLGAVISAVSIAVGLNVLVQKANKFTPATRLLIQRFVPFPAVGPAGDGADASGPAHAHPGATPDRHVHAGEIETSQLEPEIAQATSSRTVVYNKGL

SEQ ID NO: 12185 - protein, 196 aa, Homo Sapiens
LRHSSGLLSSWVTAYNRDSFDTTRQRLVLEIGDPEGPLLPYQAEFLVRSHDAEEVLPSTPASRFLSALGGLWEPGELQLLNVTSALDRGGRVPLPIEGRKEGLKRDLATSDIQMVHHCTIHGNTEELRQMAASREVPRPLSTLPMFNVHTVVPGPALTSSSLLCPHHEWHIPPADSSSWPSWNPGSKQAGRGGGVG

SEQ ID NO: 12186 - protein, 65 aa, Homo Sapiens
MAETLFWTPLLVGKLGPCSAGRPRMRGQDLGVFSWQGWGTPRPSRPRYTHLWAVSLCTPWTMRRF

SEQ ID NO: 12187 - protein, 263 aa, Homo Sapiens
MAETLFWTPLLVVLLAGLGDTEAQQTTLHPLVGRVFVHTLDHETFLSLPEHVAVPPAVHITYHAHLQGHPDLPRWLRYTQRSPHHPGFLYGSATPEDRGLQVIEVTAYNRDSFDTTRQRLVLEIGDPEGPLLPYQAEFLVRSHDAEEVLPSTPASRFLSALGGLWEPGELQLLNVTSALDRGGRVPLPIEGRKEGLKRDLATSDIQMVHHCTIHGNTEELRQMAASREVPRPLSTLPMFNVHTGERLPPRVDSAQVPLILDQH

SEQ ID NO: 12188 - protein, 298 aa, Homo Sapiens
MAETLFWTPLLVVLLAGLGDTEAQQTTLHPLVGRVFVHTLDHETFLSLPEHVAVPPAVHITYHAHLQGHPDLPRWLRYTQRSPHHPGFLYGSATPEDRGLQVIEVTAYNRDSFDTTRQRLVLEIGDPEGPLLPYQAEFLVRSHDAEEVLPSTPASRFLSALGGLWEPGELQLLNVTSALDRGGRVPLPIEGRKEGVYIKVGSASPFSTCLKMVASPDSHARCAQGQPPLLSCYDTLAPHFRVDWCNVTLAEERPGYLRHPDGPPLHHPREHRGAAADGGQPRGAPATLHPAHVQCAHR

SEQ ID NO: 12189 - protein, 387 aa, Homo Sapiens
MAETLFWTPLLVVLLAGLGDTEAQQTTLHPLVGRVFVHTLDHETFLSLPEHVAVPPAVHITYHAHLQGHPDLPRWLRYTQRSPHHPGFLYGSATPEDRGLQVIEVTAYNRDSFDTTRQRLVLEIGDPEGPLLPYQAEFLVRSHDAEEVLPSTPASRFLSALGGLWEPGELQLLNVTSALDRGGRVPLPIEGRKEGVYIKVGSASPFSTCLKMVASPDSHARCAQGQPPLLSCYDTLAPHFRVDWCNVTLVDKSVPEPADEVPTPGDGILEHDPFFCPPTEAPDRDFLVDALVTLLVPLLVALLLTLLLAYVMCCRREGRLKRDLATSDIQMVHHCTIHGNTEELRQMAASREVPRPLSTLPMFNVHTGERLPPRVDSAQVPLILDQH

SEQ ID NO: 12190 - protein, 61 aa, Homo Sapiens
MAETLFWTPLLVVLLAGLGDTEAQQTTLHPLVGRVFVHTLDHETFLSLPEHVGHSLQSGQL

SEQ ID NO: 12191 - protein, 58 aa, Homo Sapiens
  misc_feature (1)..(1): Xaa can be any naturally occurring amino acid
XCPTRCPHHLPRPPPGTPRPAPVAPLHPAQPPPPWLPLRLCHPRRSWAPGHSLQSGQL

SEQ ID NO: 12192 - protein, 160 aa, Homo Sapiens
  misc_feature (1)..(1): Xaa can be any naturally occurring amino acid
XLDRGGRVPLPIEGRKEGVYIKVDKSVPEPADEVPTPGDGILEHDPFFCPPTEAPDRDFLVDALVTLLVPLLVALLLTLLLAYVMCCRREGRLKRDLATSDIQMVHHCTIHGNTEELRQMAASREVPRPLSTLPMFNVHTGERLPPRVDSAQVPLILDQH

SEQ ID NO: 12193 - protein, 108 aa, Homo Sapiens
MSCPVPACCALLLVLGLCRARPRNALLLLADDGGFESGAYNNSAIATPHLDALARRSLLFRNAFTSVSSCSPSRASLLTGLPQAFLPLRRLPRPPPLWALPAPVRNLL

SEQ ID NO: 12194 - protein, 227 aa, Homo Sapiens
MSCPVPACCALLLVLGLCRARPRNALLLLADDGGFESGAYNNSAIATPHLDALARRSLLFRNAFTSVSSCSPSRASLLTGLPQASSGRSTWGRRPCTRLTLRTRRRMAPSSRWGGTSLELSCSSGNSCRLRMTGLSSSTSPSTTPTAVGTPSPSTEPSVRSLATERAAWVVSQTGPPRPTTHWTCWCLTSSPTPRQPEPTWPLSTPPSAAWTKELDWCSRSCVTPVS

SEQ ID NO: 12195 - protein, 502 aa, Homo Sapiens
MSCPVPACCALLLVLGLCRARPRNALLLLADDGGFESGAYNNSAIATPHLDALARRSLLFRNAFTSVSSCSPSRASLLTGLPQHQNGMYGLHQDVHHFNSFDKVRSLPLLLSQAGVRTGIIGKKHVGPETVYPFDFAYTEENGSVLQVGRNITRIKLLVRKFLQTQDDRPFFLYVAFHDPHRCGHSQPQYGTFCEKFGNGESGMGRIPDWTPQAYDPLDVLVPYFVPNTPAARADLAAQYTTVGRMDQGVGLVLQELRDAGVLNDTLVIFTSDNGIPFPSGRTNLYWPGTAEPLLVSSPEHPKRWGQVSEAYVSLLDLTPTILDWFSIPYPSYAIFGSKTIHLTGRSLLPALEAEPLWATVFGSQSHHEVTMSYPMRSVQHRHFRLVHNLNFKMPFPIDQDFYVSPTFQDLLNRTTAGQPTGWYKDLRHYYYRARWELYDRSRDPHETQNLATDPRFAQLLEMLRDQLAKWQWETHDPWVCAPDGVLEEKLSPQCQPLHNEL

SEQ ID NO: 12196 - protein, 188 aa, Homo Sapiens [sequence omitted]

SEQ ID NO: 12197 - protein, 274 aa, Homo Sapiens
MSCPVPACCALLLVLGLCRARPRNALLLLADRALSVSHLTQRMTEALRVARTTTAPSPPRTWTPWPAAASSFAMPSPRSAAALPAAPASSLACPSIRMGCTGCTRTCTTSTPSTRCGACRCCSAKLVCAQASSGRSTWGRRPCTRLTLRTRRRMAPSSRWGGTSLELSCSSGNSCRLRMTGLSSSTSPSTTPTAVGTPSPSTEPSVRSLATERAAWVVSQTGPPRPTTHWTCWCLTSSPTPRQPEPTWPLSTPPSAAWTKELDWCSRSCVTPVS

SEQ ID NO: 12198 - protein, 110 aa, Homo Sapiens
MYGLHQDVHHFNSFDKVRSLPLLLSQAGVRTGIIGKKHVGPETVYPFDFAYTEENGSVLQVGRNITRIKLLVRKFLQTQDDRPFFLYVAFHDPHRCGHSQPQYGTFCEKF

SEQ ID NO: 12199 - protein, 67 aa, Homo Sapiens
VIFTSDNGIPFPSGRTNLYWPGTAEPLLVSSPEHPKRWGQVSEAYVSLLEEKNEAQRGEVSCSGLHS

SEQ ID NO: 12200 - protein, 106 aa, Homo Sapiens
  misc_feature (1)..(1): Xaa can be any naturally occurring amino acid
XARPRNALLLLADDGGFESGAYNNSAIATPHLDALARRSLLFRNAFTSVSSCSPSRASLLTGLPQHQNGMYGLHQDVHHFNSFDKVRSLPLLLSQAGVRTGGAEHH

SEQ ID NO: 12201 - protein, 194 aa, Homo Sapiens
  misc_feature (1)..(1): Xaa can be any naturally occurring amino acid
XFDFAYTEENGSVLQVGRNITRIKLLVRKFLQTQDDRPFFLYVAFHDPHRCGHSQPQYGTFCEKFGNGESGMGRIPDWTPQAYDPLDVLVPYFVPNTPAARADLAAQYTTVGRMDQGVGLVLQELRDAGVLNDTLVIFTSDNGIPFPSGRTNLYWPGTAEPLLVSSPEHPKRWGQVSEAYVSLLVTRLLLPTVK

SEQ ID NO: 12202 - protein, 882 aa, Homo Sapiens
MLLGASWLCASKAAAAAAQSEGDEDRPGERRRRRAAATAAGAGEDMDESSLLDLLECSVCLERLDTTAKVLPCQHTFCRRCLESIVCSRHELRCPECRILVGCGVDELPANILLVRLLDGIRQRPRAGTSPGGSPPARPIPGQSAAPTLAGGGGGAAGSTPGSPVFLSAAAGSTAGSLRELATSRTAPAAKNPCLLPYGKALYSYEGKEPGDLKFNKGDIIVLRRKVDEQWYHGELHGTQGFLPASYIQCIQPLPHAPPQGKALYDFEMKDKDQDKDCLTFTKDEILTVLRRVDENWAEGMLGDKIGIFPLLYVELNDSAKQLIEMDKPCPAAASSCNASLPSDSGAVASVAPSPTLSSSGAVSAFQRRVDGKKNTKKRHSFTALSVTHRSSQAASHRHSMEISAPVLISSSDPRAAARIGDLAHLSCAAPTQDVSSSAGSTPTAVPRAASVSGEQGTPPKVQLPLNVYLALYAYKPQKSDELELHKGEMYRVLEKCQDGWFKGASLRTGVSGVFPGNYVTPVSRVPAGGAGPPRNNVVGGSPLAKGITTTMHPGSGSLSSLATATRPALPITTPQAHAQHPTASPPTGSCLRHSAQPTASQARSTISTAAHSAAQAQDRPTATVSPLRTQNSPSRLPATSLRPHSVVSPQHSHQPPVQMCPRPAIPLTSAASAITPPNVSAANLNGEAGGGPIGVLSTSSPTNTGCKLDEKKSEKKEKKSGLLKLLAGASTKKKSRSPPSVSPTHDPQVAVDALLQGAVGPEVSSLSIHGRAGSCPIESEMQGAMGMEPLHRKAGSLDLNFTSPSRQAPLSMAAIRPEPKLLPRERYRVVVSYPPQSEAEIELKEGDIVFVHKKREDGWYKGTLQRNGRTGLFPGSFVESF

SEQ ID NO: 12203 - protein, 181 aa, Homo Sapiens
MESRGPLATSRLLLLLLLLLLRHTRQGWALRPVLPTQSAHDPPAVHLSNGPGQEPIAVMTFDLTKITKTSSSFEVRTWDPEGVIFYGDTNPKDDWFMLGLRDGRPEIQLHNHWAQLTVGAAPETGLWAPDQQTPSHHEDCAWGAALPRFQPSVAAGSCPGWLPAPGFLAGQTGRDLSICPH

SEQ ID NO: 12204 - protein, 384 aa, Homo Sapiens
MESRGPLATSRLLLLLLLLLLRHTRQGWALRPVLPTQSAHDPPAVHLSNGPGQEPIAVMTFDLTKITKTSSSFEVRTWDPEGVIFYGDTNPKDDWFMLGLRDGRPEIQLHNHWAQLTVGAGPRLDDGRWHQVEVKMEGDSVLLEVDGEEVLRLRQVSGPLTSKRHPIMRIALGGLLFPASNLRLPAEISASAPTSLRSCDVESNPGIFLPPGTQAEFNLRDIPQPHAEPWAFSLDLGLKQAAGSGHLLALGTPENPSWLSLHLQDQKVVLSSGSGPGLDLPLVLGLPLQLKLSMSRVVLSQGSKMKALALPPLGLAPLLNLWAKPQGRLFLGALPGEDSSTSFCLNGLWAQGQRLDVDQALNRSHEIWTHSCPQSPGNGTDASH

SEQ ID NO: 12205 - protein, 402 aa, Homo Sapiens
MESRGPLATSRLLLLLLLLLLRHTRQGWALRPVLPTQSAHDPPAVHLSNGPGQEPIAVMTFDLTKITKTSSSFEVRTWDPEGVIFYGDTNPKDDWFMLGLRDGRPEIQLHNHWAQLTVGAGPRLDDGRWHQVEVKMEGDSVLLEVDGEEVLRLRQVSGPLTSKRHPIMRIALGGLLFPASNLRLPLVPALDGCLRRDSWLDKQAEISASAPTSLRSCDVESNPGIFLPPGTQAEFNLRDIPQPHAEPWAFSLDLGLKQAAGSGHLLALGTPENPSWLSLHLQDQKVVLSSGSGPGLDLPLVLGLPLQLKLSMSRVVLSQGSKMKALALPPLGLAPLLNLWAKPQGRLFLGALPGEDSSTSFCLNGLWAQGQRLDVDQALNRSHEIWTHSCPQSPGNGTDASH

SEQ ID NO: 12206 - protein, 293 aa, Homo Sapiens
MESRGPLATSRLLLLLLLLLLRHTRQGWALRPVLPTQSAHDPPAVHLSNGPGQEPIAVMTFDLTKITKTSSSFEVRTWDPEGVIFYGDTNPKDDWFMLGLRDGRPEIQLHNHWAQLTVGAGPRLDDGRWHQVEVKMEGDSVLLEVDGEEVLRLRQVSGPLTSKRHPIMRIALGGLLFPASNLRLPLVPALDGCLRRDSWLDKQAEISASAPTSLRSCDVESNPGIFLPPGTQAEFNLRDIPQPHAEPWAFSLDLGLKQAAGSGHLLALGTPENPSWLSLHLQDQEKTLPPLFA

SEQ ID NO: 12207 - protein, 287 aa, Homo Sapiens
MESRGPLATSRLLLLLLLLLLRHTRQGWALRPVLPTQSAHDPPAVHLSNGPGQEPIAVMTFDLTKITKTSSSFEVRTWDPEGVIFYGDTNPKDDWFMLGLRDGRPEIQLHNHWAQLTVGAGPRLDDGRWHQVEVKMEGDSVLLEVDGEEVLRLRQVSGPLTSKRHPIMRIALGGLLFPASNLRLPLVPALDGCLRRDSWLDKQAEISASAPTSLRSCDVESNPGIFLPPGTQAEFNLRGEDSSTSFCLNGLWAQGQRLDVDQALNRSHEIWTHSCPQSPGNGTDASH

SEQ ID NO: 12208 - protein, 57 aa, Homo Sapiens
MESRGPLATSRLLLLLLLLLLRHTRQGWALRPVLPTQVQERDRALSSCSLPFSPLAL

SEQ ID NO: 12209 - protein, 82 aa, Homo Sapiens
MTFDLTKITKTSSSFEVRTWDPEGVIFYGDTNPKDDWFMLGLRDGRPEIQLHNHWAQLTVGAGPRLDDGRWHQEKTLPPLFA

SEQ ID NO: 12210 - protein, 181 aa, Homo Sapiens
MTFDLTKITKTSSSFEVRTWDPEGVIFYGDTNPKDDWFMLGLRDGRPEIQLHNHWAQLTVGAGPRLDDGRWHQLVPALDGCLRRDSWLDKQAEISASAPTSLRSCDVESNPGIFLPPGTQAEFNLRDIPQPHAEPWAFSLDLGLKQAAGSGHLLALGTPENPSWLSLHLQDQEKTLPPLFA

SEQ ID NO: 12211 - protein, 290 aa, Homo Sapiens
MTFDLTKITKTSSSFEVRTWDPEGVIFYGDTNPKDDWFMLGLRDGRPEIQLHNHWAQLTVGAGPRLDDGRWHQLVPALDGCLRRDSWLDKQAEISASAPTSLRSCDVESNPGIFLPPGTQAEFNLRDIPQPHAEPWAFSLDLGLKQAAGSGHLLALGTPENPSWLSLHLQDQKVVLSSGSGPGLDLPLVLGLPLQLKLSMSRVVLSQGSKMKALALPPLGLAPLLNLWAKPQGRLFLGALPGEDSSTSFCLNGLWAQGQRLDVDQALNRSHEIWTHSCPQSPGNGTDASH

SEQ ID NO: 12212 - protein, 175 aa, Homo Sapiens
MTFDLTKITKTSSSFEVRTWDPEGVIFYGDTNPKDDWFMLGLRDGRPEIQLHNHWAQLTVGAGPRLDDGRWHQLVPALDGCLRRDSWLDKQAEISASAPTSLRSCDVESNPGIFLPPGTQAEFNLRGEDSSTSFCLNGLWAQGQRLDVDQALNRSHEIWTHSCPQSPGNGTDASH

SEQ ID NO: 12213 - protein, 93 aa, Homo Sapiens
MTFDLTKITKTSSSFEVRTWDPEGVIFYGDTNPKDDWFMLGLRDGRPEIQLHNHWAQLTVGAGPRLDDGRWHQVEVKMEGDSVLLEVDGEEVL

SEQ ID NO: 12214 - protein, 235 aa, Homo Sapiens
MTFDLTKITKTSSSFEVRTWDPEGVIFYGDTNPKDDWFMLGLRDGRPEIQLHNHWAQLTVGAGPRLDDGRWHQVEVKMEGDSVLLEVDGEEVLRLRQVSGPLTSKRHPIMRIALGGLLFPASNLRLPLVPALDGCLRRDSWLDKQAEISASAPTSLRSCDVESNPGIFLPPGTQAEFNLRDIPQPHAEPWAFSLDLGLKQAAGSGHLLALGTPENPSWLSLHLQDQEKTLPPLFA

SEQ ID NO: 12215 - protein, 344 aa, Homo Sapiens
MTFDLTKITKTSSSFEVRTWDPEGVIFYGDTNPKDDWFMLGLRDGRPEIQLHNHWAQLTVGAGPRLDDGRWHQVEVKMEGDSVLLEVDGEEVLRLRQVSGPLTSKRHPIMRIALGGLLFPASNLRLPLVPALDGCLRRDSWLDKQAEISASAPTSLRSCDVESNPGIFLPPGTQAEFNLRDIPQPHAEPWAFSLDLGLKQAAGSGHLLALGTPENPSWLSLHLQDQKVVLSSGSGPGLDLPLVLGLPLQLKLSMSRVVLSQGSKMKALALPPLGLAPLLNLWAKPQGRLFLGALPGEDSSTSFCLNGLWAQGQRLDVDQALNRSHEIWTHSCPQSPGNGTDASH

SEQ ID NO: 12216 - protein, 344 aa, Homo Sapiens; identical to SEQ ID NO: 12215

SEQ ID NO: 12217 - protein, 229 aa, Homo Sapiens
MTFDLTKITKTSSSFEVRTWDPEGVIFYGDTNPKDDWFMLGLRDGRPEIQLHNHWAQLTVGAGPRLDDGRWHQVEVKMEGDSVLLEVDGEEVLRLRQVSGPLTSKRHPIMRIALGGLLFPASNLRLPLVPALDGCLRRDSWLDKQAEISASAPTSLRSCDVESNPGIFLPPGTQAEFNLRGEDSSTSFCLNGLWAQGQRLDVDQALNRSHEIWTHSCPQSPGNGTDASH

SEQ ID NO: 12218 - protein, 113 aa, Homo Sapiens
WALRPVLPTQSAHDPPAVHLSNGPGQEPIAVMTFDLTKITKTSSSFEVRTWDPEGVIFYGDTNPKDDWFMLGLRDGRPEIQLHNHWAQLTVGAGPRLDDGRWHQEKTLPPLFA

SEQ ID NO: 12219 - protein, 212 aa, Homo Sapiens
WALRPVLPTQSAHDPPAVHLSNGPGQEPIAVMTFDLTKITKTSSSFEVRTWDPEGVIFYGDTNPKDDWFMLGLRDGRPEIQLHNHWAQLTVGAGPRLDDGRWHQLVPALDGCLRRDSWLDKQAEISASAPTSLRSCDVESNPGIFLPPGTQAEFNLRDIPQPHAEPWAFSLDLGLKQAAGSGHLLALGTPENPSWLSLHLQDQEKTLPPLFA

SEQ ID NO: 12220 - protein, 206 aa, Homo Sapiens
WALRPVLPTQSAHDPPAVHLSNGPGQEPIAVMTFDLTKITKTSSSFEVRTWDPEGVIFYGDTNPKDDWFMLGLRDGRPEIQLHNHWAQLTVGAGPRLDDGRWHQLVPALDGCLRRDSWLDKQAEISASAPTSLRSCDVESNPGIFLPPGTQAEFNLRGEDSSTSFCLNGLWAQGQRLDVDQALNRSHEIWTHSCPQSPGNGTDASH

SEQ ID NO: 12221 - protein, 260 aa, Homo Sapiens
WALRPVLPTQSAHDPPAVHLSNGPGQEPIAVMTFDLTKITKTSSSFEVRTWDPEGVIFYGDTNPKDDWFMLGLRDGRPEIQLHNHWAQLTVGAGPRLDDGRWHQVEVKMEGDSVLLEVDGEEVLRLRQVSGPLTSKRHPIMRIALGGLLFPASNLRLPLVPALDGCLRRDSWLDKQAEISASAPTSLRSCDVESNPGIFLPPGTQAEFNLRGEDSSTSFCLNGLWAQGQRLDVDQALNRSHEIWTHSCPQSPGNGTDASH

SEQ ID NO: 12222 - protein, 495 aa, Homo Sapiens
MQWSPTPGASACLGWASSLACSTAPTLLGRAGRGPLMAAKWFKEFPLNLKTVSERAKPGGGGGKLRKNSEAGGAGPGPGKGRKNSAAELGSGRAGVGPKDSRLSRDSLQGLIQAAAGKGRKNSRATEEEPHRGATKSSGCSTYINRLIKVDTQEKNGKSNYPSSSSSSSSSSSSASSSPSSLGPELDKGKIIKQQETVIILEDYADPYDAKRTKGQRDAERVGENDGYMEPYDAQQMITEIRRRGSKDPLVKALQLLDSPCEPADGGLKSETLAKRRSSKDLLGKPPQLYDTPYEPAEGGPRAEGKARPPDSRLPENDERPAAEYEQPWEWKKEQIVRALSVQFEGAERPSFREETVRQHHRQKSWTQKILKPALSDHSEGEKVDPGLPLEKQPWYHGAISRAEAESRLQPCKEAGYLVRNSESGNSRYSIALKTSQGCVHIIVAQTKDNKYTLNQTSAVFDSIPEVVHYYSNEKLPFKGAEHMTLLYPVHSKLH

SEQ ID NO: 12223 - protein, 132 aa, Homo Sapiens
  misc_feature (1)..(1): Xaa can be any naturally occurring amino acid
XEGKARPPDSRLPENDERPAAEYEQPWEWKKEQIVRALSVQFEGAERPSFREETVRQHHRQKSWTQKILKPALSDHSEGEKVDPGLPLEKQPWYHGAISRAEAESRLQPCKEAGYLVRNSESGNSRYSIALK

SEQ ID NO: 12224 - protein, 41 aa, Homo Sapiens
  misc_feature (1)..(1): Xaa can be any naturally occurring amino acid
XSRAEAESRLQPCKEAGYLVRNSESGNSRYSIALKNHHLLS

SEQ ID NO: 12225 - protein, 462 aa, Homo Sapiens
MLLLARCLLLVLVSSLLVCSGLACGPGRGFGKRRHPKKLTPLAYKQFIPNVAEKTLGASGRYEGKISRNSERFKELTPNYNPDIIFKDEENTGADRLMTQRCKDKLNALAISVMNQWPGVKLRVTEGWDEDGHHSEESLHYEGRAVDITTSDRDRSKYGMLARLAVEAGFDWVYYESKAHIHCSVKAENSVAAKSGGCFPGSATVHLEQGGTKLVKDLSPGDRVLAADDQGRLLYSDFLTFLDRDDGAKKVFYVIETREPRERLLLTAAHLLFVAPHNDSATGEPEASSGSGPPSGGALGPRALFASRVRPGQRVYVVAERDGDRRLLPAAVHSVTLSEEAAGAYAPLTAQGTILINRVLASCYAVIEEHSWAHRAFAPFRLAHALLAALAPARTDRGGDSGGGDRGGGGGRVALTAPGAADAPGAGATAGIHWYSQLLYQIGTWLLDSEALHPLGMAVKSS

SEQ ID NO: 12226 - protein, 126 aa, Homo Sapiens
MLSLFPSPGPGSSRCKDKLNALAISVMNQWPGVKLRVTEGWDEDGHHSEESLHYEGRAVDITTSDRDRSKYGMLARLAVEAGFDWVYYESKAHIHCSVKAGGQQVPGWCLQSRRKCDGFCSFDSSV

SEQ ID NO: 12227 - protein, 169 aa, Homo Sapiens
MLSLFPSPGPGSSRCKDKLNALAISVMNQWPGVKLRVTEGWDEDGHHSEESLHYEGRAVDITTSDRDRSKYGMLARLAVEAGFDWVYYESKAHIHCSVKAGKERKPLLRDTRYRASRGCSPAPPGRGADFSFRVDGAKSLCKMYAWWLLPASLMTKCISIPVKTCITMY

SEQ ID NO: 12228 - protein, 123 aa, Homo Sapiens
MLSLFPSPGPGSSRCKDKLNALAISVMNQWPGVKLRVTEGWDEDGHHSEESLHYEGRAVDITTSDRDRSKYGMLARLAVEAGFDWVYYESKAHIHCSVKAVQSDFKSVESEPEAPGTAAPLAV

SEQ ID NO: 12229 - protein, 262 aa, Homo Sapiens
KFPLRMKDNDLLVSELYRDPAEDGVTALSVYLTPKTSDSGNWIEIAYGTSSGGVRVIVQHPETVGSGPQLFQTFTVHRSPVTKIMLSEKHLISVCADNNHVRTWSVTRFRGMISTQPGSTPLASFKILALESADGHGGCSAGNDIGGLTEQELMEQLEHCELAPPAPSAPSWGCLPSPSPRISLTSLHSASSNTSLSGHRGSPSPPQAEARRRGGGSFVERCQELVRSGPDLRRPPTPAPWPSSGLGTPLTPPKMKLNETSF

SEQ ID NO: 12230 - protein, 141 aa, Homo Sapiens
MAAAATAAEGVPSRGPPGEVIHLNVGGKRFSTSRQTLTWIPDSFFSSLLSGRISTLKDETGAIFIDRDPTVFAPILNFLRTKELDPRGVHGSSLLHEAQFYGLTPLVLLLQFVACSFERSWIDLLVETSSSMVTCRHQCSQ

SEQ ID NO: 12231 - protein, 707 aa, Homo Sapiens
MAAAATAAEGVPSRGPPGEVIHLNVGGKRFSTSRQTLTWIPDSFFSSLLSGRISTLKDETGAIFIDRDPTVFAPILNFLRTKELDPRGVHGSSLLHEAQFYGLTPLVRRLQLREELDRSSCGNVLFNGYLPPPVFPVKRRNRHSLVGPQQLGGRPAPVRRSNTMPPNLGNAGLLGRMLDEKTPPSPSGQPEEPGMVRLVCGHHNWIAVAYTQFLVCYRLKEASGWQLVFSSPRLDWPIERLALTARVHGGALGEHDKMVAAATGSEILLWALQAEGGGSEIGVFHLGVPVEALFFVGNQLIATSHTGRIGVWNAVTKHWQVQEVQPITSYDAAGSFLLLGCNNGSIYYVDVQKFPLRMKDNDLLVSELYRDPAEDGVTALSVYLTPKTSDSGNWIEIAYGTSSGGVRVIVQHPETVGSGPQLFQTFTVHRSPVTKIMLSEKHLISVCADNNHVRTWSVTRFRGMISTQPGSTPLASFKILALESADGHGGCSAGNDIGPYGERDDQQVFIQKVVPSASQLFVRLSSTGQRVCSVRSVDGSPTTAFTVLECEGSRRLGSRPRRYLLTGQANGSLAMWDLTTAMDGLGQAPAGGLTEQELMEQLEHCELAPPAPSAPSWGCLPSPSPRISLTSLHSASSNTSLSGHRGSPSPPQAEARRRGGGSFVERCQELVRSGPDLRRPPTPAPWPSSGLGTPLTPPKMKLNETSF

SEQ ID NO: 12232 - protein, 682 aa, Homo Sapiens
MAAAATAAEGVPSRGPPGEVIHLNVGGKRFSTSRQTLTWIPDSFFSSLLSGRISTLKDETGAIFIDRDPTVFAPILNFLRTKELDPRGVHGSSLLHEAQFYGLTPLVRRLQLREELDRSSCGNVLFNGYLPPPVFPVKRRNRHSLVGPQQLGGRPAPVRRSNTMPPNLGNAGLLGRMLDEKTPPSPSGQPEEPGMVRLVCGHHNWIAVAYTQFLVCYRLKEASGWQLVFSSPRLDWPIERLALTARVHGGALGEHDKMVAAATGSEILLWALQAEGGGSEIGRIGVWNAVTKHWQVQEVQPITSYDAAGSFLLLGCNNGSIYYVDVQKFPLRMKDNDLLVSELYRDPAEDGVTALSVYLTPKTSDSGNWIEIAYGTSSGGVRVIVQHPETVGSGPQLFQTFTVHRSPVTKIMLSEKHLISVCADNNHVRTWSVTRFRGMISTQPGSTPLASFKILALESADGHGGCSAGNDIGPYGERDDQQVFIQKVVPSASQLFVRLSSTGQRVCSVRSVDGSPTTAFTVLECEGSRRLGSRPRRYLLTGQANGSLAMWDLTTAMDGLGQAPAGGLTEQELMEQLEHCELAPPAPSAPSWGCLPSPSPRISLTSLHSASSNTSLSGHRGSPSPPQAEARRRGGGSFVERCQELVRSGPDLRRPPTPAPWPSSGLGTPLTPPKMKLNETSF

SEQ ID NO: 12233 - protein, 102 aa, Homo Sapiens
MAAAATAAEGVPSRGPPGEVIHLNVGGKRFSTSRQTLTWIPDSFFSSLLSGRISTLKDETGAIFIDRDPTVFAPILNFLRTKELDPRLAWKKGRESLTVFSP

SEQ ID NO: 12234 - protein, 88 aa, Homo Sapiens
MAAAATAAEGVPSRGPPGEVIHLNVGGKRFSTSRQTLTWIPDSFFSSLLSGRISTLKDETGAIFIDRDPTVFAPILNFLRTKELDPRP

SEQ ID NO: 12235 - protein, 37 aa, Homo Sapiens
MRPEQSSSTGTLQSSPPSSTSCAPKSWIPAFSVHPHT

SEQ ID NO: 12236 - protein, 131 aa, Homo Sapiens
MRPEQSSSTGTLQSSPPSSTSCAPKSWIPVRRLQLREELDRSSCGNVLFNGYLPPPVFPVKRRNRHSLVGPQQLGGRPAPVRRSNTMPPNLGNAGLLGRMLDEKTPPSPSGQPEEPGMVRLVCGHHNWIAV

SEQ ID NO: 12237 - protein, 277 aa, Homo Sapiens
RSPVTKIMLSEKHLISVCADNNHVRTWSVTRFRGMISTQPGSTPLASFKILALESADGHGGCSAGNDIGPYGERDDQQVFIQKVVPSASQLFVRLSSTGQRVCSVRSVDGSPTTAFTVLECEGSRRLGSRPRRYLLTGQANGSLAMWDLTTAMDGLGQAPGGLTEQELMEQLEHCELAPPAPSAPSWGCLPSPSPRISLTSLHSASSNTSLSGHRGSPSPPQAEARRRGGGSFVERCQELVRSGPDLRRPPTPAPWPSSGLGTPLTPPKMKLNETSF

SEQ ID NO: 12238 - protein, 610 aa, Homo Sapiens
  misc_feature (1)..(1): Xaa can be any naturally occurring amino acid
XAAEGVPSRGPPGEVIHLNVGGKRFSTSRQTLTWIPDSFFSSLLSGRISTLKDETGAIFIDRDPTVFAPILNFLRTKELDPRGVHGSSLLHEAQFYGLTPLVRRLQLREELDRSSCGNVLFNGYLPPPVFPVKRRNRHSLVGPQQLGGRPAPVRRSNTMPPNLGNAGLLGRMLDEKTPPSPSGQPEEPGMVRLVCGHHNWIAVAYTQFLVCYRLKEASGWQLVFSSPRLDWPIERLALTARVHGGALGEHDKMVAAATGSEILLWALQAEGGGSEIGVFHLGVPVEALFFVGNQLIATSHTGRIGVWNAVTKHWQVQEVQPITSYDAAGSFLLLGCNNGSIYYVDVQKFPLRMKDNDLLVSELYRDPAEDGVTALSVYLTPKTSDSGNWIEIAYGTSSGGVRVIVQHPETVGSGPQLFQTFTVHRSPVTKIMLSEKHLISVCADNNHVRTWSVTRFRGMISTQPGSTPLASFKILALESADGHGGCSAGNDIAGGLTEQELMEQLEHCELAPPAPSAPSWGCLPSPSPRISLTSLHSASSNTSLSGHRGSPSPPQAEARRRGGGSFVERCQELVRSGPDLRRPPTPAPWPSSGLGTPLTPPKMKLNETSF

SEQ ID NO: 12239 - protein, 175 aa, Homo Sapiens
  misc_feature (1)..(1): Xaa can be any naturally occurring amino acid
XDSGNWIEIAYGTSSGGVRVIVQHPETVGSGPQLFQTFTVHRSPVTKIMLSEKHLISAGGLTEQELMEQLEHCELAPPAPSAPSWGCLPSPSPRISLTSLHSASSNTSLSGHRGSPSPPQAEARRRGGGSFVERCQELVRSGPDLRRPPTPAPWPSSGLGTPLTPPKMKLNETSF

SEQ ID NO: 12240 - protein, 250 aa, Homo Sapiens
  misc_feature (1)..(1): Xaa can be any naturally occurring amino acid
XELYRDPAEDGVTALSVYLTPKTSDSGNWIEIAYGTSSGGVRVIVQHPETVGSGPQLFQTFTVHRSPVTKIMLSEKHLISVCADNNHVRTWSVTRFRGMISTQPGSTPLASFKILALESADGHGGCSAGNDIAGGLTEQELMEQLEHCELAPPAPSAPSWGCLPSPSPRISLTSLHSASSNTSLSGHRGSPSPPQAEARRRGGGSFVERCQELVRSGPDLRRPPTPAPWPSSGLGTPLTPPKMKLNETSF

SEQ ID NO: 12241 - protein, 129 aa, Homo Sapiens
  misc_feature (1)..(1): Xaa can be any naturally occurring amino acid
XGSGPQLFQTFTVHRSPVTKIMLSEKHLISVCADNNHVRTWSVTRFRGMISTQPGSTPLASFKILALESADGHGGCSAGNDIGPYGERDDQQVFIQKVVPSASQLFVRLSSTGQRWPDGARADGTAGTL

SEQ ID NO: 12242 - protein, 299 aa, Homo Sapiens
  misc_feature (1)..(1): Xaa can be any naturally occurring amino acid
XGSIYYVDVQKFPLRMKDNDLLVSELYRDPAEDGVTALSVYLTPKTICADNNHVRTWSVTRFRGMISTQPGSTPLASFKILALESADGHGGCSAGNDIGPYGERDDQQVFIQKVVPSASQLFVRLSSTGQRVCSVRSVDGSPTTAFTVLECEGSRRLGSRPRRYLLTGQANGSLAMWDLTTAMDGLGQAPAGGLTEQELMEQLEHCELAPPAPSAPSWGCLPSPSPRISLTSLHSASSNTSLSGHRGSPSPPQAEARRRGGGSFVERCQELVRSGPDLRRPPTPAPWPSSGLGTPLTPP

SEQ ID NO: 12243 - protein, 164 aa, Homo Sapiens
  misc_feature (1)..(1): Xaa can be any naturally occurring amino acid
XQMGMAAAVLAMTLAPTVSGTTSKCSSRRWCPVPASSSCVSHLLGSAGGLTEQELMEQLEHCELAPPAPSAPSWGCLPSPSPRISLTSLHSASSNTSLSGHRGSPSPPQAEARRRGGGSFVERCQELVRSGPDLRRPPTPAPWPSSGLGTPLTPPKMKLNETSF

SEQ ID NO: 12244 - protein, 143 aa, Homo Sapiens
  misc_feature (1)..(1): Xaa can be any naturally occurring amino acid
XTSKCSSRRWCPVPASSSCVSHLLGSGGLTEQELMEQLEHCELAPPAPSAPSWGCLPSPSPRISLTSLHSASSNTSLSGHRGSPSPPQAEARRRGGGSFVERCQELVRSGPDLRRPPTPAPWPSSGLGTPLTPPKMKLNETSF

SEQ ID NO: 12245 - protein, 523 aa, Homo Sapiens
MVAPGLVLGLVLPLILWADRSAGIGFRFASYINNDMVLQKEPAGAVIWGFGTPGATVTVTLRQGQETIMKKVTSVKAHSDTWMVVLDPMKPGGPFEVMAQQTLEKINFTLRVHDVLFGDVWLCSGQSNMQMTVLQIFNATRELSNTAAYQSVRILSVSPIQAEQELEDLVAVDLQWSKPTSENLGHGYFKYMSAVCWLFGRHLYDTLQYPIGLIASSWGGTPIEAWSSGRSLKACGVPKQGSIPYDSVTGPSKHSVLWNAMIHPLCNMTLKGVVWYQGESNINYNTDLYNCTFPALIEDWRETFHRGSQGQTERFFPFGLVQLSSDLSKKSSDDGFPQIRWHQTADFGYVPNPKMPNTFMAVAMDLCDRDSPFGSIHPRDKQTVAYRLHLGARALAYGEKNLTFEGPLPEKIELLAHKGLLNLTYYQQIQVQKKDNKIFEISCCSDHRCKWLPASMNTVSTQSLTLAIDSCHGTVVALRYAWTTWPCEYKQCPLYHPSSALPAPPFIAFITDQGPGHQSNVAK

SEQ ID NO: 12246 - protein, 488 aa, Homo Sapiens
MVLQKEPAGAVIWGFGTPGATVTVTLRQGQETIMKKVTSVKAHSDTWMVVLDPMKPGGPFEVMAQQTLEKINFTLRVHDVLFGDVWLCSGQSNMQMTVLQIFNATRELSNTAAYQSVRILSVSPIQAEQELEDLVAVDLQWSKPTSENLGHGYFKYMSAVCWLFGRHLYDTLQYPIGLIASSWGGTPIEAWSSGRSLKACGVPKQGSIPYDSVTGPSKHSVLWNAMIHPLCNMTLKGVVWYQGESNINYNTDLYNCTFPALIEDWRETFHRGSQGQTERFFPFGLVQLSSDLSKKSSDDGFPQIRWHQTADFGYVPNPKMPNTFMAVAMDLCDRDSPFGSIHPRDKQTVAYRLHLGARALAYGEKNLTFEGPLPEKIELLAHKGLLNLTYYQQIQVQKKDNKIFEISCCSDHRCKWLPASMNTVSTQSLTLAIDSCHGTVVALRYAWTTWPCEYKQCPLYHPSSALPAPPFIAFITDQGPGHQSNVAK

SEQ ID NO: 12247 - protein, 488 aa, Homo Sapiens; identical to SEQ ID NO: 12246

SEQ ID NO: 12248 - protein, 133 aa, Homo Sapiens
GIFRRILHVLYTDCIRQCSGPLYVDRMVLLVMGNVINWSLAAYGLIMRPNDFASYLLAIGICNLLLYFAFYIIMKKTPAESREHNRDCILLDFFDDHDIWHFLSSIAMFGSFLVLLTLDDDLDTVQRDKIYVF

SEQ ID NO: 12249 - protein, 170 aa, Homo Sapiens
MDDFVLRTGEQFSFNTTAAQPQYFKYEFPEGVDSVIVKVTSNKAFPCSVISIQDVLCPVYDLDNNVAFIGMYQTMTKKAAITVQRKDFPSNSFYVVVVVKTEDQACGGSLPFYPFAEDEPVDQGHRQKTLSVLVSQAVTSEAYVSGMLFCLGIFLSFYLLTVLLACWENW

SEQ ID NO: 12250 - protein, 110 aa, Homo Sapiens
MFALGLPFLVLLVASVESHLGVLGPKNVSQKDAEFERTYVDEVNSELVNIYTFNHTVTRNRTEGVRVSVNVLNKQKGAPLLFVVRQKEAVVSFQVPLILRGMFQRKYLYQ

SEQ ID NO: 12251 - protein, 855 aa, Homo Sapiens
MFALGLPFLVLLVASVESHLGVLGPKNVSQKDAEFERTYVDEVNSELVNIYTFNHTVTRNRTEGVRVSVNVLNKQKGAPLLFVVRQKEAVVSFQVPLILRGMFQRKYLYQKVERTLCQPPTKNESEIQFFYVDVSTLSPVNTTYQLRVSRMDDFVLRTGEQFSFNTTAAQPQYFKYEFPEGVDSVIVKVTSNKAFPCSVISIQDVLCPVYDLDNNVAFIGMYQTMTKKAAITVQRKDFPSNSFYVVVVVKTEDQACGGSLPFYPFAEDEPVDQGHRQKTLSVLVSQAVTSEAYVSGMLFCLGIFLSFYLLTVLLACWENWRQKKKTLLVAIDRACPESGHPRVLADSFPGSSPYEGYNYGSFENVSGSTDGLVDSAGTGDLSYGYQGHDQFKRRLPSGQMRQLCIAMGRSFEPVGTRPRVDSMSSVEEDDYDTLTDIDSDKNVIRTKQYLYVADLARKDKRVLRKKYQIYFWNIATIAVFYALPVVQLVITYQTVVNVTGNQDICYYNFLCAHPLGNLSAFNNILSNLGYILLGLLFLLIILQREINHNRALLRNDLCALECGIPKHFGLFYAMGTALMMEGLLSACYHVCPNYTNFQFDTSFMYMIAGLCMLKLYQKRHPDINASAYSAYACLAIVIFFSVLGVVFGKGNTAFWIVFSIIHIIATLLLSTQLYYMGRWKLDSGIFRRILHVLYTDCIRQCSGPLYVDRMVLLVMGNVINWSLAAYGLIMRPNDFASYLLAIGICNLLLYFAFYIIMKLRSGERIKLIPLLCIVCTSVVWGFALFFFFQGLSTWQKTPAESREHNRDCILLDFFDDHDIWHFLSSIAMFGSFLVSGPPGRAGWVREGSSCLLLCG

SEQ ID NO: 12252 - protein, 832 aa, Homo Sapiens
MFALGLPFLVLLVASVESHLGVLGPKNVSQKDAEFERTYVDEVNSELVNIYTFNHTVTRNRTEGVRVSVNVLNKQKGAPLLFVVRQKEAVVSFQVPLILRGMFQRKYLYQKVERTLCQPPTKNESEIQFFYVDVSTLSPVNTTYQLRVSRMDDFVLRTGEQFSFNTTAAQPQYFKYEFPEGVDSVIVKVTSNKAFPCSVISIQDVLCPVYDLDNNVAFIGMYQTMTKKAAITVQRKDFPSNSFYVVVVVKTEDQACGGSLPFYPFAEDEPVDQGHRQKTLSVLVSQAVTSEAYVSGMLFCLGIFLSFYLLTVLLACWENWRQKKKTLLVAIDRACPESGHPRVLADSFPGSSPYEGYNYGSFENVSGSTDGLVDSAGTGDLSYGYQGRSFEPVGTRPRVDSMSSVEEDDYDTLTDIDSDKNVIRTKQYLYVADLARKDKRVLRKKYQIYFWNIATIAVFYALPVVQLVITYQTVVNVTGNQDICYYNFLCAHPLGNLSAFNNILSNLGYILLGLLFLLIILQREINHNRALLRNDLCALECGIPKHFGLFYAMGTALMMEGLLSACYHVCPNYTNFQFDTSFMYMIAGLCMLKLYQKRHPDINASAYSAYACLAIVIFFSVLGVVFGKGNTAFWIVFSIIHIIATLLLSTQLYYMGRWKLDSGIFRRILHVLYTDCIRQCSGPLYVDRMVLLVMGNVINWSLAAYGLIMRPNDFASYLLAIGICNLLLYFAFYIIMKLRSGERIKLIPLLCIVCTSVVWGFALFFFFQGLSTWQKTPAESREHNRDCILLDFFDDHDIWHFLSSIAMFGSFLVLLTLDDDLDTVQRDKIYVF

SEQ ID NO: 12253 - protein, 829 aa, Homo Sapiens
MFALGLPFLVLLVASVESHLGVLGPKNVSQKDAEFERTYVDEVNSELVNIYTFNHTVTRNRTEGVRVSVNVLNKQKGAPLLFVVRQKEAVVSFQVPLILRGMFQRKYLYQKVERTLCQPPTKNESEIQFFYVDVSTLSPVNTTYQLRVSRMDDFVLRTGEQFSFNTTAAQPQYFKYEFPEGVDSVIVKVTSNKAFPCSVISIQDVLCPVYDLDNNVAFIGMYQTMTKKAAITVQRKDFPSNSFYVVVVVKTEDQACGGSLPFYPFAEDEPVDQGHRQKTLSVLVSQAVTSEAYVSGMLFCLGIFLSFYLLTVLLACWENWRQKKKTLLVAIDRACPESASLLGHPRVLADSFPGSSPYEGYNYGSFENVSGSTDGLVDSAGTGDLSYGYQGTRPRVDSMSSVEEDDYDTLTDIDSDKNVIRTKQYLYVADLARKDKRVLRKKYQIYFWNIATIAVFYALPVVQLVITYQTVVNVTGNQDICYYNFLCAHPLGNLSAFNNILSNLGYILLGLLFLLIILQREINHNRALLRNDLCALECGIPKHFGLFYAMGTALMMEGLLSACYHVCPNYTNFQFDTSFMYMIAGLCMLKLYQKRHPDINASAYSAYACLAIVIFFSVLGVVFGKGNTAFWIVFSIIHIIATLLLSTQLYYMGRWKLDSGIFRRILHVLYTDCIRQCSGPLYVDRMVLLVMGNVINWSLAAYGLIMRPNDFASYLLAIGICNLLLYFAFYIIMKLRSGERIKLIPLLCIVCTSVVWGFALFFFFQGLSTWQKTPAESREHNRDCILLDFFDDHDIWHFLSSIAMFGSFLVLLTLDDDLDTVQRDKIYVF

SEQ ID NO: 12254 - protein, 832 aa, Homo Sapiens; identical to SEQ ID NO: 12252

SEQ ID NO: 12255 - protein, 855 aa, Homo Sapiens; identical to SEQ ID NO: 12251

SEQ ID NO: 12256 - protein, 98 aa, Homo Sapiens
MFQRKYLYQKVERTLCQPPTKNESEIQFFYVDVSTLSPVNTTYQLRVSRMDDFVLRTGEQFSFNTTAAQPQYFKYEFPEGVDSVIVKVTSNKAFPCSV

SEQ ID NO: 12257 - protein, 124 aa, Homo Sapiens
MRPNDFASYLLAIGICNLLLYFAFYIIMKLRSGERIKLIPLLCIVCTSVVWGFALFFFFQGLSTWQKTPAESREHNRDCILLDFFDDHDIWHFLSSIAMFGSFLVLLTLDDDLDTVQRDKIYVF

SEQ ID NO: 12258 - protein, 602 aa, Homo Sapiens
MLLPLLLSSLLGGSQAMDGRFWIRVQESVMVPEGLCISVPCSFSYPRQDWTGSTPAYGYWFKAVTETTKGAPVATNHQSREVEMSTRGRFQLTGDPAKGNCSLVIRDAQMQDESQYFFRVERGSYVRYNFMNDGFFLKVTALTQKPDVYIPETLEPGQPVTVICVFNWAFEECPPPSFSWTGAALSSQGTKPTTSHFSVLSFTPRPQDHNTDLTCHVDFSRKGVSAQRTVRLRVAYAPRDLVISISRDNTPALEPQPQGNVPYLEAQKGQFLRLLCAADSQPPATLSWVLQNRVLSSSHPWGPRPLGLELPGVKAGDSGRYTCRAENRLGSQQRALDLSVQYPPENLRVMVSQANRTVLENLGNGTSLPVLEGQSLCLVCVTHSSPPARLSWTQRGQVLSPSQPSDPGVLELPRVQVEHEGEFTCHARHPLGSQHVSLSLSVHYKKGLISTAFSNGAFLGIGITALLFLCLALIIMKILPKRRTQTETPRPRFSRHSTILDYINVVPTAGPLAQKRNQKATPNSPRTPLPPGAPSPESKKNQKKQYQLPSFPEPKSSTQAPESQESQEELHYATLNFPGVRPRPEARMPKGTQADYAEVKFQ

SEQ ID NO: 12259 - protein, 697 aa, Homo Sapiens
MLLPLLLSSLLGGSQAMDGRFWIRVQESVMVPEGLCISVPCSFSYPRQDWTGSTPAYGYWFKAVTETTKGAPVATNHQSREVEMSTRGRFQLTGDPAKGNCSLVIRDAQMQDESQYFFRVERGSYVRYNFMNDGFFLKVTALTQKPDVYIPETLEPGQPVTVICVFNWAFEECPPPSFSWTGAALSSQGTKPTTSHFSVLSFTPRPQDHNTDLTCHVDFSRKGVSAQRTVRLRVAYAPRDLVISISRDNTPALEPQPQGNVPYLEAQKGQFLRLLCAADSQPPATLSWVLQNRVLSSSHPWGPRPLGLELPGVKAGDSGRYTCRAENRLGSQQRALDLSVQYPPENLRVMVSQANRTVLENLGNGTSLPVLEGQSLCLVCVTHSSPPARLSWTQRGQVLSPSQPSDPGVLELPRVQVEHEGEFTCHARHPLGSQHVSLSLSVHYSPKLLGPSCSWEAEGLHCSCSSQASPAPSLRWWLGEELLEGNSSQDSFEVTPSSAGPWANSSLSLHGGLSSGLRLRCEAWNVHGAQSGSILQLPDKKGLISTAFSNGAFLGIGITALLFLCLALIIMKILPKRRTQTETPRPRFSRHSTILDYINVVPTAGPLAQKRNQKATPNSPRTPLPPGAPSPESKKNQKKQYQLPSFPEPKSSTQAPESQESQEELHYATLNFPGVRPRPEARMPKGTQADYAEVKFQ

SEQ ID NO: 12260 - protein, 512 aa, Homo Sapiens
MLLPLLLSSLLGGSQAMDGRFWIRVQESVMVPEGLCISVPCSFSYPRQDWTGSTPAYGYWFKAVTETTKGAPVATNHQSREVEMSTRGRFQLTGDPAKGNCSLVIRDAQMQDESQYFFRVERGSYVRYNFMNDGFFLKVTALTQKPDVYIPETLEPGQPVTVICVFNWAFEECPPPSFSWTGAALSSQGTKPTTSHFSVLSFTPRPQDHNTDLTCHVDFSRKGVSAQRTVRLRVAYAPRDLVISISRDNTPDPPENLRVMVSQANRTVLENLGNGTSLPVLEGQSLCLVCVTHSSPPARLSWTQRGQVLSPSQPSDPGVLELPRVQVEHEGEFTCHARHPLGSQHVSLSLSVHYKKGLISTAFSNGAFLGIGITALLFLCLALIIMKILPKRRTQTETPRPRFSRHSTILDYINVVPTAGPLAQKRNQKATPNSPRTPLPPGAPSPESKKNQKKQYQLPSFPEPKSSTQAPESQESQEELHYATLNFPGVRPRPEARMPKGTQADYAEVKFQ

SEQ ID NO: 12261 - protein, 554 aa, Homo Sapiens
MLLPLLLSSLLGGSQAMDGRFWIRVQESVMVPEGLCISVPCSFSYPRQDWTGSTPAYGYWFKAVTETTKGAPVATNHQSREVEMSTRGRFQLTGDPAKGNCSLVIRDAQMQDESQYFFRVERGSYVRYNFMNDGFFLKVTGTKPTTSHFSVLSFTPRPQDHNTDLTCHVDFSRKGVSAQRTVRLRVAYAPRDLVISISRDNTPALEPQPQGNVPYLEAQKGQFLRLLCAADSQPPATLSWVLQNRVLSSSHPWGPRPLGLELPGVKAGDSGRYTCRAENRLGSQQRALDLSVQYPPENLRVMVSQANRTVLENLGNGTSLPVLEGQSLCLVCVTHSSPPARLSWTQRGQVLSPSQPSDPGVLELPRVQVEHEGEFTCHARHPLGSQHVSLSLSVHYKKGLISTAFSNGAFLGIGITALLFLCLALIIMKILPKRRTQTETPRPRFSRHSTILDYINVVPTAGPLAQKRNQKATPNSPRTPLPPGAPSPESKKNQKKQYQLPSFPEPKSSTQAPESQESQEELHYATLNFPGVRPRPEARMPKGTQADYAEVKFQ

SEQ ID NO: 12262 - protein, 639 aa, Homo Sapiens
MLLPLLLSSLLGGSQAMDGRFWIRVQESVMVPEGLCISVPCSFSYPRQDWTGSTPAYGYWFKAVTETTKGAPVATNHQSREVEMSTRGRFQLTGDPAKGNCSLVIRDAQMQDESQYFFRVERGSYVRYNFMNDGFFLKVTVLSFTPRPQDHNTDLTCHVDFSRKGVSAQRTVRLRVAYAPRDLVISISRDNTPALEPQPQGNVPYLEAQKGQFLRLLCAADSQPPATLSWVLQNRVLSSSHPWGPRPLGLELPGVKAGDSGRYTCRAENRLGSQQRALDLSVQYPPENLRVMVSQANRTVLENLGNGTSLPVLEGQSLCLVCVTHSSPPARLSWTQRGQVLSPSQPSDPGVLELPRVQVEHEGEFTCHARHPLGSQHVSLSLSVHYSPKLLGPSCSWEAEGLHCSCSSQASPAPSLRWWLGEELLEGNSSQDSFEVTPSSAGPWANSSLSLHGGLSSGLRLRCEAWNVHGAQSGSILQLPDKKGLISTAFSNGAFLGIGITALLFLCLALIIMKILPKRRTQTETPRPRFSRHSTILDYINVVPTAGPLAQKRNQKATPNSPRTPLPPGAPSPESKKNQKKQYQLPSFPEPKSSTQAPESQESQEELHYATLNFPGVRPRPEARMPKGTQADYAEVKFQ

SEQ ID NO: 12263 - protein, 544 aa, Homo Sapiens
MLLPLLLSSLLGGSQAMDGRFWIRVQESVMVPEGLCISVPCSFSYPRQDWTGSTPAYGYWFKAVTETTKGAPVATNHQSREVEMSTRGRFQLTGDPAKGNCSLVIRDAQMQDESQYFFRVERGSYVRYNFMNDGFFLKVTVLSFTPRPQDHNTDLTCHVDFSRKGVSAQRTVRLRVAYAPRDLVISISRDNTPALEPQPQGNVPYLEAQKGQFLRLLCAADSQPPATLSWVLQNRVLSSSHPWGPRPLGLELPGVKAGDSGRYTCRAENRLGSQQRALDLSVQYPPENLRVMVSQANRTVLENLGNGTSLPVLEGQSLCLVCVTHSSPPARLSWTQRGQVLSPSQPSDPGVLELPRVQVEHEGEFTCHARHPLGSQHVSLSLSVHYKKGLISTAFSNGAFLGIGITALLFLCLALIIMKILPKRRTQTETPRPRFSRHSTILDYINVVPTAGPLAQKRNQKATPNSPRTPLPPGAPSPESKKNQKKQYQLPSFPEPKSSTQAPESQESQEELHYATLNFPGVRPRPEARMPKGTQADYAEVKFQ

SEQ ID NO: 12264 - protein, 454 aa, Homo Sapiens
MLLPLLLSSLLGGSQAMDGRFWIRVQESVMVPEGLCISVPCSFSYPRQDWTGSTPAYGYWFKAVTETTKGAPVATNHQSREVEMSTRGRFQLTGDPAKGNCSLVIRDAQMQDESQYFFRVERGSYVRYNFMNDGFFLKVTVLSFTPRPQDHNTDLTCHVDFSRKGVSAQRTVRLRVAYAPRDLVISISRDNTPDPPENLRVMVSQANRTVLENLGNGTSLPVLEGQSLCLVCVTHSSPPARLSWTQRGQVLSPSQPSDPGVLELPRVQVEHEGEFTCHARHPLGSQHVSLSLSVHYKKGLISTAFSNGAFLGIGITALLFLCLALIIMKILPKRRTQTETPRPRFSRHSTILDYINVVPTAGPLAQKRNQKATPNSPRTPLPPGAPSPESKKNQKKQYQLPSFPEPKSSTQAPESQESQEELHYATLNFPGVRPRPEARMPKGTQADYAEVKFQ

SEQ ID NO: 12265 - protein, 155 aa, Homo Sapiens
MLLPLLLSSLLGVLSFTPRPQDHNTDLTCHVDFSRKGVSAQRTVRLRVAYAPRDLVISISRDNTPALEPQPQGNVPYLEAQKGQFLRLLCAADSQPPATLSWVLQNRVLSSSHPWGPRPLGLELPGVKAGDSGRYTCRAENRLGSQQRALDLSVQ

SEQ ID NO: 12266 - protein, 186 aa, Homo Sapiens
MRRCYCHCCCPRCWADWTGSTPAYGYWFKAVTETTKGAPVATNHQSREVEMSTRGRFQLTGDPAKGNCSLVIRDAQMQDESQYFFRVERGSYVRYNFMNDGFFLKVTALTQKPDVYIPETLEPGQPVTVICVFNWAFEECPPPSFSWTGAALSSQGTKPTTSHFSVLSFTPRPQDHNTDLTCHVDF

SEQ ID NO: 12267 - protein, 401 aa, Homo Sapiens
MQGAQEASASEMLPLLLPLLWAASYYGYGYWFLEGADVPVATNDPDEEVQEETRGRFHLLWDPRRKNCSLSIRDARRRDNAAYFFRLKSKWMKYGYTSSKLSVRVMALTHRPNISIPGTLESGHPSNLTCSVPWVCEQGTPPIFSWMSAAPTSLGPRTTQSSVLTITPRPQDHSTNLTCQVTFPGAGVTMERTIQLNVSSFKILQNTSSLPVLEGQALRLLCDADGNPPAHLSWFQGFPALNATPISNTGVLELPQVGSAEEGDFTCRAQHPLGSLQISLSLFVHWKPEGRAGGVLGAVWGASITTLVFLCVCFIFRVKTRRKKAAQPVQNTDDVNPVMVSGSRGHQHQFQTGIVSDHPAEAGPISEDEQELHYAVLHFHKVQPQEPKVTDTEYSEIKIHK

SEQ ID NO: 12268 - protein, 437 aa, Homo Sapiens
MQGAQEASASEMLPLLLPLLWAGALAQERRFQLEGPESLTVQEGLCVLVPCRLPTTLPASYYGYGYWFLEGADVPVATNDPDEEVQEETRGRFHLLWDPRRKNCSLSIRDARRRDNAAYFFRLKSKWMKYGYTSSKLSVRVMALTHRPNISIPGTLESGHPSNLTCSVPWVCEQGTPPIFSWMSAAPTSLGPRTTQSSVLTITPRPQDHSTNLTCQVTFPGAGVTMERTIQLNVSSFKILQNTSSLPVLEGQALRLLCDADGNPPAHLSWFQGFPALNATPISNTGVLELPQVGSAEEGDFTCRAQHPLGSLQISLSLFVHWKPEGRAGGVLGAVWGASITTLVFLCVCFIFRVKTRRKKAAQPVQNTDDVNPVMVSGSRGHQHQFQTGIVSDHPAEAGPISEDEQELHYAVLHFHKVQPQEPKVTDTEYSEIKIHK

SEQ ID NO: 12269 - protein, 389 aa, Homo Sapiens
MQGAQEASASEMLPLLLPLLWAGALAQERRFQLEGPESLTVQEGLCVLVPCRLPTTLPASYYGYGYWFLEGADVPVATNDPDEEVQEETRGRFHLLWDPRRKNCSLSIRDARRRDNAAYFFRLKSKWMKYGYTSSKLSVRVMALTHRPNISIPGTLESGHPSNLTCSVPWVCEQGTPPIFSWMSAAPTSLGPRTTQSSVLTITPRPQDHSTNLTCQVTFPGAGVTMERTIQLNVSWMLRRPPLSTPDAPQKVAISIFQGNSAAFKILQNTSSLPVLEGQALRLLCDADGNPPAHLSWFQGFPALNATPISNTGVLELPQVGSAEEGDFTCRAQHPLGSLQISLSLFVHWKPEGRAGGVLGAVWGASITTLVFLCVCFIFRVISTSSRQA

SEQ ID NO: 12270 - protein, 353 aa, Homo Sapiens
MQGAQEASASEMLPLLLPLLWAGALAQERRFQLEGPESLTVQEGLCVLVPCRLPTTLPASYYGYGYWFLEGADVPVATNDPDEEVQEETRGRFHLLWDPRRKNCSLSIRDARRRDNAAYFFRLKSKWMKYGYTSSKLSVRVMALTHRPNISIPGTLESGHPSNLTCSVPWVCEQGTPPIFSWMSAAPTSLGPRTTQSSVLTITPRPQDHSTNLTCQVTFPGAGVTMERTIQLNVSYAPQKVAISIFQGNSAAFKILQNTSSLPVLEGQALRLLCDADGNPPAHLSWFQGFPALNATPISNTGVLELPQVGSAEEGDFTCRAQHPLGSLQISLSLFVHWSSAPVPDRHSFRPPC

SEQ ID NO: 12271 - protein, 453 aa, Homo Sapiens
MQGAQEASASEMLPLLLPLLWAGALAQERRFQLEGPESLTVQEGLCVLVPCRLPTTLPASYYGYGYWFLEGADVPVATNDPDEEVQEETRGRFHLLWDPRRKNCSLSIRDARRRDNAAYFFRLKSKWMKYGYTSSKLSVRVMALTHRPNISIPGTLESGHPSNLTCSVPWVCEQGTPPIFSWMSAAPTSLGPRTTQSSVLTITPRPQDHSTNLTCQVTFPGAGVTMERTIQLNVSYAPQKVAISIFQGNSAAFKILQNTSSLPVLEGQALRLLCDADGNPPAHLSWFQGFPALNATPISNTGVLELPQVGSAEEGDFTCRAQHPLGSLQISLSLFVHWKPEGRAGGVLGAVWGASITTLVFLCVCFIFRVKTRRKKAAQPVQNTDDVNPVMVSGSRGHQHQFQTGIVSDHPAEAGPISEDEQELHYAVLHFHKVQPQEPKVTDTEYSEIKIHK

SEQ ID NO: 12272 - protein, 342 aa, Homo Sapiens
MQGAQEASASEMLPLLLPLLWAGALAQERRFQLEGPESLTVQEGLCVLVPCRLPTTLPASYYGYGYWFLEGADVPVATNDPDEEVQEETRGRFHLLWDPRRKNCSLSIRDARRRDNAAYFFRLKSKWMKYGYTSSKLSVRVMGTLESGHPSNLTCSVPWVCEQGTPPIFSWMSAAPTSLGPRTTQSSVLTITPRPQDHSTNLTCQVTFPGAGVTMERTIQLNVSYAPQKVAISIFQGNSAAFKILQNTSSLPVLEGQALRLLCDADGNPPAHLSWFQGFPALNATPISNTGVLELPQVGSAEEGDFTCRAQHPLGSLQISLSLFVHWSSAPVPDRHSFRPPC

SEQ ID NO: 12273 - protein, 467 aa, Homo Sapiens
MLLLLLLPLLWGRERVEGQKSNRKDYSLTMQSSVTVQEGMCVHVRCSFSYPVDSQTDSDPVHGYWFRAGNDISWKAPVATNNPAWAVQEETRDRFHLLGDPQTKNCTLSIRDARMSDAGRYFFRMEKGNIKWNYKYDQLSVNVTALTHRPNILIPGTLESGCFQNLTCSVPWACEQGTPPMISWMGTSVSPLHPSTTRSSVLTLIPQPQHHGTSLTCQVTLPGAGVTTNRTIQLNVSYPPQNLTVTVFQGEGTASTALGNSSSLSVLEGQSLRLVCAVDSNPPARLSWTWRSLTLYPSQPSNPLVLELQVHLGDEGEFTCRAQNSLGSQHVSLNLSLQQEYTGKMRPVSGVLLGAVGGAGATALVFLSFCVIFIVVRSCRKKSARPAADVGDIGMKDANTIRGSASQGNLTESWADDNPRHHGLAAHSSGEEREIQYAPLSFHKGEPQDLSGQEATNNEYSEIKIPK

SEQ ID NO: 12274 - protein, 185 aa, Homo Sapiens
MLLLLLLPLLWGRERVEGQKSNRKDYSLTMQSSVTVQEGMCVHVRCSFSYPVDSQTDSDPVHGYWFRAGNDISWKAPVATNNPAWAVQEETRDRFHLLGDPQTKNCTLSIRDARMSDAGRYFFRMEKGNIKWNYKYDQLSVNVTAPAPRHQPHLSGDLAWGRRDHEQDHPTQCVLSPCLSVPDPP

SEQ ID NO: 12275 - protein, 374 aa, Homo Sapiens
MLLLLLLPLLWGRERVEGQKSNRKDYSLTMQSSVTVQEGMCVHVRCSFSYPVDSQTDSDPVHGYWFRAGNDISWKAPVATNNPAWAVQEETRDRFHLLGDPQTKNCTLSIRDARMSDAGRYFFRMEKGNIKWNYKYDQLSVNVTDPPQNLTVTVFQGEGTASTALGNSSSLSVLEGQSLRLVCAVDSNPPARLSWTWRSLTLYPSQPSNPLVLELQVHLGDEGEFTCRAQNSLGSQHVSLNLSLQQEYTGKMRPVSGVLLGAVGGAGATALVFLSFCVIFIVVRSCRKKSARPAADVGDIGMKDANTIRGSASQGNLTESWADDNPRHHGLAAHSSGEEREIQYAPLSFHKGEPQDLSGQEATNNEYSEIKIPK

SEQ ID NO: 12276 - protein, 145 aa, Homo Sapiens
MLLLLLLPLLWGRERVEGQKSNRKDYSLTMQSSVTVQEGMCVHVRCSFSYPVDSQTDSDPVHGYWFRAGNDISWKAPVATNNPAWAVQEETRDRFHLLGDPQTKNCTLSIRDARMSDAGRYFFRMEKGNIKWNYKYDQLSVNVTE

SEQ ID NO: 12277 - protein, 145 aa, Homo Sapiens
MLLLLLLPLLWGRERVEGQKSNRKDYSLTMQSSVTVQEGMCVHVRCSFSYPVDSQTDSDPVHGYWFRAGNDISWKAPVATNNPAWAVQEETRDRFHLLGDPQTKNCTLSIRDARMSDAGRYFFRMEKGNIKWNYKYDQLSVNVTG

SEQ ID NO: 12278 - protein, 13 aa, Homo Sapiens
MLPLLQLGGKDNS

SEQ ID NO: 12279 - protein, 103 aa, Homo Sapiens
MLPLLQLGKSSLAAQAFVKGLIQGAIYAGIVIALLFLCLLPLIVKHIRKKQAKKAAAIRAKKSSKVRASQELEMSLKPEEPGKPVVATFSESRILEKQDKRAS

SEQ ID NO: 12280 - protein, 84 aa, Homo Sapiens
MLPLLQLVPAKLLNSSCSLEKTLQCSCSFHGIPTPSVQWWMGGVPVGVDGMDGSLQVTSTMLGPWANSTISLTEEPEMGMRLLC

SEQ ID NO: 12281 - protein, 140 aa, Homo Sapiens
MLPLLQLVPAKLLNSSCSLEKTLQCSCSFHGIPTPSVQWWMGGVPVGVDGMDGSLQVTSTMLGPWANSTISLTEEPEMGMRLLCEGKNQNGTHALSILLMSRKSSLAAQAFVKGLIQGAIYAGIVIALLFLCLLPLIVKH

SEQ ID NO: 12282 - protein, 197 aa, Homo Sapiens
MLPLLQLVPAKLLNSSCSLEKTLQCSCSFHGIPTPSVQWWMGGVPVGVDGMDGSLQVTSTMLGPWANSTISLTEEPEMGMRLLCEGKNQNGTHALSILLMSRKSSLAAQAFVKGLIQGAIYAGIVIALLFLCLLPLIVKHIRKKQAKKAAAIRAKKSSKVRASQELEMSLKPEEPGKPVVATFSESRILEKQDKRAS

SEQ ID NO: 12283 - protein, 197 aa, Homo Sapiens; identical to SEQ ID NO: 12282

SEQ ID NO: 12284 - protein, 134 aa, Homo Sapiens
MGAMCLLHASLSEYVLLFGTALGSRGHSGRYWAEISDTIISGTFHQWREGTTKSEVFYPGETVVHGPGEATAVEWGPNTWMVEYGRGVIPSTLAFALADTVFSTQDFLTLFYTLRSYARGLRLELTTYLFGQDP

SEQ ID NO: 12285 - protein, 106 aa, Homo Sapiens
MQWAVGRRWAWAALLLAVAAVLTQVVWLWLGTQSFVFQREEIAQLARQYAGLDHELAFSRLIVELRRLHPGHVLPDEELQWVFVNAGGWMGAMCLLHASLSEALLG

SEQ ID NO: 12286 - protein, 192 aa, Homo Sapiens
MQWAVGRRWAWAALLLAVAAVLTQVVWLWLGTQSFVFQREEIAQLARQYAGLDHELAFSRLIVELRRLHPGHVLPDEELQWVFVNAGGWMGAMCLLHASLSEYVLLFGTALGSRGHSGETVVHGPGEATAVEWGPNTWMVEYGRGVIPSTLAFALADTVFSTQDFLTLFYTLRSYARGLRLELTTYLFGQDP

SEQ ID NO: 12287 - protein, 223 aa, Homo Sapiens
MQWAVGRRWAWAALLLAVAAVLTQVVWLWLGTQSFVFQREEIAQLARQYAGLDHELAFSRLIVELRRLHPGHVLPDEELQWVFVNAGGWMGAMCLLHASLSEYVLLFGTALGSRGHSGRYWAEISDTIISGTFHQWREGTTKSEVFYPGETVVHGPGEATAVEWGPNTWMVEYGRGVIPSTLAFALADTVFSTQDFLTLFYTLRSYARGLRLELTTYLFGQDP

SEQ ID NO: 12288 - protein, 83 aa, Homo Sapiens
LKSALAKFKEGAEMESSKEDKMDNAQDLLSFGGLQVVINGLNSTEPLVKEYAAFVLGAAFSSNPKVQVEAIEGGALQKLLVIL

SEQ ID NO: 12289 - protein, 95 aa, Homo Sapiens
MAPQSLPSSRMAPLGMLLGLLMAACFTFCLSHQNLKEFALTNPEKSSTKETERKETKAEEELDAEVLEVFHPTHEWQALQPGQAVPAGSHVRLNL

SEQ ID NO: 12290 - protein, 123 aa, Homo Sapiens
MAPQSLPSSRMAPLGMLLGLLMAACFTFCLSHQNLKEFALTNPEKSSTKETERKETKAEEELDAEVLEVFHPTHEWQALQPGQAVPAGSHVRLNLQTGEREAKLQYEDKFRNNLKGKRLDINT

SEQ ID NO: 12291 - protein, 163 aa, Homo Sapiens
MAPQSLPSSRMAPLGMLLGLLMAACFTFCLSHQNLKEFALTNPEKSSTKETERKETKAEEELDAEVLEVFHPTHEWQALQPGQAVPAGSHVRLNLQTGEREAKLQYEDKFRNNLKGKRLDINTNTYTSQDLKSALAKFKEGAEMESSKEDKARQAEVKRLFRP

SEQ ID NO: 12292 - protein, 461 aa, Homo Sapiens
MAPQSLPSSRMAPLGMLLGLLMAACFTFCLSHQNLKEFALTNPEKSSTKETERKETKAEEELDAEVLEVFHPTHEWQALQPGQAVPAGSHVRLNLQTGEREAKLQYEDKFRNNLKGKRLDINTNTYTSQDLKSALAKFKEGAEMESSKEDKARQAEVKRLFRPIEELKKDFDELNVVIETDMQIMVRLINKFNSSSSSLEEKIAALFDLEYYVHQMDNAQDLLSFGGLQVVINGLNSTEPLVKEYAAFVLGAAFSSNPKVQVEAIEGGALQKLLVILATEQPLTAKKKVLFALCSLLRHFPYAQRQFLKLGGLQVLRTLVQEKGTEVLAVRVVTLLYDLVTEKMFAEEEAELTQEMSPEKLQQYRQVHLLPGLWEQGWCEITAHLLALPEHDAREKVLQTLGVLLTTCRDRYRQDPQLGRTLASLQAEYQVLASLELQDGEDEGYFQELLGSVNSLLKELR

SEQ ID NO: 12293 - protein, 461 aa, Homo Sapiens; identical to SEQ ID NO: 12292

SEQ ID NO: 12294 - protein, 468 aa, Homo Sapiens
MNSGTSLTMAPQSLPSSRMAPLGMLLGLLMAACFTFCLSHQNLEFALTNPEKSSTKETERKETKAEEELDAEVLEVFHPTHEWQALQPGQAVPAGSHVRLNLQTGEREAKLQYEDKFRNNLKGKRLDINTNTYTSQDLKSALAKFKEGAEMESSKEDKARQAEVKRLFRPIEELKKDFDELNVVIETDMQIMVRLINKFNSSSSSLEEKIAALFDLEYYVHQMDNAQDLLSFGGLQVVINGLNSTEPLVKEYAAFVLGAAFSSNPKVQVEAIEGGALQKLLVILATEQPLTAKKKVLFALCSLLRHFPYAQRQFLKLGGLQVLRTLVQEKGTEVLAVRVVTLLYDLVTEKMFAEEEAELTQEMSPEKLQQYRQVHLLPGLWEQGWCEITAHLLALPEHDAREKVLQTLGVLLTTCRDRYRQDPQLGRTLASLQAEYQVLASLELQDGEDEGYFQELLGSVNSLLKELR

SEQ ID NO: 12295 - protein, 123 aa, Homo Sapiens
MQEMSDMSLTMAPQSLPSSRMAPLGMLLGLLMAACFTFCLSHQNLKEFALTNPEKSSTKETERKETKAEEELDAEVLEVFHPTHEWQALQPGQAVPAGSHVRLNLQTGEREAKLQYEDKFRNN

SEQ ID NO: 12296 - protein, 125 aa, Homo Sapiens
MQEMSDMSLTMAPQSLPSSRMAPLGMLLGLLMAACFTFCLSHQNLKEFALTNPEKSSTKETERKETKAEEELDAEVLEVFHPTHEWQALQPGQAVPAGSHVRLNLQTGEREAKLQYEDKFRNNLK

SEQ ID NO: 12297 - protein, 182 aa, Homo Sapiens
GNELSDFQTNVDPAGDSVSYSIHSTARVVLTRGDVHSQVICEIAHITLQGDPLRGTANLSEAIRVPPTLEVTQQPMRAENQANVTCQVSNFYPRGLQLTWLENGNVSRTETASTLIENKDGTYNWMSWLLVNTCAHRDDVVLTCQVEHDGQQAVSKSYALEISAHQKEHGSDITHGAVTSHF

SEQ ID NO: 12298 - protein, 77 aa, Homo Sapiens
HRDDVKLTCQVEHDGQPAVSKSHDLKVSAHPKEQGSNTAPGPALASAAPLLIAFLLGPKVLLVVGVSVIYVYWKQKA

SEQ ID NO: 12299 - protein, 77 aa, Homo Sapiens; identical to SEQ ID NO: 12298

SEQ ID NO: 12300 - protein, 77 aa, Homo Sapiens; identical to SEQ ID NO: 12298

SEQ ID NO: 12301 - protein, 236 aa, Homo Sapiens
HTVSFTCESHGFSPRDITLKWFKNGNELSDFQTNVDPAGDSVSYSIHSTAKVVLTREDVHSQVICEVAHVTLQGDPLRGTANLSETIRVPPTLEVTQQPVRAENQVNVTCQVRKFYPQRLQLTWLENGNVSRTETASTLTENKDGTYNWMSWLLVNVSAHRDDVKLTCQVEHDGQPAVSKSHDLKVSAHPKEQGSNTAPGPALASAAPLLIAFLLGPKVLLVVGVSVIYVYWKQKA

SEQ ID NO: 12302 - protein, 398 aa, Homo Sapiens
MPVPASWPHLPSPFLLMTLLLGRLTGVAGEDELQVIQPEKSVSVAAGESATLRCAMTSLIPVGPIMWFRGAGAGRELIYNQKEGHFPRVTTVSELTKRNNLDFSISISNITPADAGTYYCVKFRKGSPDDVEFKSGAGTELSVRAKPSAPVVSGPAVRATPEHTVSFTCESHGFSPRDITLKWFKNGNELSDFQTNVDPAGDSVSYSIHSTARVVLTRGDVHSQVICEIAHITLQGDPLRGTANLSEAIRVPPTLEVTQQPMRAENQANVTCQVSNFYPRGLQLTWLENGNVSRTETASTLIENKDGTYNWMSWLLVNTCAHRDDVVLTCQVEHDGQQAVSKSYALEISAHQKEHGSDITHEAALAPTAPLLVALLLGPKLLLVVGVSAIYICWKQKA

SEQ ID NO: 12303 - protein, 181 aa, Homo Sapiens
MPVPASWPHLPSPFLLMTLLLGRLTGVAGEDELQVIQPEKSVSVAAGESATLRCAMTSLIPVGPIMWFRGAGAGRELIYNQKEGHFPRVTTVSELTKRNNLDFSISISNITPADAGTYYCVKFRKGSPDDVEFKSGAGTELSVREAALAPTAPLLVALLLGPKLLLVVGVSAIYICWKQKA

SEQ ID NO: 12304 - protein, 398 aa, Homo Sapiens
MPVPASWPHLPSPFLLMTLLLGRLTGVAGEEELQVIQPDKSISVAAGESATLHCTVTSLIPVGPIQWFRGAGPGRELIYNQKEGHFPRVTTVSDLTKRNNMDFSIRISNITPADAGTYYCVKFRKGSPDHVEFKSGAGTELSVRAKPSAPVVSGPAARATPQHTVSFTCESHGFSPRDITLKWFKNGNELSDFQTNVDPAGDSVSYSIHSTAKVVLTREDVHSQVICEVAHVTLQGDPLRGTANLSETIRVPPTLEVTQQPVRAENQVNVTCQVRKFYPQRLQLTWLENGNVSRTETASTLTENKDGTYNWMSWLLVNVSAHRDDVKLTCQVEHDGQPAVSKSHDLKVSAHPKEQGSNTAPGPALASAAPLLIAFLLGPKVLLVVGVSVIYVYWKQKA

SEQ ID NO: 12305 - protein, 398 aa, Homo Sapiens; identical to SEQ ID NO: 12304

SEQ ID NO: 12306 - protein, 156 aa, Homo Sapiens
MPVPASWPHPPCPFLLLTLLLGLTGVAGEDELQVIQPEKSVSVAAGESATLRCAMTSLIPVGPIMWFRGAGAGRELIYNQKEGHFPRVTTVSELTKRNNLDFSISISNITPADAGTYYCVKFRKGSPDDVEFKSGAGTELSVREAALAPTAPLLVA

SEQ ID NO: 12307 - protein, 180 aa, Homo Sapiens
MPVPASWPHPPCPFLLLTLLLGLTGVAGEDELQVIQPEKSVSVAAGESATLRCAMTSLIPVGPIMWFRGAGAGRELIYNQKEGHFPRVTTVSELTKRNNLDFSISISNITPADAGTYYCVKFRKGSPDDVEFKSGAGTELSVREAALAPTAPLLVALLLGPKLLLVVGVSAIYICWKQKA

SEQ ID NO: 12308 - protein, 58 aa, Homo Sapiens
RKGSPDHVEFKSGAGTELSVREAALAPTAPLLVALLLGPKLLLVVGVSAIYICWKQKA

SEQ ID NO: 12309 - protein, 131 aa, Homo Sapiens
  misc_feature (1)..(1): Xaa can be any naturally occurring amino acid
XPPTLEVTQQPVRAENQVNVTCQVRKFYPQRLQLTWLENGNVSRTETASTLTENKDGTYNWMSWLLVNVSAHRDDVKLTCQVEHDGQPAVSKSHDLKVSAHPKEQGSNTAPVSLEFYRRGNQDLGSNGGYC

SEQ ID NO: 12310 - protein, 198 aa, Homo Sapiens
MPIPASPLHPPLPSLLLYLLLELAGVTHVFHVQQTEMSQTVSTGESIILSCSVPNTLPNGPVLWFKGTGPNRKLIYNFKQGNFPRVKEIGDTTKPGNTDFSTRIREISLADAGTYYCVKFIKGRAIKEYQSGRGTQVFVTAEQNPRPPKNRPAGRAGSRAHHDAHTCLSALPERNSTNYFVQPCCCLRLLGLTGLLSK

SEQ ID NO: 12311 - protein, 197 aa, Homo Sapiens
MPIPASPLHPPLPSLLLYLLLELAGVTHVFHVQQTEMSQTVSTGESIILSCSVPNTLPNGPVLWFKGTGPNRKLIYNFKQGNFPRVKEIGDTTKPGNTDFSTRIREISLADAGTYYCVKFIKGRAIKEYQSGRGTQVFVTEQNPRPPKNRPAGRAGSRAHHDAHTCLSALPERNSTNYFVQPCCCLRLLGLTGLLSK

SEQ ID NO: 12312 - protein, 80 aa, Homo Sapiens
  misc_feature (1)..(1): Xaa can be any naturally occurring amino acid
XNGPVLWFKGTGPNRKLIYNFKQEQNPRPPKNRPAGRAGSRAHHDAHTCLSALPERNSTNYFVQPCCCLRLLGLTGLLSK

SEQ ID NO: 12313 - protein, 335 aa, Homo Sapiens
MDPKGLLSLTFVLFLSLAFGASYGTGGRMMNCPKILRQLGSKVLLPLTYERINKSMNKSIHIVVTMAKSLENSVENKIVSLDPSEAGPPRYLGDRYKFYLENLTLGIRESRKEDEGWYLMTLEKNVSVQRFCLQLRLYEQVSTPEIKVLNKTQENGTCTLILGCTVEKGDHVAYSWSEKAGTHPLNPANSSHLLSLTLGPQHADNIYICTVSNPISNNSQTFSPWPGCRTDPSETKPWAVYAGLLGGVIMILIMVVILQLRRRGKTNHYQTTVEKKSLTIYAQVQKPGPLQKKLDSFPAQDPCTTIYVAATEPVPESVQETNSITVYASVTLPES

SEQ ID NO: 12314 - protein, 357 aa, Homo Sapiens
MDPKGLLSLTFVLFLSLAFGASYGTGGRMMNCPKILRQLGSKVLLPLTYERINKSMNKSIHIVVTMAKSLENSVENKIVSLDPSEAGPPRYLGDRYKFYLENLTLGIRESRKEDEGWYLMTLEKNVSVQRFCLQLRLYEQVSTPEIKVLNKTQENGTCTLILGCTVEKGDHVAYSWSEKAGTHPLNPANSSHLLSLTLGPQHADNIYICTVSNPISNNSQTFSPWPGCRTDPSETKPWAVYAGLLGGVIMILIMVVILQLRRRATLTTTNQYWSQNVLTQDQERCPGCLPMVKRTITRQQWKKKALRSMPKSRNQVLFRRNLTPSQLRTLAPPYMLLPQSLSQSLSRKQIPSQSMLV

SEQ ID NO: 12315 - protein, 144 aa, Homo Sapiens
MDPKGLLSLTFVLFLSLAFGASYGTGGRMMNCPKILRQLGSKVLLPLTYERINKSMNKSIHIVVTMAKSLENSVENKIVSLDPSEAGPPRYLGDRYKFYLENLTLGIRESRKEDEGWYLMTLEKSLHFGYLYFVLGADHDNLQT

SEQ ID NO: 12316 - protein, 149 aa, Homo Sapiens
MAGSPTCLTLIYILWQLTEHLSKPKVTMGLQSNKNGTCVTNLTCCMEHGEEDVIYTWKALGQAANESHNGSILPISWRWGESDMTFICVARNPVSRNFSSPILARKLCEENNPKGRSSKYGLLHCGNTEKDGKSPLTAHDARHTKAICL

SEQ ID NO: 12317 - protein, 188 aa, Homo Sapiens
MAGSPTCLTLIYILWQLTEHLSKPKVTMGLQSNKNGTCVTNLTCCMEHGEEDVIYTWKALGQAANESHNGSILPISWRWGESDMTFICVARNPVSRNFSSPILARKLCEEYIEEKKRVDICRETPNICPHSGENTEYDTIPHTNRTILKEDPANTVYSTVEIPKKMENPHSLLTMPDTPRLFAYENVI

SEQ ID NO: 12318 - protein, 228 aa, Homo Sapiens
MAGSPTCLTLIYILWQLTEHLSKPKVTMGLQSNKNGTCVTNLTCCMEHGEEDVIYTWKALGQAANESHNGSILPISWRWGESDMTFICVARNPVSRNFSSPILARKLCEGAADDPDSSMVLLCLLLVPLLLSLFVLGLFLWFLKRERQEEYIEEKKRVDICRETPNICPHSGENTEYDTIPHTNRTILKEDPANTVYSTVEIPKKMENPHSLLTMPDTPRLFAYENVI

SEQ ID NO: 12319 - protein, 241 aa, Homo Sapiens
MAGSPTCLTLIYILWQLTEHLSKPKVTMGLQSNKNGTCVTNLTCCMEHGEEDVIYTWKALGQAANESHNGSILPISWRWGESDMTFICVARNPVSRNFSSPILARKLCEGDCLSPLHRRLCPGAADDPDSSMVLLCLLLVPLLLSLFVLGLFLWFLKRERQEEYIEEKKRVDICRETPNICPHSGENTEYDTIPHTNRTILKEDPANTVYSTVEIPKKMENPHSLLTMPDTPRLFAYENVI

SEQ ID NO: 12320 - protein, 335 aa, Homo Sapiens
MAGSPTCLTLIYILWQLTGSAASGPVKELVGSVGGAVTFPLKSKVKQVDSIVWTFNTTPLVTIQPEGGTIIVTQNRNRERVDFPDGGYSLKLSKLKKNDSGIYYVGIYSSSLQQPSTQEYVLHVYEHLSKPKVTMGLQSNKNGTCVTNLTCCMEHGEEDVIYTWKALGQAANESHNGSILPISWRWGESDMTFICVARNPVSRNFSSPILARKLCEGAADDPDSSMVLLCLLLVPLLLSLFVLGLFLWFLKRERQEEYIEEKKRVDICRETPNICPHSGENTEYDTIPHTNRTILKEDPANTVYSTVEIPKKMENPHSLLTMPDTPRLFAYENVI

SEQ ID NO: 12321 - protein, 296 aa, Homo Sapiens
MAGSPTCLTLIYILWQLTGSAASGPVKELVGSVGGAVTFPLKSKVKQVDSIVWTFNTTPLVTIQPEGGTIIVTQNRNRERVDFPDGGYSLKLSKLKKNDSGIYYVGIYSSSLQQPSTQEYVLHVYEHLSKPKVTMGLQSNKNGTCVTNLTCCMEHGEEDVIYTWKALGQAANESHNGSILPISWRWGESDMTFICVARNPVSRNFSSPILARKLCEGAADDPDSSMVLLCLLLVPLLLSLFVLGLFLWFLKRERQEENNPKGRSSKYGLLHCGNTEKDGKSPLTAHDARHTKAICL

SEQ ID NO: 12322 - protein, 165 aa, Homo Sapiens
MAGSPTCLTLIYILWQLTGSAASGPVKELVGSVGGAVTFPLKSKVKQVDSIVWTFNTTPLVTIQPEGGTIIVTQNRNRERVDFPDGGYSLKLSKLKKNDSGIYYVGIYSSSLQQPSTQEYVLHVYENNPKGRSSKYGLLHCGNTEKDGKSPLTAHDARHTKAICL

SEQ ID NO: 12323 - protein, 204 aa, Homo Sapiens
MAGSPTCLTLIYILWQLTGSAASGPVKELVGSVGGAVTFPLKSKVKQVDSIVWTFNTTPLVTIQPEGGTIIVTQNRNRERVDFPDGGYSLKLSKLKKNDSGIYYVGIYSSSLQQPSTQEYVLHVYEYIEEKKRVDICRETPNICPHSGENTEYDTIPHTNRTILKEDPANTVYSTVEIPKKMENPHSLLTMPDTPRLFAYENVI

SEQ ID NO: 12324 - protein, 236 aa, Homo Sapiens
  misc_feature (1)..(1): Xaa can be any naturally occurring amino acid
XAGSPTCLTLIYILWQLTGSAASGPVKELVGSVGGAVTFPLKSKVKQVDSIVWTFNTTPLVTIQPEGGTIIVTQNRNRERVDFPDGGYSLKLSKLKKNDSGIYYVGIYSSSLQQPSTQEYVLHVYEHLSKPKVTMGLQSNKNGTCVTNLTCCMEHGEEDVIYTWKALGQAANESHNGSILPISWRWGESDMTFICVARNPVSRNFSSPILARKLCEENNPKGRSSKYGLLHCGNTE

SEQ ID NO: 12325 - protein, 532 aa, Homo Sapiens
MAGPRPPGDSPAIKEDSTGLGPTHEPFSGQPNSTSGDVLLSRRGPGHAIRPPGRAMVLMQDKGSSQQWPGLGGEGGGTGPLSMLRAALLLISLPWGAQGTASTSLSTAGGHTVPPTGGRYLSIGDGSVMEFEFPEDSEGIIVISSQYPGQANRTAPGPMLRVTSLDTEVLTIKNVSAITWGGGGGFVVSIHSGLAGLAPLHIQLVDAHEAPPTLIEERRDFCIKVSPAEDTPATLSADLAHFSENPILYLLLPLIFVNKCSFGCKVELEVLKGLMQSPQPMLLGLLGQFLVMPLYAFLMAKVFMLPKALALGLIITCSSPGGGGSYLFSLLLGGDVTLAISMTFLSTVAATGFLPLSSAIYSRLLSIHETLHVPISKILGTLLFIAIPIAVGVLIKSKLPKFSQLLLQVVKPFSFVLLLGGLFLAYRMGVFILAGIRLPIVLVGITVPLVGLLVGYCLATCLKLPVAQRRTVSIEVGVQNSLLALAMLQLSLRRLQADYASQAPFIVALSGTSEMLALVIGHFIYSSLFPVP

SEQ ID NO: 12326 - protein, 448 aa, Homo Sapiens
MVLMQDKGSSQQWPGLGGEGGGTGPLSMLRAALLLISLPWGAQGTASTSLSTAGGHTVPPTGGRYLSIGDGSVMEFEFPEDSEGIIVISSQYPGQANRTAPGPMLRVTSLDTEVLTIKNLVDAHEAPPTLIEERRDFCIKVSPAEDTPATLSADLAHFSENPILYLLLPLIFVNKCSFGCKVELEVLKGLMQSPQPMLLGLLGQFLVMPLYAFLMAKVFMLPKALALGLIITCSSPGGGGSYLFSLLLGGDVTLAISMTFLSTVAATGFLPLSSAIYSRLLSIHETLHVPISKILGTLLFIAIPIAVGVLIKSKLPKFSQLLLQVVKPFSFVLLLGGLFLAYRMGVFILAGIRLPIVLVGITVPLVGLLVGYCLATCLKLPVAQRRTVSIEVGVQNSLLALAMLQLSLRRLQADYASQAPFIVALSGTSEMLALVIGHFIYSSLFPVP

SEQ ID NO: 12327 - protein, 218 aa, Homo Sapiens
MVLMQDKGSSQQWPGLGGEGGGTGPLSMLRAALLLISLPWGAQGTASTSLSTAGGHTVPPTGGRYLSIGDGSVMEFEFPEDSEGIIVISSQYPGQANRTAPGPMLRVTSLDTEVLTIKNVSAITWGGGGGFVVSIHSGLAGLAPLHIQLVDAHEAPPTLIEERRDFCIKVSPAEDTPATLSADLAHFSENPILYLLLPLIFVNKCSFGCKVELEVLKG

SEQ ID NO: 12328 - protein, 477 aa, Homo Sapiens
MVLMQDKGSSQQWPGLGGEGGGTGPLSMLRAALLLISLPWGAQGTASTSLSTAGGHTVPPTGGRYLSIGDGSVMEFEFPEDSEGIIVISSQYPGQANRTAPGPMLRVTSLDTEVLTIKNVSAITWGGGGGFVVSIHSGLAGLAPLHIQLVDAHEAPPTLIEERRDFCIKVSPAEDTPATLSADLAHFSENPILYLLLPLIFVNKCSFGCKVELEVLKGLMQSPQPMLLGLLGQFLVMPLYAFLMAKVFMLPKALALGLIITCSSPGGGGSYLFSLLLGGDVTLAISMTFLSTVAATGFLPLSSAIYSRLLSIHETLHVPISKILGTLLFIAIPIAVGVLIKSKLPKFSQLLLQVVKPFSFVLLLGGLFLAYRMGVFILAGIRLPIVLVGITVPLVGLLVGYCLATCLKLPVAQRRTVSIEVGVQNSLLALAMLQLSLRRLQADYASQAPFIVALSGTSEMLALVIGHFIYSSLFPVP

SEQ ID NO: 12329 - protein, 477 aa, Homo Sapiens; identical to SEQ ID NO: 12328

SEQ ID NO: 12330 - protein, 43 aa, Homo Sapiens
GAIMGIFFCLSGVGSLLGSSLVALLSLPGGWLHCPKDFAEEEL

SEQ ID NO: 12331 - protein, 209 aa, Homo Sapiens
MDLGRDATRRFFNWFYWSINLGAVLSLLVVAFIQQNISFLLGYSIPVGCVGLAFFIFLFATPVFITKPPMGSQVSSMLKLALQNCCPQLWQRHSARDRQCARVLADERSPQPGASPQEDIANFQVLVKILPVMVTLVPYWMVYFQMQSTYVLQGLHLHIPNIFPANPANISVALRAQGSSYTIPEAWLLLANVVVVLILVPLKDRLIDP

SEQ ID NO: 12332 - protein, 581 aa, Homo Sapiens
MPAPRAREQPRVPGERQPLLPRGARGPRRWRRAAGAAVLLVEMLERAAFFGVTANLVLYLNSTNFNWTGEQATRAALVFLGASYLLAPVGGWLADVYLGRYRAVALSLLLYLAASGLLPATAFPDGRSSFCGEMPASPLGPACPSAGCPRSSPSPYCAPVLYAGLLLLGLAASSVRSNLTSFGADQVMDLGRDATRRFFNWFYWSINLGAVLSLLVVAFIQQNISFLLGYSIPVGCVGLAFFIFLFATPVFITKPPMGSQVSSMLKLALQNCCPQLWQRHSARDRQCARVLADERSPQPGASPQEDIANFQVLVKILPVMVTLVPYWMVYFQMQSTYVLQGLHLHIPNIFPANPANISVALRAQGSSYTIPEAWLLLANVVVVLILVPLKDRLIDPLLLRCKLLPSALQKMALGMFFGFTSVIVAGVLEMERLHYIHHNETVSQQIGEVLYNAAPLSIWWQIPQYLLIGISEIFASIPGLEFAYSEAPRSMQGAIMGIFFCLSGVGSLLGSSLVALLSLPGGWLHCPKDFGNINNCRMDLYFFLLAGIQAVTALLFVWIAGRYERASQGPASHSRFSRDRG

SEQ ID NO: 12333 - protein, 456 aa, Homo Sapiens
MPAPRAREQPRVPGERQPLLPRGARGPRRWRRAAGAAVLLVEMLERAAFFGVTANLVLYLNSTNFNWTGEQATRAALVFLGASYLLAPVGGWLADVYLGRYRAVALSLLLYLAASGLLPATAFPDGRSSFCGEMPASPLGPACPSAGCPRSSPSPYCAPVLYAGLLLLGLAASSVRSNLTSFGADQVMDLGRDATRRFFNWFYWSINLGAVLSLLVVAFIQQNISFLLGYSIPVGCVGLAFFIFLFATPVFITKPPMGSQVSSMLKLALQNCCPQLWQRHSARDRQCARVLADERSPQPGASPQEDIANFQVLVKILPVMVTLVPYWMVYFQMQSTYVLQGLHLHIPNIFPANPANISVALRAQGSSYTESWRWSAYTTSTTTRPCPSRLGRSCTTRHHCPSGGRSLSTCSLGSVRSLPASQAWSLPTQRPRAPCRAPSWASSSACRGWAHCWAPA

SEQ ID NO: 12334 - protein, 149 aa, Homo Sapiens
MPASPLGPACPSAGCPRSSPSPYCAPVLYAGLLLLGLAASSVRSNLTSFGADQVMDLGRDATRRFFNWFYWSINLGAVLSLLVVAFIQQNISFLLGYSIPVGCVGLAFFIFLFATPVFITKPPMGSQVSSMLKLALQNCCPQLWQRHSA

SEQ ID NO: 12335 - protein, 247 aa, Homo Sapiens
  misc_feature (1)..(1): Xaa can be any naturally occurring amino acid
XPGASPQEDIANFQVLVKILPVMVTLVPYWMVYFQIPEAWLLLANVVVVLILVPLKDRLIDPLLLRCKLLPSALQKMALGMFFGFTSVIVAGVLEMERLHYIHHNETVSQQIGEVLYNAAPLSIWWQIPQYLLIGISEIFASIPGLEFAYSEAPRSMQGAIMGIFFCLSGVGSLLGSSLVALLSLPGGWLHCPKDFGNINNCRMDLYFFLLAGIQAVTALLFVWIAGRYERASQGPASHSRFSRDRG

SEQ ID NO: 12336 - protein, 353 aa, Homo Sapiens
MGIFPGIILIFLRVKFATAAVIHQKSTTVSHEMSGLNWKPFVYGGLASIVAEFGTFPVDLTKTRLQVQGQSIDARFKEIKYRGMFHALFRICKEEGVLALYSGIAPALLRQASYGTIKIGIYQSLKRLFVERLEDETLLINMICGVVSGVISSTIANPTDVLKIRMQAQGSLFQGSMIGSFIDIYQQEGTRGLWRCLCSKAVTGCVLWLMPVIPALWEANAGGSLEGVVPTAQRAAIVVGVELPVYDITKKHLILSGMMGDTILTHFVSSFTCGLAGALASNPVDVVRTRMMNQRAIVGHVDLYKGTVDGILKMWKHEGFFALYKGFWPNWLRLGPWNIIFFITYEQLKRLQI

SEQ ID NO: 12337 - protein, 353 aa, Homo Sapiens; identical to SEQ ID NO: 12336

SEQ ID NO: 12338 - protein, 322 aa, Homo Sapiens
MGIFPGIILIFLRVKFATAAVIHQKSTTVSHEMSGLNWKPFVYGGLASIVAEFGTFPVDLTKTRLQVQGQSIDARFKEIKYRGMFHALFRICKEEGVLALYSGIAPALLRQASYGTIKIGIYQSLKRLFVERLEDETLLINMICGVVSGVISSTIANPTDVLKIRMQAQGSLFQGSMIGSFIDIYQQEGTRGLWRGVVPTAQRAAIVVGVELPVYDITKKHLILSGMMGDTILTHFVSSFTCGLAGALASNPVDVVRTRMMNQRAIVGHVDLYKGTVDGILKMWKHEGFFALYKGFWPNWLRLGPWNIIFFITYEQLKRLQI

SEQ ID NO: 12339 - protein, 198 aa, Homo Sapiens
MGIFPGIILIFLRVKFATAAVIVSGHQKSTTVSHEMSGLNWKPFVYGGLASIVAEFGTFPVDLTKTRLQVQGQSIDARFKEIKYRGMFHALFRICKEEGVLALYSGIAPALLRQASYGTIKIGIYQSLKRLFVERLEDETLLINMICGVVSGVISSTIANPTDVLKIRMQAQGSLFQGSMIGSFIDIYQQEGTRGLWR

SEQ ID NO: 12340 - protein, 325 aa, Homo Sapiens
MGIFPGIILIFLRVKFATAAVIVSGHQKSTTVSHEMSGLNWKPFVYGGLASIVAEFGTFPVDLTKTRLQVQGQSIDARFKEIKYRGMFHALFRICKEEGVLALYSGIAPALLRQASYGTIKIGIYQSLKRLFVERLEDETLLINMICGVVSGVISSTIANPTDVLKIRMQAQGSLFQGSMIGSFIDIYQQEGTRGLWRGVVPTAQRAAIVVGVELPVYDITKKHLILSGMMGDTILTHFVSSFTCGLAGALASNPVDVVRTRMMNQRAIVGHVDLYKGTVDGILKMWKHEGFFALYKGFWPNWLRLGPWNIIFFITYEQLKRLQI

SEQ ID NO: 12341 - protein, 325 aa, Homo Sapiens; identical to SEQ ID NO: 12340

SEQ ID NO: 12342 - protein, 290 aa, Homo Sapiens
MSGLNWKPFVYGGLASIVAEFGTFPVDLTKTRLQVQGQSIDARFKEIKYRGMFHALFRICKEEGVLALYSGIAPALLRQASYGTIKIGIYQSLKRLFVERLEDETLLINMICGVVSGVISSTIANPTDVLKIRMQAQGSLFQGSMIGSFIDIYQQEGTRGLWRGVVPTAQRAAIVVGVELPVYDITKKHLILSGMMGDTILTHFVSSFTCGLAGALASNPVDVVRTRMMNQRAIVGHVDLYKGTVDGILKMWKHEGFFALYKGFWPNWLRLGPWNIIFFITYEQLKRLQI

SEQ ID NO: 12343 - protein, 75 aa, Homo Sapiens
MLCLCLYVPVIGEAQTEFQYFESKGLPAELKSIFKLSVFIPSQEFSTYRQWKQCPLCTKGDLQIQGRRQKEAQAL

SEQ ID NO: 12344 - protein, 469 aa, Homo Sapiens
MLCLCLYVPVIGEAQTEFQYFESKGLPAELKSIFKLSVFIPSQEFSTYRQWKQKIVQAGDKDLDGQLDFEEFVHYLQDHEKKLRLVFKSLDKKNDGRIDAQEIMQSLRDLGVKISEQQAEKILKSMDKNGTMTIDWNEWRDYHLLHPVENIPEIILYWKHSTIFDVGENLTVPDEFTVEERQTGMWWRHLVAGGGAGAVSRTCTAPLDRLKVLMQVHASRSNNMGIVGGFTQMIREGGARSLWRGNGINVLKIAPESAIKFMAYEQIKRLVGSDQETLRIHERLVAGSLAGAIAQSSIYPMEVLKTRMALRKTGQYSGMLDCARRILAREGVAAFYKGYVPNMLGIIPYAGIDLAVYETLKNAWLQHYAVNSADPGVFVLLACGTMSSTCGQLASYPLALVRTRMQAQASIEGAPEVTMSSLFKHILRTEGAFGLYRGLAPNFMKVIPAVSISYVVYENLKITLGVQSR

SEQ ID NO: 12345 - protein, 501 aa, Homo Sapiens
MLQMLWHFLASFFPRAGCHGSREGDDREVRGTPAPAWRDQMASFLGKQDGRAEATEKRPTILLVVGPAEQFPKKIVQAGDKDLDGQLDFEEFVHYLQDHEKKLRLVFKSLDKKNDGRIDAQEIMQSLRDLGVKISEQQAEKILKRIRTGHFWGPVTYMDKNGTMTIDWNEWRDYHLLHPVENIPEIILYWKHSTIFDVGENLTVPDEFTVEERQTGMWWRHLVAGGGAGAVSRTCTAPLDRLKVLMQVHASRSNNMGIVGGFTQMIREGGARSLWRGNGINVLKIAPESAIKFMAYEQIKRLVGSDQETLRIHERLVAGSLAGAIAQSSIYPMEVLKTRMALRKTGQYSGMLDCARRILAREGVAAFYKGYVPNMLGIIPYAGIDLAVYETLKNAWLQHYAVNSADPGVFVLLACGTMSSTCGQLASYPLALVRTRMQAQASIEGAPEVTMSSLFKHILRTEGAFGLYRGLAPNFMKVIPAVSISYVVYENLKITLGVQSR

SEQ ID NO: 12346 - protein, 489 aa, Homo Sapiens
MLQMLWHFLASFFPRAGCHGSREGDDREVRGTPAPAWRDQMASFLGKQDGRAEATEKRPTILLVVGPAEQFPKKIVQAGDKDLDGQLDFEEFVHYLQDHEKKLRLVFKSLDKKNDGRIDAQEIMQSLRDLGVKISEQQAEKILKSMDKNGTMTIDWNEWRDYHLLHPVENIPEIILYWKHSTIFDVGENLTVPDEFTVEERQTGMWWRHLVAGGGAGAVSRTCTAPLDRLKVLMQVHASRSNNMGIVGGFTQMIREGGARSLWRGNGINVLKIAPESAIKFMAYEQIKRLVGSDQETLRIHERLVAGSLAGAIAQSSIYPMEVLKTRMALRKTGQYSGMLDCARRILAREGVAAFYKGYVPNMLGIIPYAGIDLAVYETLKNAWLQHYAVNSADPGVFVLLACGTMSSTCGQLASYPLALVRTRMQAQASIEGAPEVTMSSLFKHILRTEGAFGLYRGLAPNFMKVIPAVSISYVVYENLKITLGVQSR

SEQ ID NO: 12347 - protein, 515 aa, Homo Sapiens
MVSSVLCRCVASPPPDAAATAASSSASSPASVGDPCGGAICGGPDHRLRLWRLFQTLDVNRDGGLCVNDLAVGLRRLGLHRTEGELQKIVQAGDKDLDGQLDFEEFVHYLQDHEKKLRLVFKSLDKKNDGRIDAQEIMQSLRDLGVKISEQQAEKILKRIRTGHFWGPVTYMDKNGTMTIDWNEWRDYHLLHPVENIPEIILYWKHSTIFDVGENLTVPDEFTVEERQTGMWWRHLVAGGGAGAVSRTCTAPLDRLKVLMQVHASRSNNMGIVGGFTQMIREGGARSLWRGNGINVLKIAPESAIKFMAYEQIKRLVGSDQETLRIHERLVAGSLAGAIAQSSIYPMEVLKTRMALRKTGQYSGMLDCARRILAREGVAAFYKGYVPNMLGIIPYAGIDLAVYETLKNAWLQHYAVNSADPGVFVLLACGTMSSTCGQLASYPLALVRTRMQAQASIEGAPEVTMSSLFKHILRTEGAFGLYRGLAPNFMKVIPAVSISYVVYENLKITLGVQSR

SEQ ID NO: 12348 - protein, 503 aa, Homo Sapiens
MVSSVLCRCVASPPPDAAATAASSSASSPASVGDPCGGAICGGPDHRLRLWRLFQTLDVNRDGGLCVNDLAVGLRRLGLHRTEGELQKIVQAGDKDLDGQLDFEEFVHYLQDHEKKLRLVFKSLDKKNDGRIDAQEIMQSLRDLGVKISEQQAEKILKSMDKNGTMTIDWNEWRDYHLLHPVENIPEIILYWKHSTIFDVGENLTVPDEFTVEERQTGMWWRHLVAGGGAGAVSRTCTAPLDRLKVLMQVHASRSNNMGIVGGFTQMIREGGARSLWRGNGINVLKIAPESAIKFMAYEQIKRLVGSDQETLRIHERLVAGSLAGAIAQSSIYPMEVLKTRMALRKTGQYSGMLDCARRILAREGVAAFYKGYVPNMLGIIPYAGIDLAVYETLKNAWLQHYAVNSADPGVFVLLACGTMSSTCGQLASYPLALVRTRMQAQASIEGAPEVTMSSLFKHILRTEGAFGLYRGLAPNFMKVIPAVSISYVVYENLKITLGVQSR

SEQ ID NO: 12349 - protein, 165 aa, Homo Sapiens
  misc_feature (1)..(1): Xaa can be any naturally occurring amino acid
XTVEERQTGMWWRHLVAGGGAGAVSRTCTAPLDRLKVLMQVLKTRMALRKTGQYSGMLDCARRILAREGVAAFYKGYVPNMLGIIPYAGIDLAVYETLKNAWLQHYAVNSADPGVFVLLACGTMSSTCGQLASYPLALVRTRMQAQGKAGPGQSPGRSGGADRSI

SEQ ID NO: 12350 - protein, 81 aa, Homo Sapiens
MEQQDQSMKEGRLTLVLALATLIAAFGSSFQYGYNVAAVNSPALLMQQFYNETYYGRTGEFMEDFPLTLLWSVTVSMFPFG

SEQ ID NO: 12351 - protein, 139 aa, Homo Sapiens
MEQQDQSMKEGRLTLVLALATLIAAFGSSFQYGYNVAAVNSPALLMQQFYNETYYGRTGEFMEDFPLTLLWSVTVSMFPFGGFIGSLLVGPLVNKFGRKGALLFNNIFSIVPAILMGCSRVATSFELIIISRLLVGICA

SEQ ID NO: 12352 - protein, 166 aa, Homo Sapiens
MEQQDQSMKEGRLTLVLALATLIAAFGSSFQYGYNVAAVNSPALLMQQFYNETYYGRTGEFMEDFPLTLLWSVTVSMFPFGGFIGSLLVGPLVNKFGRKGALLFNNIFSIVPAILMGCSRVATSFELIIISRLLVGICAGVSSNVVPMYLGELAPKNLRGALGVVP

SEQ ID NO: 12353 - protein, 190 aa, Homo Sapiens
MEQQDQSMKEGRLTLVLALATLIAAFGSSFQYGYNVAAVNSPALLMQQFYNETYYGRTGEFMEDFPLTLLWSVTVSMFPFGGFIGSLLVGPLVNKFGRKGALLFNNIFSIVPAILMGCSRVATSFELIIISRLLVGICAGVSSNVVPMYLGELAPKNLRGALGVVPQLFITVGILVAQIFGLRNLLANVD

SEQ ID NO: 12354 - protein, 190 aa, Homo Sapiens; identical to SEQ ID NO: 12353

SEQ ID NO: 12355 - protein, 190 aa, Homo Sapiens; identical to SEQ ID NO: 12353

SEQ ID NO: 12356 - protein, 190 aa, Homo Sapiens; identical to SEQ ID NO: 12353

SEQ ID NO: 12357 - protein, 244 aa, Homo Sapiens
MEQQDQSMKEGRLTLVLALATLIAAFGSSFQYGYNVAAVNSPALLMQQFYNETYYGRTGEFMEDFPLTLLWSVTVSMFPFGGFIGSLLVGPLVNKFGRKGALLFNNIFSIVPAILMGCSRVATSFELIIISRLLVGICAGVSSNVVPMYLGELAPKNLRGALGVVPQLFITVGILVAQIFGLRNLLANVDGEFRTSREHPHPFTTTLGPLLVFQSHHHRTGLSADWSLLTGWMSLGGPSCPEPT

SEQ ID NO: 12358 - protein, 501 aa, Homo Sapiens
MEQQDQSMKEGRLTLVLALATLIAAFGSSFQYGYNVAAVNSPALLMQQFYNETYYGRTGEFMEDFPLTLLWSVTVSMFPFGGFIGSLLVGPLVNKFGRKGALLFNNIFSIVPAILMGCSRVATSFELIIISRLLVGICAGVSSNVVPMYLGELAPKNLRGALGVVPQLFITVGILVAQIFGLRNLLANVDGWPILLGLTGVPAALQLLLLPFFPESPRYLLIQKKDEAAAKKALQTLRGWDSVDREVAEIRQEDEAEKAAGFISVLKLFRMRSLRWQLLSIIVLMGGQQLSGVNAIYYYADQIYLSAGVPEEHVQYVTAGTGAVNVVMTFCAVFVVELLGRRLLLLLGFSICLIACCVLTAALALQDTVSWMPYISIVCVISYVIGHALGPSPIPALLITEIFLQSSRPSAFMVGGSVHWLSNFTVGLIFPFIQEGLGPYSFIVFAVICLLTTIYIFLIVPETKAKTFIEINQIFTKMNKVSEVYPEKEELKELPPVTSEQ

SEQ ID NO: 12359 - protein, 313 aa, Homo Sapiens
MALLVDRVRGHWRIAAGLLFNLLVSICIVFLNKWIYVYHGFPNMSLTLVHFVVTWLGLYICQKLDIFAPKSLPPSRLLLLALSFCGFVVFTNLSLQNNTIGTYQLAKAMTTPVIIAIQTFCYQKTFSTRIQLTLIPITLGVILNSYYDVKFNFLGMVFAALGVLVTSLYQVWVGAKQHELQVNSMQLLYYQAPMSSAMLLVAVPFFEPVFGEGGIFGPWSVSALLMVLLSGVIAFMVNLSIYWIIGNTSPVTYNMFGHFKFCITLFGGYVLFKDPLSINQALGILCTLFGILAYTHFKLSEQEGSRSKLAQRP

SEQ ID NO: 12360 - protein, 125 aa, Homo Sapiens
QAPMSSAMLLVAVPFFEPVFGEGGIFGPWSVSALSTRLECSGTIMAHCSLSLLGSSNPPASTSPVAGTTGAHQHTWLIFIFFVETEFCHVAQADLKLLSSSHLSASASRSAGITGLSHHTWPVIS

SEQ ID NO: 12361 - protein, 39 aa, Homo Sapiens
MKNVMVMILVVDTKILILIMKVNFDILEREKHHMLKIMQ

SEQ ID NO: 12362 - protein, 39 aa, Homo Sapiens; identical to SEQ ID NO: 12361

SEQ ID NO: 12363 - protein, 38 aa, Homo Sapiens
MKVHMHTKFCLICLLTFIFHHCNHCHEEHDHGPEALHR

SEQ ID NO: 12364 - protein, 126 aa, Homo Sapiens
MKVHMHTKFCLICLLTFIFHHCNHCHEEHDHGPEALHRQHRGMTELEPSKFSKQAAENEKKYYIEKLFERYGENGRLSFFGLEKLLTNLGLGERKVVEINHEDLGHDHVSHLDILAVQEGKHFHSH

SEQ ID NO: 12365 - protein, 130 aa, Homo Sapiens
MKVHMHTKFCLICLLTFIFHHCNHCHEEHDHGPEALHRQHRGMTELEPSKFSKQAAENEKKYYIEKLFERYGENGRLSFFGLEKLLTNLGLGERKVVEINHEDLGHDHVSHLDILAVQEGKHFHSHNHQH

SEQ ID NO: 12366 - protein, 831 aa, Homo Sapiens
MKVHMHTKFCLICLLTFIFHHCNHCHEEHDHGPEALHRQHRGMTELEPSKFSKQAAENEKKYYIEKLFERYGENGRLSFFGLEKLLTNLGLGERKVVEINHEDLGHDHVSHLDILAVQEGKHFHSHNHQHSHNHLNSENQTVTSVSTKRNHKCDPEKETVEVSVKSDDKHMHDHNHRLRHHHRLHHHLDHNNTHHFHNDSITPSERGEPSNEPSTETNKTQEQSDVKLPKGKRKKKGRKSNENSEVITPGFPPNHDQGEQYEHNRVHKPDRVHNPGHSHVHLPERNGHDPGRGHQDLDPDNEGELRHTRKREAPHVKNNAIISLRKDLNEDDHHHECLNVTQLLKYYGHGANSPISTDLFTYLCPALLYQIDSRLCIEHFDKLLVEDINKDKNLVPEDEANIGASAWICGIISITVISLLSLLGVILVPIINQGCFKFLLTFLVALAVGTMSGDALLHLLPHSQGGHDHSHQHAHGHGHSHGHESNKFLEEYDAVLKGLVALGGIYLLFIIEHCIRMFKHYKQQRGKQKWFMKQNTEESTIGRKLSDHKLNNTPDSDWLQLKPLAGTDDSVVSEDRLNETELTDLEGQQESPPKNYLCIEEEKIIDHSHSDGLHTIHEHDLHAAAHNHHGENKTVLRKHNHQWHHKHSHHSHGPCHSGSDLKETGIANIAWMVIMGDGIHNFSDGLAIGAAFSAGLTGGISTSIAVFCHELPHELGDFAVLLKAGMTVKQAIVYNLLSAMMAYIGMLIGTAVGQYANNITLWIFAVTAGMFLYVALVDMLPEMLHGDGDNEEHGFCPVGQFILQNLGLLFGFAIMLVIALYEDKIVFDIQF

SEQ ID NO: 12367 - protein, 831 aa, Homo Sapiens; identical to SEQ ID NO: 12366

SEQ ID NO: 12368 - protein, 202 aa, Homo Sapiens
MKKTFYKRLLLYFIALAIGTLYSNALFQLIPEAFGFNPLEDYYVSKSAVVFGGFYLFFFTEKILKILLKQKNEHHHGHSHYASESLPSKKDQEEGVMEKLQNGDLDHMIPQHCSSELDGKAPMVDEKVIVGSLSVQDLQASQSACYWLKGVRYSDIGTLAWMITLSDGLHNFIDGLAIGASFTVSVFQGISTSVAILCEEFP

SEQ ID NO: 12369 - protein, 53 aa, Homo Sapiens
MKLLLLHPAFQSCLLLTLLGLWRTTPEAHASSLGAPAISAASFLQDLIHRYGE

SEQ ID NO: 12370 - protein, 89 aa, Homo Sapiens
MKLLLLHPAFQSCLLLTLLGLWRTTPEAHASSLGAPAISAASFLQDLIHRYGEGDSLTLQQLKALLNHLDVGVGRGNVTQHVQGHRNLS

SEQ ID NO: 12371 - protein, 90 aa, Homo Sapiens
MKLLLLHPAFQSCLLLTLLGLWRTTPEAHASSLGAPAISAASFLQDLIHRYGEGDSLTLQQLKALLNHLDVGVGRGNVTQHVQGHRNLST

SEQ ID NO: 12372 - protein, 122 aa, Homo Sapiens
MKLLLLHPAFQSCLLLTLLGLWRTTPEAHASSLGAPAISAASFLQDLIHRYGEGDSLTLQQLKALLNHLDVGVGRGNVTQHVQGHRNLSTCFSSGDLFTAHNFSEQSRIGSSELQEFCPTIL

SEQ ID NO: 12373 - protein, 127 aa, Homo Sapiens
MKLLLLHPAFQSCLLLTLLGLWRTTPEAHASSLGAPAISAASFLQDLIHRYGEGDSLTLQQLKALLNHLDVGVGRGNVTQHVQGHRNLSTCFSSGDLFTAHNFSEQSRIGSSELQEFCPTILQQLDS

SEQ ID NO: 12374 - protein, 155 aa, Homo Sapiens
MKLLLLHPAFQSCLLLTLLGLWRTTPEAHASSLGAPAISAASFLQDLIHRYGEGDSLTLQQLKALLNHLDVGVGRGNVTQHVQGHRNLSTCFSSGDLFTAHNFSEQSRIGSSELQEFCPTILQQLDSRACTSENQENEENEQTEEGRPSAVEVWG

SEQ ID NO: 12375 - protein, 492 aa, Homo Sapiens
MKLLLLHPAFQSCLLLTLLGLWRTTPEAHASSLGAPAISAASFLQDLIHRYGEGDSLTLQQLKALLNHLDVGVGRGNVTQHVQGHRNLSTCFSSGDLFTAHNFSEQSRIGSSELQEFCPTILQQLDSRACTSENQENEENEQTEEGRPSAVEVWGFGFLSVSLINLASLLGVLVLPCTEKAFFSRVLTYFIALSIGTLLSNALFQLIPEAFGFNPLEDYYVSKSAVVFGGFYLFFFTEKILKILLKQKNEHHHGHSHYASESLPSKKDQEEGVMEKLQNGDLDHMIPQHCSSELDGKAPMVDEKVIVGSLSVQDLQASQSACYWLKGVRYSDIGTLAWMITLSDGLHNFIDGLAIGASFTVSVFQGISTSVAILCEEFPHELGDFVILLNAGMSIQQALFFNFLSACCCYLGLAFGILAGSHFSANWIFALAGGMFLYISLADMFPEMNEVCQEDERKGSILIPFIIQNLGLLTGFTIMVVLTMYSGQIQIG

SEQ ID NO: 12376 - protein, 481 aa, Homo Sapiens
MKLLLLHPAFQSCLLLTLLGLWRTTPEAHASSLGAPAISAASFLQDLIHRYGEGDSLTLQQLKALLNHLDVGVGRGNVTQHVQGHRNLSTCFSSGDLFTAHNFSEQSRIGSSELQEFCPTILQQLDSRACTSENQENEENEQTEEGRPSAVEVWGYGLLCVTVISLCSLLGASVVPFMKKTFYKRLLLYFIALAIGTLYSNALFQLIPEAFGFNPLEDYYVSKSAVVFGGFYLFFFTEKILKILLKQKNEHHHGHSHYASESLPSKKDQEEGVMEKLQNGDLDHMIPQHCSSELDGKAPMVDEKVIVGSLSVQDLQASQSACYWLKGVRYSDIGTLAWMITLSDGLHNFIDGLAIGASFTVSVFQGISTSVAILCEEFPHELGDFVILLNAGMSIQQALFFNFLSACCCYLGLAFGILAGSHFSANWIFALAGGMFLYISLADMMEFCSVAQAGVQWCHLSSLQPLPLGLKRLSCLSLPSN

SEQ ID NO: 12377 - protein, 492 aa, Homo Sapiens
MKLLLLHPAFQSCLLLTLLGLWRTTPEAHASSLGAPAISAASFLQDLIHRYGEGDSLTLQQLKALLNHLDVGVGRGNVTQHVQGHRNLSTCFSSGDLFTAHNFSEQSRIGSSELQEFCPTILQQLDSRACTSENQENEENEQTEEGRPSAVEVWGYGLLCVTVISLCSLLGASVVPFMKKTFYKRLLLYFIALAIGTLYSNALFQLIPEAFGFNPLEDYYVSKSAVVFGGFYLFFFTEKILKILLKQKNEHHHGHSHYASESLPSKKDQEEGVMEKLQNGDLDHMIPQHCSSELDGKAPMVDEKVIVGSLSVQDLQASQSACYWLKGVRYSDIGTLAWMITLSDGLHNFIDGLAIGASFTVSVFQGISTSVAILCEEFPHELGDFVILLNAGMSIQQALFFNFLSACCCYLGLAFGILAGSHFSANWIFALAGGMFLYISLADMFPEMNEVCQEDERKGSILIPFIIQNLGLLTGFTIMVVLTMYSGQIQIG

SEQ ID NO: 12378 - protein, 492 aa, Homo Sapiens; identical to SEQ ID NO: 12377

SEQ ID NO: 12379 - protein, 184 aa, Homo Sapiens
MASLVSLELGLLLAVLVVTATASPPAGLLSLLTSGQGALDQEALGGLLNTLADRVHCANGPCGKACVDIPQLLEEAVGAGAPGSAGGVLAALLDHVRSGSCFHALPSPQYFVDFVFQQHSSEVPMTLAELSALMQRLGVGREAHSDHSHRHRGASSRDPVPLISSSNSSSVWDTVCLSARDVMA

SEQ ID NO: 12380 - protein, 647 aa, Homo Sapiens
MASLVSLELGLLLAVLVVTATASPPAGLLSLLTSGQGALDQEALGGLLNTLADRVHCANGPCGKCLSVEDALGLGEPEGSGLPPGPVLEARYVARLSAAAVLYLSNPEGTCEDARAGLWASHADHLLALLESPKALTPGLSWLLQRMQARAAGQTPKMACVDIPQLLEEAVGAGAPGSAGGVLAALLDHVRSGSCFHALPSPQYFVDFVFQQHSSEVPMTLAELSALMQRLGVGREAHSDHSHRHRGASSRDPVPLISSSNSSSVWDTVCLSARDVMAAYGLSEQAGVTPEAWAQLSPALLQQQLSGACTSQSRPPVQDQLSQSERYLYGSLATLLICLCAVFGLLLLTCTGCRGVTHYILQTFLSLAVGAVTGDAVLHLTPKVLGLHTHSEEGLSPQPTWRLLAMLAGLYAFFLFENLFNLLLPRDPEDLEDGPCGHSSHSHGGHSHGVSLQLAPSELRQPKPPHEGSRADLVAEESPELLNPEPRRLSPELRLLPYMITLGDAVHNFADGLAVGAAFASSWKTGLATSLAVFCHELPHELGDFAALLHAGLSVRQALLLNLASALTAFAGLYVALAVGVSEESEAWILAVATGLFLYVALCDMLPAMLKVRDPRPWLLFLLHNVGLLGGWTVLLLLSLYEDDITF

SEQ ID NO: 12381 - protein, 622 aa, Homo Sapiens
MVDVVGLERETGPRGSPWPGLPLPSLVGPAPLLTCLCPQCLSVEDALGLGEPEGSGLPPGPVLEARYVARLSAAAVLYLSNPEGTCEDARAGLWASHADHLLALLESPKALTPGLSWLLQRMQARAAGQTPKMACVDIPQLLEEAVGAGAPGSAGGVLAALLDHVRSGSCFHALPSPQYFVDFVFQQHSSEVPMTLAELSALMQRLGVGREAHSDHSHRHRGASSRDPVPLISSSNSSSVWDTVCLSARDVMAAYGLSEQAGVTPEAWAQLSPALLQQQLSGACTSQSRPPVQDQLSQSERYLYGSLATLLICLCAVFGLLLLTCTGCRGVTHYILQTFLSLAVGAVTGDAVLHLTPKVLGLHTHSEEGLSPQPTWRLLAMLAGLYAFFLFENLFNLLLPRDPEDLEDGPCGHSSHSHGGHSHGVSLQLAPSELRQPKPPHEGSRADLVAEESPELLNPEPRRLSPELRLLPYMITLGDAVHNFADGLAVGAAFASSWKTGLATSLAVFCHELPHELGDFAALLHAGLSVRQALLLNLASALTAFAGLYVALAVGVSEESEAWILAVATGLFLYVALCDMLPAMLKVRDPRPWLLFLLHNVGLLGGWTVLLLLSLYEDDITF

SEQ ID NO: 12382 - protein, 239 aa, Homo Sapiens
MMGSPEQNHYLAQLFGLYGENGTLTAGGLARLLHSLGLGRVQGLRLGQHGPLTGRAASPAADNSTHRPQNPELSVDVWAGMPLGPSGWGDLEESKAPHLPRGPAPSGLDLLHRLLLLDHSLADHLNEDCLNGSQLLVNFGLSPAAPLTPRQFALLCPALLYQIDSRVCIGAPAPAPPGDLLSALLQSALAVLLLSLPSPLSLLLLRLLGPRLLRPLLGFLGALAVGTLCGDALLHLLPH

SEQ ID NO: 12383 - protein, 123 aa, Homo Sapiens
MMGSPVSHLLAGFCVWVVLGWVGGSVPNLGPAEQEQNHYLAQLFGLYGENGTLTAGGLARLLHSLGLGRVQGLRLGQHGPLTGRAASPAADNSTHRPQNPELSVDVWAGMPLGPSGWGDLEES

SEQ ID NO: 12384 - protein, 126 aa, Homo Sapiens
MMGSPVSHLLAGFCVWVVLGWVGGSVPNLGPAEQEQNHYLAQLFGLYGENGTLTAGGLARLLHSLGLGRVQGLRLGQHGPLTGRAASPAADNSTHRPQNPELSVDVWAGMPLGPSGWGDLEESKAP

SEQ ID NO: 12385 - protein, 129 aa, Homo Sapiens
MMGSPVSHLLAGFCVWVVLGWVGGSVPNLGPAEQEQNHYLAQLFGLYGENGTLTAGGLARLLHSLGLGRVQGLRLGQHGPLTGRAASPAADNSTHRPQNPELSVDVWAGMPLGPSGWGDLEESKAPHLP

SEQ ID NO: 12386 - protein, 156 aa, Homo Sapiens
MMGSPVSHLLAGFCVWVVLGWVGGSVPNLGPAEQEQNHYLAQLFGLYGENGTLTAGGLARLLHSLGLGRVQGLRLGQHGPLTGRAASPAADNSTHRPQNPELSVDVWAGMPLGPSGWGDLEESKAPHLPRGPAPSGLDLLHRLLLLDHSLADHLNE

SEQ ID NO: 12387 - protein, 540 aa, Homo Sapiens
MMGSPVSHLLAGFCVWVVLGWVGGSVPNLGPAEQEQNHYLAQLFGLYGENGTLTAGGLARLLHSLGLGRVQGLRLGQHGPLTGRAASPAADNSTHRPQNPELSVDVWAGMPLGPSGWGDLEESKAPHLPRGPAPSGLDLLHRLLLLDHSLADHLNEDCLNGSQLLVNFGLSPAAPLTPRQFALLCPALLYQIDSRVCIGAPAPAPPGDLLSALLQSALAVLLLSLPSPLSLLLLRLLGPRLLRPLLGFLGALAVGTLCGDALLHLLPHAQEGRHAGPGGLPEKDLGPGLSVLGGLFLLFVLENMLGLLRHRGLRPRCCRRKRRNLETRNLDPENGSGMALQPLQAAPEPGAQGQREKNSQHPPALAPPGHQGHSHGHQGGTDITWMVLLGDGLHNLTDGLAIGAAFSDGFSSGLSTTLAVFCHELPHELGDFAMLLQSGLSFRRLLLLSLVSGALGLGGAVLGVGLSLGPVPLTPWVFGVTAGVFLYVALVDMLPALLRPPEPLPTPHVLLQGLGLLLGGGLMLAITLLEERLLPVTTEG

SEQ ID NO: 12388 - protein, 540 aa, Homo Sapiens; identical to SEQ ID NO: 12387

SEQ ID NO: 12389 - protein, 685 aa, Homo Sapiens
MAEDKSKRDSIEMSMKGCQTNNGFVHNEDILEQTPDPGSSTDNLKHSTRGILGSQEPDFKGVQPYAGMPKEVLFQFSGQARYRIPREILFWLTVASVLVLIAATIAIIALSPKCLDWWQEGPMYQIYPRSFKDSNKDGNGDLKGIQDKLDYITALNIKTVWITSFYKSSLKDFRYGVEDFREVDPIFGTMEDFENLVAAIHDKGLKLIIDFIPNHTSDKHIWFQLSRTRTGKYTDYYIWHDCTHENGKTIPPNNWLSVYGNSSWHFDEVRNQCYFHQFMKEQPDLNFRNPDVQEEIKEILRFWLTKGVDGFSLDAVKFLLEAKHLRDEIQVNKTQIPDTVTQYSELYHDFTTTQVGMHDIVRSFRQTMDQYSTEPGRYRFMGTEAYAESIDRTVMYYGLPFIQEADFPFNNYLSMLDTVSGNSVYEVITSWMENMPEGKWPNWMIGGPDSSRLTSRLGNQYVNVMNMLLFTLPGTPITYYGEEIGMGNIVAANLNESYDINTLRSKSPMQWDNSSNAGFSEASNTWLPTNSDYHTVNVDVQKTQPRSALKLYQDLSLLHANELLLNRGWFCHLRNDSHYVVYTRELDGIDRIFIVVLNFGESTLLNLHNMISGLPAKMRIRLSTNSADKGSKVDTSGIFLDKGEGLIFEHNTKNLLHRQTAFRDRCFVSNRACYSSVLNILYTSC

SEQ ID NO: 12390 - protein, 564 aa, Homo Sapiens
MAEDKSKRDSIEMSMKGCQTNNGFVHNEDILEQTPDPGSSTDNLKHSTRGILGSQEPDFKGVQPYAGMPKEVLFQFSGQARYRIPREILFWLTVASVLVLIAATIAIIALSPKCLDWWQEGPMYQIYPRSFKDSNKDGNGDLKGIQDKLDYITALNIKTVWITSFYKSSLKDFRYGVEDFREVDPIFGTMEDFENLVAAIHDKGLKLIIDFIPNHTSDKHIWFQLSRTRTGKYTDYYIWHDCTHENGKTIPPNNWLSVYGNSSWHFDEVRNQCYFHQFMKEQPDLNFRNPDVQEEIKEILRFWLTKGVDGFSLDAVKFLLEAKHLRDEIQVNKTQIPDTVTQYSELYHDFTTTQVGMHDIVRSFRQTMDQYSTEPGRYRFMGTEAYAESIDRTVMYYGLPFIQEADFPFNNYLSMLDTVSGNSVYEVITSWMENMPEGKWPNWMIGGPDSSRLTSRLGNQYVNVMNMLLFTLPGTPITYYGEEIGMGNIVAANLNESYDINTLRSKSPMQWDNSSNAGFSEASNTWLPTNSDYHTVNVDVSISENFMLILETKKWVSTESTHSP

SEQ ID NO: 12391 - protein, 564 aa, Homo Sapiens
MAEDKSKRDSIEMSMKGCQTNNGFVHNEDILEQTPDPGSSTDNLKHSTRGILGSQEPDFKGVQPYAGMPKEVLFQFSGQARYRIPREILFWLTVASVLVLIAATIAIIALSPKCLDWWQEGPMYQIYPRSFKDSNKDGNGDLKGIQDKLDYITALNIKTVWITSFYKSSLKDFRYGVEDFREVDPIFGTMEDFENLVAAIHDKGLKLIIDFIPNHTSDKHIWFQLSRTRTGKYTDYYIWHDCTHENGKTIPPNNWLSVYGNSSWHFDEVRNQCYFHQFMKEQPDLNFRNPDVQEEIKEILRFWLTKGVDGFSLDAVKFLLEAKHLRDEIQVNKTQIPDTVTQYSELYHDFTTTQVGMHDIVRSFRQTMDQYSTEPGRYRFMGTEAYAESIDRTVMYYGLPFIQEADFPFNNYLSMLDTVSGNSVYEVITSWMENMPEGKWPNWMIGGPDSSRLTSRLGNQYVNVMNMLLFTLPGTPITYYGEEIGMGNIVAANLNESYDINTLRSKSPMQWDNSSNAGFSEASNTWLPTNSDYHTVNVDSCSVTHARVQWRDLGTLQPLLPGFK

SEQ ID NO: 12392 - protein, 502 aa, Homo Sapiens
MAEDKSKRDSIEMSMKGCQTNNGFVHNEDILEQTPDPGSSTDNLKHSTRGILGSQEPDFKGVQPYAGMPKEVLFQFSGQARYRIPREILFWLTVASVLVLIAATIAIIALSPKCLDWWQEGPMYQIYPRSFKDSNKDGNGDLKGIQDKLDYITALNIKTVWITSFYKSSLKDFRYGVEDFREVDPIFGTMEDFENLVAAIHDKGLKLIIDFIPNHTSDKHIWFQLSRTRTGKYTDYYIWHDCTHENGKTIPPNNWLSVYGNSSWHFDEVRNQCYFHQFMKEQPDLNFRNPDVQEEIKEILRFWLTKGVDGFSLDAVKFLLEAKHLRDEIQVNKTQIPDTVTQYSELYHDFTTTQVGMHDIVRSFRQTMDQYSTEPGRYRFMGTEAYAESIDRTVMYYGLPFIQEADFPFNNYLSMLDTVSGNSVYEVITSWMENMPEGKWPNWMIGGPDSSRLTSRLGNQYVNVMNMLLFTLPGTPITYYGEEIGMGNIVAANLNESYDIVS

SEQ ID NO: 12393 - protein, 391 aa, Homo Sapiens
MAEDKSKRDSIEMSMKGCQTNNGFVHNEDILEQTPDPGSSTDNLKHSTRGILGSQEPDFKGVQPYAGMPKEVLFQFSGQARYRIPREILFWLTVASVLVLIAATIAIIALSPKCLDWWQEGPMYQIYPRSFKDSNKDGNGDLKGIQDKLDYITALNIKTVWITSFYKSSLKDFRYGVEDFREVDPIFGTMEDFENLVAAIHDKGLKLIIDFIPNHTSDKHIWFQLSRTRTGKYTDYYIWHDCTHENGKTIPPNNWLSVYGNSSWHFDEVRNQCYFHQFMKEQPDLNFRNPDVQEEIKEILRFWLTKGVDGFSLDAVKFLLEAKHLRDEIQVNKTQIPDTVTQYSELYHDFTTTQVGMHDIVRSFRQTMDQYSTEPGRYRLTTAYALISSQA

SEQ ID NO: 12394 - protein, 552 aa, Homo Sapiens
MAEDKSKRDSIEMSMKGCQTNNGFVHNEDILEQTPDPGSSTDNLKHSTRGILGSQEPDFKGVQPYAGMPKEVLFQFSGQARYRIPREILFWLTVASVLVLIAATIAIIALSPKCLDWWQEGPMYQIYPRSFKDSNKDGNGDLKGIQDKLDYITALNIKTVWITSFYKSSLKDFRYGVEDFREVDPIFGTMEDFENLVAAIHDKGLKLIIDFIPNHTSDKHIWFQLSRTRTGKYTDYYIWHDCTHENGKTIPPNNWLSVYGNSSWHFDEVRNQCYFHQFMKEQPDLNFRNPDVQEEIKEILRFWLTKGVDGFSLDAVKFLLEAKHLRDEIQVNKTQIPDTVTQYSELYHDFTTTQVGMHDIVRSFRQTMDQYSTEPGRYRFMGTEAYAESIDRTVMYYGLPFIQEADFPFNNYLSMLDTVSGNSVYEVITSWMENMPEGKWPNWMIGGPDSSRLTSRLGNQYVNVMNMLLFTLPGTPITYYGEEIGMGNIVAANLNESYDINTLRSKSPMQWDNSSNAGFSEASNTWLPTNSDYHTVNVDVILLRHPCSSAVA

SEQ ID NO: 12395 - protein, 184 aa, Homo Sapiens
MGTEAYAESIDRTVMYYGLPFIQEADFPFNNYLSMLDTVSGNSVYEVITSWMENMPEGKWPNWMIGGPDSSRLTSRLGNQYVNVMNMLLFTLPGTPITYYGEEIGMGNIVAANLNESYDINTLRSKSPMQWDNSSNAGFSEASNTWLPTNSDYHTVNVDVSISENFMLILETKKWVSTESTHSP

SEQ ID NO: 12396 - protein, 407 aa, Homo Sapiens
MKEQPDLNFRNPDVQEEIKEILRFWLTKGVDGFSLDAVKFLLEAKHLRDEIQVNKTQIPDTVTQYSELYHDFTTTQVGMHDIVRSFRQTMDQYSTEPGRYRFMGTEAYAESIDRTVMYYGLPFIQEADFPFNNYLSMLDTVSGNSVYEVITSWMENMPEGKWPNWMIGGPDSSRLTSRLGNQYVNVMNMLLFTLPGTPITYYGEEIGMGNIVAANLNESYDINTLRSKSPMQWDNSSNAGFSEASNTWLPTNSDYHTVNVDVQKTQPRSALKLYQDLSLLHANELLLNRGWFCHLRNDSHYVVYTRELDGIDRIFIVVLNFGESTLLNLHNMISGLPAKMRIRLSTNSADKGSKVDTSGIFLDKGEGLIFEHNTKNLLHRQTAFRDRCFVSNRACYSSVLNILYTSC

SEQ ID NO: 12397 - protein, 143 aa, Homo Sapiens
MSGMFLSSKLTTILLLFTNKSLDPGQKIQENTLLSVYGNSSWHFDEVRNQCYFHQFMKEQPDLNFRNPDVQEEIKEILRFWLTKGVDGFSLDAVKFLLEAKHLRDEIQVNKTQIPDTVTQYSELYHDFTTTQVGMHDIVRSFR

SEQ ID NO: 12398 - protein, 316 aa, Homo Sapiens
MTLNLVNSYRFMGTEAYAESIDRTVMYYGLPFIQEADFPFNNYLSMLDTVSGNSVYEVITSWMENMPEGKWPNWMIGGPDSSRLTSRLGNQYVNVMNMLLFTLPGTPITYYGEEIGMGNIVAANLNESYDINTLRSKSPMQWDNSSNAGFSEASNTWLPTNSDYHTVNVDVQKTQPRSALKLYQDLSLLHANELLLNRGWFCHLRNDSHYVVYTRELDGIDRIFIVVLNFGESTLLNLHNMISGLPAKMRIRLSTNSADKGSKVDTSGIFLDKGEGLIFEHNTKNLLHRQTAFRDRCFVSNRACYSSVLNILYTSC

SEQ ID NO: 12399 - protein, 340 aa, Homo Sapiens
MEPGRTQIKLDPRYTADLLEVLKTNYGIPSACFSQPPTAAQLLRALGPVELALTSILTLLALGSIAIFLEDAVYLYKNTLCPIKRRTLLWKSSAPTVVSVLCCFGLWIPRSLVLVEMTITSFYAVCFYLLMLVMVEGFGGKEAVLRTLRDTPMMVHTGPCCCCCPCCPRLLLTRKKLQLLMLGPFQYAFLKITLTLVGLFLVPDGIYDPADISEGSTALWINTFLGVSTLLALWTLGIISRQARLHLGEQNMGAKFALFQVLLILTALQPSIFSVLANGGQIACSPPYSSKTRSQVMNCHLLILETFLMTVLTRMYYRRKDHKVGYETFSSPDLDLNLKA

SEQ ID NO: 12400 - protein, 58 aa, Homo Sapiens
MEPGRTQIKLDPRYTADLLEVLKTNYGIPSACFSQPPTAAQLLRDRVWLCGPGWSAVV

SEQ ID NO: 12401 - protein, 66 aa, Homo Sapiens
MLLILMLSLSFNEQASHPAPGPHLPAPPALPHPGACGIAGENAAMEPGRTQIKLDPRYTADLLEVL

SEQ ID NO: 12402 - protein, 23 aa, Homo Sapiens
QARLHLGEQNMGAKFALFQQQHG

SEQ ID NO: 12403 - protein, 212 aa, Homo Sapiens
  misc_feature (1)..(1): Xaa can be any naturally occurring amino acid
XACFSQPPTAAQLLRALGPVELALTSILTLLALGSIAIFLEDAVYLYKNTLCPIKRRTLLWKSSAPTLATFKERCLECVGFASCVLAAKGFRSLRVSLPPSPAPAPSEQVVSVLCCFGLWIPRSLVLVEMTITSFYAVCFYLLMLVMVEGFGGKEAVLRTLRDTPMMVHTGPCCCCCPCCPRLLLTRKKLQLLMLGPFQYAFLKITLTLVGL

SEQ ID NO: 12404 - protein, 175 aa, Homo Sapiens
MAAPTPARPVLTHLLVALFGMGSWAAVNGIWVELPVVVKELPEAAAFQGLLLLLPPPPSVPTGELGSGLQVGAPGAEEEVEESSPLQEPPSQAAGTTPGPDPKAYQLLSARSACLLGLLAATNALTNGVLPAVQSFSCLPYGRLAYHLAVVLGSAANPLACFLAMGVLCRSLAGL

SEQ ID NO: 12405 - protein, 111 aa, Homo Sapiens
MAAPTPARPVLTHLLVALFGMGSWAAVNGIWVELPVVVKELPEGAVVGAVSWRVLLREGGSQLPAAWRGPAGIAGSRRGHPGGLSARRCCYVPPDQHLSRVPQQKGLCRPL

SEQ ID NO: 12406 - protein, 69 aa, Homo Sapiens
MAAPTPARPVLTHLLVALFGMGSWAAVNGIWVELPVVVKELPEGWSLPSYVSVLVALGNLGLLVVTLWR

SEQ ID NO: 12407 - protein, 87 aa, Homo Sapiens
MAAPTPARPVLTHLLVALFGMGSWAAVNGIWVELPVVVKELPEGWSLPSYVSVLVALGNLGLLVVTLWRRLAPGKDEQVPIRVVQGS

SEQ ID NO: 12408 - protein, 172 aa, Homo Sapiens
MAAPTPARPVLTHLLVALFGMGSWAAVNGIWVELPVVVKELPEGWSLPSYVSVLVALGNLGLLVVTLWRRLAPGKDEQVPIRVVQVLGMVGTALLASLWHHVAPVAGQLHSVAFLALAFVLALACCASNVTFLPFLSHLPPRFLRSFFLGQGLSALLPCVLALVQGVGRLEC

SEQ ID NO: 12409 - protein, 445 aa, Homo Sapiens
MAAPTPARPVLTHLLVALFGMGSWAAVNGIWVELPVVVKELPEGWSLPSYVSVLVALGNLGLLVVTLWRRLAPGKDEQVPIRVVQVLGMVGTALLASLWHHVAPVAGQLHSVAFLALAFVLALACCASNVTFLPFLSHLPPRFLRSFFLGQGLSALLPCVLALVQGVGRLECPPAPINGTPGPPLDFLERFPASTFFWALTALLVASAAAFQGLLLLLPPPPSVPTGELGSGLQVGAPGAEEEVEESSPLQEPPSQAAGTTPGPDPKAYQLLSARSACLLGLLAATNALTNGVLPAVQSFSCLPYGRLAYHLAVVLGSAANPLACFLAMGVLCRSLAGLGGLSLLGVFCGGYLMALAVLSPCPPLVGTSAGVVLVVLSWVLCLGVFSYVKVAASSLLHGGGRPALLAAGVAIQVGSLLGAVAMFPPTSIYHVFHSRKDCADPCDS

SEQ ID NO: 12410 - protein, 445 aa, Homo Sapiens; identical to SEQ ID NO: 12409

SEQ ID NO: 12411 - protein, 445 aa, Homo Sapiens; identical to SEQ ID NO: 12409

SEQ ID NO: 12412 - protein, 445 aa, Homo Sapiens; identical to SEQ ID NO: 12409

SEQ ID NO: 12413 - protein, 445 aa, Homo Sapiens; identical to SEQ ID NO: 12409

SEQ ID NO: 12414 - protein, 445 aa, Homo Sapiens; identical to SEQ ID NO: 12409

SEQ ID NO: 12415 - protein, 27 aa, Homo Sapiens
MSVGVSTSAPLSPTSGTSVGMSTFSIM

SEQ ID NO: 12416 - protein, 39 aa, Homo Sapiens
MSVGVSTSAPLSPTSGTSVGMSTFSIMDYVVFVLLLVLS

SEQ ID NO: 12417 - protein, 59 aa, Homo Sapiens
MSVGVSTSAPLSPTSGTSVGMSTFSIMDYVVFVLLLVLSLAIGLYHACRGWGRHTVGEL

SEQ ID NO: 12418 - protein, 78 aa, Homo Sapiens
MSVGVSTSAPLSPTSGTSVGMSTFSIMDYVVFVLLLVLSLAIGLYHACRGWGRHTVGELLMADRKMGCLPVALSLLAT

SEQ ID NO: 12419 - protein, 115 aa, Homo Sapiens
MSVGVSTSAPLSPTSGTSVGMSTFSIMDYVVFVLLLVLSLAIGLYHACRGWGRHTVGELLMADRKMGCLPVALSLLATFQSAVAILGVPSEIYRFGTQYWFLGCCYFLGLLIPAH

SEQ ID NO: 12420 - protein, 133 aa, Homo Sapiens
MSVGVSTSAPLSPTSGTSVGMSTFSIMDYVVFVLLLVLSLAIGLYHACRGWGRHTVGELLMADRKMGCLPVALSLLATFQSAVAILGVPSEIYRFGTQYWFLGCCYFLGLLIPAHIFIPVFYRLHLTSAYEYL

SEQ ID NO: 12421 - protein, 147 aa, Homo Sapiens
MSVGVSTSAPLSPTSGTSVGMSTFSIMDYVVFVLLLVLSLAIGLYHACRGWGRHTVGELLMADRKMGCLPVALSLLATFQSAVAILGVPSEIYRFGTQYWFLGCCYFLGLLIPAHIFIPVFYRLHLTSAYEYLELRFNKTVRVCGTV

SEQ ID NO: 12422 - protein, 153 aa, Homo Sapiens
MSVGVSTSAPLSPTSGTSVGMSTFSIMDYVVFVLLLVLSLAIGLYHACRGWGRHTVGELLMADRKMGCLPVALSLLATFQSAVAILGVPSEIYRFGTQYWFLGCCYFLGLLIPAHIFIPVFYRLHLTSAYEYLELRFNKTVRVCGTVTFIFQM

SEQ ID NO: 12423 - protein, 193 aa, Homo Sapiens
MSVGVSTSAPLSPTSGTSVGMSTFSIMDYVVFVLLLVLSLAIGLYHACRGWGRHTVGELLMADRKMGCLPVALSLLATFQSAVAILGVPSEIYRFGTQYWFLGCCYFLGLLIPAHIFIPVFYRLHLTSAYEYLELRFNKTVRVCGTVTFIFQMVIYMGVVLYAPSLALNAVTGFDLWLSVLALGIVCTVYTAL

SEQ ID NO: 12424 - protein, 635 aa, Homo Sapiens
MSVGVSTSAPLSPTSGTSVGMSTFSIMDYVVFVLLLVLSLAIGLYHACRGWGRHTVGELLMADRKMGCLPVALSLLATFQSAVAILGVPSEIYRFGTQYWFLGCCYFLGLLIPAHIFIPVFYRLHLTSAYEYLELRFNKTVRVCGTVTFIFQMVIYMGVVLYAPSLALNAVTGFDLWLSVLALGIVCTVYTALGGLKAVIWTDVFQTLVMFLGQLAVIIVGSAKVGGLGRVWAVASQHGRISGFELDPDPFVRHTFWTLAFGGVFMMLSLYGVNQAQVQRYLSSRTEKAAVLSCYAVFPFQQVSLCVGCLIGLVMFAYYQEYPMSIQQAQAAPDQFVLYFVMDLLKGLPGLPGLFIACLFSGSLSTISSAFNSLATVTMEDLIRPWFPEFSEARAIMLSRGLAFGYGLLCLGMAYISSQMGPVLQAAISIFGMVGGPLLGLFCLGMFFPCANPPGAVVGLLAGLVMAFWIGIGSIVTSMGSSMPPSPSNGSSFSLPTNLTVATVTTLMPLTTFSKPTGLQRFYSLSYLWYSAHNSTTVIVVGLIVSLLTGRMRGRSLNPATIYPVLPKLLSLLPLSCQKRLHCRSYGQDHLDTGLFPEKPRNGVLGDSRDKEAMALDGTAYQGSSSTCILQETSL

SEQ ID NO: 12425 - protein, 635 aa, Homo Sapiens; identical to SEQ ID NO: 12424

SEQ ID NO: 12426 - protein, 574 aa, Homo Sapiens
MFPYFIMLIFCGIPLFFMELSFGQFASQGCLGVWRISPMFKGVGYGMMVVSTYIGIYYNVVICIAFYYFFSSMTHVLPWAYCNNPWNTHDCAGVLDASNLTNGSRPAALPSNLSHLLNHSLQRTSPSEEYWRLYVLKLSDDIGNFGEVRLPLLGCLGVSWLVVFLCLIRGVKSSGKVVYFTATFPYVVLTILFVRGVTLEGAFDGIMYYLTPQWDKILEAKVWGDAASQIFYSLGCAWGGLITMASYNKFHNNCYRDSVIISITNCATSVYAGFVIFSILGFMANHLGVDVSRVADHGPGLAFVAYPEALTLLPISPLWSLLFFFMLILLGLGTQFCLLETLVTAIVDEVGNEWILQKKTYVTLGVAVAGFLLGIPLTSQAGIYWLLLMDNYAASFSLVVISCIMCVAIMYIYGHRNYFQDIQMMLGFPPPLFFQICWRFVSPAIIFLQAQVHRRLPQNPLHFASLPERNVLLHQLPQRGGVPEHDPPTPPSPARTYGPQVRVREVPRARRQRSPNPAPLWAPPSPKPHPCSAAGPLGWDCPFRNCQSLALSSARLLADSDAGGPETRQWEPGP

SEQ ID NO: 12427 - protein, 522 aa, Homo Sapiens
MMVVSTYIGIYYNVVICIAFYYFFSSMTHVLPWAYCNNPWNTHDCAGVLDASNLTNGSRPAALPSNLSHLLNHSLQRTSPSEEYWRLYVLKLSDDIGNFGEVRLPLLGCLGVSWLVVFLCLIRGVKSSGKVVYFTATFPYVVLTILFVRGVTLEGAFDGIMYYLTPQWDKILEAKVWGDAASQIFYSLGCAWGGLITMASYNKFHNNCYRDSVIISITNCATSVYAGFVIFSILGFMANHLGVDVSRVADHGPGLAFVAYPEALTLLPISPLWSLLFFFMLILLGLGTQFCLLETLVTAIVDEVGNEWILQKKTYVTLGVAVAGFLLGIPLTSQAGIYWLLLMDNYAASFSLVVISCIMCVAIMYIYGHRNYFQDIQMMLGFPPPLFFQICWRFVSPAIIFFILVFTVIQYQPITYNHYQYPGWAVAIGFLMALSSVLCIPLYAMFRLCRTDGDTLLQRLKNATKPSRDWGPALLEHRTGRYAPTIAPSPEDGFEVQPLHPDKAQIPIVGSNGSSRLQDSRI

SEQ ID NO: 12428 - protein, 134 aa, Homo Sapiens
MSGGDTRAAIARPRMAAAHGPVAPSSPEQNGAVPSEATKRDQNLKRGNWGNQIEFVLTSVGYAVGLGNVWRFPYLCYRNGGGAFMFPYFIMLIFCGIPLFFMELSFGQFASQGCLGVWRISPMFKGVGYGMMVV

SEQ ID NO: 12429 - protein, 652 aa, Homo Sapiens
MSGGDTRAAIARPRMAAAHGPVAPSSPEQNGAVPSEATKRDQNLKRGNWGNQIEFVLTSVGYAVGLGNVWRFPYLCYRNGGGAFMFPYFIMLIFCGIPLFFMELSFGQFASQGCLGVWRISPMFKGVGYGMMVVSTYIGIYYNVVICIAFYYFFSSMTHVLPWAYCNNPWNTHDCAGVLDASNLTNGSRPAALPSNLSHLLNHSLQRTSPSEEYWRLYVLKLSDDIGNFGEVRLPLLGCLGVSWLVVFLCLIRGVKSSGKVVYFTATFPYVVLTILFVRGVTLEGAFDGIMYYLTPQWDKILEAKVWGDAASQIFYSLGCAWGGLITMASYNKFHNNCYRDSVIISITNCATSVYAGFVIFSILGFMANHLGVDVSRVADHGPGLAFVAYPEALTLLPISPLWSLLFFFMLILLGLGTQFCLLETLVTAIVDEVGNEWILQKKTYVTLGVAVAGFLLGIPLTSQAGIYWLLLMDNYAASFSLVVISCIMCVAIMYIYGHRNYFQDIQMMLGFPPPLFFQICWRFVSPAIIFFILVFTVIQYQPITYNHYQYPGWAVAIGFLMALSSVLCIPLYAMFRLCRTDGDTLLQRLKNATKPSRDWGPALLEHRTGRYAPTIAPSPEDGFEVQPLHPDKAQIPIVGSNGSSRLQDSRI

SEQ ID NO: 12430 - protein, 706 aa, Homo Sapiens
MSGGDTRAAIARPRMAAAHGPVAPSSPEQVTLLPVQRSFFLPPFSGATPSTSLAESVLKVWHGAYNSGLLPQLMAQHSLAMAQNGAVPSEATKRDQNLKRGNWGNQIEFVLTSVGYAVGLGNVWRFPYLCYRNGGGAFMFPYFIMLIFCGIPLFFMELSFGQFASQGCLGVWRISPMFKGVGYGMMVVSTYIGIYYNVVICIAFYYFFSSMTHVLPWAYCNNPWNTHDCAGVLDASNLTNGSRPAALPSNLSHLLNHSLQRTSPSEEYWRLYVLKLSDDIGNFGEVRLPLLGCLGVSWLVVFLCLIRGVKSSGKVVYFTATFPYVVLTILFVRGVTLEGAFDGIMYYLTPQWDKILEAKVWGDAASQIFYSLGCAWGGLITMASYNKFHNNCYRDSVIISITNCATSVYAGFVIFSILGFMANHLGVDVSRVADHGPGLAFVAYPEALTLLPISPLWSLLFFFMLILLGLGTQFCLLETLVTAIVDEVGNEWILQKKTYVTLGVAVAGFLLGIPLTSQAGIYWLLLMDNYAASFSLVVISCIMCVAIMYIYGHRNYFQDIQMMLGFPPPLFFQICWRFVSPAIIFFILVFTVIQYQPITYNHYQYPGWAVAIGFLMALSSVLCIPLYAMFRLCRTDGDTLLQRLKNATKPSRDWGPALLEHRTGRYAPTIAPSPEDGFEVQPLHPDKAQIPIVGSNGSSRLQDSRI

SEQ ID NO: 12431 - protein, 633 aa, Homo Sapiens
MVGKGAKGMLNGAVPSEATKRDQNLKRGNWGNQIEFVLTSVGYAVGLGNVWRFPYLCYRNGGGAFMFPYFIMLIFCGIPLFFMELSFGQFASQGCLGVWRISPMFKGVGYGMMVVSTYIGIYYNVVICIAFYYFFSSMTHVLPWAYCNNPWNTHDCAGVLDASNLTNGSRPAALPSNLSHLLNHSLQRTSPSEEYWRLYVLKLSDDIGNFGEVRLPLLGCLGVSWLVVFLCLIRGVKSSGKVVYFTATFPYVVLTILFVRGVTLEGAFDGIMYYLTPQWDKILEAKVWGDAASQIFYSLGCAWGGLITMASYNKFHNNCYRDSVIISITNCATSVYAGFVIFSILGFMANHLGVDVSRVADHGPGLAFVAYPEALTLLPISPLWSLLFFFMLILLGLGTQFCLLETLVTAIVDEVGNEWILQKKTYVTLGVAVAGFLLGIPLTSQAGIYWLLLMDNYAASFSLVVISCIMCVAIMYIYGHRNYFQDIQMMLGFPPPLFFQICWRFVSPAIIFFILVFTVIQYQPITYNHYQYPGWAVAIGFLMALSSVLCIPLYAMFRLCRTDGDTLLQRLKNATKPSRDWGPALLEHRTGRYAPTIAPSPEDGFEVQPLHPDKAQIPIVGSNGSSRLQDSRI

SEQ ID NO: 12432 - protein, 579 aa, Homo Sapiens
MVGKGAKGMLNGAVPSEATKRDQNLKRGNWGNQIEFVLTSVGYAVGLGNVWRFPYLCYRNGGGAFMFPYFIMLIFCGIPLFFMELSFGQFASQGCLGVWRISPMFKGVGYGMMVVSTYIGIYYNVVICIAFYYFFSSMTHVLPWAYCNNPWNTHDCAGVLDASNLTNGSRPAALPSNLSHLLNHSLQRTSPSEEYWRLYVLKLSDDIGNFGEVRLPLLGCLGVSWLVVFLCLIRGVKSSGKVVYFTATFPYVVLTILFVRGVTLEGAFDGIMYYLTPQWDKILEAKVWGDAASQIFYSLGCAWGGLITMASYNKFHNNCYRDSVIISITNCATSVYAGFVIFSILGFMANHLGVDVSRVADHGPGLAFVAYPEALTLLPISPLWSLLFFFMLILLGLGTQFCLLETLVTAIVDEVGNEWILQKKTYVTLGVAVAGFLLGIPLTSQAGIYWLLLMDNYAASFSLVVISCIMCVAIMYIYGEHSSLRPPATRPLARPLCPAGLLTPHLSRAPELLPGHPDDAGIPTTPLLSDLLALRLSRHHLPPGSGPPPPPPESSSLRVAPGAERAPPPAPTARGSAGA

SEQ ID NO: 12433 - protein, 116 aa, Homo Sapiens
MVGKGAKGMLVTLLPVQRSFFLPPFSGATPSTSLAESVLKVWHGAYNSGLLPQLMAQHSLAMAQNGAVPSEATKRDQNLKRGNWGNQIEFVLTSVGYAVGLGNVWRFPYLCYRNGG

SEQ ID NO: 12434 - protein, 664 aa, Homo Sapiens
MRRLSLSPTFSMGFHLLVTVSLLFSHVDHVIAETEMEGEGNETGECTGSYYCKKGVILPIWEPQDPSFGDKIARATVYFVAMVYMFLGVSIIADRFMSSIEVITSQEKEITIKKPNGETTKTTVRIWNETVSNLTLMALGSSAPEILLSVIEVCGHNFTAGDLGPSTIVGSAAFNMFIIIALCVYVVPDGETRKIKHLRVFFVTAAWSIFAYTWLYIILSVISPGVVEVWEGLLTFFFFPICVVFAWVADRRLLFYKYVYKRYRAGKQRGMIIEHEGDRPSSKTEIEMDGKVVNSHVENFLDGALVLEVDERDQDDEEARREMARILKELKQKHPDKEIEQLIELANYQVLSQQQKSRAFYRIQATRLMTGAGNILKRHAADQARKAVSMHEVNTEVTENDPVSKIFFEQGTYQCLENCGTVALTIIRRGGDLTNTVFVDFRTEDGTANAGSDYEFTEGTVVFKPGDTQKEIRVGIIDDDIFEEDENFLVHLSNVKVSSEASEDGILEANHVSTLACLGSPSTATVTIFDDDHAGIFTFEEPVTHVSESIGIMEVKVLRTSGARGNVIVPYKTIEGTARGGGEDFEDTCGELEFQNDEIVKTISVKVIDDEEYEKNKTFFLEIGEPRLVEMSEKKGRSLPLEYLTVRNMRKSAVSPLCLRNQNG

SEQ ID NO: 12435 - protein, 73 aa, Homo Sapiens
MYNMRRLSLSPTFSMGFHLLVTVSLLFSHVDHVIAETEMEGEGNETGECTGSYYCKKGVILPIWEPQDPSFGD

SEQ ID NO: 12436 - protein, 87 aa, Homo Sapiens
MYNMRRLSLSPTFSMGFHLLVTVSLLFSHVDHVIAETEMEGEGNETGECTGSYYCKKGVILPIWEPQDPSFGDKIARATVYFVAMVY

SEQ ID NO: 12437 - protein, 87 aa, Homo Sapiens; identical to SEQ ID NO: 12436

SEQ ID NO: 12438 - protein, 973 aa, Homo Sapiens
MYNMRRLSLSPTFSMGFHLLVTVSLLFSHVDHVIAETEMEGEGNETGECTGSYYCKKGVILPIWEPQDPSFGDKIARATVYFVAMVYMFLGVSIIADRFMSSIEVITSQEKEITIKKPNGETTKTTVRIWNETVSNLTLMALGSSAPEILLSVIEVCGHNFTAGDLGPSTIVGSAAFNMFIIIALCVYVVPDGETRKIKHLRVFFVTAAWSIFAYTWLYIILSVISPGVVEVWEGLLTFFFFPICVVFAWVADRRLLFYKYVYKRYRAGKQRGMIIEHEGDRPSSKTEIEMDGKVVNSHVENFLDGALVLEVDERDQDDEEARREMARILKELKQKHPDKEIEQLIELANYQVLSQQQKSRAFYRIQATRLMTGAGNILKRHAADQARKAVSMHEVNTEVTENDPVSKIFFEQGTYQCLENCGTVALTIIRRGGDLTNTVFVDFRTEDGTANAGSDYEFTEGTVVFKPGDTQKEIRVGIIDDDIFEEDENFLVHLSNVKVSSEASEDGILEANHVSTLACLGSPSTATVTIFDDDHAGIFTFEEPVTHVSESIGIMEVKVLRTSGARGNVIVPYKTIEGTARGGGEDFEDTCGELEFQNDEIVKTISVKVIDDEEYEKNKTFFLEIGEPRLVEMSEKKALLLNELGGFTITGKYLFGQPVFRKVHAREHPILSTVITIADEYDDKQPLTSKEEEERRIAEMGRPILGEHTKLEVIIEESYEFKSTVDKLIKKTNLALVVGTNSWREQFIEAITVSAGEDDDDDECGEEKLPSCFDYVMHFLTVFWKVLFAFVPPTEYWNGWACFIVSILMIGLLTAFIGDLASHFGCTIGLKDSVTAVVFVALGTSVPDTFASKVAATQDQYADASIGNVTGSNAVNVFLGIGVAWSIAAIYHAANGEQFKVSPGTLAFSVTLFTIFAFINVGVLLYRRRPEIGGELGGPRTAKLLTSCLFVLLWLLYIFFSSLEAYCHIKGF

SEQ ID NO: 12439 - protein, 968 aa, Homo Sapiens
MYNMRRLSLSPTFSMGFHLLVTVSLLFSHVDHVIAETEMEGEGNETGECTGSYYCKKGVILPIWEPQDPSFGDKIARATVYFVAMVYMFLGVSIIADRFMSSIEVITSQEKEITIKKPNGETTKTTVRIWNETVSNLTLMALGSSAPEILLSVIEVCGHNFTAGDLGPSTIVGSAAFNMFIIIALCVYVVPDGETRKIKHLRVFFVTAAWSIFAYTWLYIILSVISPGVVEVWEGLLTFFFFPICVVFAWVADRRLLFYKYVYKRYRAGKQRGMIIEHEGDRPSSKTEIEMDGKVVNSHVENFLDGALVLEVDERDQDDEEARREMARILKELKQKHPDKEIEQLIELANYQVLSQQQKSRAFYRIQATRLMTGAGNILKRHAADQARKAVSMHEVNTEVTENDPVSKIFFEQGTYQCLENCGTVALTIIRRGGDLTNTVFVDFRTEDGTANAGSDYEFTEGTVVFKPGDTQKEIRVGIIDDDIFEEDENFLVHLSNVKVSSEASEDGILEANHVSTLACLGSPSTATVTIFDDDHAGIFTFEEPVTHVSESIGIMEVKVLRTSGARGNVIVPYKTIEGTARGGGEDFEDTCGELEFQNDEIVKTISVKVIDDEEYEKNKTFFLEIGEPRLVEMSEKKALLLNELGGFTITGQPVFRKVHAREHPILSTVITIADEYDDKQPLTSKEEEERRIAEMGRPILGEHTKLEVIIEESYEFKSTVDKLIKKTNLALVVGTNSWREQFIEAITVSAGEDDDDDECGEEKLPSCFDYVMHFLTVFWKVLFAFVPPTEYWNGWACFIVSILMIGLLTAFIGDLASHFGCTIGLKDSVTAVVFVALGTSVPDTFASKVAATQDQYADASIGNVTGSNAVNVFLGIGVAWSIAAIYHAANGEQFKVSPGTLAFSVTLFTIFAFINVGVLLYRRRPEIGGELGGPRTAKLLTSCLFVLLWLLYIFFSSLEAYCHIKGF

SEQ ID NO: 12440 - protein, 937 aa, Homo Sapiens
MYNMRRLSLSPTFSMGFHLLVTVSLLFSHVDHVIAETEMEGEGNETGECTGSYYCKKGVILPIWEPQDPSFGDKIARATVYFVAMVYMFLGVSIIADRFMSSIEVITSQEKEITIKKPNGETTKTTVRIWNETVSNLTLMALGSSAPEILLSVIEVCGHNFTAGDLGPSTIVGSAAFNMFIIIALCVYVVPDGETRKIKHLRVFFVTAAWSIFAYTWLYIILSVISPGVVEVWEGLLTFFFFPICVVFAWVADRRLLFYKYVYKRYRAGKQRGMIIEHEGDRPSSKTEIEMDGKVVNSHVENFLDGALVLEVDERDQDDEEARREMARILKELKQKHPDKEIEQLIELANYQVLSQQQKSRAFYRIQATRLMTGAGNILKRHAADQARKAVSMHEVNTEVTENDPVSKIFFEQGTYQCLENCGTVALTIIRRGGDLTNTVFVDFRTEDGTANAGSDYEFTEGTVVFKPGDTQKEIRVGIIDDDIFEEDENFLVHLSNVKVSSEASEDGILEANHVSTLACLGSPSTATVTIFDDDHAGIFTFEEPVTHVSESIGIMEVKVLRTSGARGNVIVPYKTIEGTARGGGEDFEDTCGELEFQNDEIVKIITIRIFDREEYEKECSFSLVLEEPKWIRRGMKGGFTITDEYDDKQPLTSKEEEERRIAEMGRPILGEHTKLEVIIEESYEFKSTVDKLIKKTNLALVVGTNSWREQFIEAITVSAGEDDDDDECGEEKLPSCFDYVMHFLTVFWKVLFAFVPPTEYWNGWACFIVSILMIGLLTAFIGDLASHFGCTIGLKDSVTAVVFVALGTSVPDTFASKVAATQDQYADASIGNVTGSNAVNVFLGIGVAWSIAAIYHAANGEQFKVSPGTLAFSVTLFTIFAFINVGVLLYRRRPEIGGELGGPRTAKLLTSCLFVLLWLLYIFFSSLEAYCHIKGF

SEQ ID NO: 12441 - protein, 937 aa, Homo Sapiens; identical to SEQ ID NO: 12440

SEQ ID NO: 12442 - protein, 965 aa, Homo Sapiens
MYNMRRLSLSPTFSMGFHLLVTVSLLFSHVDHVIAETEMEGEGNETGECTGSYYCKKGVILPIWEPQDPSFGDKIARATVYFVAMVYMFLGVSIIADRFMSSIEVITSQEKEITIKKPNGETTKTTVRIWNETVSNLTLMALGSSAPEILLSVIEVCGHNFTAGDLGPSTIVGSAAFNMFIIIALCVYVVPDGETRKIKHLRVFFVTAAWSIFAYTWLYIILSVISPGVVEVWEGLLTFFFFPICVVFAWVADRRLLFYKYVYKRYRAGKQRGMIIEHEGDRPSSKTEIEMDGKVVNSHVENFLDGALVLEVDERDQDDEEARREMARILKELKQKHPDKEIEQLIELANYQVLSQQQKSRAFYRIQATRLMTGAGNILKRHAADQARKAVSMHEVNTEVTENDPVSKIFFEQGTYQCLENCGTVALTIIRRGGDLTNTVFVDFRTEDGTANAGSDYEFTEGTVVFKPGDTQKEIRVGIIDDDIFEEDENFLVHLSNVKVSSEASEDGILEANHVSTLACLGSPSTATVTIFDDDHAGIFTFEEPVTHVSESIGIMEVKVLRTSGARGNVIVPYKTIEGTARGGGEDFEDTCGELEFQNDEIVKIITIRIFDREEYEKECSFSLVLEEPKWIRRGMKGGFTITGKYLFGQPVFRKVHAREHPILSTVITIADEYDDKQPLTSKEEEERRIAEMGRPILGEHTKLEVIIEESYEFKSTVDKLIKKTNLALVVGTNSWREQFIEAITVSAGEDDDDDECGEEKLPSCFDYVMHFLTVFWKVLFAFVPPTEYWNGWACFIVSILMIGLLTAFIGDLASHFGCTIGLKDSVTAVVFVALGTSVPDTFASKVAATQDQYADASIGNVTGSNAVNVFLGIGVAWSIAAIYHAANGEQFKVSPGTLAFSVTLFTIFAFINVGVLLYRRRPEIGGELGGPRTAKLLTSCLFVLLWLLYIFFSSLEAYCHIKGF

SEQ ID NO: 12443 - protein, 973 aa, Homo Sapiens; identical to SEQ ID NO: 12438

SEQ ID NO: 12444 - protein, 937 aa, Homo Sapiens; identical to SEQ ID NO: 12440

SEQ ID NO: 12445 - protein, 937 aa, Homo Sapiens; identical to SEQ ID NO: 12440

SEQ ID NO: 12446 - protein, 99 aa, Homo Sapiens
MAFSACFGGIIFNILVGVGLGCLLQISRSHTEVKLEPDGLLVWVLAGALGLSLVFSLVSVPLQCFQLSRVYGFCLLLFYLNFLVVALLTEFGVIHLKSM

SEQ ID NO: 12447 - protein, 103 aa, Homo Sapiens
MAGRRLNLRWALSVLCVLLMAETVSGTRGSSTGAHISPQFPASGVNQTPVVDCRKVCGLNVSDRCDFIRTNPDCHSDGGYLDYLEGIFCHFPPSLLPLAVTLY

SEQ ID NO: 12448 - protein, 131 aa, Homo Sapiens
MAGRRLNLRWALSVLCVLLMAETVSGTRGSSTGAHISPQFPASGVNQTPVVDCRKVCGLNVSDRCDFIRTNPDCHSDGGYLDYLEGIFCHFPPSLLPLAVTLYVSWLLYLFLILGVTAAKFFCPNLSAIST

SEQ ID NO: 12449 - protein, 231 aa, Homo Sapiens
MAGRRLNLRWALSVLCVLLMAETVSGTRGSSTGAHISPQFPASGVNQTPVVDCRKVCGLNVSDRCDFIRTNPDCHSDGGYLDYLEGIFCHFPPSLLPLAVTLYVSWLLYLFLILGVTAAKFFCPNLSAISTTLKLSHNVAGVTFLAFGNGAPDIFSALVAFSDPHTAGLALGALFGAGVLVTTVVAGGITILHPFMAASRPFFRDIVFYMVAVFLTFLMLFRGRVTLAWAL

SEQ ID NO: 12450 - protein, 584 aa, Homo Sapiens
MAGRRLNLRWALSVLCVLLMAETVSGTRGSSTGAHISPQFPASGVNQTPVVDCRKVCGLNVSDRCDFIRTNPDCHSDGGYLDYLEGIFCHFPPSLLPLAVTLYVSWLLYLFLILGVTAAKFFCPNLSAISTTLKLSHNVAGVTFLAFGNGAPDIFSALVAFSDPHTAGLALGALFGAGVLVTTVVAGGITILHPFMAASRPFFRDIVFYMVAVFLTFLMLFRGRVTLAWALGYLGLYVFYVVTVILCTWIYQRQRRGSLFCPMPVTPEILSDSEEDRVSSNTNSYDYGDEYRPLFFYQETTAQILVRALNPLDYMKWRRKSAYWKALKVFKLPVEFLLLLTVPVVDPDKDDQNWKRPLNCLHLVISPLVVVLTLQSGTYGVYEIGGLVPVWVVVVIAGTALASVTFFATSDSQPPRLHWLFAFLGFLTSALWINAAATEVVNILRSLGVVFRLSNTVLGLTLLAWGNSIGDAFSDFTLARQGYPRMAFSACFGGIIFNILVGVGLGCLLQISRSHTEVKLEPDGLLVWVLAGALGLSLVFSLVSVPLQCFQLSRVYGFCLLLFYLNFLVVALLTEFGVIHLKSM

SEQ ID NO: 12451 - protein, 584 aa, Homo Sapiens; identical to SEQ ID NO: 12450

SEQ ID NO: 12452 - protein, 528 aa, Homo Sapiens
MAGRRLNLRWALSVLCVLLMAETVSGTRGSSTGAHISPQFPASGVNQTPVVDCRKVCGLNVSDRCDFIRTNPDCHSDGGYLDYLEGIFCHFPPSLLPLAVTLYVSWLLYLFLILGVTAAKFFCPNLSAISTTLKLSHNVAGVTFLAFGNGAPDIFSALVAFSDPHTAGLALGALFGYLGLYVFYVVTVILCTWIYQRQRRGSLFCPMPVTPEILSDSEEDRVSSNTNSYDYGDEYRPLFFYQETTAQILVRALNPLDYMKWRRKSAYWKALKVFKLPVEFLLLLTVPVVDPDKDDQNWKRPLNCLHLVISPLVVVLTLQSGTYGVYEIGGLVPVWVVVVIAGTALASVTFFATSDSQPPRLHWLFAFLGFLTSALWINAAATEVVNILRSLGVVFRLSNTVLGLTLLAWGNSIGDAFSDFTLARQGYPRMAFSACFGGIIFNILVGVGLGCLLQISRSHTEVKLEPDGLLVWVLAGALGLSLVFSLVSVPLQCFQLSRVYGFCLLLFYLNFLVVALLTEFGVIHLKSM

SEQ ID NO: 12453 - protein, 53 aa, Homo Sapiens
MAGRRLNLRWALSVLCVLLMAETVSGTRGSSTGAHISPQFPASVPQGVWPECL

SEQ ID NO: 12454 - protein, 53 aa, Homo Sapiens; identical to SEQ ID NO: 12453

SEQ ID NO: 12455 - protein, 143 aa, Homo Sapiens
MTVGENEGVDDQGGWGKRLTTAGPSCSCADAFSDFTLARQGYPRMAFSACFGGIIFNILVGVGLGCLLQISRSHTEVKLEPDGLLVWVLAGALGLSLVFSLVSVPLQCFQLSRVYGFCLLLFYLNFLVVALLTEFGVIHLKSM

SEQ ID NO: 12456 - protein, 404 aa, Homo Sapiens
  misc_feature (1)..(1): Xaa can be any naturally occurring amino acid
XTLKLSHNVAGVTFLAFGNGAPDIFSALVAFSDPHTAGLALGALFGAGVLVTTVVAGGITILHPFMAASRPFFRDIVFYMVAVFLTFLMLFRGRVTLAWALGYLGLYVFYVVTVILCTWIYQRQRRGSLFCPMPVTPEILSDSEEDRVSSNTNSYDYGDEYRPLFFYQETTAQILVRALNPLDYMKWRRKSAYWKALKVFKLPVEFLLLLTVPVVDPDKDDQNWKRPLNCLHLVISPLVVVLTLQSGTYGVYEIGGLVPVWVVVVIAGTALASVTFFATSDSQPPRLHWLFAFLGFLTSALWINAAATEVVNILRSLGVVFRLSNTVLGLTLLAWGNSIGDAFSDFTLARQGYPRMAFSACFGGIIFNILVGVGLGCLLQISRSHTEVKTRRMQVAGKTKRHGA

SEQ ID NO: 12457 - protein, 701 aa, Homo Sapiens
MARRGWRRAPLRRGVGSSPRARRLMRPLWLLLAVGVFDWAGASDGGGGEARAMDEEIVSEKQAEESHRQDSANLLIFILLLTLTILTIWLFKHRRARFLHETGLAMIYGLLVGLVLRYGIHVPSDVNNVTLSCEVQSSPTTLLVNVSGKFYEYMLKGEISSHELNNVQDNEMLRKVTFDPEVFFNILLPPIIFYAGYSLKRRHFFRNLGSILAYAFLGTAISCFVIGSIMYGCVTLMKVTGQLAGDFYFTDCLLFGAIVSATDPVTVLAIFHELQVDVELYALLFGESVLNDAVAIVLSSSIVAYQPAGDNSHTFDVTAMFKSIGIFLGIFSGSFAMGAATGVVTALVTKFTKLREFQLLETGLFFLMSWSTFLLAEAWGFTGVVAVLFCGITQAHYTYNNLSTESQHRTKQLFELLNFLAENFIFSYMGLTLFTFQNHVFNPTFVVGAFVAIFLGRAANIYPLSLLLNLGRRSKIGSNFQHMMMFAGLRGAMAFALAIRDTATYARQMMFSTTLLIVFFTVWVFGGGTTAMLSCLHIRVGVDSDQEHLGVPENERRTTKAESAWLFRMWYNFDHNYLKPLLTHSGPPLTTTLPACCGPIARCLTSPQAYENQEQLKDDDSDLILNDGDISLTYGDSTVNTEPATSSAPRRFMGNSSEDALDRELAFGDHELVIRGTRLVLPMDDSEPPLNLLDNTRHGPA

SEQ ID NO: 12458 - protein, 669 aa, Homo Sapiens
MARRGWRRAPLRRGVGSSPRARRLMRPLWLLLAVGVFDWAGASDGGGGEARAMDEEIVSEKQAEESHRQDSANLLIFILLLTLTILTIWLFKHRRARFLHETGLAMIYGLLVGLVLRYGIHVPSDVNNVTLSCEVQSSPTTLLVTFDPEVFFNILLPPIIFYAGYSLKRRHFFRNLGSILAYAFLGTAISCFVIGSIMYGCVTLMKVTGQLAGDFYFTDCLLFGAIVSATDPVTVLAIFHELQVDVELYALLFGESVLNDAVAIVLSSSIVAYQPAGDNSHTFDVTAMFKSIGIFLGIFSGSFAMGAATGVVTALVTKFTKLREFQLLETGLFFLMSWSTFLLAEAWGFTGVVAVLFCGITQAHYTYNNLSTESQHRTKQLFELLNFLAENFIFSYMGLTLFTFQNHVFNPTFVVGAFVAIFLGRAANIYPLSLLLNLGRRSKIGSNFQHMMMFAGLRGAMAFALAIRDTATYARQMMFSTTLLIVFFTVWVFGGGTTAMLSCLHIRVGVDSDQEHLGVPENERRTTKAESAWLFRMWYNFDHNYLKPLLTHSGPPLTTTLPACCGPIARCLTSPQAYENQEQLKDDDSDLILNDGDISLTYGDSTVNTEPATSSAPRRFMGNSSEDALDRELAFGDHELVIRGTRLVLPMDDSEPPLNLLDNTRHGPA

SEQ ID NO: 12459 - protein, 184 aa, Homo Sapiens
MDEEIVSEKQAEESHRQDSANLLIFILLLTLTILTIWLFKHRRARFLHETGLAMIYGLLVGLVLRYGIHVPSDVNNVTLSCEVQSSPTTLLVNVSGKFYEYMLKGEISSHELNNVQDNEMLRKVTFDPEVFFNILLPPIIFYAGYSLKRRHFFRNLGSILAYAFLGTAISCFVIGSIMYGCVTL

SEQ ID NO: 12460 - protein, 649 aa, Homo Sapiens
MDEEIVSEKQAEESHRQDSANLLIFILLLTLTILTIWLFKHRRARFLHETGLAMIYGLLVGLVLRYGIHVPSDVNNVTLSCEVQSSPTTLLVNVSGKFYEYMLKGEISSHELNNVQDNEMLRKVTFDPEVFFNILLPPIIFYAGYSLKRRHFFRNLGSILAYAFLGTAISCFVIGSIMYGCVTLMKVTGQLAGDFYFTDCLLFGAIVSATDPVTVLAIFHELQVDVELYALLFGESVLNDAVAIVLSSSIVAYQPAGDNSHTFDVTAMFKSIGIFLGIFSGSFAMGAATGVVTALVTKFTKLREFQLLETGLFFLMSWSTFLLAEAWGFTGVVAVLFCGITQAHYTYNNLSTESQHRTKQLFELLNFLAENFIFSYMGLTLFTFQNHVFNPTFVVGAFVAIFLGRAANIYPLSLLLNLGRRSKIGSNFQHMMMFAGLRGAMAFALAIRDTATYARQMMFSTTLLIVFFTVWVFGGGTTAMLSCLHIRVGVDSDQEHLGVPENERRTTKAESAWLFRMWYNFDHNYLKPLLTHSGPPLTTTLPACCGPIARCLTSPQAYENQEQLKDDDSDLILNDGDISLTYGDSTVNTEPATSSAPRRFMGNSSEDALDRELAFGDHELVIRGTRLVLPMDDSEPPLNLLDNTRHGPA

SEQ ID NO: 12461 - protein, 649 aa, Homo Sapiens; identical to SEQ ID NO: 12460

SEQ ID NO: 12462 - protein, 649 aa, Homo Sapiens; identical to SEQ ID NO: 12460

SEQ ID NO: 12463 - protein, 679 aa, Homo Sapiens
MDEEIVSEKQAEESHRQDSANLLIFILLLTLTILTIWLFKHRRARFLHETGLAMIYGLLVGLVLRYGIHVPSDVNNVTLSCEVQSSPTTLLVNVSGKFYEYMLKGEISSHELNNVQDNEMLRKVTFDPEVFFNILLPPIIFYAGYSLKRRHFFRNLGSILAYAFLGTAISCFVIGSIMYGCVTLMKVTGQLAGDFYFTDCLLFGAIVSATDPVTVLAIFHELQVDVELYALLFGESVLNDAVAIVLSSSIVAYQPAGDNSHTFDVTAMFKSIGIFLGIFSGSFAMGAATGVVTALVTKFTKLREFQLLETGLFFLMSWSTFLLAEAWGFTGVVAVLFCGITQAHYTYNNLSTESQHRTKQLFELLNFLAENFIFSYMGLTLFTFQNHVFNPTFVVGAFVAIFLGRAANIYPLSLLLNLGRRSKIGSNFQHMMMFAGLRGAMAFALAIRDTATYARQMMFSTTLLIVFFTVWVFGGGTTAMLSCLHIRYCARLWGYRDELRHGLYPQGTHSLFGETDRVGVDSDQEHLGVPENERRTTKAESAWLFRMWYNFDHNYLKPLLTHSGPPLTTTLPACCGPIARCLTSPQAYENQEQLKDDDSDLILNDGDISLTYGDSTVNTEPATSSAPRRFMGNSSEDALDRELAFGDHELVIRGTRLVLPMDDSEPPLNLLDNTRHGPA

SEQ ID NO: 12464 - protein, 649 aa, Homo Sapiens; identical to SEQ ID NO: 12460

SEQ ID NO: 12465 - protein, 649 aa, Homo Sapiens; identical to SEQ ID NO: 12460

SEQ ID NO: 12466 - protein, 617 aa, Homo Sapiens
MDEEIVSEKQAEESHRQDSANLLIFILLLTLTILTIWLFKHRRARFLHETGLAMIYGLLVGLVLRYGIHVPSDVNNVTLSCEVQSSPTTLLVTFDPEVFFNILLPPIIFYAGYSLKRRHFFRNLGSILAYAFLGTAISCFVIGSIMYGCVTLMKVTGQLAGDFYFTDCLLFGAIVSATDPVTVLAIFHELQVDVELYALLFGESVLNDAVAIVLSSSIVAYQPAGDNSHTFDVTAMFKSIGIFLGIFSGSFAMGAATGVVTALVTKFTKLREFQLLETGLFFLMSWSTFLLAEAWGFTGVVAVLFCGITQAHYTYNNLSTESQHRTKQLFELLNFLAENFIFSYMGLTLFTFQNHVFNPTFVVGAFVAIFLGRAANIYPLSLLLNLGRRSKIGSNFQHMMMFAGLRGAMAFALAIRDTATYARQMMFSTTLLIVFFTVWVFGGGTTAMLSCLHIRVGVDSDQEHLGVPENERRTTKAESAWLFRMWYNFDHNYLKPLLTHSGPPLTTTLPACCGPIARCLTSPQAYENQEQLKDDDSDLILNDGDISLTYGDSTVNTEPATSSAPRRFMGNSSEDALDRELAFGDHELVIRGTRLVLPMDDSEPPLNLLDNTRHGPA

SEQ ID NO: 12467 - protein, 170 aa, Homo Sapiens
MLSCLHIRVGVDSDQEHLGVPENERRTTKAESAWLFRMWYNFDHNYLKPLLTHSGPPLTTTLPACCGPIARCLTSPQAYENQEQLKDDDSDLILNDGDISLTYGDSTVNTEPATSSAPRRFMGNSSEDALDRELAFGDHELVIRGTRLVLPMDDSEPPLNLLDNTRHGPA

SEQ ID NO: 12468 - protein, 33 aa, Homo Sapiens
  misc_feature (1)..(1): Xaa can be any naturally occurring amino acid
XAMLSCLHIRVGVDSDQEHLKGPQLFLNHRSYL

SEQ ID NO: 12469 - protein, 32 aa, Homo Sapiens
MENGTQILRPTQDPSECTKEVKSLMWVYVLVG

SEQ ID NO: 12470 - protein, 538 aa, Homo Sapiens
MENGTQILRPTQDPSECTKEVKSLMWVYVLVGNIVRGMGETPILPLGISYIEDFAKFENSPLYIGLVETGAIIGPLIGLLLASFCANVYVDTGFVNTDDLIITPTDTRWVGAWWFGFLICAGVNVLTAIPFFFLPNTLPKEGLETNADIIKNENEDKQKEEVKKEKYGITKDFLPFMKSLSCNPIYMLFILVSVIQFNAFVNMISFMPKYLEQQYGISSSDAIFLMGIYNLPPICIGYIIGGLIMKKFKITVKQAAHIGCWLSLLEYLLYFLSFLMTCENSSVVGINTSYEGIPQDLYVENDIFADCNVDCNCPSKIWDPVCGNNGLSYLSACLAGCETSIGTGINMVFQNCSCIQTSGNSSAVLGLCDKGPDCSLMLQYFLILSAMSSFIYSLAAIPGYMVLLRCMKSEEKSLGVGLHTFCTRVFAGIPAPIYFGALMDSTCLHWGTLKCGESGACRIYDSTTFRYIYLGLPAALRGSSFVPALIILILLRKCHLPGENASSGTELIETKVKGKENECKDIYQKSTVLKDDELKTKL

SEQ ID NO: 12471 - protein, 93 aa, Homo Sapiens
MFLTKNCKQEQERVESAKMFLLAITCAFVSKTLSGSYMNSMLTQIERQFNIPTSLVGFINGSFEIDMNMNLQFQFQATCPQTVSCVWKMEPRF

SEQ ID NO: 12472 - protein, 71 aa, Homo Sapiens
MFLTKNCKQEQERVESAKMFLLAITCAFVSKTLSGSYMNSMLTQIERQFNIPTSLVGFINGSFEIGNLLLI

SEQ ID NO: 12473 - protein, 13 aa, Homo Sapiens
MGETEKRIETHRI

SEQ ID NO: 12474 - protein, 51 aa, Homo Sapiens
MGETEKRIETHRIRCLSKLKMFLLAITCAFVSKTLSGSYMNSMLTQIERQF

SEQ ID NO: 12475 - protein, 95 aa, Homo Sapiens
MGETEKRIETHRIRCLSKLKMFLLAITCAFVSKTLSGSYMNSMLTQIERQFNIPTSLVGFINGSFEIDMNMNLQFQFQATCPQTVSCVWKMEPRF

SEQ ID NO: 12476 - protein, 88 aa, Homo Sapiens
MGETEKRIETHRIRCLSKLKMFLLAITCAFVSKTLSGSYMNSMLTQIERQFNIPTSLVGFINGSFEIGNLLLIIFVSYFGTKLHRPIM

SEQ ID NO: 12477 - protein, 91 aa, Homo Sapiens
MGETEKRIETHRIRCLSKLKMFLLAITCAFVSKTLSGSYMNSMLTQIERQFNIPTSLVGFINGSFEIGNLLLIIFVSYFGTKLHRPIMIGI

SEQ ID NO: 12478 - protein, 99 aa, Homo Sapiens
MGETEKRIETHRIRCLSKLKMFLLAITCAFVSKTLSGSYMNSMLTQIERQFNIPTSLVGFINGSFEIGNLLLIIFVSYFGTKLHRPIMIGIGCVVMGLG

SEQ ID NO: 12479 - protein, 137 aa, Homo Sapiens
MGETEKRIETHRIRCLSKLKMFLLAITCAFVSKTLSGSYMNSMLTQIERQFNIPTSLVGFINGSFEIGNLLLIIFVSYFGTKLHRPIMIGIGCVVMGLGCFLKSLPHFLMNQYEYESTVSVSGNLSSNSFLCMENGT

SEQ ID NO: 12480 - protein, 147 aa, Homo Sapiens
MGETEKRIETHRIRCLSKLKMFLLAITCAFVSKTLSGSYMNSMLTQIERQFNIPTSLVGFINGSFEIGNLLLIIFVSYFGTKLHRPIMIGIGCVVMGLGCFLKSLPHFLMNQYEYESTVSVSGNLSSNSFLCMENGTQILRPTQDPS

SEQ ID NO: 12481 - protein, 670 aa, Homo Sapiens
MGETEKRIETHRIRCLSKLKMFLLAITCAFVSKTLSGSYMNSMLTQIERQFNIPTSLVGFINGSFEIGNLLLIIFVSYFGTKLHRPIMIGIGCVVMGLGCFLKSLPHFLMNQYEYESTVSVSGNLSSNSFLCMENGTQILRPTQDPSECTKEVKSLMWVYVLVGNIVRGMGETPILPLGISYIEDFAKFENSPLYIGLVETGAIIGPLIGLLLASFCANVYVDTGFVNTDDLIITPTDTRWVGAWWFGFLICAGVNVLTAIPFFFLPNTLPKEGLETNADIIKNENEDKQKEEVKKEKYGITKDFLPFMKSLSCNPIYMLFILVSVIQFNAFVNMISFMPKYLEQQYGISSSDAIFLMGIYNLPPICIGYIIGGLIMKKFKITVKQAAHIGCWLSLLEYLLYFLSFLMTCENSSVVGINTSYEGIPQDLYVENDIFADCNVDCNCPSKIWDPVCGNNGLSYLSACLAGCETSIGTGINMVFQNCSCIQTSGNSSAVLGLCDKGPDCSLMLQYFLILSAMSSFIYSLAAIPGYMVLLRCMKSEEKSLGVGLHTFCTRVFAGIPAPIYFGALMDSTCLHWGTLKCGESGACRIYDSTTFRYIYLGLPAALRGSSFVPALIILILLRKCHLPGENASSGTELIETKVKGKENECKDIYQKSTVLKDDELKTKL

SEQ ID NO: 12482 - protein, 782 aa, Homo Sapiens [sequence omitted]

SEQ ID NO: 12483 - protein, 1534 aa, Homo Sapiens
MALTPGWGSSAGPVRPELWLLLWAAAWRLGASACPALCTCTGTTVDCHGTGLQAIPKNIPRNTERLELNGNNITRIHKNDFAGLKQLRVLQLMENQIGAVERGAFDDMKELERLRLNRNQLHMLPELLFQNNQALSRLDLSENAIQAIPRKAFRGATDLKNLQLDKNQISCIEEGAFRALRGLEVLTLNNNNITTIPVSSFNHMPKLRTFRLHSNHLFCDCHLAWLSQWLRQRPTIGLFTQCSGPASLRGLNVAEVQKSEFSCSGQGEAGRVPTCTLSSGSCPAMCTCSNGIVDCRGKGLTAIPANLPETMTEIRLELNGIKSIPPGAFSPYRKLRRIDLSNNQIAEIAPDAFQGLRSLNSLVLYGNKITDLPRGVFGGLYTLQLLLLNANKINCIRPDAFQDLQNLSLLSLYDNKIQSLAKGTFTSLRAIQTLHLAQNPFICDCNLKWLADFLRTNPIETSGARCASPRRLANKRIGQIKSKKFRCSAKEQYFIPGTEDYQLNSECNSDVVCPHKCRCEANVVECSSLKLTKIPERIPQSTAELRLNNNEISILEATGMFKKLTHLKKINLSNNKVSEIEDGAFEGAASVSELHLTANQLESIRSGMFRGLDGLRTLMLRNNRISCIHNDSFTGLRNVRLLSLYDNQITTVSPGAFDTLQSLSTLNLLANPFNCNCQLAWLGGWLRKRKIVTGNPRCQNPDFLRQIPLQDVAFPDFRCEEGQEEGGCLPRPQCPQECACLDTVVRCSNKHLRALPKGIPKNVTELYLDGNQFTLVPGQLSTFKYLQLVDLSNNKISSLSNSSFTNMSQLTTLILSYNALQCIPPLAFQGLRSLRLLSLHGNDISTLQEGIFADVTSLSHLAIGANPLYCDCHLRWLSSWVKTGYKEPGIARCAGPQDMEGKLLLTTPAKKFECQGPPTLAVQAKCDLCLSSPCQNQGTCHNDPLEVYRCACPSGYKGRDCEVSLDSCSSGPCENGGTCHAQEGEDAPFTCSCPTGFEGPTCGVNTDDCVDHACANGGVCVDGVGNYTCQCPLQYEGKACEQLVDLCSPDLNPCQHEAQCVGTPDGPRCECMPGYAGDNCSENQDDCRDHRCQNGAQCMDEVNSYSCLCAEGYSGQLCEIPPHLPAPKSPCEGTECQNGANCVDQGNRPVCQCLPGFGGPECEKLLSVNFVDRDTYLQFTDLQNWPRANITLQVSTAEDNGILLYNGDNDHIAVELYQGHVRVSYDPGSYPSSAIYSAETINDGQFHTVELVAFDQMVNLSIDGGSPMTMDNFGKHYTLNSEAPLYVGGMPVDVNSAAFRLWQILNGTGFHGCIRNLYINNELQDFTKTQMKPGVVPGCEPCRKLYCLHGICQPNATPGPMCHCEAGWVGLHCDQPADGPCHGHKCVHGQCVPLDALSYSCQCQDGYSGALCNQAGALAEPCRGLQCLHGHCQASGTKGAHCVCDPGFSGELCEQESECRGDPVRDFHQVQRGYAICQTTRPLSWVECRGSCPGQGCCQGLRLKRRKFTFECSDGTSFAEEVEKPTKCGCALCA

SEQ ID NO: 12484 - protein, 1461 aa, Homo Sapiens
MALTPGWGSSAGPVRPELWLLLWAAAWRLGASACPALCTCTGTTVDCHGTGLQAIPKNIPRNTERLELNGNNITRIHKNDFAGLKQLRVLQLMENQIGAVERGAFDDMKELERLRLNRNQLHMLPELLFQNNQALSRLDLSENAIQAIPRKAFRGATDLKNLQLDKNQISCIEEGAFRALRGLEVLTLNNNNITTIPVSSFNHMPKLRTFRLHSNHLFCDCHLAWLSQWLRQRPTIGLFTQCSGPASLRGLNVAEVQKSEFSCSGQGEAGRVPTCTLSSGSCPAMCTCSNGIVDCRGKGLTAIPANLPETMTEIRLELNGIKSIPPGAFSPYRKLRRIDLSNNQIAEIAPDAFQGLRSLNSLVLYGNKITDLPRGVFGGLYTLQLLLLNANKINCIRPDAFQDLQNLSLLSLYDNKIQSLAKGTFTSLRAIQTLHLAQNPFICDCNLKWLADFLRTNPIETSGARCASPRRLANKRIGQIKSKKFRCSAKEQYFIPGTEDYQLNSECNSDVVCPHKCRCEANVVECSSLKLTKIPERIPQSTAELRLNNNEISILEATGMFKKLTHLKKINLSNNKVSEIEDGAFEGAASVSELHLTANQLESIRSGMFRGLDGLRTLMLRNNRISCIHNDSFTGLRNVRLLSLYDNQITTVSPGAFDTLQSLSTLNLLANPFNCNCQLAWLGGWLRKRKIVTGNPRCQNPDFLRQIPLQDVAFPDFRCEEGQEEGGCLPRPQCPQECACLDTVVRCSNKHLRALPKGIPKNVTELYLDGNQFTLVPGQLSTFKYLQLVDLSNNKISSLSNSSFTNMSQLTTLILSYNALQCIPPLAFQGLRSLRLLSLHGNDISTLQEGIFADVTSLSHLAIGANPLYCDCHLRWLSSWVKTGYKEPGIARCAGPQDMEGKLLLTTPAKKFECQGPPTLAVQAKCDLCLSSPCQNQGTCHNDPLEVYRCACPSGYKGRDCEVSLDSCSSGPCENGGTCHAQEGEDAPFTCSCPTGFEGPTCGVNTDDCVDHACANGGVCVDGVGNYTCQCPLQYEGKACEQLVDLCSPDLNPCQHEAQCVGTPDGPRCECMPGYAGDNCSENQDDCRDHRCQNGAQCMDEVNSYSCLCAEGYSGQLCEIPPHLPAPKSPCEGTECQNGANCVDQGNRPVCQCLPGFGGPECEKLLSVNFVDRDTYLQFTDLQNWPRANITLQVSTAEDNGILLYNGDNDHIAVELYQGHVRVSYDPGSYPSSAIYSAETINDGQFHTVELVAFDQMVNLSIDGGSPMTMDNFGKHYTLNSEAPLYVGGMPVDVNSAAFRLWQILNGTGFHGCIRNLYINNELQDFTKTQMKPGVVPGCEPCRKLYCLHGICQPNATPGPMCHCEAGWVGLHCDQPADGPCHGHKCVHGQCVPLDALSYSCQCQDGYSGALCNQSPSAGGTLSGTFTRSRGAMPSARPRAPCHGWSAGARAQARAAARAFG

SEQ ID NO: 12485 - protein, 409 aa, Homo Sapiens
MALTPGWGSSAGPVRPELWLLLWAAAWRLGASACPALCTCTGTTVDCHGTGLQAIPKNIPRNTERLELNGNNITRIHKNDFAGLKQLRVLQLMENQIGAVERGAFDDMKELERLRLNRNQLHMLPELLFQNNQALSRLDLSENAIQAIPRKAFRGATDLKNLQLDKNQISCIEEGAFRALRGLEVLTLNNNNITTIPVSSFNHMPKLRTFRLHSNHLFCDCHLAWLSQWLRQRPTIGLFTQCSGPASLRGLNVAEVQKSEFSCSGQGEAGRVPTCTLSSGSCPAMCTCSNGIVDCRGKGLTAIPANLPETMTEIRLELNGIKSIPPGAFSPYRKLRRIDLSNNQIAEIAPDAFQGLRSLNSLHTGPVTCPHTTGTHSSHCRAFAVAVPHSRNDLEAMFEEEVPRIFYSA

SEQ ID NO: 12486 - protein, 146 aa, Homo Sapiens
MEAVLFVNAEAAAPRQSGRPRDLNGNNITRITKTDFAGLRHLRVLQLMENKISTIERGAFQDLKELERLRLNRNHLQLFPELLFLGTAKLYRLDLSENQIQAIPRKAFRGAVDIKNLQLDYNQISCIEDGAFRALRDLEVLTLNNN

SEQ ID NO: 12487 - protein, 1439 aa, Homo Sapiens
MENKISTIERGAFQDLKELERLRLNRNHLQLFPELLFLGTAKLYRLDLSENQIQAIPRKAFRGAVDIKNLQLDYNQISCIEDGAFRALRDLEVLTLNNNNITRLSVASFNHMPKLRTFRLHSNNLYCDCHLAWLSDWLRQRPRVGLYTQCMGPSHLRGHNVAEVQKREFVCSARHGGHQSFMAPSCSVLHCPAACTCSNNIVDCRGKGLTEIPTNLPETITEIRLEQNTIKVIPPGAFSPYKKLRRIDLSNNQISELAPDAFQGLRSLNSLVLYGNKITELPKSLFEGLFSLQLLLLNANKINCLRVDAFQDLHNLNLLSLYDNKLQTIAKGTFSPLRAIQTMHLAQNPFICDCHLKWLADYLHTNPIETSGARCTSPRRLANKRIGQIKSKKFRCSGTEDYRSKLSGDCFADLACPEKCRCEGTTVDCSNQKLNKIPEHIPQYTAELRLNNNEFTVLEATGIFKKLPQLRKINFSNNKITDIEEGAFEGASGVNEILLTSNRLENVQHKMFKGLESLKTLMLRSNRITCVGNDSFIGLSSVRLLSLYDNQITTVAPGAFDTLHSLSTLNLLANPFNCNCYLAWLGEWLRKKRIVTGNPRCQKPYFLKEIPIQDVAIQDFTCDDGNDDNSCSPLSRCPTECTCLDTVVRCSNKGLKVLPKGIPRDVTELYLDGNQFTLVPKELSNYKHLTLIDLSNNRISTLSNQSFSNMTQLLTLILSYNRLRCIPPRTFDGLKSLRLLSLHGNDISVVPEGAFNDLSALSHLAIGANPLYCDCNMQWLSDWVKSEYKEPGIARCAGPGEMADKLLLTTPSKKFTCQGPVDVNILAKCNPCLSNPCKNDGTCNSDPVDFYRCTCPYGFKGQDCDVPIHACISNPCKHGGTCHLKEGEEDGFWCICADGFEGENCEVNVDDCEDNDCENNSTCVDGINNYTCLCPPEYTGELCEEKLDFCAQDLNPCQHDSKCILTPKGFKCDCTPGYVGEHCDIDFDDCQDNKCKNGAHCTDAVNGYTCICPEGYSGLFCEFSPPMVLPRTSPCDNFDCQNGAQCIVRINEPICQCLPGYQGEKCEKLVSVNFINKESYLQIPSAKVRPQTNITLQIATDEDSGILLYKGDKDHIAVELYRGRVRASYDTGSHPASAIYSVETINDGNFHIVELLALDQSLSLSVDGGNPKIITNLSKQSTLNFDSPLYVGGMPGKSNVASLRQAPGQNGTSFHGCIRNLYINSELQDFQKVPMQTGILPGCEPCHKKVCAHGTCQPSSQAGFTCECQEGWMGPLCDQRTNDPCLGNKCVHGTCLPINAFSYSCKCLEGHGGVLCDEEEDLFNPCQAIKCKHGKCRLSGLGQPYCECSSGYTGDSCDREISCRGERIRDYYQKQQGYAACQTTKKVSRLECRGGCAGGQCCGPLRSKRRKYSFECTDGSSFVDEVEKVVKCGCTRCVS

SEQ ID NO: 12488 - protein, 1542 aa, Homo Sapiens
MRGVGWQMLSLSLGLVLAILNKVAPQACPAQCSCSGSTVDCHGLALRSVPRNIPRNTERLDLNGNNITRITKTDFAGLRHLRVLQLMENKISTIERGAFQDLKELERLRLNRNHLQLFPELLFLGTAKLYRLDLSENQIQAIPRKAFRGAVDIKNLQLDYNQISCIEDGAFRALRDLEVLTLNNNNITRLSVASFNHMPKLRTFRLHSNNLYCDCHLAWLSDWLRQRPRVGLYTQCMGPSHLRGHNVAEVQKREFVCSDEEEGHQSFMAPSCSVLHCPAACTCSNNIVDCRGKGLTEIPTNLPETITEIRLEQNTIKVIPPGAFSPYKKLRRIDLSNNQISELAPDAFQGLRSLNSLVLYGNKITELPKSLFEGLFSLQLLLLNANKINCLRVDAFQDLHNLNLLSLYDNKLQTIAKGTFSPLRAIQTMHLAQNPFICDCHLKWLADYLHTNPIETSGARCTSPRRLANKRIGQIKSKKFRCSAKEQYFIPGTEDYRSKLSGDCFADLACPEKCRCEGTTVDCSNQKLNKIPEHIPQYTAELRLNNNEFTVLEATGIFKKLPQLRKINFSNNKITDIEEGAFEGASGVNEILLTSNRLENVQHKMFKGLESLKTLMLRSNRITCVGNDSFIGLSSVRLLSLYDNQITTVAPGAFDTLHSLSTLNLLANPFNCNCYLAWLGEWLRKKRIVTGNPRCQKPYFLKEIPIQDVAIQDFTCDDGNDDNSCSPLSRCPTECTCLDTVVRCSNKGLKVLPKGIPRDVTELYLDGNQFTLVPKELSNYKHLTLIDLSNNRISTLSNQSFSNMTQLLTLILSYNRLRCIPPRTFDGLKSLRLLSLHGNDISVVPEGAFNDLSALSHLAIGANPLYCDCNMQWLSDWVKSEYKEPGIARCAGPGEMADKLLLTTPSKKFTCQGPVDVNILAKCNPCLSNPCKNDGTCNSDPVDFYRCTCPYGFKGQDCDVPIHACISNPCKHGGTCHLKEGEEDGFWCICADGFEGENCEVNVDDCEDNDCENNSTCVDGINNYTCLCPPEYTAANLNEVEKGELCEEKLDFCAQDLNPCQHDSKCILTPKGFKCDCTPGYVGEHCDIDFDDCQDNKCKNGAHCTDAVNGYTCICPEGYSGLFCEFSPPMVLPRTSPCDNFDCQNGAQCIVRINEPICQCLPGYQGEKCEKLVSVNFINKESYLQIPSAKVRPQTNITLQIATDEDSGILLYKGDKDHIAVELYRGRVRASYDTGSHPASAIYSVETINDGNFHIVELLALDQSLSLSVDGGNPKIITNLSKQSTLNFDSPLYVGGMPGKSNVASLRQAPGQNGTSFHGCIRNLYINSELQDFQKVPMQTGILPGCEPCHKKVCAHGTCQPSSQAGFTCECQEGWMGPLCDQRTNDPCLGNKCVHGTCLPINAFSYSCKCLEGHGGVLCDEEEDLFNPCQAIKCKHGKCRLSGLGQPYCECSSGYTGDSCDREISCRGERIRDYYQKQQGYAACQTTKKVSRLECRGGCAGGQCCGPLRSKRRKYSFECTDGSSFVDEVEKVVKCGCTRCVS

SEQ ID NO: 12489 - protein, 1529 aa, Homo Sapiens
MRGVGWQMLSLSLGLVLAILNKVAPQACPAQCSCSGSTVDCHGLALRSVPRNIPRNTERLDLNGNNITRITKTDFAGLRHLRVLQLMENKISTIERGAFQDLKELERLRLNRNHLQLFPELLFLGTAKLYRLDLSENQIQAIPRKAFRGAVDIKNLQLDYNQISCIEDGAFRALRDLEVLTLNNNNITRLSVASFNHMPKLRTFRLHSNNLYCDCHLAWLSDWLRQRPRVGLYTQCMGPSHLRGHNVAEVQKREFVCSGHQSFMAPSCSVLHCPAACTCSNNIVDCRGKGLTEIPTNLPETITEIRLEQNTIKVIPPGAFSPYKKLRRIDLSNNQISELAPDAFQGLRSLNSLVLYGNKITELPKSLFEGLFSLQLLLLNANKINCLRVDAFQDLHNLNLLSLYDNKLQTIAKGTFSPLRAIQTMHLAQNPFICDCHLKWLADYLHTNPIETSGARCTSPRRLANKRIGQIKSKKFRCSAKEQYFIPGTEDYRSKLSGDCFADLACPEKCRCEGTTVDCSNQKLNKIPEHIPQYTAELRLNNNEFTVLEATGIFKKLPQLRKINFSNNKITDIEEGAFEGASGVNEILLTSNRLENVQHKMFKGLESLKTLMLRSNRITCVGNDSFIGLSSVRLLSLYDNQITTVAPGAFDTLHSLSTLNLLANPFNCNCYLAWLGEWLRKKRIVTGNPRCQKPYFLKEIPIQDVAIQDFTCDDGNDDNSCSPLSRCPTECTCLDTVVRCSNKGLKVLPKGIPRDVTELYLDGNQFTLVPKELSNYKHLTLIDLSNNRISTLSNQSFSNMTQLLTLILSYNRLRCIPPRTFDGLKSLRLLSLHGNDISVVPEGAFNDLSALSHLAIGANPLYCDCNMQWLSDWVKSEYKEPGIARCAGPGEMADKLLLTTPSKKFTCQGPVDVNILAKCNPCLSNPCKNDGTCNSDPVDFYRCTCPYGFKGQDCDVPIHACISNPCKHGGTCHLKEGEEDGFWCICADGFEGENCEVNVDDCEDNDCENNSTCVDGINNYTCLCPPEYTGELCEEKLDFCAQDLNPCQHDSKCILTPKGFKCDCTPGYVGEHCDIDFDDCQDNKCKNGAHCTDAVNGYTCICPEGYSGLFCEFSPPMVLPRTSPCDNFDCQNGAQCIVRINEPICQCLPGYQGEKCEKLVSVNFINKESYLQIPSAKVRPQTNITLQIATDEDSGILLYKGDKDHIAVELYRGRVRASYDTGSHPASAIYSVETINDGNFHIVELLALDQSLSLSVDGGNPKIITNLSKQSTLNFDSPLYVGGMPGKSNVASLRQAPGQNGTSFHGCIRNLYINSELQDFQKVPMQTGILPGCEPCHKKVCAHGTCQPSSQAGFTCECQEGWMGPLCDQRTNDPCLGNKCVHGTCLPINAFSYSCKCLEGHGGVLCDEEEDLFNPCQAIKCKHGKCRLSGLGQPYCECSSGYTGDSCDREISCRGERIRDYYQKQQGYAACQTTKKVSRLECRGGCAGGQCCGPLRSKRRKYSFECTDGSSFVDEVEKVVKCGCTRCVS

SEQ ID NO: 12490 - protein, 1521 aa, Homo Sapiens
MRGVGWQMLSLSLGLVLAILNKVAPQACPAQCSCSGSTVDCHGLALRSVPRNIPRNTERLDLNGNNITRITKTDFAGLRHLRVLQLMENKISTIERGAFQDLKELERLRLNRNHLQLFPELLFLGTAKLYRLDLSENQIQAIPRKAFRGAVDIKNLQLDYNQISCIEDGAFRALRDLEVLTLNNNNITRLSVASFNHMPKLRTFRLHSNNLYCDCHLAWLSDWLRQRPRVGLYTQCMGPSHLRGHNVAEVQKREFVCSGHQSFMAPSCSVLHCPAACTCSNNIVDCRGKGLTEIPTNLPETITEIRLEQNTIKVIPPGAFSPYKKLRRIDLSNNQISELAPDAFQGLRSLNSLVLYGNKITELPKSLFEGLFSLQLLLLNANKINCLRVDAFQDLHNLNLLSLYDNKLQTIAKGTFSPLRAIQTMHLAQNPFICDCHLKWLADYLHTNPIETSGARCTSPRRLANKRIGQIKSKKFRCSGTEDYRSKLSGDCFADLACPEKCRCEGTTVDCSNQKLNKIPEHIPQYTAELRLNNNEFTVLEATGIFKKLPQLRKINFSNNKITDIEEGAFEGASGVNEILLTSNRLENVQHKMFKGLESLKTLMLRSNRITCVGNDSFIGLSSVRLLSLYDNQITTVAPGAFDTLHSLSTLNLLANPFNCNCYLAWLGEWLRKKRIVTGNPRCQKPYFLKEIPIQDVAIQDFTCDDGNDDNSCSPLSRCPTECTCLDTVVRCSNKGLKVLPKGIPRDVTELYLDGNQFTLVPKELSNYKHLTLIDLSNNRISTLSNQSFSNMTQLLTLILSYNRLRCIPPRTFDGLKSLRLLSLHGNDISVVPEGAFNDLSALSHLAIGANPLYCDCNMQWLSDWVKSEYKEPGIARCAGPGEMADKLLLTTPSKKFTCQGPVDVNILAKCNPCLSNPCKNDGTCNSDPVDFYRCTCPYGFKGQDCDVPIHACISNPCKHGGTCHLKEGEEDGFWCICADGFEGENCEVNVDDCEDNDCENNSTCVDGINNYTCLCPPEYTGELCEEKLDFCAQDLNPCQHDSKCILTPKGFKCDCTPGYVGEHCDIDFDDCQDNKCKNGAHCTDAVNGYTCICPEGYSGLFCEFSPPMVLPRTSPCDNFDCQNGAQCIVRINEPICQCLPGYQGEKCEKLVSVNFINKESYLQIPSAKVRPQTNITLQIATDEDSGILLYKGDKDHIAVELYRGRVRASYDTGSHPASAIYSVETINDGNFHIVELLALDQSLSLSVDGGNPKIITNLSKQSTLNFDSPLYVGGMPGKSNVASLRQAPGQNGTSFHGCIRNLYINSELQDFQKVPMQTGILPGCEPCHKKVCAHGTCQPSSQAGFTCECQEGWMGPLCDQRTNDPCLGNKCVHGTCLPINAFSYSCKCLEGHGGVLCDEEEDLFNPCQAIKCKHGKCRLSGLGQPYCECSSGYTGDSCDREISCRGERIRDYYQKQQGYAACQTTKKVSRLECRGGCAGGQCCGPLRSKRRKYSFECTDGSSFVDEVEKVVKCGCTRCVS

SEQ ID NO: 12491 - protein, 1525 aa, Homo Sapiens
MRGVGWQMLSLSLGLVLAILNKVAPQACPAQCSCSGSTVDCHGLALRSVPRNIPRNTERLDLNGNNITRITKTDFAGLRHLRVLQLMENKISTIERGAFQDLKELERLRLNRNHLQLFPELLFLGTAKLYRLDLSENQIQAIPRKAFRGAVDIKNLQLDYNQISCIEDGAFRALRDLEVLTLNNNNITRLSVASFNHMPKLRTFRLHSNNLYCDCHLAWLSDWLRQRPRVGLYTQCMGPSHLRGHNVAEVQKREFVCSDEEEGHQSFMAPSCSVLHCPAACTCSNNIVDCRGKGLTEIPTNLPETITEIRLEQNTIKVIPPGAFSPYKKLRRIDLSNNQISELAPDAFQGLRSLNSLVLYGNKITELPKSLFEGLFSLQLLLLNANKINCLRVDAFQDLHNLNLLSLYDNKLQTIAKGTFSPLRAIQTMHLAQNPFICDCHLKWLADYLHTNPIETSGARCTSPRRLANKRIGQIKSKKFRCSGTEDYRSKLSGDCFADLACPEKCRCEGTTVDCSNQKLNKIPEHIPQYTAELRLNNNEFTVLEATGIFKKLPQLRKINFSNNKITDIEEGAFEGASGVNEILLTSNRLENVQHKMFKGLESLKTLMLRSNRITCVGNDSFIGLSSVRLLSLYDNQITTVAPGAFDTLHSLSTLNLLANPFNCNCYLAWLGEWLRKKRIVTGNPRCQKPYFLKEIPIQDVAIQDFTCDDGNDDNSCSPLSRCPTECTCLDTVVRCSNKGLKVLPKGIPRDVTELYLDGNQFTLVPKELSNYKHLTLIDLSNNRISTLSNQSFSNMTQLLTLILSYNRLRCIPPRTFDGLKSLRLLSLHGNDISVVPEGAFNDLSALSHLAIGANPLYCDCNMQWLSDWVKSEYKEPGIARCAGPGEMADKLLLTTPSKKFTCQGPVDVNILAKCNPCLSNPCKNDGTCNSDPVDFYRCTCPYGFKGQDCDVPIHACISNPCKHGGTCHLKEGEEDGFWCICADGFEGENCEVNVDDCEDNDCENNSTCVDGINNYTCLCPPEYTGELCEEKLDFCAQDLNPCQHDSKCILTPKGFKCDCTPGYVGEHCDIDFDDCQDNKCKNGAHCTDAVNGYTCICPEGYSGLFCEFSPPMVLPRTSPCDNFDCQNGAQCIVRINEPICQCLPGYQGEKCEKLVSVNFINKESYLQIPSAKVRPQTNITLQIATDEDSGILLYKGDKDHIAVELYRGRVRASYDTGSHPASAIYSVETINDGNFHIVELLALDQSLSLSVDGGNPKIITNLSKQSTLNFDSPLYVGGMPGKSNVASLRQAPGQNGTSFHGCIRNLYINSELQDFQKVPMQTGILPGCEPCHKKVCAHGTCQPSSQAGFTCECQEGWMGPLCDQRTNDPCLGNKCVHGTCLPINAFSYSCKCLEGHGGVLCDEEEDLFNPCQAIKCKHGKCRLSGLGQPYCECSSGYTGDSCDREISCRGERIRDYYQKQQGYAACQTTKKVSRLECRGGCAGGQCCGPLRSKRRKYSFECTDGSSFVDEVEKVVKCGCTRCVS

SEQ ID NO: 12492 - protein, 212 aa, Homo Sapiens
MTQLLTLILSYNRLRCIPPRTFDGLKSLRLLSLHGNDISVVPEGAFNDLSALSHLAIGANPLYCDCNMQWLSDWVKSEYKEPGIARCAGPGEMADKLLLTTPSKKFTCQGLPGPCGFLIPGPVDVNILAKCNPCLSNPCKNDGTCNSDPVDFYRCTCPYGFKGQDCDVPIHACISNPCKHGGTCHLKEGEEDGFWCICADGFEGENCEVNVD

SEQ ID NO: 12493 - protein, 196 aa, Homo Sapiens
  misc_feature (1)..(1): Xaa can be any naturally occurring amino acid
XSDWVKSEYKEPGIARCAGPGEMADKLLLTTPSKKFTCQGPVDVNILAKCNPCLSNPCKNDGTCNSDPVDFYRCTCPYGFKGQDCDVPIHACISNPCKHGGTCHLKEGEEDGFWCICADGFEGENCEVNVDDCEDNDCENNSTCVDGINNYTCLCPPEYTGTNNRKYFAFHQYICLKASLELCYICLVNLFLFDKW

SEQ ID NO: 12494 - protein, 82 aa, Homo Sapiens
  misc_feature (1)..(1): Xaa can be any naturally occurring amino acid
XSYDTGSHPASAIYSVETINDGNFHIVELLALDQSLSLSVDGGNPKIITNLSKQSTLNFDSPLYVGGMPGKSNVASLRQGAL

SEQ ID NO: 12495 - protein, 1530 aa, Homo Sapiens
MAPGWAGVGAAVRARLALALALASVLSGPPAVACPTKCTCSAASVDCHGLGLRAVPRGIPRNAERLDLDRNNITRITKMDFAGLKNLRVLHLEDNQVSVIERGAFQDLKQLERLRLNKNKLQVLPELLFQSTPKLTRLDLSENQIQGIPRKAFRGITDVKNLQLDNNHISCIEDGAFRALRDLEILTLNNNNISRILVTSFNHMPKIRTLRLHSNHLYCDCHLAWLSDWLRQRRTVGQFTLCMAPVHLRGFNVADVQKKEYVCPAPHSEPPSCNANSISCPSPCTCSNNIVDCRGKGLMEIPANLPEGIVEIRLEQNSIKAIPAGAFTQYKKLKRIDISKNQISDIAPDAFQGLKSLTSLVLYGNKITEIVKGLFDGLVSLQLLLLNANKINCLRVNTFQDLQNLNLLSLYDNKLQTISKGLFAPLQSIQTLHLAQNPFVCDCHLKWLADYLQDNPIETSGARCSSPRRLANKRISQIKSKKFRCSGSEDYRSRFSSECFMDLVCPEKCRCEGTIVDCSNQKLVRIPSHLPEYVTDLRLNDNEVSVLEATGIFKKLPNLRKINLSNNKIKEVREGAFDGAASVQELMLTGNQLETVHGRVFRGLSGLKTLMLRSNLIGCVSNDTFAGLSSVRLLSLYDNRITTITPGAFTTLVSLSTINLLSNPFNCNCHLAWLGKWLRKRRIVSGNPRCQKPFFLKEIPIQDVAIQDFTCDGNEESSCQLSPRCPEQCTCMETVVRCSNKGLRALPRGMPKDVTELYLEGNHLTAVPRELSALRHLTLIDLSNNSISMLTNYTFSNMSHLSTLILSYNRLRCIPVHAFNGLRSLRVLTLHGNDISSVPEGSFNDLTSLSHLALGTNPLHCDCSLRWLSEWVKAGYKEPGIARCSSPEPMADRLLLTTPTHRFQCKVLWFCCPGPVDINIVAKCNACLSSPCKNNGTCTQDPVELYRCACPYSYKGKDCTVPINTCIQNPCQHGGTCHLSDSHKDGFSCSCPLGFEGQRCEINPDDCEDNDCENNATCVDGINNYVCICPPNYTGELCDEVIDHCVPELNLCQHEAKCIPLDKGFSCECVPGYSGKLCETDNDDCVAHKCRHGAQCVDTINGYTCTCPQGFSGPFCEHPPPMVLLQTSPCDQYECQNGAQCIVVQQEPTCRCPPGFAGPRCEKLITVNFVGKDSYVELASAKVRPQANISLQVATDKDNGILLYKGDNDPLALELYQGHVRLVYDSLSSPPTTVYSVETVNDGQFHSVELVTLNQTLNLVVDKGTPKSLGKLQKQPAVGINSPLYLGGIPTSTGLSALRQGTDRPLGGFHGCIHEVRINNELQDFKALPPQSLGVSPGCKSCTVCKHGLCRSVEKDSVVCECRPGWTGPLCDQEARDPCLGHRCHHGKCVATGTSYMCKCAEGYGGDLCDNKNDSANACSAFKCHHGQCHISDQGEPYCLCQPGFSGEHCQQENPCLGQVVREVIRRQKGYASCATASKVPIMECRGGCGPQCCQPTRSKRRKYVFQCTDGSSFVEEVERHLECGCLACS

SEQ ID NO: 12496 - protein, 1523 aa, Homo Sapiens
MAPGWAGVGAAVRARLALALALASVLSGPPAVACPTKCTCSAASVDCHGLGLRAVPRGIPRNAERLDLDRNNITRITKMDFAGLKNLRVLHLEDNQVSVIERGAFQDLKQLERLRLNKNKLQVLPELLFQSTPKLTRLDLSENQIQGIPRKAFRGITDVKNLQLDNNHISCIEDGAFRALRDLEILTLNNNNISRILVTSFNHMPKIRTLRLHSNHLYCDCHLAWLSDWLRQRRTVGQFTLCMAPVHLRGFNVADVQKKEYVCPAPHSEPPSCNANSISCPSPCTCSNNIVDCRGKGLMEIPANLPEGIVEIRLEQNSIKAIPAGAFTQYKKLKRIDISKNQISDIAPDAFQGLKSLTSLVLYGNKITEIVKGLFDGLVSLQLLLLNANKINCLRVNTFQDLQNLNLLSLYDNKLQTISKGLFAPLQSIQTLHLAQNPFVCDCHLKWLADYLQDNPIETSGARCSSPRRLANKRISQIKSKKFRCSGSEDYRSRFSSECFMDLVCPEKCRCEGTIVDCSNQKLVRIPSHLPEYVTDLRLNDNEVSVLEATGIFKKLPNLRKINLSNNKIKEVREGAFDGAASVQELMLTGNQLETVHGRVFRGLSGLKTLMLRSNLIGCVSNDTFAGLSSVRLLSLYDNRITTITPGAFTTLVSLSTINLLSNPFNCNCHLAWLGKWLRKRRIVSGNPRCQKPFFLKEIPIQDVAIQDFTCDGNEESSCQLSPRCPEQCTCMETVVRCSNKGLRALPRGMPKDVTELYLEGNHLTAVPRELSALRHLTLIDLSNNSISMLTNYTFSNMSHLSTLILSYNRLRCIPVHAFNGLRSLRVLTLHGNDISSVPEGSFNDLTSLSHLALGTNPLHCDCSLRWLSEWVKAGYKEPGIARCSSPEPMADRLLLTTPTHRFQCKGPVDINIVAKCNACLSSPCKNNGTCTQDPVELYRCACPYSYKGKDCTVPINTCIQNPCQHGGTCHLSDSHKDGFSCSCPLGFEGQRCEINPDDCEDNDCENNATCVDGINNYVCICPPNYTGELCDEVIDHCVPELNLCQHEAKCIPLDKGFSCECVPGYSGKLCETDNDDCVAHKCRHGAQCVDTINGYTCTCPQGFSGPFCEHPPPMVLLQTSPCDQYECQNGAQCIVVQQEPTCRCPPGFAGPRCEKLITVNFVGKDSYVELASAKVRPQANISLQVATDKDNGILLYKGDNDPLALELYQGHVRLVYDSLSSPPTTVYSVETVNDGQFHSVELVTLNQTLNLVVDKGTPKSLGKLQKQPAVGINSPLYLGGIPTSTGLSALRQGTDRPLGGFHGCIHEVRINNELQDFKALPPQSLGVSPGCKSCTVCKHGLCRSVEKDSVVCECRPGWTGPLCDQEARDPCLGHRCHHGKCVATGTSYMCKCAEGYGGDLCDNKNDSANACSAFKCHHGQCHISDQGEPYCLCQPGFSGEHCQQENPCLGQVVREVIRRQKGYASCATASKVPIMECRGGCGPQCCQPTRSKRRKYVFQCTDGSSFVEEVERHLECGCLACS

SEQ ID NO: 12497 - protein, 1393 aa, Homo Sapiens
RDLSENQIQGIPRKAFRGITDVKNLQLDNNHISCIEDGAFRALRDLEILTLNNNNISRILVTSFNHMPKIRTLRLHSNHLYCDCHLAWLSDWLRQRRTVGQFTLCMAPVHLRGFNVADVQKKEYVCPAPHSEPPSCNANSISCPSPCTCSNNIVDCRGKGLMEIPANLPEGIVEIRLEQNSIKAIPAGAFTQYKKLKRIDISKNQISDIAPDAFQGLKSLTSLVLYGNKITEIVKGLFDGLVSLQLLLLNANKINCLRVNTFQDLQNLNLLSLYDNKLQTISKGLFAPLQSIQTLHLAQNPFVCDCHLKWLADYLQDNPIETSGARCSSPRRLANKRISQIKSKKFRCSGSEDYRSRFSSECFMDLVCPEKCRCEGTIVDCSNQKLVRIPSHLPEYVTDLRLNDNEVSVLEATGIFKKLPNLRKINLSNNKIKEVREGAFDGAASVQELMLTGNQLETVHGRVFRGLSGLKTLMLRSNLIGCVSNDTFAGLSSVRLLSLYDNRITTITPGAFTTLVSLSTINLLSNPFNCNCHLAWLGKWLRKRRIVSGNPRCQKPFFLKEIPIQDVAIQDFTCDGNEESSCQLSPRCPEQCTCMETVVRCSNKGLRALPRGMPKDVTELYLEGNHLTAVPRELSALRHLTLIDLSNNSISMLTNYTFSNMSHLSTLILSYNRLRCIPVHAFNGLRSLRVLTLHGNDISSVPEGSFNDLTSLSHLALGTNPLHCDCSLRWLSEWVKAGYKEPGIARCSSPEPMADRLLLTTPTHRFQCKVLWFCCPGPVDINIVAKCNACLSSPCKNNGTCTQDPVELYRCACPYSYKGKDCTVPINTCIQNPCQHGGTCHLSDSHKDGFSCSCPLGFEGQRCEINPDDCEDNDCENNATCVDGINNYVCICPPNYTGELCDEVIDHCVPELNLCQHEAKCIPLDKGFSCECVPGYSGKLCETDNDDCVAHKCRHGAQCVDTINGYTCTCPQGFSGPFCEHPPPMVLLQTSPCDQYECQNGAQCIVVQQEPTCRCPPGFAGPRCEKLITVNFVGKDSYVELASAKVRPQANISLQVATDKDNGILLYKGDNDPLALELYQGHVRLVYDSLSSPPTTVYSVETVNDGQFHSVELVTLNQTLNLVVDKGTPKSLGKLQKQPAVGINSPLYLGGIPTSTGLSALRQGTDRPLGGFHGCIHEVRINNELQDFKALPPQSLGVSPGCKSCTVCKHGLCRSVEKDSVVCECRPGWTGPLCDQEARDPCLGHRCHHGKCVATGTSYMCKCAEGYGGDLCDNKNDSANACSAFKCHHGQCHISDQGEPYCLCQPGFSGEHCQQENPCLGQVVREVIRRQKGYASCATASKVPIMECRGGCGPQCCQPTRSKRRKYVFQCTDGSSFVEEVERHLECGCLACS

SEQ ID NO: 12498 - protein, 163 aa, Homo Sapiens
MKPSIAEMLHRGRMLWIILLSTIALGWTTPIPLIEDSEEIDEPCFDPCYCEVKESLFHIHCDSKGFTNISQITEFWSRPFKLYLQRNSMRKLYTNSFLHLNNAVSINLGNNALQDIQTGAFNGLKILKRLYLHENKLDVFRNDTFLGLESLEYLQADYNVIKR

SEQ ID NO: 12499 - protein, 977 aa, Homo Sapiens
MKPSIAEMLHRGRMLWIILLSTIALGWTTPIPLIEDSEEIDEPCFDPCYCEVKESLFHIHCDSKGFTNISQITEFWSRPFKLYLQRNSMRKLYTNSFLHLNNAVSINLGNNALQDIQTGAFNGLKILKRLYLHENKLDVFRNDTFLGLESLEYLQADYNVIKRIESGAFRNLSKLRVLILNDNLIPMLPTNLFKAVSLTHLDLRGNRLKVLFYRGMLDHIGRSLMELQLEENPWNCTCEIVQLKSWLERIPYTALVGDITCETPFHFHGKDLREIRKTELCPLLSDSEVEASLGIPHSSSSKENAWPTKPSSMLSSVHFTASSVEYKSSNKQPKPTKQPRTPRPPSTSQALYPGPNQPPIAPYQTRPPIPIICPTGCTCNLHINDLGLTVNCKERGFNNISELLPRPLNAKKLYLSSNLIQKIYRSDFWNFSSLDLLHLGNNRISYVQDGAFINLPNLKSLFLNGNDIEKLTPGMFRGLQSLHYLYFEFNVIREIQPAAFSLMPNLKLLFLNNNLLRTLPTDAFAGTSLARLNLRKNYFLYLPVAGVLEHLNAIVQIDLNENPWDCTCDLVPFKQWIETISSVSVVGDVLCRSPENLTHRDVRTIELEVLCPEMLHVAPAGESPAQPGDSHLIGAPTSASPYEFSPPGGPVPLSVLILSLLVLFFSAVFVAAGLFAYVLRRRRKKLPFRSKRQEGVDLTGIQMQCHRLFEDGGGGGGGSGGGGRPTLSSPEKAPPVGHVYEYIPHPVTQMCNNPIYKPREEEEVAVSSAQEAGSAERGGPGTQPPGMGEALLGSEQFAETPKENHSNYRTLLEKEKEWALAVSSSQLNTIVTVNHHHPHHPAVGGVSGVVGGTGGDLAGFRHHEKNGGVVLFPPGGGCGSGSMLLDRERPQPAPCTVGFVDCLYGTVPKLKELHVHPPGMQYPDLQQDARLKETLLFSAGKGFTDHQTQKSDYLELRAKLQTKPDYLEVLEKTTYRF

SEQ ID NO: 12500 - protein, 977 aa, Homo Sapiens; identical to SEQ ID NO: 12499

SEQ ID NO: 12501 - protein, 132 aa, Homo Sapiens
MKSSGLFPFLVLLALGTLAPWAVEGSGKSFKAGVCPPKKSAQCLRYKKPECQSDWQCPGKKRCCPDTCGIKCLDPVDTPNPTRRKPGKCPVTYGQCLMLNPPNFCEMDGQCKRDLKCCMGMCGKSCVSPVKA

SEQ ID NO: 12502 - protein, 600 aa, Homo Sapiens
GKVLSAKVVTNARSPGAKCYGIVTMSSSTEVSRCIAHLHRTELHGQLISVEKVKGDPSKKEMKKENDEKSSSRSSGDKKNTSDRSSKTQASVKKEEKRSSEKSEKKESKDTKKIEGSKSPGHMVILDQTKGDHCRPSRRGRYEKIHGRSKEKERASLDKKRDKDYRRKEILPFEKMKEQRLREHLVRFERLRRAMELRRRREIAERERRERERIRIIREREERERLQRERERLEIERQKLERERMERERLERERIRIEQERRKEAERIAREREELRRQQQQLRYEQEKRNSLKRPRDVDHRRDDPYWSENKKLSLDTDARFGHGSDYSRQQNRFNDFDHRERGRFPESSAVQSSSFERRDRFVGQSEGKKARPTARREDPSFERYPKNFSDSRRNEPPPPRNELRESDRREVRGERDERRTVIIHDRPDITHPRHPREAGPNPSRPTSWKSEGSMSTDKRETRVERPERSGREVSGHSVRGAPPGNRSSASGYGSREGDRGVITDRGGGSQHYPEERHVVERHGRDTSGPRKEWHGPPSQGPSYHDTRRMGDGRAGAGMITQHSSNASPINRIVQISGNSMPRGSGSGFKPFKGGPPRRF

SEQ ID NO: 12503 - protein, 100 aa, Homo Sapiens
GVITDRGGGSQHYPEERHVVERHGRDTSGPRKEWHGPPSQGPSYHDTRRMGDGRAGAGMITQHSSNASPINRIVQISGNSMPRGSGSGFKPFKGGPPRRF

SEQ ID NO: 12504 - protein, 89 aa, Homo Sapiens
MAAATGAVAASAASGQAEGKKITDLRVIDLKSELKRRNLDITGVKTVLISRLKQAIEEEGGDPDNIELTVSTDTPNKKPTKGKDYKLKH

SEQ ID NO: 12505 - protein, 1034 aa, Homo Sapiens
MAAATGAVAASAASGQAEGKKITDLRVIDLKSELKRRNLDITGVKTVLISRLKQAIEEEGGDPDNIELTVSTDTPNKKPTKGKGKKHEADELSGDASVEDDAFIKDCELENQEAHEQDGNDELKDSEEFGENEEENVHSKELLSAEENKRAHELIEAEGIEDIEKEDIESQEIEAQEGEDDTFLTAQDGEEEENEKDIAGSGDGTQEVSKPLPSEGSLAEADHTAHEEMEAHTTVKEAEDDNISVTIQAEDAITLDFDGDDLLETGKNVKITDSEASKPKDGQDAIAQSPEKESKDYEMNANHKDGKKEDCVKGDPVEKEARESSKKAESGDKEKDTLKKGPSSTGASGQAKSSSKESKDSKTSSKDDKGSTSSTSGSSGSSTKNIWVSGLSSNTKAADLKNLFGKYGKVLSAKVVTNARSPGAKCYGIVTMSSSTEVSRCIAHLHRTELHGQLISVEKVKGDPSKKEMKKENDEKSSSRSSGDKKNTSDRSSKTQASVKKEEKRSSEKSEKKESKDTKKIEGKDEKNDNGASGQTSESIKKSEEKKRISSKSPGHMVILDQTKGDHCRPSRRGRYEKIHGRSKEKERASLDKKRDKDYRRKEILPFEKMKEQRLREHLVRFERLRRAMELRRRREIAERERRERERIRIIREREERERLQRERERLEIERQKLERERMERERLERERIRIEQERRKEAERIAREREELRRQQQQLRYEQEKRNSLKRPRDVDHRRDDPYWSENKKLSLDTDARFGHGSDYSRQQNRFNDFDHRERGRFPESSAVQSSSFERRDRFVGQSEGKKARPTARREDPSFERYPKNFSDSRRNEPPPPRNELRESDRREVRGERDERRTVIIHDRPDITHPRHPREAGPNPSRPTSWKSEGSMSTDKRETRVERPERSGREVSGHSVRGAPPGNRSSASGYGSREGDRGVITDRGGGSQHYPEERHVVERHGRDTSGPRKEWHGPPSQGPSYHDTRRMGDGRAGAGMITQHSSNASPINRIVQISGNSMPRGSGSGFKPFKGGPPRRF

SEQ ID NO: 12506 - protein, 229 aa, Homo Sapiens
MAAATGAVAASAASGQAEGKKITDLRVIDLKSELKRRNLDITGVKTVLISRLKQAIEEEGGDPDNIELTVSTDTPNKKPTKGKGKKHEADELSGDASVEDDAFIKDCELENQEAHEQDGNDELKDSEEFGENEEENVHSKELLSAEENKRAHELIEAEGIEDIEKEDIESQEIEAQEGEDDTFLTAQDGEEEENEKDSEASKPKDGQDAIAQSPEKESKDYEMNANHKD

SEQ ID NO: 12507 - protein, 453 aa, Homo Sapiens
MAAATGAVAASAASGQAEGKKITDLRVIDLKSELKRRNLDITGVKTVLISRLKQAIEEEGGDPDNIELTVSTDTPNKKPTKGKGKKHEADELSGDASVEDDAFIKDCELENQEAHEQDGNDELKDSEEFGENEEENVHSKELLSAEENKRAHELIEAEGIEDIEKEDIESQEIEAQEGEDDTFLTAQDGEEEENEKEGSLAEADHTAHEEMEAHTTVKEAEDDNISVTIQAEDAITLDFDGDDLLETGKNVKITDSEASKPKDGQDAIAQSPEKESKDYEMNANHKDGKKEDCVKGDPVEKEARESSKKAESGDKEKDTLKKGPSSTGASGQAKSSSKESKDSKTSSKDDKGSTSSTSGSSGSSTKNIWVSGLSSNTKAADLKNLFGKYGKVLSAKVVTNARSPGAKCYGIVTMSSSTEVSRCIAHLHRTELHGQLISVEKVKGDPSKKEMKK

SEQ ID NO: 12508 - protein, 192 aa, Homo Sapiens
MAAATGAVAASAASGQAEGKKITDLRVIDLKSELKRRNLDITGVKTVLISRLKQAIEEEGGDPDNIELTVSTDTPNKKPTKGKGKKHEADELSGDASVEDDAFIKDGEEEENEKDIAGSGDGTQEVSKPLPSEGSLAEADHTAHEEMEAHTTVKEAEDDNISVTIQAEDAITLDFDGDDLLETGKNVKITDS

SEQ ID NO: 12509 - protein, 177 aa, Homo Sapiens
MAAATGAVAASAASGQAEGKKITDLRVIDLKSELKRRNLDITGVKTVLISRLKQAIEEEGGDPDNIELTVSTDTPNKKPTKGKGKKHEADELSGDASVEDDAFIKEIEAQEGEDDTFLTAQDGEEEENEKALQRNLKTARHHLKMTKEVQVVLVVAVEAQLKISGLVDFHLIPKLLI

SEQ ID NO: 12510 - protein, 161 aa, Homo Sapiens
MAAATGAVAASAASGQAEGKKITDLRVIDLKSELKRRNLDITGVKTVLISRLKQAIEEEGGDPDNIELTVSTDTPNKKPTKGKGKKHEADELSGDASVEDDAFIKEIEAQEGEDDTFLTAQDGEEEENEKEGSLAEADHTAHEEMEAHTTVKEAEDDNISV

SEQ ID NO: 12511 - protein, 62 aa, Homo Sapiens
MAAATGAVAASAASGQAEGKKITDLRVIDLKSELKRRNLDITGVKTVLISRLKQVKNMKQMS

SEQ ID NO: 12512 - protein, 62 aa, Homo Sapiens; identical to SEQ ID NO: 12511

SEQ ID NO: 12513 - protein, 62 aa, Homo Sapiens; identical to SEQ ID NO: 12511

SEQ ID NO: 12514 - protein, 205 aa, Homo Sapiens
  misc_feature (1)..(1): Xaa can be any naturally occurring amino acid
XDITGVKTVLISRLKQAIEEEGGDPDNIELTVSTDTPNKKPTKGKGKKHEADELSGDASVEDDAFIKDCELENQEAHEQDGNDELKDSEEFGENEEENVHSKELLSAEENKRAHELIEAEGIEDIEKEDIESQEIEAQEGEDDTFLTAQDGEEEENEKALQRNLKTARHHLKMTKEVQVVLVVAVEAQLKISGLVDFHLIPKLLI

SEQ ID NO: 12515 - protein, 112 aa, Homo Sapiens
  misc_feature (1)..(1): Xaa can be any naturally occurring amino acid
XLRYEQEKRNSLKRPRDVDHSKYFSSRRDDPYWSENKKLSLDTDARFGHGSDYSRQQNRFNDFDHRERGRFPESSAVQSSSFERRDRFVGQSEGKKARPTARREDPSFERYP

SEQ ID NO: 12516 - protein, 103 aa, Homo Sapiens
MASRWAVQLLLVAAWSMGCGEALKCYTCKEPMTSASCRTITRCKPEDTACMTTLVTVEAEYPFNQSPVVTRSCSSSCVATDPDSIGAAHLIFCCFRDLCNSEL

SEQ ID NO: 12517 - protein, 57 aa, Homo Sapiens
AAAQPPAAAVPGPSVPQPAPGQPSPVLQLQQKQSRISPIQKPQGLDPVEILQEREYR

SEQ ID NO: 12518 - protein, 37 aa, Homo Sapiens
AEGGESALGPDGECFVEGVRGKNHWPIDESSQMSDLP

SEQ ID NO: 12519 - protein, 68 aa, Homo Sapiens
MAIEDGNLEEMEEEVRLKKRKRRRNVDKDPAKEDVEKAKKRRGRPPAEKLSPNPPKLTKQMNAIIDTV

SEQ ID NO: 12520 - protein, 254 aa, Homo Sapiens
MEEEVRLKKRKRRRNVDKDPAKEDVEKAKKRRGRPPAEKLSPNPPKLTKQMNAIIDTVINYKDRCNVEKVPSNSQLEIEGNSSGRQLSEVFIQLPSRKELPEYYELIRKPVDFKKIKERIRNHKYRSLGDLEKDVMLLCHNAQTFNLEGSQIYEDSIVLQSVFKSARQKIAKEEESEDESNEEEEEEDEEESESEAKSVKVKIKLNKKDDKGRDKGKGKKRPNRGKAKPVVSDFDSDEEQDEREQSEGSGTDDE

SEQ ID NO: 12521 - protein, 254 aa, Homo Sapiens; identical to SEQ ID NO: 12520

SEQ ID NO: 12522 - protein, 149 aa, Homo Sapiens
MEEEVRLKKRKRRRNVDKDPAKEDVEKAKKRRGRPPAEKLSPNPPKLTKQMNAIIDTVINYKDSSGRQLSEVFIQLPSRKELPEYYELIRKPVDFKKIKERIRNHKYRSLGDLEKDVMLLCHNAQTFNLEGSQIYEDSIVLQSVFKSAR

SEQ ID NO: 12523 - protein, 169 aa, Homo Sapiens
MEEEVRLKKRKRRRNVDKDPAKEDVEKAKKRRGRPPAEKLSPNPPKLTKQMNAIIDTVINYKDSSGRQLSEVFIQLPSRKELPEYYELIRKPVDFKKIKERIRNHKYRSLGDLEKDVMLLCHNAQTFNLEGSQIYEDSIVLQSVFKSARQKIAKEEESEDESNEEEEEE

SEQ ID NO: 12524 - protein, 192 aa, Homo Sapiens
MEEEVRLKKRKRRRNVDKDPAKEDVEKAKKRRGRPPAEKLSPNPPKLTKQMNAIIDTVINYKDSSGRQLSEVFIQLPSRKELPEYYELIRKPVDFKKIKERIRNHKYRSLGDLEKDVMLLCHNAQTFNLEGSQIYEDSIVLQSVFKSARQKIAKEEESEDESNEEEEEEDEEESESEAKSVKVKIKLNKKDD

SEQ ID NO: 12525 - protein, 202 aa, Homo Sapiens
MEEEVRLKKRKRRRNVDKDPAKEDVEKAKKRRGRPPAEKLSPNPPKLTKQMNAIIDTVINYKDSSGRQLSEVFIQLPSRKELPEYYELIRKPVDFKKIKERIRNHKYRSLGDLEKDVMLLCHNAQTFNLEGSQIYEDSIVLQSVFKSARQKIAKEEESEDESNEEEEEEDEEESESEAKSVKVKIKLNKKDDKGRDKGKGKK

SEQ ID NO: 12526 - protein, 236 aa, Homo Sapiens
MEEEVRLKKRKRRRNVDKDPAKEDVEKAKKRRGRPPAEKLSPNPPKLTKQMNAIIDTVINYKDSSGRQLSEVFIQLPSRKELPEYYELIRKPVDFKKIKERIRNHKYRSLGDLEKDVMLLCHNAQTFNLEGSQIYEDSIVLQSVFKSARQKIAKEEESEDESNEEEEEEDEEESESEAKSVKVKIKLNKKDDKGRDKGKGKKRPNRGKAKPVVSDFDSDEEQDEREQSEGSGTDDE

SEQ ID NO: 12527 - protein, 260 aa, Homo Sapiens
MIINISHVWCCGEMKAIEDGNLEEMEEEVRLKKRKRRRNVDKDPAKEDVEKAKKRRGRPPAEKLSPNPPKLTKQMNAIIDTVINYKDSSGRQLSEVFIQLPSRKELPEYYELIRKPVDFKKIKERIRNHKYRSLGDLEKDVMLLCHNAQTFNLEGSQIYEDSIVLQSVFKSARQKIAKEEESEDESNEEEEEEDEEESESEAKSVKVKIKLNKKDDKGRDKGKGKKRPNRGKAKPVVSDFDSDEEQDEREQSEGSGTDDE

SEQ ID NO: 12528 - protein, 62 aa, Homo Sapiens
MKGTGMRPPHPGMGPPQSPMDQHSQGYMSPHPSPLGAPEHVSSPMSGGGPTPPQMPPSQPGA

SEQ ID NO: 12529 - protein, 244 aa, Homo Sapiens
MKRLAARCFAGLLILSPLTVISDSRPADSGKAIEDGNLEEMEEEVRLKKRKRRRNVDKDPAKEDVEKAKKRRGRPPAEKLSPNPPKLTKQMNAIIDTVINYKDRCNVEKVPSNSQLEIEGNSSGRQLSEVFIQLPSRKELPEYYELIRKPVDFKKIKERIRNHKYRSLGDLEKDVMLLCHNAQTFNLEGSQIYEDSIVLQSVFKSARQKIAKEEESEDESNEEEEEEDEEESESEAKSVKVKIK

SEQ ID NO: 12530 - protein, 245 aa, Homo Sapiens
MKRLAARCFAGLLILSPLTVISDSRPADSGKAIEDGNLEEMEEEVRLKKRKRRRNVDKDPAKEDVEKAKKRRGRPPAEKLSPNPPKLTKQMNAIIDTVINYKDRCNVEKVPSNSQLEIEGNSSGRQLSEVFIQLPSRKELPEYYELIRKPVDFKKIKERIRNHKYRSLGDLEKDVMLLCHNAQTFNLEGSQIYEDSIVLQSVFKSARQKIAKEEESEDESNEEEEEEDEEESESEAKSVKVKIKL

SEQ ID NO: 12531 - protein, 200 aa, Homo Sapiens
MKRLAARCFAGLLILSPLTVISDSRPADSGKAIEDGNLEEMEEEVRLKKRKRRRNVDKDPAKEDVEKAKKRRGRPPAEKLSPNPPKLTKQMNAIIDTVINYKDSSGRQLSEVFIQLPSRKELPEYYELIRKPVDFKKIKERIRNHKYRSLGDLEKDVMLLCHNAQTFNLEGSQIYEDSIVLQSVFKSARQKIAKEEESED

SEQ ID NO: 12532 - protein, 228 aa, Homo Sapiens
MKRLAARCFAGLLILSPLTVISDSRPADSGKAIEDGNLEEMEEEVRLKKRKRRRNVDKDPAKEDVEKAKKRRGRPPAEKLSPNPPKLTKQMNAIIDTVINYKDSSGRQLSEVFIQLPSRKELPEYYELIRKPVDFKKIKERIRNHKYRSLGDLEKDVMLLCHNAQTFNLEGSQIYEDSIVLQSVFKSARQKIAKEEESEDESNEEEEEEDEEESESEAKSVKVKIKLN

SEQ ID NO: 12533 - protein, 229 aa, Homo Sapiens
MKRLAARCFAGLLILSPLTVISDSRPADSGKAIEDGNLEEMEEEVRLKKRKRRRNVDKDPAKEDVEKAKKRRGRPPAEKLSPNPPKLTKQMNAIIDTVINYKDSSGRQLSEVFIQLPSRKELPEYYELIRKPVDFKKIKERIRNHKYRSLGDLEKDVMLLCHNAQTFNLEGSQIYEDSIVLQSVFKSARQKIAKEEESEDESNEEEEEEDEEESESEAKSVKVKIKLNK

SEQ ID NO: 12534 - protein, 276 aa, Homo Sapiens
MKRLAARCFAGLLILSPLTVISDSRPADSGKAIEDGNLEEMEEEVRLKKRKRRRNVDKDPAKEDVEKAKKRRGRPPAEKLSPNPPKLTKQMNAIIDTVINYKDSSGRQLSEVFIQLPSRKELPEYYELIRKPVDFKKIKERIRNHKYRSLGDLEKDVMLLCHNAQTFNLEGSQIYEDSIVLQSVFKSARQKIAKEEESEDESNEEEEEEDEEESESEAKSVKVKIKLNKKDDKGRDKGKGKKRPNRGKAKPVVSDFDSDEEQDEREQSEGSGTDDE

SEQ ID NO: 12535 - protein, 276 aa, Homo Sapiens; identical to SEQ ID NO: 12534

SEQ ID NO: 12536 - protein, 98 aa, Homo Sapiens
MKRLAARCFAGLLILSPLTVISDSRPADSGKCCWLWFKASVCRPSKTAIWRKWKRKYGLRSEKDEEMWIKILQKKMWKKLRREEAALPLRNCHQIPPN

SEQ ID NO: 12537 - protein, 98 aa, Homo Sapiens; identical to SEQ ID NO: 12536

SEQ ID NO: 12538 - protein, 98 aa, Homo Sapiens; identical to SEQ ID NO: 12536

SEQ ID NO: 12539 - protein, 232 aa, Homo Sapiens [sequence omitted]

SEQ ID NO: 12540 - protein, 278 aa, Homo Sapiens
MLMKRLAARCFAGLLILSPLTVISDSRPADSGKAIEDGNLEEMEEEVRLKKRKRRRNVDKDPAKEDVEKAKKRRGRPPAEKLSPNPPKLTKQMNAIIDTVINYKDSSGRQLSEVFIQLPSRKELPEYYELIRKPVDFKKIKERIRNHKYRSLGDLEKDVMLLCHNAQTFNLEGSQIYEDSIVLQSVFKSARQKIAKEEESEDESNEEEEEEDEEESESEAKSVKVKIKLNKKDDKGRDKGKGKKRPNRGKAKPVVSDFDSDEEQDEREQSEGSGTDDE

SEQ ID NO: 12541 - protein, 5 aa, Homo Sapiens
MSTPT

SEQ ID NO: 12542 - protein, 7 aa, Homo Sapiens
MSTPTDP

SEQ ID NO: 12543 - protein, 9 aa, Homo Sapiens
MSTPTDPGA

SEQ ID NO: 12544 - protein, 193 aa, Homo Sapiens
MSTPTDPGAMPHPGPSPGPGPSPGPILGPSPGPGPSPGSVHSMMGPSPGPPSVSHPMPTMGSTDFPQEGMHQMHKPIDGIHDKGIVEDIHCGSMKGTGMRPPHPGMGPPQSPMDQHSQGYMSPHPSPLGAPEHVSSPMSGGGPTPPQMPPSQPGALIPGDPQAMSQPNRGPSPFSPVQLHQLRAQILAYKMLA

SEQ ID NO: 12545 - protein, 215 aa, Homo Sapiens
MSTPTDPGAMPHPGPSPGPGPSPGPILGPSPGPGPSPGSVHSMMGPSPGPPSVSHPMPTMGSTDFPQEGMHQMHKPIDGIHDKGIVEDIHCGSMKGTGMRPPHPGMGPPQSPMDQHSQGYMSPHPSPLGAPEHVSSPMSGGGPTPPQMPPSQPGALIPGDPQAMSQPNRGPSPFSPVQLHQLRAQILAYKMLARGQPLPETLQLAVQGKRTLPGL

SEQ ID NO: 12546 - protein, 1590 aa, Homo Sapiens
MSTPTDPGAMPHPGPSPGPGPSPGPILGPSPGPGPSPGSVHSMMGPSPGPPSVSHPMPTMGSTDFPQEGMHQMHKPIDGIHDKGIVEDIHCGSMKGTGMRPPHPGMGPPQSPMDQHSQGYMSPHPSPLGAPEHVSSPMSGGGPTPPQMPPSQPGALIPGDPQAMSQPNRGPSPFSPVQLHQLRAQILAYKMLARGQPLPETLQLAVQGKRTLPGLQQQQQQQQQQQQQQQQQQQQQQQPQQQPPQPQTQQQQQPALVNYNRPSGPGPELSGPSTPQKLPVPAPGGRPSPAPPAAAQPPAAAVPGPSVPQPAPGQPSPVLQLQQKQSRISPIQKPQGLDPVEILQEREYRLQARIAHRIQELENLPGSLPPDLRTKATVELKALRLLNFQRQLRQEVVACMRRDTTLETALNSKAYKRSKRQTLREARMTEKLEKQQKIEQERKRRQKHQEYLNSILQHAKDFKEYHRSVAGKIQKLSKAVATWHANTEREQKKETERIEKERMRRLMAEDEEGYRKLIDQKKDRRLAYLLQQTDEYVANLTNLVWEHKQAQAAKEKKKRRRRKKKAEENAEGGESALGPDGEPIDESSQMSDLPVKVTHTETGKVLFGPEAPKASQLDAWLEMNPGYEVAPRSDSEESDSDYEEEDEEEESSRQETEEKILLDPNSEEVSEKDAKQIIETAKQDVDDEYSMQYSARGSQSYYTVAHAISERVEKQSALLINGTLKHYQLQGLEWMVSLYNNNLNGILADEMGLGKTIQTIALITYLMEHKRLNGPYLIIVPLSTLSNWTYEFDKWAPSVVKISYKGTPAMRRSLVPQLRSGKFNVLLTTYEYIIKDKHILAKIRWKYMIVDEGHRMKNHHCKLTQVLNTHYVAPRRILLTGTPLQNKLPELWALLNFLLPTIFKSCSTFEQWFNAPFAMTGERVDLNEEETILIIRRLHKVLRPFLLRRLKKEVESQLPEKVEYVIKCDMSALQKILYRHMQAKGILLTDGSEKDKKGKGGAKTLMNTIMQLRKICNHPYMFQHIEESFAEHLGYSNGVINGAELYRASGKFELLDRILPKLRATNHRVLLFCQMTSLMTIMEDYFAFRNFLYLRLDGTTKSEDRAALLKKFNEPGSQYFIFLLSTRAGGLGLNLQAADTVVIFDSDWNPHQDLQAQDRAHRIGQQNEVRVLRLCTVNSVEEKILAAAKYKLNVDQKVIQAGMFDQKSSSHERRAFLQAILEHEEENEEEDEVPDDETLNQMIARREEEFDLFMRMDMDRRREDARNPKRKPRLMEEDELPSWIIKDDAEVERLTCEEEEEKIFGRGSRQRRDVDYSDALTEKQWLRAIEDGNLEEMEEEVRLKKRKRRRNVDKDPAKEDVEKAKKRRGRPPAEKLSPNPPKLTKQMNAIIDTVINYKDRCNVEKVPSNSQLEIEGNSSGRQLSEVFIQLPSRKELPEYYELIRKPVDFKKIKERIRNHKYRSLGDLEKDVMLLCHNAQTFNLEGSQIYEDSIVLQSVFKSARQKIAKEEESEDESNEEEEEEDEEESESEAKSVKVKIKLNKKDDKGRDKGKGKKRPNRGKAKPVVSDFDSDEEQDEREQSEGSGTDDE

SEQ ID NO: 12547 - protein, 1572 aa, Homo Sapiens
MSTPTDPGAMPHPGPSPGPGPSPGPILGPSPGPGPSPGSVHSMMGPSPGPPSVSHPMPTMGSTDFPQEGMHQMHKPIDGIHDKGIVEDIHCGSMKGTGMRPPHPGMGPPQSPMDQHSQGYMSPHPSPLGAPEHVSSPMSGGGPTPPQMPPSQPGALIPGDPQAMSQPNRGPSPFSPVQLHQLRAQILAYKMLARGQPLPETLQLAVQGKRTLPGLQQQQQQQQQQQQQQQQQQQQQQQPQQQPPQPQTQQQQQPALVNYNRPSGPGPELSGPSTPQKLPVPAPGGRPSPAPPAAAQPPAAAVPGPSVPQPAPGQPSPVLQLQQKQSRISPIQKPQGLDPVEILQEREYRLQARIAHRIQELENLPGSLPPDLRTKATVELKALRLLNFQRQLRQEVVACMRRDTTLETALNSKAYKRSKRQTLREARMTEKLEKQQKIEQERKRRQKHQEYLNSILQHAKDFKEYHRSVAGKIQKLSKAVATWHANTEREQKKETERIEKERMRRLMAEDEEGYRKLIDQKKDRRLAYLLQQTDEYVANLTNLVWEHKQAQAAKEKKKRRRRKKKAEENAEGGESALGPDGEPIDESSQMSDLPVKVTHTETGKVLFGPEAPKASQLDAWLEMNPGYEVAPRSDSEESDSDYEEEDEEEESSRQETEEKILLDPNSEEVSEKDAKQIIETAKQDVDDEYSMQYSARGSQSYYTVAHAISERVEKQSALLINGTLKHYQLQGLEWMVSLYNNNLNGILADEMGLGKTIQTIALITYLMEHKRLNGPYLIIVPLSTLSNWTYEFDKWAPSVVKISYKGTPAMRRSLVPQLRSGKFNVLLTTYEYIIKDKHILAKIRWKYMIVDEGHRMKNHHCKLTQVLNTHYVAPRRILLTGTPLQNKLPELWALLNFLLPTIFKSCSTFEQWFNAPFAMTGERVDLNEEETILIIRRLHKVLRPFLLRRLKKEVESQLPEKVEYVIKCDMSALQKILYRHMQAKGILLTDGSEKDKKGKGGAKTLMNTIMQLRKICNHPYMFQHIEESFAEHLGYSNGVINGAELYRASGKFELLDRILPKLRATNHRVLLFCQMTSLMTIMEDYFAFRNFLYLRLDGTTKSEDRAALLKKFNEPGSQYFIFLLSTRAGGLGLNLQAADTVVIFDSDWNPHQDLQAQDRAHRIGQQNEVRVLRLCTVNSVEEKILAAAKYKLNVDQKVIQAGMFDQKSSSHERRAFLQAILEHEEENEEEDEVPDDETLNQMIARREEEFDLFMRMDMDRRREDARNPKRKPRLMEEDELPSWIIKDDAEVERLTCEEEEEKIFGRGSRQRRDVDYSDALTEKQWLRAIEDGNLEEMEEEVRLKKRKRRRNVDKDPAKEDVEKAKKRRGRPPAEKLSPNPPKLTKQMNAIIDTVINYKDSSGRQLSEVFIQLPSRKELPEYYELIRKPVDFKKIKERIRNHKYRSLGDLEKDVMLLCHNAQTFNLEGSQIYEDSIVLQSVFKSARQKIAKEEESEDESNEEEEEEDEEESESEAKSVKVKIKLNKKDDKGRDKGKGKKRPNRGKAKPVVSDFDSDEEQDEREQSEGSGTDDE

SEQ ID NO: 12548 - protein, 1590 aa, Homo Sapiens; identical to SEQ ID NO: 12546

SEQ ID NO: 12549 - protein, 1514 aa, Homo Sapiens
MSTPTDPGAMPHPGPSPGPGPSPGPILGPSPGPGPSPGSVHSMMGPSPGPPSVSHPMPTMGSTDFPQEGMHQMHKPIDGIHDKGIVEDIHCGSMKGTGMRPPHPGMGPPQSPMDQHSQGYMSPHPSPLGAPEHVSSPMSGGGPTPPQMPPSQPGALIPGDPQAMSQPNRGPSPFSPVQLHQLRAQILAYKMLARGQPLPETLQLAVQGKRTLPGLQQQQQQQQQQQQQQQQQQQQQQQPQQQPPQPQTQQQQQPALVNYNRPSGPGPELSGPSTPQKLPVPAPGGRPSPAPPAAAQPPAAAVPGPSVPQPAPGQPSPVLQLQQKQSRISPIQKPQGLDPVEILQEREYRLQARIAHRIQELENLPGSLPPDLRTKATVELKALRLLNFQRQLRQEVVACMRRDTTLETALNSKAYKRSKRQTLREARMTEKLEKQQKIEQERKRRQKHQEYLNSILQHAKDFKEYHRSVAGKIQKLSKAVATWHANTEREQKKETERIEKERMRRLMAEDEEGYRKLIDQKKDRRLAYLLQQTDEYVANLTNLVWEHKQAQAAKEKKKRRRRKKKAEENAEGGESALGPDGEPIDESSQMSDLPVKVTHTETGKVLFGPEAPKASQLDAWLEMNPGYEVAPRSDSEESDSDYEEEDEEEESSRQETEEKILLDPNSEEVSEKDAKQIIETAKQDVDDEYSMQYSARGSQSYYTVAHAISERVEKQSALLINGTLKHYQLQGLEWMVSLYNNNLNGILADEMGLGKTIQTIALITYLMEHKRLNGPYLIIVPLSTLSNWTYEFDKWAPSVVKISYKGTPAMRRSLVPQLRSGKFNVLLTTYEYIIKDKHILAKIRWKYMIVDEGHRMKNHHCKLTQVDLNEEETILIIRRLHKVLRPFLLRRLKKEVESQLPEKVEYVIKCDMSALQKILYRHMQAKGILLTDGSEKDKKGKGGAKTLMNTIMQLRKICNHPYMFQHIEESFAEHLGYSNGVINGAELYRASGKFELLDRILPKLRATNHRVLLFCQMTSLMTIMEDYFAFRNFLYLRLDGTTKSEDRAALLKKFNEPGSQYFIFLLSTRAGGLGLNLQAADTVVIFDSDWNPHQDLQAQDRAHRIGQQNEVRVLRLCTVNSVEEKILAAAKYKLNVDQKVIQAGMFDQKSSSHERRAFLQAILEHEEENEEEDEVPDDETLNQMIARREEEFDLFMRMDMDRRREDARNPKRKPRLMEEDELPSWIIKDDAEVERLTCEEEEEKIFGRGSRQRRDVDYSDALTEKQWLRAIEDGNLEEMEEEVRLKKRKRRRNVDKDPAKEDVEKAKKRRGRPPAEKLSPNPPKLTKQMNAIIDTVINYKDSSGRQLSEVFIQLPSRKELPEYYELIRKPVDFKKIKERIRNHKYRSLGDLEKDVMLLCHNAQTFNLEGSQIYEDSIVLQSVFKSARQKIAKEEESEDESNEEEEEEDEEESESEAKSVKVKIKLNKKDDKGRDKGKGKKRPNRGKAKPVVSDFDSDEEQDEREQSEGSGTDDE

SEQ ID NO: 12550 - protein, 1572 aa, Homo Sapiens; identical to SEQ ID NO: 12547

SEQ ID NO: 12551 - protein, 1428 aa, Homo Sapiens
MSTPTDPGAMPHPGPSPGPGPSPGPILGPSPGPGPSPGSVHSMMGPSPGPPSVSHPMPTMGSTDFPQEGMHQMHKPIDGIHDKGIVEDIHCGSMKGTGMRPPHPGMGPPQSPMDQHSQGYMSPHPSPLGAPEHVSSPMSGGGPTPPQMPPSQPGALIPGDPQAMSQPNRGPSPFSPVQLHQLRAQILAYKMLARGQPLPETLQLAVQGKRTLPGLQQQQQQQQQQQQQQQQQQQQQQQPQQQPPQPQTQQQQQPALVNYNRPSGPGPELSGPSTPQKLPVPAPGGRPSPAPPAAAQPPAAAVPGPSVPQPAPGQPSPVLQLQQKQSRISPIQKPQGLDPVEILQEREYRLQARIAHRIQELENLPGSLPPDLRTKATVELKALRLLNFQRQLRQEVVACMRRDTTLETALNSKAYKRSKRQTLREARMTEKLEKQQKIEQERKRRQKHQEYLNSILQHAKDFKEYHRSVAGKIQKLSKAVATWHANTEREQKKETERIEKERMRRLMAEDEEGYRKLIDQKKDRRLAYLLQQTDEYVANLTNLVWEHKQAQAAKEKKKRRRRKKKAEENAEGGESALGPDGEPIDESSQMSDLPVKVTHTETGKVLFGPEAPKASQLDAWLEMNPGYEVAPRSDSEESDSDYEEEDEEEESSRQETEEKILLDPNSEEVSEKDAKQIIETAKQDVDDEYSMQYSARGSQSYYTVAHAISERVEKQSALLINGTLKHYQLQGLEWMVSLYNNNLNGILADEMGLGKTIQTIALITYLMEHKRLNGPYLIIVPLSTLSNWTYEFDKWAPSVVKISYKGTPAMRRSLVPQLRSGKFNVLLTTYEYIIKDKHILAKIRWKYMIVDEGHRMKNHHCKLTQVLNTHYVAPRRILLTGTPLQNKLPELWALLNFLLPTIFKSCSTFEQWFNAPFAMTGERVDLNEEETILIIRRLHKVLRPFLLRRLKKEVESQLPEKVEYVIKCDMSALQKILYRHMQAKGILLTDGSEKDKKGKGGAKTLMNTIMQLRKICNHPYMFQHIEESFAEHLGYSNGVINGAELYRASGKFELLDRILPKLRATNHRVLLFCQMTSLMTIMEDYFAFRNFLYLRLDGTTKSEDRAALLKKFNEPGSQYFIFLLSTRAGGLGLNLQAADTVVIFDSDWNPHQDLQAQDRAHRIGQQNEVRVLRLCTVNSVEEKILAAAKYKLNVDQKVIQAGMFDQKSSSHERRAFLQAILEHEEENEEEDEVPDDETLNQMIARREEEFDLFMRMDMDRRREDARNPKRKPRLMEEDELPSWIIKDDAEVERLTCEEEEEKIFGRGSRQRRDVDYSDALTEKQWLRAIEDGNLEEMEEEVRLKKRKRRRNVDKDPAKEDVEKAKKRRGRPPAEKLSPNPPKLTKQMNAIIDTVINYKDRCNVEKVPSNSQLEIEGNRKGFVIISTGA

SEQ ID NO: 12552 - protein, 279 aa, Homo Sapiens
MSTPTDPGAMPHPGPSPGPGPSPGPILGPSPGPGPSPGSVHSMMGPSPGPPSVSHPMPTMGSTDFPQEGMHQMHKPIDGIHDKGIVEDIHCGSMKGTGMRPPHPGMGPPQSPMDQHSQGYMSPHPSPLGAPEHVSSPMSGGGPTPPQMPPSQPGALIPGDPQAMSQPNRGPSPFSPVQLHQLRAQILAYKMLARGQPLPETLQLAVQGKRTLPGLQQQQQQQQQQQQQQQQQQQQQQQPQQQPPQPQTQQQQQPALVNYNRPSGRLIRNQMNNAMVQLG

SEQ ID NO: 12553 - protein, 288 aa, Homo Sapiens
MSTPTDPGAMPHPGPSPGPGPSPGPILGPSPGPGPSPGSVHSMMGPSPGPPSVSHPMPTMGSTDFPQEGMHQMHKPIDGIHDKGIVEDIHCGSMKGTGMRPPHPGMGPPQSPMDQHSQGYMSPHPSPLGAPEHVSSPMSGGGPTPPQMPPSQPGALIPGDPQAMSQPNRGPSPFSPVQLHQLRAQILAYKMLARGQPLPETLQLAVQGKRTLPGLQQQQQQQQQQQQQQQQQQQQQQQPQQQPPQPQTQQQQQPALVNYNRPSALNAGNSNLKTPADSVSGEGLLPDS

SEQ ID NO: 12554 - protein, 279 aa, Homo Sapiens; identical to SEQ ID NO: 12552

SEQ ID NO: 12555 - protein, 288 aa, Homo Sapiens; identical to SEQ ID NO: 12553

SEQ ID NO: 12556 - protein, 183 aa, Homo Sapiens [sequence omitted]

SEQ ID NO: 12557 - protein, 248 aa, Homo Sapiens
MWLAIEDGNLEEMEEEVRLKKRKRRRNVDKDPAKEDVEKAKKRRGRPPAEKLSPNPPKLTKQMNAIIDTVINYKDSSGRQLSEVFIQLPSRKELPEYYELIRKPVDFKKIKERIRNHKYRSLGDLEKDVMLLCHNAQTFNLEGSQIYEDSIVLQSVFKSARQKIAKEEESEDESNEEEEEEDEEESESEAKSVKVKIKLNKKDDKGRDKGKGKKRPNRGKAKPVVSDFDSDEEQDEREQSEGSGTDDE

SEQ ID NO: 12558 - protein, 271 aa, Homo Sapiens
  misc_feature (1)..(1): Xaa can be any naturally occurring amino acid
XEEEKIFGRGSRQRRDVDYSDALTEKQWLRAIEDGNLEEMEEEVRLKKRKRRRNVDKDPAKEDVEKAKKRRGRPPAEKLSPNPPKLTKQMNAIIDTVINYKDSSGRQLSEVFIQLPSRKELPEYYELIRKPVDFKKIKERIRNHKYRSLGDLEKDVMLLCHNAQTFNLEGSQIYEDSIVLQSVFKSARQKIAKEEESEDESNEEEEEEDEEESESEAKSVKVKIKLNKKDDKGRDKGKGKKRPNRGKAKPVVSDFDSDEEQDERVSVADWD

SEQ ID NO: 12559 - protein, 270 aa, Homo Sapiens
  misc_feature (1)..(1): Xaa can be any naturally occurring amino acid
XLNLQAADTVVIFDSDWNPHQEEDEVPDDETLNQMIARREEEFDLFMRMDMDRRREDARNPKRKPRLMEEDELPSWIIKDDAEVERLTCEEEEEKIFGRGSRQRRDVDYSDALTEKQWLRAIEDGNLEEMEEEVRLKKRKRRRNVDKDPAKEDVEKAKKRRGRPPAEKLSPNPPKLTKQMNAIIDTVINYKDSSGRQLSEVFIQLPSRKELPEYYELIRKPVDFKKIKERIRNHKYRSLGDLEKDVMLLCHNAQTFNLEGSQIYEDSIVL

SEQ ID NO: 12560 - protein, 228 aa, Homo Sapiens
  misc_feature (1)..(1): Xaa can be any naturally occurring amino acid
XNSEEVSEKDAKQIIETAKQDVDDEYSMQYSARGSQSYYTVAHAISERVEKQSALLINGTLKHYQLQGLEWMVSLYNNNLNGILADEMGLGKTIQTIALITYLMEHKRLNGPYLIIVPLSTLSNWTYEFDKWAPSVVKISYKGTPAMRRSLVPQLRSGKFNVLLTTYEYIIKDKHILAKVDLNEEETILIIRRLHKVLRPFLLRRLKKEVESQLPEKVEYVIKCDMSA

SEQ ID NO: 12561 - protein, 58 aa, Homo Sapiens
  misc_feature (1)..(1): Xaa can be any naturally occurring amino acid
XPFPSSLFFPDQLMKRLAARCFAGLLILSPLTVISDSRPADSGHRRRQFGGNGRGSTA

SEQ ID NO: 12562 - protein, 38 aa, Homo Sapiens
  misc_feature (1)..(1): Xaa can be any naturally occurring amino acid
XSGRQLSEVFIQLPSRKELPEYYELIRKPVDFKKIKDS

SEQ ID NO: 12563 - protein, 1419 aa, Homo Sapiens
MAEGLERVRISASELRGILATLAPQAGSRENMKELKEARPRKDNRRPDLEIYKPGLSRLRNKPKIKEPPGSEEFKDEIVNDRDCSAVENGTQPVKDVCKELNNQEQNGPIDPENNRGQESFPRTAGQEDRSLKIIKRTKKPDLQIYQPGRRLQTVSKESASRVEEEEVLNQVEQLRVEEDECRGNVAKEEVANKPDRAEIEKSPGGGRVGAAKGEKGKRMGKGEGVRETHDDPARGRPGSAKRYSRSDKRRNRYRTRSTSSAGSNNSAEGAGLTDNGCRRRRQDRTKERPRLKKQVSVSSTDSLDEDRIDEPDGLGPRRSSERKRHLERNWSGRGEGEQKNSAKEYRGTLRVTFDAEAMNKESPMVRSARDDMDRGKPDKGLSSGGKGSEKQESKNPKQELRGRGRGILILPAHTTLSVNSAGSPESAPLGPRLLFGSGSKGSRSWGRGGTTRRLWDPNNPDQKPALKTQTPQLHFLDTDDEVSPTSWGDSRQAQASYYKFQNSDNPYYYPRTPGPASQYPYTGYNPLQYPVGPTNGVYPGPYYPGYPTPSGQYVCSPLPTSTMSPEEVEQHMRNLQQQELHRLLRVADNQELQLSNLLSRDRISPEGLEKMAQLRAELLQLYERCILLDIEFSDNQNVDQILWKNAFYQVIEKFRQLVKDPNVENPEQIRNRLLELLDEGSDFFDSLLQKLQVTYKFKLEDYMDGLAIRSKPLRKTVKYALISAQRCMICQGDIARYREQASDTANYGKARSWYLKAQHIAPKNGRPYNQLALLAVYTRRKLDAVYYYMRSLAASNPILTAKESLMSLFEETKRKAEQMEKKQHEEFDLSPDQWRKGKKSTFRHVGDDTTRLEIWIHPSHPRSSQGTESGKDSEQENGLGSLSPSDLNKRFILSFLHAHGKLFTRIGMETFPAVAEKVLKEFQVLLQHSPSPIGSTRMLQLMTINMFAVHNSQLKDCFSEECRSVIQEQAAALGLAMFSLLVRRCTCLLKESAKAQLSSPEDQDDQDDIKVSSFVPDLKELLPSVKVWSDWMLGYPDTWNPPPTSLDLPSHVAVDVWSTLADFCNILTAVNQSEVPLYKDPDDDLTLLILEEDRLLSGFVPLLAAPQDPCYVEKTSDKVIAADCKRVTVLKYFLEALCGQEEPLLAFKGGKYVSVAPVPDTMGKEMGSQEGTRLEDEEEDVVIEDFEEDSEAEGSGGEDDIRELRAKKLALARKIAEQQRRQEKIQAVLEDHSQMRQMELEIRPLFLVPDTNGFIDHLASLARLLESRKYILVVPLIVINELDGLAKGQETDHRAGGYARVVQEKARKSIEFLEQRFESRDSCLRALTSRGNELESIAFRSEDITGQLGNNDDLILSCCLHYCKDKAKDFMPASKEEPIRLLREVVLLTDDRNLRVKALTRNVPVRDIPAFLTWAQVG

SEQ ID NO: 12564 - protein, 119 aa, Homo Sapiens
METFPAVAEKVLKEFQVLLQHSPSPIGSTRMLQLMTINMFAVHNSQLKDCFSEECRSVIQEQAAALGLAMFSLLVRRCTCLLKESAKAQLSSPEDQDDQDDIKVSSFVPDLKELLPSVK

SEQ ID NO: 12565 - protein, 123 aa, Homo Sapiens
METFPAVAEKVLKEFQVLLQHSPSPIGSTRMLQLMTINMFAVHNSQLKDCFSEECRSVIQEQAAALGLAMFSLLVRRCTCLLKESAKAQLSSPEDQDDQDDIKVSSFVPDLKELLPSVKVWSD

SEQ ID NO: 12566 - protein, 162 aa, Homo Sapiens
METFPAVAEKVLKEFQVLLQHSPSPIGSTRMLQLMTINMFAVHNSQLKDCFSEECRSVIQEQAAALGLAMFSLLVRRCTCLLKESAKAQLSSPEDQDDQDDIKVSSFVPDLKELLPSVKVWSDWMLGYPDTWNPPPTSLDLPSHVAVDVWSTLADFCNILTA

SEQ ID NO: 12567 - protein, 163 aa, Homo Sapiens
METFPAVAEKVLKEFQVLLQHSPSPIGSTRMLQLMTINMFAVHNSQLKDCFSEECRSVIQEQAAALGLAMFSLLVRRCTCLLKESAKAQLSSPEDQDDQDDIKVSSFVPDLKELLPSVKVWSDWMLGYPDTWNPPPTSLDLPSHVAVDVWSTLADFCNILTAV

SEQ ID NO: 12568 - protein, 164 aa, Homo Sapiens
METFPAVAEKVLKEFQVLLQHSPSPIGSTRMLQLMTINMFAVHNSQLKDCFSEECRSVIQEQAAALGLAMFSLLVRRCTCLLKESAKAQLSSPEDQDDQDDIKVSSFVPDLKELLPSVKVWSDWMLGYPDTWNPPPTSLDLPSHVAVDVWSTLADFCNILTAVN

SEQ ID NO: 12569 - protein, 511 aa, Homo Sapiens
METFPAVAEKVLKEFQVLLQHSPSPIGSTRMLQLMTINMFAVHNSQLKDCFSEECRSVIQEQAAALGLAMFSLLVRRCTCLLKESAKAQLSSPEDQDDQDDIKVSSFVPDLKELLPSVKVWSDWMLGYPDTWNPPPTSLDLPSHVAVDVWSTLADFCNILTAVNQSEVPLYKDPDDDLTLLILEEDRLLSGFVPLLAAPQDPCYVEKTSDKVIAADCKRVTVLKYFLEALCGQEEPLLAFKGGKYVSVAPVPDTMGKEMGSQEGTRLEDEEEDVVIEDFEEDSEAEGSGGEDDIRELRAKKLALARKIAEQQRRQEKIQAVLEDHSQMRQMELEIRPLFLVPDTNGFIDHLASLARLLESRKYILVVPLIVINELDGLAKGQETDHRAGGYARVVQEKARKSIEFLEQRFESRDSCLRALTSRGNELESIAFRSEDITGQLGNNDDLILSCCLHYCKDKAKDFMPASKEEPIRLLREVVLLTDDRNLRVKALTRNVPVRDIPAFLTWAQVG

SEQ ID NO: 12570 - protein, 511 aa, Homo Sapiens; identical to SEQ ID NO: 12569

SEQ ID NO: 12571 - protein, 115 aa, Homo Sapiens
MFSLLVRRCTCLLKESAKAQLSSPEDQDDQDDIKVSSFVPDLKELLPSVKVWSDWMLGYPDTWNPPPTSLDLPSHVAVDVWSTLADFCNILTAVNQSEVPLYKDPDDDLTLLILE

SEQ ID NO: 12572 - protein, 124 aa, Homo Sapiens
MFSLLVRRCTCLLKESAKAQLSSPEDQDDQDDIKVSSFVPDLKELLPSVKVWSDWMLGYPDTWNPPPTSLDLPSHVAVDVWSTLADFCNILTAVNQSEVPLYKDPDDDLTLLILEEDRLLSGFV

SEQ ID NO: 12573 - protein, 139 aa, Homo Sapiens
MFSLLVRRCTCLLKESAKAQLSSPEDQDDQDDIKVSSFVPDLKELLPSVKVWSDWMLGYPDTWNPPPTSLDLPSHVAVDVWSTLADFCNILTAVNQSEVPLYKDPDDDLTLLILEEDRLLSGFVPLLAAPQDPCYVEKT

SEQ ID NO: 12574 - protein, 208 aa, Homo Sapiens
MTGPCIRQLSLQILFPLCVAVDVWSTLADFCNILTAVNQSEVPLYKDPDDDLTLLILEEDRLLSGFVPLLAAPQDPCYVEKTSDKVIAADCKRVTVLKYFLEALCGQEEPLLAFKGGKYVSVAPVPDTMGKEMGSQEGTRLEDEEEDVVIEDFEEDSEAEGSGGEDDIRELRAKKLALARKIAEQQRRQEKIQAVLEDHSQMRQMELE

SEQ ID NO: 12575 - protein, 49 aa, Homo Sapiens
MIGDILLFGTLLMNAGAVLNFKLKKKDTQGFGEESREPSTGCSALESQR

SEQ ID NO: 12576 - protein, 49 aa, Homo Sapiens; identical to SEQ ID NO: 12575

SEQ ID NO: 12577 - protein, 49 aa, Homo Sapiens; identical to SEQ ID NO: 12575

SEQ ID NO: 12578 - protein, 49 aa, Homo Sapiens; identical to SEQ ID NO: 12575

SEQ ID NO: 12579 - protein, 75 aa, Homo Sapiens
MIGDILLFGTLLMNAGAVLNFKLKKKDTQGFGEESREPSTGDNIREFLLSLRYFRIFIALWNIFMMFCMIVLFGS

SEQ ID NO: 12580 - protein, 75 aa, Homo Sapiens; identical to SEQ ID NO: 12579

SEQ ID NO: 12581 - protein, 75 aa, Homo Sapiens; identical to SEQ ID NO: 12579

SEQ ID NO: 12582 - protein, 75 aa, Homo Sapiens; identical to SEQ ID NO: 12579

SEQ ID NO: 12583 - protein, 75 aa, Homo Sapiens; identical to SEQ ID NO: 12579

SEQ ID NO: 12584 - protein, 75 aa, Homo Sapiens; identical to SEQ ID NO: 12579

SEQ ID NO: 12585 - protein, 103 aa, Homo Sapiens
MIGDILLFGTLLMNAGAVLNFKLKKKDTQGFGEESREPSTGDNIREFLLSLRYFRIFIALWNIFMMFCMIVLRKLKQIAFPSSTGAITLILLLTNCEICCKWI

SEQ ID NO: 12586 - protein, 103 aa, Homo Sapiens; identical to SEQ ID NO: 12585

SEQ ID NO: 12587 - protein, 103 aa, Homo Sapiens; identical to SEQ ID NO: 12585

SEQ ID NO: 12588 - protein, 47 aa, Homo Sapiens
MIGDILLFGTLLMNAGAVLNFKLKKKDTQGFGEESREPSTGLERESD

SEQ ID NO: 12589 - protein, 56 aa, Homo Sapiens
MIGDILLFGTLLMNAGAVLNFKLKKKDTQGFGEESREPSTGWSAVVRSWLTADSTS

SEQ ID NO: 12590 - protein, 63 aa, Homo Sapiens
MNAGAVLNFKLKKKDTQGFGEESREPSTGDNIREFLLSLRYFRIFIALWNIFMMFCMIVLFGS

SEQ ID NO: 12591 - protein, 63 aa, Homo Sapiens; identical to SEQ ID NO: 12590

SEQ ID NO: 12592 - protein, 435 aa, Homo Sapiens
MLPARCARLLTPHLLLVLVQLSPARGHRTTGPRFLISDRDPQCNLHCSRTQPKPICASDGRSYESMCEYQRAKCRDPTLGVVHRGRCKDAGQSKCRLERAQALEQAKKPQEAVFVPECGEDGSFTQVQCHTYTGYCWCVTPDGKPISGSSVQNKTPVCSGSVTDKPLSQGNSGRKDDGSKPTPTMETQPVFDGDEITAPTLWIKHLVIKDSKLNNTNIRNSEKVYSCDQERQSALEEAQQNPREGIVIPECAPGGLYKPVQCHQSTGYCWCVLVDTGRPLPGTSTRYVMPSCESDARAKTTEADDPFKDRELPGCPEGKKMEFITSLLDALTTDMVQAINSAAPTGGGRFSEPDPSHTLEERVVHWYFSQLDSNSSNDINKREMKPFKRYVKKKAKPKKCARRFTDYCDLNKDKVISLPELKGCLGVSKEVGRLV

SEQ ID NO: 12593 - protein, 434 aa, Homo Sapiens
MLPARCARLLTPHLLLVLVQLSPARGHRTTGPRFLISDRDPQCNLHCSRTQPKPICASDGRSYESMCEYQRAKCRDPTLGVVHRGRCKDAGQSKCRLERAQALEQAKKPQEAVFVPECGEDGSFTQVQCHTYTGYCWCVTPDGKPISGSSVQNKTPVCSGSVTDKPLSQGNSGRKDDGSKPTPTMETQPVFDGDEITAPTLWIKHLVIKDSKLNNTNIRNSEKVYSCDQERQSALEEAQQNPREGIVIPECAPGGLYKPVQCHQSTGYCWCVLVDTGRPLPGTSTRYVMPSCESDARAKTTEADDPFKDRELPGCPEGKKMEFITSLLDALTTDMVQAINSAAPTGGGRFSEPDPSHTLEERVVHWYFSQLDSNSSNDINKREMKPFKRYVKKKAKPKKCARRFTDYCDLNKDKVISLPELKGCLGVSKEGRLV

SEQ ID NO: 12594 - protein, 67 aa, Homo Sapiens
GKKEIKPFKRFLRKKSKPKKCVKKFVEYCDVNNDKSISVQELMGCLGVAKEDGKADTKKRHRSKRNL

SEQ ID NO: 12595 - protein, 84 aa, Homo Sapiens
KKSKPKKCVKKFVEYCDVNNDKSISVQELMGCLGVAKEDGKADTKKRHTPRGHAESTSNRQDAMVVSSRPKATTHRKSRTLSRR

SEQ ID NO: 12596 - protein, 446 aa, Homo Sapiens
MLLPQLCWLPLLAGLLPPVPAQKFSALTFLRVDQDKDKDCSLDCAGSPQKPLCASDGRTFLSRCEFQRAKCKDPQLEIAYRGNCKDVSRCVAERKYTQEQARKEFQQVFIPECNDDGTYSQVQCHSYTGYCWCVTPNGRPISGTAVAHKTPRCPGSVNEKLPQREGTGKTDDAAAPALETQPQGDEEDIASRYPTLWTEQVKSRQNKTNKNSVSSCDQEHQSALEEAKQPKNDNVVIPECAHGGLYKPVQCHPSTGYCWCVLVDTGRPIPGTSTRYEQPKCDNTARAHPAKARDLYKGRQLQGCPGAKKHEFLTSVLDALSTDMVHAASDPSSSSGRLSEPDPSHTLEERVVHWYFKLLDKNSSGDIGKKEIKPFKRFLRKKSKPKKCVKKFVEYCDVNNDKSISVQELMGCLGVAKEDGKADTKKRHTPRGHAESTSNRQPRKQG

SEQ ID NO: 12597 - protein, 457 aa, Homo Sapiens
MLLPQLCWLPLLAGLLPPVPAQKFSALTFLRVDQDKDKDCSLDCAGSPQKPLCASDGRTFLSRCEFQRAKCKDPQLEIAYRGNCKDVSRCVAERKYTQEQARKEFQQVFIPECNDDGTYSQVQCHSYTGYCWCVTPNGRPISGTAVAHKTPRCPGSVNEKLPQREGTGKTVSLQIFSVLNSDDAAAPALETQPQGDEEDIASRYPTLWTEQVKSRQNKTNKNSVSSCDQEHQSALEEAKQPKNDNVVIPECAHGGLYKPVQCHPSTGYCWCVLVDTGRPIPGTSTRYEQPKCDNTARAHPAKARDLYKGRQLQGCPGAKKHEFLTSVLDALSTDMVHAASDPSSSSGRLSEPDPSHTLEERVVHWYFKLLDKNSSGDIGKKEIKPFKRFLRKKSKPKKCVKKFVEYCDVNNDKSISVQELMGCLGVAKEDGKADTKKRHTPRGHAESTSNRQPRKQG

SEQ ID NO: 12598 - protein, 136 aa, Homo Sapiens
MVGGCLGGSKSSHSAWEGPILPKCKSSRGVTELANRLVCLVFLLHVDIILLILLPGPPQGYRKVKSSPEPIMSSLLTEGTAGYVVPPGLVLAAGGGAGSPRFLSAFLNASRVRELANGKFIRVALAEKDRSGMPTQ

SEQ ID NO: 12599 - protein, 453 aa, Homo Sapiens
MALVRALVCCLLTAWHCRSGLGLPVAPAGGRNPPPAIGQFWHVTDLHLDPTYHITDDHTKVCASSKGANASNPGPFGDVLCDSPYQLILSAFDFIKNSGQEASFMIWTGDSPPHVPVPELSTDTVINVITNMTTTIQSLFPNLQVFPALGNHDYWPQDQLPVVTSKVYNAVANLWKPWLDEEAISTLRKGGFYSQKVTTNPNLRIISLNTNLYYGPNIMTLNKTDPANQFEWLESTLNNSQQNKEKVYIIAHVPVGYLPSSQNITAMREYYNEKLIDIFQKYSDVIAGQFYGHTHRDSIMVLSDKKGSPVNSLFVAPAVTPVKSVLEKQTNNPGIRLFQYDPRDYKLLDMLQYYLNLTEANLKGESIWKLEYILTQTYDIEDLQPESLYGLAKQFTILDSKQFIKYYNYFFVSYDSSVTCDKTCKAFQICAIMNLDNISYADCLKQLYIKHNY

SEQ ID NO: 12600 - protein, 322 aa, Homo Sapiens
MTTTIQSLFPNLQVFPALGNHDYWPQDQLPVVTSKVYNAVANLWKPWLDEEAISTLRKGGFYSQKVTTNPNLRIISLNTNLYYGPNIMTLNKTDPANQFEWLESTLNNSQQNKEKVYIIAHVPVGYLPSSQNITAMREYYNEKLIDIFQKYSDVIAGQFYGHTHRDSIMVLSDKKGSPVNSLFVAPAVTPVKSVLEKQTNNPGIRLFQYDPRDYKLLDMLQYYLNLTEANLKGESIWKLEYILTQTYDIEDLQPESLYGLAKQFTILDSKQFIKYYNYFFVSYDSSVTCDKTCKAFQICAIMNLDNISYADCLKQLYIKHNY

SEQ ID NO: 12601 - protein, 269 aa, Homo Sapiens
MRLLAWLIFLANWGGARAEPEEAQGPCAQEKGKGPPPTSILASLAPGLEAGKFWHIADLHLDPDYKVSKDPFQVCPSAGSQPVPDAGPWGDYLCDSPWALINSSIYAMKEIEPEPDFILWTGDDTPHVPDEKLGEAAVLEIVERLTKLIREVFPDTKVYAALGNHDFHPKNQFPAGSNNIYNQIAELWKPWLSNESIALFKKGAFYCEKLPGPSGAGRIVVLNTNLYYTSNALTADMADPGQQFQWLEDVLTDASKAGDMVYIVGHVPP

SEQ ID NO: 12602 - protein, 102 aa, Homo Sapiens
MRLLAWLIFLANWGGARAEPGKFWHIADLHLDPDYKVSKDPFQVCPSAGSQPVPDAGPWGDYLCDSPWALINSSIYAMKEIEPEPDFILWTGAVPSFSSAAS

SEQ ID NO: 12603 - protein, 455 aa, Homo Sapiens
MRLLAWLIFLANWGGARAEPGKFWHIADLHLDPDYKVSKDPFQVCPSAGSQPVPDAGPWGDYLCDSPWALINSSIYAMKEIEPEPDFILWTGDDTPHVPDEKLGEAAVLEIVERLTKLIREVFPDTKVYAALGNHDFHPKNQFPAGSNNIYNQIAELWKPWLSNESIALFKKGAFYCEKLPGPSGAGRIVVLNTNLYYTSNALTADMADPGQQFQWLEDVLTDASKAGDMVYIVGHVPPGFFEKTQNKAWFREGFNEKYLKVVRKHHRVIAGQFFGHHHTDSFRMLYDDAGVPISAMFITPGVTPWKTTLPGVVNGANNPAIRVFEYDRATLSLKDMVTYFMNLSQANAQGTPRWELEYQLTEAYGVPDASAHSMHTVLDRIAGDQSTLQRYYVYNSVSYSAGVCDEACSMQHVCAMRQVDIDAYTTCLYASGTTPVPQLPLLLMALLGLCTLVL

SEQ ID NO: 12604 - protein, 373 aa, Homo Sapiens
MRLLAWLIFLANWGGARAEPGKFWHIADLHLDPDYKVSKDPFQVCPSAGSQPVPDAGPWGDYLCDSPWALINSSIYAMKEIEPEPDFILWTGDDTPHVPDEKLGEAAVLEIVERLTKLIREVFPDTKVYAALGNHDFHPKNQFPAGSNNIYNQIAELWKPWLSNESIALFKKGAFYCEKLPGPSGAGRIVVLNTNLYYTSNALTADMADPGQQFQWLEDVLTDASKAGDMVYIVGHVPPGFFEKTQNKAWFREGFNEKYLKVVRKHHRVIAGQFFGHHHTDSFRMLYDDAGVPISAMFITPGVTPWKTTLPGVVNGANNPAIRVFEYDRATLSLKVRSPAEARGGGWEGLKCITTFPHSQLIHLPLTTEPQEG

SEQ ID NO: 12605 - protein, 407 aa, Homo Sapiens
MRLLAWLIFLANWGGARAEPGKFWHIADLHLDPDYKVSKDPFQVCPSAGSQPVPDAGPWGDYLCDSPWALINSSIYAMKEIEPEPDFILWTGDDTPHVPDEKLGEAAVLEIVERLTKLIREVFPGAFYCEKLPGPSGAGRIVVLNTNLYYTSNALTADMADPGQQFQWLEDVLTDASKAGDMVYIVGHVPPGFFEKTQNKAWFREGFNEKYLKVVRKHHRVIAGQFFGHHHTDSFRMLYDDAGVPISAMFITPGVTPWKTTLPGVVNGANNPAIRVFEYDRATLSLKDMVTYFMNLSQANAQGTPRWELEYQLTEAYGVPDASAHSMHTVLDRIAGDQSTLQRYYVYNSVSYSAGVCDEACSMQHVCAMRQVDIDAYTTCLYASGTTPVPQLPLLLMALLGLCTLVL

SEQ ID NO: 12606 - protein, 134 aa, Homo Sapiens
MKSLTWILGLWALAACFTPGESQRGPRGPYPPGPLAPPPPPCFPFGTGFVPPPHPPPYGPGRFPPPLSPPYGPGRIPPSPPPPYGPGRIQSHSLPPPYGPGYPQPPSQPRPYPPGPPFFPVNSPTDPALPTPAP

SEQ ID NO: 12607 - protein, 79 aa, Homo Sapiens
MKSLTWILGLWALAACFTPGESQRGPRGPYPPGPLAPPQPFGPGFVPPPPPPPYGPGRIPPPPPAPYGPGIFPPPPPQP

SEQ ID NO: 12608 - protein, 79 aa, Homo Sapiens; identical to SEQ ID NO: 12607

SEQ ID NO: 12609 - protein, 79 aa, Homo Sapiens; identical to SEQ ID NO: 12607

SEQ ID NO: 12610 - protein, 599 aa, Homo Sapiens
MHGILGACGRLRLEPATPLTPLLCAERDECRAHPCRNGGSCRNLPGAYVCRCPAGFVGVHCETEVDACDSSPCQHGGRCESGGGAYLCVCPESFFGYHCETVSDPCFSSPCGGRGYCLASNGSHSCTCKVGYTGEDCAKELFPPTALKMERVEESGVSISWNPPNGPAARQMLDGYAVTYVSSDGSYRRTDFVDRTRSSHQLQALAAGRAYNISVFSVKRNSNNKNDISRPAVLLARTRPRPVEGFEVTNVTASTISVQWALHRIRHATVSGVRVSIRHPEALRDQATDVDRSVDRFTFRALLPGKRYTIQLTTLSGLRGEEHPTESLATAPTHVWTRPLPPANLTAARVTATSAHVVWDAPTPGSLLEAYVINVTTSQSTKSRYVPNGKLASYTVRDLLPGRRYQLSVIAVQSTELGPQHSEPAHLYIITSPRDGADRRWHQGGHHPRVLKNRPPPARLPELRLLNDHSAPETPTQPPRFSELVDGRGRVSARFGGSPSKAATVRSHVPGNCSENPCQNGGTCVPGADAHSCDCGPGFKGRRCELACIKVSRPCTRLFSETKAFPVWEGGVCHHVYKRVYRVHQDICFKESCESTSLK

SEQ ID NO: 12611 - protein, 1413 aa, Homo Sapiens
MRHGVAWALLVAAALGLGARGVRGAVALADFYPFGAERGDAVTPKQDDGGSGLRPLSVPFPFFGAEHSGLYVNNNGIISFLKEVSQFTPVAFPIAKDRCVVAAFWADVDNRRAGDVYYREATDPAMLRRATEDVRHYFPELLDFNATWVFVATWYRVTFFGGSSSSPVNTFQTVLITDGKLSFTIFNYESIVWTTGTHASSGGNATGLGGIAAQAGFNAGDGQRYFSIPGSRTADMAEVETTTNVGVPGRWAFRIDDAQVRVGGCGHTTSVCLALRPCLNGGKCIDDCVTGNPSYTCSCLSGFTGRRCHLDVNECASQPCQNGGTCTHGINSFRCQCPAGFGGPTCETAQSPCDTKECQHGGQCQVENGSAVCVCQAGYTGAACEMDVDDCSPDPCLNGGSCVDLVGNYTCLCAEPFKGLRCETGDHPVPDACLSAPCHNGGTCVDADQGYVCECPEGFMGLDCRERVPDDCECRNGGRCLGANTTLCQCPLGFFGLLCEFEITAMPCNMNTQCPDGGYCMEHGGSYLCVCHTDHNASHSLPSPCDSDPCFNGGSCDAHDDSYTCECPRGFHGKHCEKARPHLCSSGPCRNGGTCKEAGGEYHCSCPYRFTGRHCEIGKPDSCASGPCHNGGTCFHYIGKYKCDCPPGFSGRHCEIAPSPCFRSPCVNGGTCEDRDTDFFCHCQAGYMGRRCQAEVDCGPPEEVKHATLRFNGTRLGAVALYACDRGYSLSAPSRIRVCQPHGVWSEPPQCLEIDECRSQPCLHGGSCQDRVAGYLCLCSTGYEGAHCELERDECRAHPCRNGGSCRNLPGAYVCRCPAGFVGVHCETEVDACDSSPCQHGGRCESGGGAYLCVCPESFFGYHCETVSDPCFSSPCGGRGYCLASNGSHSCTCKVGYTGEDCAKELFPPTALKMERVEESGVSISWNPPNGPAARQMLDGYAVTYVSSDGSYRRTDFVDRTRSSHQLQALAAGRAYNISVFSVKRNSNNKNDISRPAVLLARTRPRPVEGFEVTNVTASTISVQWALHRIRHATVSGVRVSIRHPEALRDQATDVDRSVDRFTFRALLPGKRYTIQLTTLSGLRGEEHPTESLATAPTHVWTRPLPPANLTAARVTATSAHVVWDAPTPGSLLEAYVINVTTSQSTKSRYVPNGKLASYTVRDLLPGRRYQLSVIAVQSTELGPQHSEPAHLYIITSPRDGADRRWHQGGHHPRVLKNRPPPARLPELRLLNDHSAPETPTQPPRFSELVDGRGRVSARFGGSPSKAATVRSQPTASAQLENMEEAPKRVSLALQLPEHGSKDIGNVPGNCSENPCQNGGTCVPGADAHSCDCGPGFKGRRCELACIKVSRPCTRLFSETKAFPVWEGGVCHHVYKRVYRVHQDICFKESCESTSLKKTPNRKQSKSQTLEKS

SEQ ID NO: 12612 - protein, 1324 aa, Homo Sapiens
MRHGVAWALLVAAALGLGARGVRGAVALADFYPFGAERGDAVTPKQDDGGSGLRPLSVPFPFFGAEHSGLYVNNNGIISFLKEVSQFTPVAFPIAKDRCVVAAFWADVDNRRAGDVYYREATDPAMLRRATEDVRHYFPELLDFNATWVFVATWYRVTFFGGSSSSPVNTFQTVLITDGKLSFTIFNYESIVWTTGTHASSGGNATGLGGIAAQAGFNAGDGQRYFSIPGSRTADMAEVETTTNVGVPGRWAFRIDDAQVRVGGCGHTTSVCLALRPCLNGGKCIDDCVTGNPSYTCSCLSGFTGRRCHLDVNECASQPCQNGGTCTHGINSFRCQCPAGFGGPTCETAQSPCDTKECQHGGQCQVENGSAVCVCQAGYTGAACEMDVDDCSPDPCLNGGSCVDLVGNYTCLCAEPFKGLRCETGDHPVPDACLSAPCHNGGTCVDADQGYVCECPEGFMGLDCRERVPDDCECRNGGRCLGANTTLCQCPLGFFGLLCEFEITAMPCNMNTQCPDGGYCMEHGGSYLCVCHTDHNASHSLPSPCDSDPCFNGGSCDAHDDSYTCECPRGFHGKHCEKARPHLCSSGPCRNGGTCKEAGGEYHCSCPYRFTGRHCEIGKPDSCASGPCHNGGTCFHYIGKYKCDCPPGFSGRHCEIAPSPCFRSPCVNGGTCEDRDTDFFCHCQAGYMGRRCQAEVDCGPPEEVKHATLRFNGTRLGAVALYACDRGYSLSAPSRIRVCQPHGVWSEPPQCLEIDECRSQPCLHGGSCQDRVAGYLCLCSTGYEGAHCELERDECRAHPCRNGGSCRNLPGAYVCRCPAGFVGVHCETEVDACDSSPCQHGGRCESGGGAYLCVCPESFFGYHCETVSDPCFSSPCGGRGYCLASNGSHSCTCKVGYTGEDCAKELFPPTALKMERVEESGVSISWNPPNGPAARQMLDGYAVTYVSSDGSYRRTDFVDRTRSSHQLQALAAGRAYNISVFSVKRNSNNKNDISRPAVLLARTRPRPVEGFEVTNVTASTISVQWALHRIRHATVSGVRVSIRHPEALRDQATDVDRSVDRFTFRALLPGKRYTIQLTTLSGLRGEEHPTESLATAPTHVWTRPLPPANLTAARVTATSAHVVWDAPTPGSLLEAYVINVTTSQSTKSRYVPNGKLASYTVRDLLPGRRYQLSVIAVQSTELGPQHSEPAHLYIITSPRDGADRRWHQGGHHPRVLKNRPPPARLPELRLLNDHSAPETPTQPPRFSELVDGRGRVSARFGGSPSKAATVRSQPTASAQLENMEEAPKRVSLALQLPEHGSKDIGSESAALVGTLGLTDCSQGP

SEQ ID NO: 12613 - protein, 1352 aa, Homo Sapiens
MRHGVAWALLVAAALGLGARGVRGAVALADFYPFGAERGDAVTPKQDDGGSGLRPLSVPFPFFGAEHSGLYVNNNGIISFLKEVSQFTPVAFPIAKDRCVVAAFWADVDNRRAGDVYYREATDPAMLRRATEDVRHYFPELLDFNATWVFVATWYRVTFFGGSSSSPVNTFQTVLITDGKLSFTIFNYESIVWTTGTHASSGGNATGLGGIAAQAGFNAGDGQRYFSIPGSRTADMAEVETTTNVGVPGRWAFRIDDAQVRVGGCGHTTSVCLALRPCLNGGKCIDDCVTGNPSYTCSCLSGFTGRRCHLDVNECASQPCQNGGTCTHGINSFRCQCPAGFGGPTCETAQSPCDTKECQHGGQCQVENGSAVCVCQAGYTGAACEMDVDDCSPDPCLNGGSCVDLVGNYTCLCAEPFKGLRCETGDHPVPDACLSAPCHNGGTCVDADQGYVCECPEGFMGLDCRERVPDDCECRNGGRCLGANTTLCQCPLGFFGLLCEFEITAMPCNMNTQCPDGGYCMEHGGSYLCVCHTDHNASHSLPSPCDSDPCFNGGSCDAHDDSYTCECPRGFHGKHCEKARPHLCSSGPCRNGGTCKEAGGEYHCSCPYRFTGRHCEIGKPDSCASGPCHNGGTCFHYIGKYKCDCPPGFSGRHCEIAPSPCFRSPCVNGGTCEDRDTDFFCHCQAGYMGRRCQAEVDCGPPEEVKHATLRFNGTRLGAVALYACDRGYSLSAPSRIRVCQPHGVWSEPPQCLEIDECRSQPCLHGGSCQDRVAGYLCLCSTGYEGAHCELERDECRAHPCRNGGSCRNLPGAYVCRCPAGFVGVHCETEVDACDSSPCQHGGRCESGGGAYLCVCPESFFGYHCETVSDPCFSSPCGGRGYCLASNGSHSCTCKVGYTGEDCAKELFPPTALKMERVEESGVSISWNPPNGPAARQMLDGYAVTYVSSDGSYRRTDFVDRTRSSHQLQALAAGRAYNISVFSVKRNSNNKNDISRPAVLLARTRPRPVEGFEVTNVTASTISVQWALHRIRHATVSGVRVSIRHPEALRDQATDVDRSVDRFTFRALLPGKRYTIQLTTLSGLRGEEHPTESLATAPTHVWTRPLPPANLTAARVTATSAHVVWDAPTPGSLLEAYVINVTTSQSTKSRYVPNGKLASYTVRDLLPGRRYQLSVIAVQSTELGPQHSEPAHLYIITSPRDGADRRWHQGGHHPRVLKNRPPPARLPELRLLNDHSAPETPTQPPRFSELVDGRGRVSARFGGSPSKAATVRSHVPGNCSENPCQNGGTCVPGADAHSCDCGPGFKGRRCELACIKVSRPCTRLFSETKAFPVWEGGVCHHVKQSKSQTLEKS

SEQ ID NO: 12614 - protein, 66 aa, Homo Sapiens
QCQVENGSAVCVCQAGYTGAACEMDVDDCSPDPCLNGGSCVDLVGNYTCLCAEPFKGLRCETVVTC

SEQ ID NO: 12615 - protein, 272 aa, Homo Sapiens
  misc_feature (1)..(1): Xaa can be any naturally occurring amino acid
XPTCETAQSPCDTKECQHGGQCQVENGSAVCVCQAGYTGAACEMDVDDCSPDPCLNGGSCVDLVGNYTCLCAEPFKGLRCETGDHPVPDACLSAPCHNGGTCVDADQGYVCECPEGFMGLDCRERVPDDCECRNGGRCLGANTTLCQCPLGFFGLLCEFEITAMPCNMNTQCPDGGYCMEHGGSYLCVCHTDHNASHSLPSPCDSDPCFNGGSCDAHDDSYTCECPRGFHGKHCEKGMAGRGVRAGVSTLESARGPPSCFSAVSLLVSRIAD

SEQ ID NO: 12616 - protein, 300 aa, Homo Sapiens
  misc_feature (1)..(1): Xaa can be any naturally occurring amino acid
XSLPHVSDVNECASQPCQNGGTCTHGINSFRCQCPAGFGGPTCETAQSPCDTKECQHGGQCQVENGSAVCVCQAGYTGAACEMDVDDCSPDPCLNGGSCVDLVGNYTCLCAEPFKGLRCETGDHPVPDACLSAPCHNGGTCVDADQGYVCECPEGFMGLDCRERVPDDCECRNGGRCLGANTTLCQCPLGFFGLLCEFEITAMPCNMNTQCPDGGYCMEHGGSYLCVCHTDHNASHSLPSPCDSDPCFNGGSCDAHDDSYTCECPRGFHGKHCEKARPHLCSSGPCRNGGTCKEAGGEYH

SEQ ID NO: 12617 - protein, 28 aa, Homo Sapiens
MAVAAAAAAAGPAGAGGGRAQRSGLLEV

SEQ ID NO: 12618 - protein, 538 aa, Homo Sapiens [sequence omitted]

SEQ ID NO: 12619 - protein, 538 aa, Homo Sapiens [sequence omitted]

SEQ ID NO: 12620 - protein, 540 aa, Homo Sapiens
MRVAAATAAAGAGPAMAVWTRATKAGLVELLLRERWVRVVAELSGESLSLTGDAAAAELEPALGPAAAAFNGLPNGGGAGDSLPGSPSRGLGPPSPPAPPRGPAGEAGASPPVRRVRVVKQEAGGLGISIKGGRENRMPILISKIFPGLAADQSRALRLGDAILSVNGTDLRQATHDQAVQALKRAGKEVLLEVKFIREVTPYIKKPSLVSDLPWEGAAPQSPSFSGSEDSGSPKHQNSTKDRKIIPLKMCFAARNLSMPDLENRLIELHSPDSRNTLILRCKDTATAHSWFVAIHTNIMALLPQVLAELNAMLGATSTAGGSKEVKHIAWLAEQAKLDGGRQQWRPVLMAVTEKDLLLYDCMPWTRDAWASPCHSYPLVATRLVHSGSGCRSPSLGSDLTFATRTGSRQGIEMHLFRVETHRDLSSWTRILVQGCHAAAELIKEVSLGCMLNGQEVRLTIHYENGFTISRENGGSSSILYRYPFERLKMSADDGIRNLYLDFGGPEGELTMDLHSCPKPIVFVLHTFLSAKVTRMGLLV

SEQ ID NO: 12621 - protein, 267 aa, Homo Sapiens
MRVAAATAAAGAGPAMAVWTRATKAGLVELLLRERWVRVVAELSGESLSLTGDAAAAELEPALGPAAAAFNGLPNGGGAGDSLPGSPSRGLGPPSPPAPPRGPAGEAGASPPVRRVRVVKQEAGGLGISIKGGRENRMPILISKIFPGLAADQSRALRLGDAILSVNGTDLRQATHDQAVQALKRAGKEVLLEVKFIREVTPYIKKPSLVSDLPWEGAAPQSPSFSGSEDSGSPKHQNSTKDRKIIPLKMCFAARNLSMPDLENRQN

SEQ ID NO: 12622 - protein, 64 aa, Homo Sapiens
  misc_feature (1)..(1): Xaa can be any naturally occurring amino acid
XGRENRMPILISKIFPGLAADQSRALRLGDAILSVNGTDLRQATHDQAVQALKRAGKEVLLEGL

SEQ ID NO: 12623 - protein, 162 aa, Homo Sapiens
  misc_feature (1)..(1): Xaa can be any naturally occurring amino acid
XGRENRMPILISKIFPGLAADQSRALRLGDAILSVNGTDLRQATHDQAVQALKRAGKEVLLEVKFIREVTPYIKKPSLVSDLPWEGAAPQSPSFSGSEDSGSPKHQNSTKDRKIIPLKMCFAARNLSMPDLENRLIELHSPDSRNTLILRCKDTATAHSWQN

SEQ ID NO: 12624 - protein, 139 aa, Homo Sapiens
  misc_feature (1)..(1): Xaa can be any naturally occurring amino acid
XPHLQDLPRAGCRPEPGAAAGRRHPVGERHRPAPGHPRPGRAGAEARGQGVKFIREVTPYIKKPSLVSDLPWEGAAPQSPSFSGSEDSGSPKHQNSTKDRKIIPLKMCFAARNLSMPDLENRLIELHSPDSRNTLILRC

SEQ ID NO: 12625 - protein, 212 aa, Homo Sapiens
DAQLPSKRIIGPKNYEFLKSKREEFQEYLQKLLQHPELSNSQLLADFLSPNGGETQFLDKILPDVNLGKIIKSVPGKLMKEKGQHLEPFIMNFINSCESPKPKPSRPELTILSPTSENNKKLFNDLFKNNANRAENTERKQNQNYFMEVMTVEGVYDYLMYVDAIFCENTEPRSLQDKQKGAKQTFEEMMNYIPDLLVKCIGEETKYESIRL

SEQ ID NO: 12626 - protein, 91 aa, Homo Sapiens
MIFWSFVAGVVTFYCSLGPDSLLPNIFFTIKYKPKQLGLQELFPQGHSCAVCGKVKCKRHRPSLLLENYQPWLDLKISSKVDASLSEGCDR

SEQ ID NO: 12627 - protein, 145 aa, Homo Sapiens
MIFWSFVAGVVTFYCSLGPDSLLPNIFFTIKYKPKQLGLQELFPQGHSCAVCGKVKCKRHRPSLLLENYQPWLDLKISSKVDASLSEVDIPSIITKKLLKAAMKHIEVIVKARQKVKNTEFLQQAALEEYGPELHVALRSRRDEL

SEQ ID NO: 12628 - protein, 894 aa, Homo Sapiens
MIFWSFVAGVVTFYCSLGPDSLLPNIFFTIKYKPKQLGLQELFPQGHSCAVCGKVKCKRHRPSLLLENYQPWLDLKISSKVDASLSEVLELVLENFVYPWYRDVTDDESFVDELRITLRFFASVLIRRIHKVDIPSIITKKLLKAAMKHIEVIVKARQKVKNTEFLQQAALEEYGPELHVALRSRRDELHYLRKLTELLFPYILPPKATDCRSLTLLIREILSGSVFLPSLDFLADPDTVNHLLIIFIDDSPPEKATEPASPLVPFLQKFAEPRNKKPSVLKLELKQIREQQDLLFRFMNFLKQEGAVHVLQFCLTVEEFNDRILRPELSNDEMLSLHEELQKIYKTYCLDESIDKIRFDPFIVEEIQRIAEGPYIDVVKLQTMRCLFEAYEHVLSLLENVFTPMFCHSDEYFRQLLRGAESPTRNSKLNRGSLSLDDFRNTQKRGESFGISRIGSKIKGVFKSTTMEGAMLPNYGVAEGEDDFIEEGIVVMEDDSPVEAVSTPNTPRNLAAWKISIPYVDFFEDPSSERKEKKERIPVFCIDVERNDRRAVGHEPEHWSVYRRYLEFYVLESKLTEFHGAFPDAQLPSKRIIGPKNYEFLKSKREEFQEYLQKLLQHPELSNSQLLADFLSPNGGETQFLDKILPDVNLGKIIKSVPGKLMKEKGQHLEPFIMNFINSCESPKPKPSRPELTILSPTSENNKKLFNDLFKNNANRAENTERKQNQNYFMEVMTVEGVYDYLMYVGRVVFQVPDWLHHLLMGTRILFKNTLEMYTDYYLQCKLEQLFQEHRLVSLITLLRDAIFCENTEPRSLQDKQKGAKQTFEEMMNYIPDLLVKCIGEETKYESIRLLFDGLQQPVLNKQLTYVLLDIVIQELFPELNKVQKEVTSVTSWM

SEQ ID NO: 12629 - protein, 833 aa, Homo Sapiens
MKMKTFVIIHFHLIQLGLQELFPQGHSCAVCGKVKCKRHRPSLLLENYQPWLDLKISSKVDASLSEVLELVLENFVYPWYRDVTDDESFVDELRITLRFFASVLIRRIHKVDIPSIITKKLLKAAMKHIEVIVKARQKVKNTEFLQQAALEEYGPELHVALRSRRDELHYLRKLTELLFPYILPPKATDCRSLTLLIREILSGSVFLPSLDFLADPDTVNHLLIIFIDDSPPEKATEPASPLVPFLQKFAEPRNKKPSVLKLELKQIREQQDLLFRFMNFLKQEGAVHVLQFCLTVEEFNDRILRPELSNDEMLSLHEELQKIYKTYCLDESIDKIRFDPFIVEEIQRIAEGPYIDVVKLQTMRCLFEAYEHVLSLLENVFTPMFCHSDEYFRQLLRGAESPTRNSKLNRNTQKRGESFGISRIGSKIKGVFKSTTMEGAMLPNYGVAEGEDDFIEEGIVVMEDDSPVEAVSTPNTPRNLAAWKISIPYVDFFEDPSSERKEKKERIPVFCIDVERNDRRAVGHEPEHWSVYRRYLEFYVLESKLTEFHGAFPDAQLPSKRIIGPKNYEFLKSKREEFQEYLQKLLQHPELSNSQLLADFLSPNGGETQFLDKILPDVNLGKIIKSVPGKLMKEKGQHLEPFIMNFINSCESPKPKPSRPELTILSPTSENNKKLFNDLFKNNANRAENTERKQNQNYFMEVMTVEGVYDYLMYVGRVVFQVPDWLHHLLMGTRILFKNTLEMYTDYYLQCKLEQLFQEHRLVSLITLLRDAIFCENTEPRSLQDKQKGAKQTFEEMMNYIPDLLVKCIGEETKYESIRLLFDGLQQPVLNKQ

SEQ ID NO: 12630 - protein, 236 aa, Homo Sapiens
MVPWVRTMGQKLKQRLRLDVGREICRQYPLFCFLLLCLSAASLLLNRYIHILMIFWSFVAGVVTFYCSLGPDSLLPNIFFTIKYKPKLGLQELFPQGHSCAVCGKVKCKRHRPSLLLENYQPWLDLKISSKVDASLSEVLELVLENFVYPWYRDVTDDESFVDELRITLRFFASVLIRRIHKVDIPSIITKKLLKAAMKHIEVIVKARQKVKNTEFLQQAALEEYGPELHVALRSR

SEQ ID NO: 12631 - protein, 893 aa, Homo Sapiens
MVPWVRTMGQKLKQRLRLDVGREICRQYPLFCFLLLCLSAASLLLNRYIHILMIFWSFVAGVVTFYCSLGPDSLLPNIFFTIKYKPKQLGLQELFPQGHSCAVCGKVKCKRHRPSLLLENYQPWLDLKISSKVDASLSEVDIPSIITKKLLKAAMKHIEVIVKARQKVKNTEFLQQAALEEYGPELHVALRSRRDELHYLRKLTELLFPYILPPKATDCRSLTLLIREILSGSVFLPSLDFLADPDTVNHLLIIFIDDSPPEKATEPASPLVPFLQKFAEPRNKKPSVLKLELKQIREQQDLLFRFMNFLKQEGAVHVLQFCLTVEEFNDRILRPELSNDEMLSLHEELQKIYKTYCLDESIDKIRFDPFIVEEIQRIAEGPYIDVVKLQTMRCLFEAYEHVLSLLENVFTPMFCHSDEYFRQLLRGAESPTRNSKLNRNTQKRGESFGISRIGSKIKGVFKSTTMEGAMLPNYGVAEGEDDFIEEGIVVMEDDSPVEAVSTPNTPRNLAAWKISIPYVDFFEDPSSERKEKKERIPVFCIDVERNDRRAVGHEPEHWSVYRRYLEFYVLESKLTEFHGAFPDAQLPSKRIIGPKNYEFLKSKREEFQEYLQKLLQHPELSNSQLLADFLSPNGGETQFLDKILPDVNLGKIIKSVPGKLMKEKGQHLEPFIMNFINSCESPKPKPSRPELTILSPTSENNKKLFNDLFKNNANRAENTERKQNQNYFMEVMTVEGVYDYLMYVGRVVFQVPDWLHHLLMGTRILFKNTLEMYTDYYLQCKLEQLFQEHRLVSLITLLRDAIFCENTEPRSLQDKQKGAKQTFEEMMNYIPDLLVKCIGEETKYESIRLLFDGLQQPVLNKQLTYVLLDIVIQELFPELNKVQKEVTSVTSWM

SEQ ID NO: 12632 - protein, 183 aa, Homo Sapiens
MVPWVRTMGQKLKQRLRLDVGREICRQYPLFCFLLLCLSAASLLLNRYIHILMIFWSFVAGVVTFYCSLGPDSLLPNIFFTIKYKPKQLGLQELFPQGHSCAVCGKVKCKRHRPSLLLENYQPWLDLKISSKVDASLSEVLELVLENFVYPWYRDVTDDESFVDELRITLRFFASVLIRRIHK

SEQ ID NO: 12633 - protein, 946 aa, Homo Sapiens
MVPWVRTMGQKLKQRLRLDVGREICRQYPLFCFLLLCLSAASLLLNRYIHILMIFWSFVAGVVTFYCSLGPDSLLPNIFFTIKYKPKQLGLQELFPQGHSCAVCGKVKCKRHRPSLLLENYQPWLDLKISSKVDASLSEVLELVLENFVYPWYRDVTDDESFVDELRITLRFFASVLIRRIHKVDIPSIITKKLLKAAMKHIEVIVKARQKVKNTEFLQQAALEEYGPELHVALRSRRDELHYLRKLTELLFPYILPPKATDCRSLTLLIREILSGSVFLPSLDFLADPDTVNHLLIIFIDDSPPEKATEPASPLVPFLQKFAEPRNKKPSVLKLELKQIREQQDLLFRFMNFLKQEGAVHVLQFCLTVEEFNDRILRPELSNDEMLSLHEELQKIYKTYCLDESIDKIRFDPFIVEEIQRIAEGPYIDVVKLQTMRCLFEAYEHVLSLLENVFTPMFCHSDEYFRQLLRGAESPTRNSKLNRGSLSLDDFRNTQKRGESFGISRIGSKIKGVFKSTTMEGAMLPNYGVAEGEDDFIEEGIVVMEDDSPVEAVSTPNTPRNLAAWKISIPYVDFFEDPSSERKEKKERIPVFCIDVERNDRRAVGHEPEHWSVYRRYLEFYVLESKLTEFHGAFPDAQLPSKRIIGPKNYEFLKSKREEFQEYLQKLLQHPELSNSQLLADFLSPNGGETQFLDKILPDVNLGKIIKSVPGKLMKEKGQHLEPFIMNFINSCESPKPKPSRPELTILSPTSENNKKLFNDLFKNNANRAENTERKQNQNYFMEVMTVEGVYDYLMYVGRVVFQVPDWLHHLLMGTRILFKNTLEMYTDYYLQCKLEQLFQEHRLVSLITLLRDAIFCENTEPRSLQDKQKGAKQTFEEMMNYIPDLLVKCIGEETKYESIRLLFDGLQQPVLNKQLTYVLLDIVIQELFPELNKVQKEVTSVTSWM

SEQ ID NO: 12634 - protein, 937 aa, Homo Sapiens
MVPWVRTMGQKLKQRLRLDVGREICRQYPLFCFLLLCLSAASLLLNRYIHILMIFWSFVAGVVTFYCSLGPDSLLPNIFFTIKYKPKQLGLQELFPQGHSCAVCGKVKCKRHRPSLLLENYQPWLDLKISSKVDASLSEVLELVLENFVYPWYRDVTDDESFVDELRITLRFFASVLIRRIHKVDIPSIITKKLLKAAMKHIEVIVKARQKVKNTEFLQQAALEEYGPELHVALRSRRDELHYLRKLTELLFPYILPPKATDCRSLTLLIREILSGSVFLPSLDFLADPDTVNHLLIIFIDDSPPEKATEPASPLVPFLQKFAEPRNKKPSVLKLELKQIREQQDLLFRFMNFLKQEGAVHVLQFCLTVEEFNDRILRPELSNDEMLSLHEELQKIYKTYCLDESIDKIRFDPFIVEEIQRIAEGPYIDVVKLQTMRCLFEAYEHVLSLLENVFTPMFCHSDEYFRQLLRGAESPTRNSKLNRNTQKRGESFGISRIGSKIKGVFKSTTMEGAMLPNYGVAEGEDDFIEEGIVVMEDDSPVEAVSTPNTPRNLAAWKISIPYVDFFEDPSSERKEKKERIPVFCIDVERNDRRAVGHEPEHWSVYRRYLEFYVLESKLTEFHGAFPDAQLPSKRIIGPKNYEFLKSKREEFQEYLQKLLQHPELSNSQLLADFLSPNGGETQFLDKILPDVNLGKIIKSVPGKLMKEKGQHLEPFIMNFINSCESPKPKPSRPELTILSPTSENNKKLFNDLFKNNANRAENTERKQNQNYFMEVMTVEGVYDYLMYVGRVVFQVPDWLHHLLMGTRILFKNTLEMYTDYYLQCKLEQLFQEHRLVSLITLLRDAIFCENTEPRSLQDKQKGAKQTFEEMMNYIPDLLVKCIGEETKYESIRLLFDGLQQPVLNKQLTYVLLDIVIQELFPELNKVQKEVTSVTSWM

SEQ ID NO: 12635 - protein, 665 aa, Homo Sapiens
MVPWVRTMGQKLKQRLRLDVGREICRQYPLFCFLLLCLSAASLLLNRYIHILMIFWSFVAGVVTFYCSLGPDSLLPNIFFTIKYKPKQLGLQELFPQGHSCAVCGKVKCKRHRPSLLLENYQPWLDLKISSKVDASLSEVLELVLENFVYPWYRDVTDDESFVDELRITLRFFASVLIRRIHKVDIPSIITKKLLKAAMKHIEVIVKARQKVKNTEFLQQAALEEYGPELHVALRSRRDELHYLRKLTELLFPYILPPKATDCRSLTLLIREILSGSVFLPSLDFLADPDTVNHLLIIFIDDSPPEKATEPASPLVPFLQKFAEPRNKKPSVLKLELKQIREQQDLLFRFMNFLKQEGAVHVLQFCLTVEEFNDRILRPELSNDEMLSLHEELQKIYKTYCLDESIDKIRFDPFIVEEIQRRKIIKSVPGKLMKEKGQHLEPFIMNFINSCESPKPKPSRPELTILSPTSENNKKLFNDLFKNNANRAENTERKQNQNYFMEVMTVEGVYDYLMYVGRVVFQVPDWLHHLLMGTRILFKNTLEMYTDYYLQCKLEQLFQEHRLVSLITLLRDAIFCENTEPRSLQDKQKGAKQTFEEMMNYIPDLLVKCIGEETKYESIRLLFDGLQQPVLNKQLTYVLLDIVIQELFPELNKVQKEVTSVTSWM

SEQ ID NO: 12636 - protein, 178 aa, Homo Sapiens
  misc_feature (1)..(1): Xaa can be any naturally occurring amino acid
XKNNANRAENTERKQNQNYFMEVMTVEGVYDYLMYVGRVVFQVPDWLHHLLMGTRILFKNTLEMYTDYYLQCKLEQLFQEHRLVSLITLLRDAIFCENTEPRSLQDKQKGAKQTFEEMMNYIPDLLVKCIGEETKYESIRLLFDGLQQPVLNKQLTYVLLDIVIQELFPELNKVTEKQ

SEQ ID NO: 12637 - protein, 54 aa, Homo Sapiens
MLALLCSCLLLAAGASDAWTGEDSAEPNSDSAEWIRDMYAKVTEIWQEVMQRRD

SEQ ID NO: 12638 - protein, 240 aa, Homo Sapiens
MLALLCSCLLLAAGASDAWTGEDSAEPNSDSAEWIRDMYAKVTEIWQEVMQRRDDDGALHAACQVQPSATLDAAQPRVTGVVLFRQLAPRAKLDAFFALEGFPTEPNSSSRAIHVHQFGDLSQGCESTGPHYNPLAVPHPQHPGDFGNFAVRDGSLWRYRAGLAASLAGPHSIVGRAVVVHAGEDDLGRGGNQASVENGNAGRRLACCVVGVCGPGLWERQAREHSERKKRRRESECKAA

SEQ ID NO: 12639 - protein, 213 aa, Homo Sapiens
MQLPLALCLVCLLVHTAFRVVEGQGWQAFKNDATEIIPELGEYPEPPPELENNKTMNRAENGGRPPHHPFETKDVSEYSCRELHFTRYVTDGPCRSAKPVTELVCSGQCGPARLLPNAIGRGKWWRPSGPDFRCIPDRYRAQRVQLLCPGGEAPRARKVRLVASCKCKRLTRFHNQSELKDFGTEAARPQKGRKPRPRARSAKANQAELENAY

SEQ ID NO: 12640 - protein, 230 aa, Homo Sapiens
MLPPAIHFYLLPLACILMKSCLAFKNDATEILYSHVVKPVPAHPSSNSTLNQARNGGRHFSNTGLDRNRTESLTRQNYFWLFPGAFLRQLQEARVQVGCRELRSTKYISDGQCTSISPLKELVCAGECLPLPVLPNWIGGGYGTKYWSRRSSQEWRCVNDKTRTQRIQLQCQDGSTRTYKITVVTACKCKRYTRQHNESSHNFESMSPAKPVQHHRERKRASKSSKHSMS

SEQ ID NO: 12641 - protein, 206 aa, Homo Sapiens
MLPPAIHFYLLPLACILMKSCLAFKNDATEILYSHVVKPVPAHPSSNSTLNQARNGGRHFSNTGLDRNTRVQVGCRELRSTKYISDGQCTSISPLKELVCAGECLPLPVLPNWIGGGYGTKYWSRRSSQEWRCVNDKTRTQRIQLQCQDGSTRTYKITVVTACKCKRYTRQHNESSHNFESMSPAKPVQHHRERKRASKSSKHSMS

SEQ ID NO: 12642 - protein, 549 aa, Homo Sapiens
MALAAAAAAAAAGVSQAAVLGFLQEHGGKVRNSELLSRFKPLLDAGDPRGRAARRDRFKQFVNNVAVVKELDGVKFVVLRKKPRPPEPEPAPFGPPGAAAQPSKPTSTVLPRSASAPGAPPLVRVPRPVEPPGDLGLPTEPQDTPGGPASEPAQPPGERSADPPLPALELAQATERPSADAAPPPRAPSEAASPCSDPPDAEPGPGAAKGPPQQKPCMLPVRCVPAPATLRLRAEEPGLRRQLSEEPSPRSSPLLLRRLSVEESGLGLGLGPGRSPHLRRLSRAGPRLLSPDAEELPAAPPPSAVPLEPSEHEWLVRTAGGRWTHQLHGLLLRDRGLAAKRDFMSGFTALHWAAKSGDGEMALQLVEVARRSGAPVDVNARSHGGYTPLHLAALHGHEDAAVLLVVRLGAQVHVRDHSGRRAYQYLRPGSSYALRRLLGDPGLRGTTEPDATGGGSGSLAARRPVQVAATILSSTTSAFLGVLADDLMLQDLARGLKKSSSFSKFLSASPMAPRKKTKIRGGLPAFSEISRRPTPGPLAGLVPSLPPTT

SEQ ID NO: 12643 - protein, 146 aa, Homo Sapiens
MLLALVCLLSCLLPSSEAKLYGRCELARVLHDFGLDGYRGYSLADWVCLAYFTSGFNAAALDYEADGSTNNGIFQINSRRWCSNLTPNVPNVCRMYCSDLLNPNLKDTVICAMKITQEPQGLGYWEAWRHHCQGKDLTEWVDGCDF

SEQ ID NO: 12644 - protein, 112 aa, Homo Sapiens
MVSALRGAPLIRVCLAYFTSGFNAAALDYEADGSTNNGIFQINSRRWCSNLTPNVPNVCRMYCSDLLNPNLKDTVICAMKITQEPQGLGYWEAWRHHCQGKDLTEWVDGCDF

SEQ ID NO: 12645 - protein, 215 aa, Homo Sapiens [sequence omitted]

SEQ ID NO: 12646 - protein, 124 aa, Homo Sapiens
MVLCWLLLLVMALPPGTTGVKDCVFCELTDSMQCPGTYMHCGDDEDCFTGHGVAPGTGPVINKGCLRATSCGLEEPVSYRGVTYSLTTNCCTGRLCNRAPSSQTVGATTSLALGLGMLLPPRLL

SEQ ID NO: 12647 - protein, 159 aa, Homo Sapiens
MKAWGTVVVTLATLMVVTVDAKIYERCELAARLERAGLNGYKGYGVGDWLCMAHYESGFDTAFVDHNPDGSSEYGIFQLNSAWWCDNGITPTKNLCHMDCHDLLNRHILDDIRCAKQIVSSQNGLSAWTSWRLHCSGHDLSEWLKGCDMHVKIDPKIHP

SEQ ID NO: 12648 - protein, 159 aa, Homo Sapiens; identical to SEQ ID NO: 12647

SEQ ID NO: 12649 - protein, 159 aa, Homo Sapiens; identical to SEQ ID NO: 12647

SEQ ID NO: 12650 - protein, 195 aa, Homo Sapiens
MAVSQGDGTLCFVLLLCCWQETELRPRTVIPGSPTEIPFSSKQEDMSELLDEILVQEILDLNKTTPSEMPSTASTLSTPLHAGIDENYQAGGSENYHELLENLQFSPGIEVKISNDEANANANLHGDPSENYRGPQVSPGSEKSVSSKEKNSKNTQYENLSILDQILQNIGRSSGNIFHKEQQRTSAQRRSQGSQ

SEQ ID NO: 12651 - protein, 164 aa, Homo Sapiens
MLWLLPTDRGRSGNGNEPQDEILVQEILDLNKTTPSEMPSTASTLSTPLHAGIDENYQAGGSENYHELLENLQFSPGIEVKISNDEANANANLHGDPSENYRGPQVSPGSEKSVSSKEKNSKNTQYENLSILDQILQNIGRSSGNIFHKEQQRTSAQRRSQGSQ

SEQ ID NO: 12652 - protein, 104 aa, Homo Sapiens
MLWLLPTDRGRSGNGNEPQGSPTEIPFSSKQEDMSELLDEILVQEILDLNKTTPSEMPSTASTLSTPLHAGIDENYQAGGSENYHELLENLQFSPGIEVKISND

SEQ ID NO: 12653 - protein, 112 aa, Homo Sapiens
MTFFTHLWDGDPVSQVAGSPTEIPFSSKQEDMSELLDEILVQEILDLNKTTPSEMPSTASTLSTPLHAGIDENYQAGGSENYHELLENLQFSPGIEVKISNDEANANANLHG

SEQ ID NO: 12654 - protein, 80 aa, Homo Sapiens
MKVFFLFAVLFCLVQTNSGDVPLGIRNTICRMQQGICRLFFCHSGEKKRDISSDPWNRCCVSNTDEEGKEKPEMDGRSGI

SEQ ID NO: 12655 - protein, 50 aa, Homo Sapiens
MKVFFLFAVLFCLVQTNSVHISHQEARGPSFKICVGFLGPRWARGCSTGN

SEQ ID NO: 12656 - protein, 113 aa, Homo Sapiens
MRQRLLPSVTSLLLVALLFPGSSQARHVNHSATEALGELRERAPGQGTNGFQLLRHAVKRDLLPPRTPPYQEPASDLKVVDCRRSEGFCQEYCNYMETQVGYCSKKKDACCLH

SEQ ID NO: 12657 - protein, 133 aa, Homo Sapiens
MRQRLLPSVTSLLLVALLFPGSSQARHVNHSATEALGELRERAPGQGTNGFQLLRHAVKRDLLPPRTPPYQGDVPLGIRNTICRMQQGICRLFFCHSGEKKRDISSDPWNRCCVSNTDEEGKEKPEMDGRSGI

SEQ ID NO: 12658 - protein, 108 aa, Homo Sapiens
MRQRLLPSVTSLLLVALLFPGSSQARHVNHSATEALGELRERAPGQGTNGFQLLRHAVKRDLLPPRTPPYQGDVPLGIRNTICRMQQGICRLFFCHSGTGQQHRQRCG

SEQ ID NO: 12659 - protein, 82 aa, Homo Sapiens
MRQRLLPSVTSLLLVALLFPGSSQARHVNHSATEALGELRERAPGQGTNGFQLLRHAVKRDLLPPRTPPYQGTGQQHRQRCG

SEQ ID NO: 12660 - protein, 103 aa, Homo Sapiens
MRQRLLPSVTSLLLVALLFPGSSQARHVNHSATEALGELRERAPGQGTNGFQLLRHAVKRDLLPPRTPPYQVHISHQEARGPSFKICVGFLGPRWARGCSTGN

SEQ ID NO: 12661 - protein, 53 aa, Homo Sapiens
SSQARHVNHSATEALGELRERAPGQGTNGFQLLRHAVKRDLLPPRTPPYQEMK

SEQ ID NO: 12662 - protein, 106 aa, Homo Sapiens
  misc_feature (1)..(1): Xaa can be any naturally occurring amino acid
XFPGSSQARHVNHSATEALGELRERAPGQGTNGFQLLRHAVKRDLLPPRTPPYQGTHSVAQAGVQWHCYRLLQPLPPGLKCSSHLSLPNTWDHRHAPLHTASFFRC

SEQ ID NO: 12663 - protein, 106 aa, Homo Sapiens
LFPGSSQARHVNHSATEALGELRERAPGQGTNGFQLLRHAVKRDLLPPRTPPYQGTHSVAQAGVQWHCYRLLQPLPPGLKCSSHLSLPNTWDHRHAPLHTASFFRC

SEQ ID NO: 12664 - protein, 80 aa, Homo Sapiens
MKVFFLFAVLFCLVQTNSGDVPPGIRNTICHMQQGICRLFFCHSGEKKRDICSDPWNRCCVSNTDEEGKEKPEMDGRSGI

SEQ ID NO: 12665 - protein, 50 aa, Homo Sapiens
MKVFFLFAVLFCLVQTNSVHISHREARGPSFRICVDFLGPRWARGCSTGN

SEQ ID NO: 12666 - protein, 113 aa, Homo Sapiens; identical to SEQ ID NO: 12656

SEQ ID NO: 12667 - protein, 133 aa, Homo Sapiens
MRQRLLPSVTSLLLVALLFPGSSQARHVNHSATEALGELRERAPGQGTNGFQLLRHAVKRDLLPPRTPPYQGDVPPGIRNTICHMQQGICRLFFCHSGEKKRDICSDPWNRCCVSNTDEEGKEKPEMDGRSGI

SEQ ID NO: 12668 - protein, 108 aa, Homo Sapiens
MRQRLLPSVTSLLLVALLFPGSSQARHVNHSATEALGELRERAPGQGTNGFQLLRHAVKRDLLPPRTPPYQGDVPPGIRNTICHMQQGICRLFFCHSGTGQQHRQRCG

SEQ ID NO: 12669 - protein, 82 aa, Homo Sapiens; identical to SEQ ID NO: 12659

SEQ ID NO: 12670 - protein, 103 aa, Homo Sapiens
MRQRLLPSVTSLLLVALLFPGSSQARHVNHSATEALGELRERAPGQGTNGFQLLRHAVKRDLLPPRTPPYQVHISHREARGPSFRICVDFLGPRWARGCSTGN

SEQ ID NO: 12671 - protein, 53 aa, Homo Sapiens; identical to SEQ ID NO: 12661

SEQ ID NO: 12672 - protein, 115 aa, Homo Sapiens
MCVCQDPTSCPAPIGEFEKVCSNDNKTFDSSCHFFATKCTLEGTKKGHKLHLDYIGPCKYIPPCLDSELTEFPLRMRDWLKNVLVTLYERDEDNNLLTEKQKLRVKKIHENEKRL

SEQ ID NO: 12673 - protein, 149 aa, Homo Sapiens
MCVCQDPTSCPAPIGEFEKVCSNDNKTFDSSCHFFATKCTLEGTKKGHKLHLDYIGPCKYIPPCLDSELTEFPLRMRDWLKNVLVTLYERDEDNNLLTEKQKLRVKKIHENEKRLEAGDHPVELLARDFEKNYNMYIFPVHWQFGQLDQ

SEQ ID NO: 12674 - protein, 53 aa, Homo Sapiens
MRAWIFFLLCLAGRALAAPQQEALPDETEVVEETVAEVTEVSVGANPVQVEVG

SEQ ID NO: 12675 - protein, 111 aa, Homo Sapiens
MRAWIFFLLCLAGRALAAPQQEALPDETEVVEETVAEVTEVSVGANPVQVEVGEFDDGAEETEEEVVAENPCQNHHCKHGKVCELDENNTPMCVCQDPTSCPAPIGEFEKV

SEQ ID NO: 12676 - protein, 303 aa, Homo Sapiens
MRAWIFFLLCLAGRALAAPQQEALPDETEVVEETVAEVTEVSVGANPVQVEVGEFDDGAEETEEEVVAENPCQNHHCKHGKVCELDENNTPMCVCQDPTSCPAPIGEFEKVCSNDNKTFDSSCHFFATKCTLEGTKKGHKLHLDYIGPCKYIPPCLDSELTEFPLRMRDWLKNVLVTLYERDEDNNLLTEKQKLRVKKIHENEKRLEAGDHPVELLARDFEKNYNMYIFPVHWQFGQLDQHPIDGYLSHTELAPLRAPLIPMEHCTTRFFETCDLDNDKYIALDEWAGCFGIKQKDIDKDLVI

SEQ ID NO: 12677 - protein, 56 aa, Homo Sapiens
MKTGLFFLCLLGTAAAIPTNARLLSDHSKPTAETVAPDNTAIPSLRAEAEENEKET

SEQ ID NO: 12678 - protein, 89 aa, Homo Sapiens
MKTGLFFLCLLGTAAAIPTNARLLSDHSKPTAETVAPDNTAIPSLRAEAEENEKETAVSTEDDSHHKAEKSSVLKSKEESHEQSAEQGK

SEQ ID NO: 12679 - protein, 120 aa, Homo Sapiens
MKTGLFFLCLLGTAAAIPTNARLLSDHSKPTAETVAPDNTAIPSLRAEAEENEKETAVSTEDDSHHKAEKSSVLKSKEESHEQSAEQGKSSSQELGLKDQEDSDGHLSVNLEYAPTEGTL

SEQ ID NO: 12680 - protein, 127 aa, Homo Sapiens
MKTGLFFLCLLGTAAAIPTNARLLSDHSKPTAETVAPDNTAIPSLRAEAEENEKETAVSTEDDSHHKAEKSSVLKSKEESHEQSAEQGKSSSQELGLKDQEDSDGHLSVNLEYAPTEGTLDIKEDMS

SEQ ID NO: 12681 - protein, 141 aa, Homo Sapiens
MKTGLFFLCLLGTAAAIPTNARLLSDHSKPTAETVAPDNTAIPSLRAEAEENEKETAVSTEDDSHHKAEKSSVLKSKEESHEQSAEQGKSSSQELGLKDQEDSDGHLSVNLEYAPTEGTLDIKEDMSEPQEKKLSENTDFL

SEQ ID NO: 12682 - protein, 144 aa, Homo Sapiens
MKTGLFFLCLLGTAAAIPTNARLLSDHSKPTAETVAPDNTAIPSLRAEAEENEKETAVSTEDDSHHKAEKSSVLKSKEESHEQSAEQGKSSSQELGLKDQEDSDGHLSVNLEYAPTEGTLDIKEDMSEPQEKKLSENTDFLAPG

SEQ ID NO: 12683 - protein, 664 aa, Homo Sapiens
MKTGLFFLCLLGTAAAIPTNARLLSDHSKPTAETVAPDNTAIPSLRAEAEENEKETAVSTEDDSHHKAEKSSVLKSKEESHEQSAEQGKSSSQELGLKDQEDSDGHLSVNLEYAPTEGTLDIKEDMSEPQEKKLSENTDFLAPGVSSFTDSNQQESITKREENQEQPRNYSHHQLNRSSKHSQGLRDQGNQEQDPNISNGEEEEEKEPGEVGTHNDNQERKTELPREHANSKQEEDNTQSDDILEESDQPTQVSKMQEDEFDQGNQEQEDNSNAEMEEENASNVNKHIQETEWQSQEGKTGLEAISNHKETEEKTVSEALLMEPTDDGNTTPRNHGVDDDGDDDGDDGGTDGPRHSASDDYFIPSQAFLEAERAQSIAYHLKIEEQREKVHENENIGTTEPGEHQEAKKAENSSNEEETSSEGNMRVHAVDSCMSFQCKRGHICKADQQGKPHCVCQDPVTCPPTKPLDQVCGTDNQTYASSCHLFATKCRLEGTKKGHQLQLDYFGACKSIPTCTDFEVIQFPLRMRDWLKNILMQLYEANSEHAGYLNEKQRNKVKKIYLDEKRLLAGDHPIDLLLRDFKKNYHMYVYPVHWQFSELDQHPMDRVLTHSELAPLRASLVPMEHCITRFFEECDPNKDKHITLKEWGHCFGIKEEDIDENLLF

SEQ ID NO: 12684 - protein, 664 aa, Homo Sapiens; identical to SEQ ID NO: 12683

SEQ ID NO: 12685 - protein, 19 aa, Homo Sapiens
MSEPQEKKLSENTDFLAPG

SEQ ID NO: 12686 - protein, 539 aa, Homo Sapiens
MSEPQEKKLSENTDFLAPGVSSFTDSNQQESITKREENQEQPRNYSHHQLNRSSKHSQGLRDQGNQEQDPNISNGEEEEEKEPGEVGTHNDNQERKTELPREHANSKQEEDNTQSDDILEESDQPTQVSKMQEDEFDQGNQEQEDNSNAEMEEENASNVNKHIQETEWQSQEGKTGLEAISNHKETEEKTVSEALLMEPTDDGNTTPRNHGVDDDGDDDGDDGGTDGPRHSASDDYFIPSQAFLEAERAQSIAYHLKIEEQREKVHENENIGTTEPGEHQEAKKAENSSNEEETSSEGNMRVHAVDSCMSFQCKRGHICKADQQGKPHCVCQDPVTCPPTKPLDQVCGTDNQTYASSCHLFATKCRLEGTKKGHQLQLDYFGACKSIPTCTDFEVIQFPLRMRDWLKNILMQLYEANSEHAGYLNEKQRNKVKKIYLDEKRLLAGDHPIDLLLRDFKKNYHMYVYPVHWQFSELDQHPMDRVLTHSELAPLRASLVPMEHCITRFFEECDPNKDKHITLKEWGHCFGIKEEDIDENLLF

SEQ ID NO: 12687 - protein, 802 aa, Homo Sapiens
MLGARAWLGRVLLLPRAGAGLAASRRCPGVWPRTWPHRSPSRGSSSRDKDRSATVSSSVPMPAGGKGSHPSSTPQRVPNRLIHEKSPYLLQHAYNPVDWYPWGQEAFDKARKENKPIFLSVGYSTCHWCHMMEEESFQNEEIGRLLSEDFVSVKVDREERPDVDKVYMTFVQATSSGGGWPMNVWLTPNLQPFVGGTYFPPEDGLTRVGFRTVLLRIREQWKQNKNTLLENSQRVTTALLARSEISVGDRQLPPSAATVNNRCFQQLDEGYDEEYGGFAEAPKFPTPVILSFLFSYWLSHRLTQDGSRAQQMALHTLKMMANGGIRDHVGQGFHRYSTDRQWHVPHFEKMLYDQAQLAVAYSQAFQLSGDEFYSDVAKGILQYVARSLSHRSGGFYSAEDADSPPERGQRPKEGAYYVWTVKEVQQLLPEPVLGATEPLTSGQLLMKHYGLTEAGNISPSQDPKGELQGQNVLTVRYSLELTAARFGLDVEAVRTLLNSGLEKLFQARKHRPKPHLDSKMLAAWNGLMVSGYAVTGAVLGQDRLINYATNGAKFLKRHMFDVASGRLMRTCYTGPGGTVEHSNPPCWGFLEDYAFVVRGLLDLYEASQESAWLEWALRLQDTQDKLFWDSQGGGYFCSEAELGAGLPLRLKDDQDGAEPSANSVSAHNLLRLHGFTGHKDWMDKCVCLLTAFSERMRRVPVALPEMVRALSAQQQTLKQIVICGDRQAKDTKALVQCVHSVYIPNKVLILADGDPSSFLSRQLPFLSTLRRLEDQATAYVCENQACSVPITDPCELRKLLHP

SEQ ID NO: 12688 - protein, 56 aa, Homo Sapiens
MLGARAWLGRVLLLPRAGAGLAASRRCPGVWPRTWPHRSPSRPRRLGETNLARSPQ

SEQ ID NO: 12689 - protein, 67 aa, Homo Sapiens
MLGARAWLGRVLLLPRAGAGLAASRRCPGVWPRTWPHRSPSRWALSEGVPMSGFLCLSLTWSSPRPY

SEQ ID NO: 12690 - protein, 786 aa, Homo Sapiens
MLGARAWLGRVLLLPRAGAGLAASRRGSSSRDKDRSATVSSSVPMPAGGKGSHPSSTPQRVPNRLIHEKSPYLLQHAYNPVDWYPWGQEAFDKARKENKPIFLSVGYSTCHWCHMMEEESFQNEEIGRLLSEDFVSVKVDREERPDVDKVYMTFVQATSSGGGWPMNVWLTPNLQPFVGGTYFPPEDGLTRVGFRTVLLRIREQWKQNKNTLLENSQRVTTALLARSEISVGDRQLPPSAATVNNRCFQQLDEGYDEEYGGFAEAPKFPTPVILSFLFSYWLSHRLTQDGSRAQQMALHTLKMMANGGIRDHVGQGFHRYSTDRQWHVPHFEKMLYDQAQLAVAYSQAFQLSGDEFYSDVAKGILQYVARSLSHRSGGFYSAEDADSPPERGQRPKEGAYYVWTVKEVQQLLPEPVLGATEPLTSGQLLMKHYGLTEAGNISPSQDPKGELQGQNVLTVRYSLELTAARFGLDVEAVRTLLNSGLEKLFQARKHRPKPHLDSKMLAAWNGLMVSGYAVTGAVLGQDRLINYATNGAKFLKRHMFDVASGRLMRTCYTGPGGTVEHSNPPCWGFLEDYAFVVRGLLDLYEASQESAWLEWALRLQDTQDKLFWDSQGGGYFCSEAELGAGLPLRLKDDQDGAEPSANSVSAHNLLRLHGFTGHKDWMDKCVCLLTAFSERMRRVPVALPEMVRALSAQQQTLKQIVICGDRQAKDTKALVQCVHSVYIPNKVLILADGDPSSFLSRQLPFLSTLRRLEDQATAYVCENQACSVPITDPCELRKLLHP

SEQ ID NO: 12691 - protein, 43 aa, Homo Sapiens
MLGARAWLGRVLLLPRAGAGLAASRRSACSPTSRLNSLRSLIP

SEQ ID NO: 12692 - protein, 43 aa, Homo Sapiens; identical to SEQ ID NO: 12691

SEQ ID NO: 12693 - protein, 43 aa, Homo Sapiens; identical to SEQ ID NO: 12691

SEQ ID NO: 12694 - protein, 43 aa, Homo Sapiens; identical to SEQ ID NO: 12691

SEQ ID NO: 12695 - protein, 43 aa, Homo Sapiens; identical to SEQ ID NO: 12691

SEQ ID NO: 12696 - protein, 742 aa, Homo Sapiens
MPAGGKGSHPSSTPQRVPNRLIHEKSPYLLQHAYNPVDWYPWGQEAFDKARKENKPIFLSVGYSTCHWCHMMEEESFQNEEIGRLLSEDFVSVKVDREERPDVDKVYMTFVQATSSGGGWPMNVWLTPNLQPFVGGTYFPPEDGLTRVGFRTVLLRIREQWKQNKNTLLENSQRVTTALLARSEISVGDRQLPPSAATVNNRCFQQLDEGYDEEYGGFAEAPKFPTPVILSFLFSYWLSHRLTQDGSRAQQMALHTLKMMANGGIRDHVGQGFHRYSTDRQWHVPHFEKMLYDQAQLAVAYSQAFQLSGDEFYSDVAKGILQYVARSLSHRSGGFYSAEDADSPPERGQRPKEGAYYVWTVKEVQQLLPEPVLGATEPLTSGQLLMKHYGLTEAGNISPSQDPKGELQGQNVLTVRYSLELTAARFGLDVEAVRTLLNSGLEKLFQARKHRPKPHLDSKMLAAWNGLMVSGYAVTGAVLGQDRLINYATNGAKFLKRHMFDVASGRLMRTCYTGPGGTVEHSNPPCWGFLEDYAFVVRGLLDLYEASQESAWLEWALRLQDTQDKLFWDSQGGGYFCSEAELGAGLPLRLKDDQDGAEPSANSVSAHNLLRLHGFTGHKDWMDKCVCLLTAFSERMRRVPVALPEMVRALSAQQQTLKQIVICGDRQAKDTKALVQCVHSVYIPNKVLILADGDPSSFLSRQLPFLSTLRRLEDQATAYVCENQACSVPITDPCELRKLLHP

SEQ ID NO: 12697 - protein, 521 aa, Homo Sapiens
MSHLSSPPKKHKGEHKGHSLPHGSERGSSSRDKDRSATVSSSVPMPAGGKGSHPSSTPQRVPNRLIHEKSPYLLQHAYNPVDWYPWGQEAFDKARKENKPIFLSVGYSTCHWCHMMEEESFQNEEIGRLLSEDFVSVKVDREERPDVDKVYMTFVQATSSGGGWPMNVWLTPNLQPFVGGTYFPPEDGLTRVGFRTVLLRIREQWKQNKNTLLENSQRVTTALLARSEISVGDRQLPPSAATVNNRCFQQLDEGYDEEYGGFAEAPKFPTPVILSFLFSYWLSHRLTQDGSRAQQMALHTLKMMANGGIRDHVGQGFHRYSTDRQWHVPHFEKMLYDQAQLAVAYSQAFQLSGDEFYSDVAKGILQYVARSLSHRSGGFYSAEDADSPPERGQRPKEGAYYVWTVKEVQQLLPEPVLGATEPLTSGQLLMKHYGLTEAGNISPSQDPKGELQGQNVLTVRYSLELTAARFGLDVEAVRTLLNSGLEKLFQARKHRPKPHLDSKMLAAWNGGAAHLRPSLSA

SEQ ID NO: 12698 - protein, 786 aa, Homo Sapiens
MSHLSSPPKKHKGEHKGHSLPHGSERGSSSRDKDRSATVSSSVPMPAGGKGSHPSSTPQRVPNRLIHEKSPYLLQHAYNPVDWYPWGQEAFDKARKENKPIFLSVGYSTCHWCHMMEEESFQNEEIGRLLSEDFVSVKVDREERPDVDKVYMTFVQATSSGGGWPMNVWLTPNLQPFVGGTYFPPEDGLTRVGFRTVLLRIREQWKQNKNTLLENSQRVTTALLARSEISVGDRQLPPSAATVNNRCFQQLDEGYDEEYGGFAEAPKFPTPVILSFLFSYWLSHRLTQDGSRAQQMALHTLKMMANGGIRDHVGQGFHRYSTDRQWHVPHFEKMLYDQAQLAVAYSQAFQLSGDEFYSDVAKGILQYVARSLSHRSGGFYSAEDADSPPERGQRPKEGAYYVWTVKEVQQLLPEPVLGATEPLTSGQLLMKHYGLTEAGNISPSQDPKGELQGQNVLTVRYSLELTAARFGLDVEAVRTLLNSGLEKLFQARKHRPKPHLDSKMLAAWNGLMVSGYAVTGAVLGQDRLINYATNGAKFLKRHMFDVASGRLMRTCYTGPGGTVEHSNPPCWGFLEDYAFVVRGLLDLYEASQESAWLEWALRLQDTQDKLFWDSQGGGYFCSEAELGAGLPLRLKDDQDGAEPSANSVSAHNLLRLHGFTGHKDWMDKCVCLLTAFSERMRRVPVALPEMVRALSAQQQTLKQIVICGDRQAKDTKALVQCVHSVYIPNKVLILADGDPSSFLSRQLPFLSTLRRLEDQATAYVCENQACSVPITDPCELRKLLHP

SEQ ID NO: 12699 - protein, 247 aa, Homo Sapiens
  misc_feature (1)..(1): Xaa can be any naturally occurring amino acid
XESFQNEEIGRLLSEDFVSVKVDREERPDVDKVYMTFVQATSSGGGWPMNVWLTPNLQPFVGGTYFPPEDGLTRVGFRTVLLRIREQWKQNKNTLLENSQRVTTALLARSEISVGDRQLPPSAATVNNRCFQQLDEGYDEEYGGFAEAPKFPTPVILSFLFSYWLSHRLTQDGSRAQQMALHTLKMMANGGIRDHVGQTASGTSLTLRRCSMTRHSSLWPIRRPSSSLVMNSTLTWPKASCSTWLGA

SEQ ID NO: 12700 - protein, 110 aa, Homo Sapiens
  misc_feature (1)..(1): Xaa can be any naturally occurring amino acid
XQAQLAVAYSQAFQLSGDEFYSDVAKGILQYVARSLSHRSGGFYSAEDADSPPERGQRPKEGAYYVWTVKEVQQLLPEPVLGATEPLTSGQLLMKHYGLTEAGNISPSQA

SEQ ID NO: 12701 - protein, 350 aa, Homo Sapiens
MKPLVLLVALLLWPSSVPAYPSITVTPDEEQNLNHYIQVLENLVRSVPSGEPGREKKSNSPKHVYSIASKGSKFKELVTHGDASTENDVLTNPISEETTTFPTGGFTPEIGKKKHTESTPFWSIKPNNVSIVLHAEEPYIENEEPEPEPEPAAKQTEAPRMLPVVTESSTSPYVTSYKSPVTTLDKSTGIGISTESEDVPQLSGETAIEKPEEFGKHPESWNNDDILKKILDINSQVQQALLSDTSNPAYREDIEASKDHLKRSLALAAAAEHKLKTMYKSQLLPVGRTSNKIDDIETVINMLCNSRSKLYEYLDIKCVPPEMREKAATVFNTLKNMCRSRRVTALLKVY

SEQ ID NO: 12702 - protein, 65 aa, Homo Sapiens
MKVTGIFLLSALALLSLSGNTGADSLGREAKCYNELNGCTKIYDPVCGTDGNTYPNECVLCFENR

SEQ ID NO: 12703 - protein, 79 aa, Homo Sapiens
MKVTGIFLLSALALLSLSGNTGADSLGREAKCYNELNGCTKIYDPVCGTDGNTYPNECVLCFENRKRQTSILIQKSGPC

SEQ ID NO: 12704 - protein, 94 aa, Homo Sapiens
MAAFPHKIIFFLVCSTLTHVAFSGIFNKRDFTRWPKPRCKMYIPLDPDYNADCPNVTAPVCASNGHTFQNECFFCVEQREFHYRIKFEKYGKCD

SEQ ID NO: 12705 - protein, 94 aa, Homo Sapiens; identical to SEQ ID NO: 12704

SEQ ID NO: 12706 - protein, 54 aa, Homo Sapiens
MYIPLDPDYNADCPNVTAPVCASNGHTFQNECFFCVEQREFHYRIKFEKYGKCD

SEQ ID NO: 12707 - protein, 47 aa, Homo Sapiens
MAKSFPVFSLLSFILIHLVLSSVSGPRHWWPPRGIIKEISWKNQVLP

SEQ ID NO: 12708 - protein, 97 aa, Homo Sapiens
MAKSFPVFSLLSFILIHLVLSSVSGPRHWWPPRGIIKVKCPYEKVNLSWYNGTVNPCPGLYQPICGTNFITYDNPCILCVESLKSHGRIRFYHDGKC

SEQ ID NO: 12709 - protein, 84 aa, Homo Sapiens
MALSVLRLALLLLAVTFAASLIPQFGLFSKYRTPNCSQYRLPGCPRHFNPVCGSDMSTYANECTLCMKIREGGHNIKIIRNGPC

SEQ ID NO: 12710 - protein, 119 aa, Homo Sapiens
MALSVLRLALLLLAVTFAGSARSGPGERGPPEKSGFGSQTGGGPCPAPGGLGDASLIPQFGLFSKYRTPNCSQYRLPGCPRHFNPVCGSDMSTYANECTLCMKIREGGHNIKIIRNGPC

SEQ ID NO: 12711 - protein, 88 aa, Homo Sapiens [sequence omitted]

SEQ ID NO: 12712 - protein, 134 aa, Homo Sapiens
MALSVLRLALLLLAVTFAGSARSGPGERGPPEKSGFGSQTGGGPCPAPGGLGDGTRAPVTGGSPEDLPASLIPQFGLFSKYRTPNCSQYRLPGCPRHFNPVCGSDMSTYANECTLCMKIREGGHNIKIIRNGPC

SEQ ID NO: 12713 - protein, 103 aa, Homo Sapiens [sequence omitted]

SEQ ID NO: 12714 - protein, 134 aa, Homo Sapiens
MALSVLRLALLLLAVTFAGSARSGPGERGPPEKSGFGSQTGGGPCPAPGGLGDGTRAPVTGGSPEDLPGKVVIILKSFEMDPADGAVYRKEDGETTFTGRLDKLHFPFFSFPVFLYMRFVNTHFLRAGMEDSHV

SEQ ID NO: 12715 - protein, 86 aa, Homo Sapiens
MAVRQWVIALALAALLVVDREVPVAAGKLPFSRMPICEHMVESPTCSQMSNLVCGTDGLTYTNECQLCLARIKTKQDIQIMKDGKC

SEQ ID NO: 12716 - protein, 109 aa, Homo Sapiens
MILGIGSSPHLLWTLEGTHIWSLLGDASHTDRLPEAGAGKLLSEVPVAAGKLPFSRMPICEHMVESPTCSQMSNLVCGTDGLTYTNECQLCLARIKTKQDIQIMKDGKC

SEQ ID NO: 12717 - protein, 68 aa, Homo Sapiens
MKIATVSVLLPLALCLIQDAASKNEDQDKKFFQSLDGIMFINKCATCKMILEKEAKSQKRARHLARAP

SEQ ID NO: 12718 - protein, 869 aa, Homo Sapiens
MKIATVSVLLPLALCLIQDAASKNEDQDKKFFQSLDGIMFINKCATCKMILEKEAKSQKRARHLARAPKATAPTELNCDDFKKGERDGDFICPDYYEAVCGTDGKTYDNRCALCAENAKTGSQIGVKSEGECKSSNPEQDVCSAFRPFVRDGRLGCTRENDPVLGPDGKTHGNKCAMCAELFLKEAENAKREGETRIRRNAEKDFCKEYEKQVRNGRLFCTRESDPVRGPDGRMHGNKCALCAEIFKQRFSEENSKTDQNLGKAEEKTKVKREIVKLCSQYQNQAKNGILFCTRENDPIRGPDGKMHGNLCSMCQAYFQAENEEKKKAEARARNKRESGKATSYAELCSEYRKLVRNGKLACTRENDPIQGPDGKVHGNTCSMCEVFFQAEEEEKKKKEGKSRNKRQSKSTASFEELCSEYRKSRKNGRLFCTRENDPIQGPDGKMHGNTCSMCEAFFQQEERARAKAKREAAKEICSEFRDQVRNGTLICTREHNPVRGPDGKMHGNKCAMCASVFKLEEEEKKNDKEEKGKVEAEKVKREAVQELCSEYRHYVRNGRLPCTRENDPIEGLDGKIHGNTCSMCEAFFQQEAKEKERAEPRAKVKREAEKETCDEFRRLLQNGKLFCTRENDPVRGPDGKTHGNKCAMCKAVFQKENEERKRKEEEDQRNAAGHGSSGGGGGNTQDECAEYREQMKNGRLSCTRESDPVRDADGKSYNNQCTMCKAKLEREAERKNEYSRSRSNGTGSESGKDTCDEFRSQMKNGKLICTRESDPVRGPDGKTHGNKCTMCKEKLEREAAEKKKKEDEDRSNTGERSNTGERSNDKEDLCREFRSMQRNGKLICTRENNPVRGPYGKMHINKCAMCQSI

SEQ ID NO: 12719 - protein, 1064 aa, Homo Sapiens
MKIATVSVLLPLALCLIQDAASKNEDQEMCHEFQAFMKNGKLFCPQDKKFFQSLDGIMFINKCATCKMILEKEAKSQKRARHLARAPKATAPTELNCDDFKKGERDGDFICPDYYEAVCGTDGKTYDNRCALCAENAKTGSQIGVKSEGECKSSNPEQDVCSAFRPFVRDGRLGCTRENDPVLGPDGKTHGNKCAMCAELFLKEAENAKREGETRIRRNAEKDFCKEYEKQVRNGRLFCTRESDPVRGPDGRMHGNKCALCAEIFKQRFSEENSKTDQNLGKAEEKTKVKREIVKLCSQYQNQAKNGILFCTRENDPIRGPDGKMHGNLCSMCQAYFQAENEEKKKAEARARNKRESGKATSYAELCSEYRKLVRNGKLACTRENDPIQGPDGKVHGNTCSMCEVFFQAEEEEKKKKEGKSRNKRQSKSTASFEELCSEYRKSRKNGRLFCTRENDPIQGPDGKMHGNTCSMCEAFFQQEERARAKAKREAAKEICSEFRDQVRNGTLICTREHNPVRGPDGKMHGNKCAMCASVFKLEEEEKKNDKEEKGKVEAEKVKREAVQELCSEYRHYVRNGRLPCTRENDPIEGLDGKIHGNTCSMCEAFFQQEAKEKERAEPRAKVKREAEKETCDEFRRLLQNGKLFCTRENDPVRGPDGKTHGNKCAMCKAVFQKENEERKRKEEEDQRNAAGHGSSGGGGGNTQDECAEYREQMKNGRLSCTRESDPVRDADGKSYNNQCTMCKAKLEREAERKNEYSRSRSNGTGSESGKDTCDEFRSQMKNGKLICTRESDPVRGPDGKTHGNKCTMCKEKLEREAAEKKKKEDEDRSNTGERSNTGERSNDKEDLCREFRSMQRNGKLICTRENNPVRGPYGKMHINKCAMCQSIFDREANERKKKDEEKSSSKPSNNAKDECSEFRNYIRNNELICPRENDPVHGADGKFYTNKCYMCRAVFLTEALERAKLQEKPSHVRASQEEDSPDSFSSLDSEMCKDYRVLPRIGYLCPKDLKPVCGDDGQTYNNPCMLCHENLIRQTNTHIRSTGKCEESSTPGTTAASMPPSDE

SEQ ID NO: 12720 - protein, 1094 aa, Homo Sapiens
MKIATVSVLLPLALCLIQDAASKNEDQEMCHEFQAFMKNGKLFCPQDKKFFQSLDGIMFINKCATCKMILEKEAKSQKRARHLARAPKATAPTELNCDDFKKGERDGDFICPDYYEAVCGTDGKTYDNRCALCAENAKTGSQIGVKSEGECKSSNPEQDVCSAFRPFVRDGRLGCTRENDPVLGPDGKTHGNKCAMCAELFLKEAENAKREGETRIRRNAEKDFCKEYEKQVRNGRLFCTRESDPVRGPDGRMHGNKCALCAEIFKQRFSEENSKTDQNLGKAEEKTKVKREIVKLCSQYQNQAKNGILFCTRENDPIRGPDGKMHGNLCSMCQAYFQAENEEKKKAEARARNKRESGKATSYAELCSEYRKLVRNGKLACTRENDPIQGPDGKVHGNTCSMCEVFFQAEEEEKKKKEGKSRNKRQSKSTASFEELCSEYRKSRKNGRLFCTRENDPIQGPDGKMHGNTCSMCEAFFQQEERARAKAKREAAKEICSEFRDQVRNGTLICTREHNPVRGPDGKMHGNKCAMCASVFKLEEEEKKNDKEEKGKVEAEKVKREAVQELCSEYRHYVRNGRLPCTRENDPIEGLDGKIHGNTCSMCEAFFQQEAKEKERAEPRAKVKREAEKETCDEFRRLLQNGKLFCTRENDPVRGPDGKTHGNKCAMCKAVFQKENEERKRKEEEDQRNAAGHGSSGGGGGNTQDECAEYREQMKNGRLSCTRESDPVRDADGKSYNNQCTMCKAKLEREAERKNEYSRSRSNGTGSESGKDTCDEFRSQMKNGKLICTRESDPVRGPDGKTHGNKCTMCKEKLEREAAEKKKKEDEDRSNTGERSNTGERSNDKEDLCREFRSMQRNGKLICTRENNPVRGPYGKMHINKCAMCQSIFDREANERKKKDEEKSSSKPSNNAKDQCRQVQNEAEDAKFRQPGRSLASVARMSTDECSEFRNYIRNNELICPRENDPVHGADGKFYTNKCYMCRAVFLTEALERAKLQEKPSHVRASQEEDSPDSFSSLDSEMCKDYRVLPRIGYLCPKDLKPVCGDDGQTYNNPCMLCHENLIRQTNTHIRSTGKCEESSTPGTTAASMPPSDE

SEQ ID NO: 12721 - protein, 916 aa, Homo Sapiens
MKIATVSVLLPLALCLIQDAASKNEDQEMCHEFQAFMKNGKLFCPQDKKFFQSLDGIMFINKCATCKMILEKEAKSQKRARHLARAPKATAPTELNCDDFKKGERDGDFICPDYYEAVCGTDGKTYDNRCALCAENAKTGSQIGVKSEGECKSSNPEQDVCSAFRPFVRDGRLGCTRENDPVLGPDGKTHGNKCAMCAELFLKEAENAKREGETRIRRNAEKDFCKEYEKQVRNGRLFCTRESDPVRGPDGRMHGNKCALCAEIFKQRFSEENSKTDQNLGKAEEKTKVKREIVKLCSQYQNQAKNGILFCTRENDPIRGPDGKMHGNLCSMCQAYFQAENEEKKKAEARARNKRESGKATSYAELCSEYRKLVRNGKLACTRENDPIQGPDGKVHGNTCSMCEVFFQAEEEEKKKKEGKSRNKRQSKSTASFEELCSEYRKSRKNGRLFCTRENDPIQGPDGKMHGNTCSMCEAFFQQEERARAKAKREAAKEICSEFRDQVRNGTLICTREHNPVRGPDGKMHGNKCAMCASVFKLEEEEKKNDKEEKGKVEAEKVKREAVQELCSEYRHYVRNGRLPCTRENDPIEGLDGKIHGNTCSMCEAFFQQEAKEKERAEPRAKVKREAEKETCDEFRRLLQNGKLFCTRENDPVRGPDGKTHGNKCAMCKAVFQKENEERKRKEEEDQRNAAGHGSSGGGGGNTQDECAEYREQMKNGRLSCTRESDPVRDADGKSYNNQCTMCKAKLEREAERKNEYSRSRSNGTGSESGKDTCDEFRSQMKNGKLICTRESDPVRGPDGKTHGNKCTMCKEKLEREAAEKKKKEDEDRSNTGERSNTGERSNDKEDLCREFRSMQRNGKLICTRENNPVRGPYGKMHINKCAMCQSIFDREANERKKKDEEKSSSKPSNNAKVIY

SEQ ID NO: 12722 - protein, 201 aa, Homo Sapiens
MKIATVSVLLPLALCLIQDAASKNEDQEMCHEFQAFMKNGKLFCPQDKKFFQSLDGIMFINKCATCKMILEKEAKSQKRARHLARAPKATAPTELNCDDFKKGERDGDFICPDYYEAVCGTDGKTYDNRCALCAENAKTGSQIGVKSEGECKSSNPEQFCEPVMVGEGEGRKDLIHVTLVFFQEIGSKLMARTVLCLSSGT

SEQ ID NO: 12723 - protein, 41 aa, Homo Sapiens
MKLSGMFLLLSLALFCFLTGVFSQGGQVDCGEFQDPKVYCT

SEQ ID NO: 12724 - protein, 80 aa, Homo Sapiens
MKLSGMFLLLSLALFCFLTGVFSQGGQVDCGEFQDPKVYCTRESNPHCGSDGQTYGNKCAFCKAIVKSGGKISLKHPGKC

SEQ ID NO: 12725 - protein, 80 aa, Homo Sapiens; identical to SEQ ID NO: 12724

SEQ ID NO: 12726 - protein, 85 aa, Homo Sapiens
MKITGGLLLLCTVVYFCSSSEAASLSPKKVDCSIYKKYPVVAIPCPITYLPVCGSDYITYGNECHLCTESLKSNGRVQFLHDGSC

SEQ ID NO: 12727 - protein, 59 aa, Homo Sapiens
MTQVDCSIYKKYPVVAIPCPITYLPVCGSDYITYGNECHLCTESLKSNGRVQFLHDGSC

SEQ ID NO: 12728 - protein, 97 aa, Homo Sapiens
MKGICSDAILVLATSMWMAFAIDFPLPMASERGQLDKTIVECLKNVNKCWFLSYIKPSEPICGSDQVTYSSDCHLCSKILFEGLNITKLYDGQCENS

SEQ ID NO: 12729 - protein, 86 aa, Homo Sapiens
MRATAIVLLLALTLATMFSIECAKQTKQMVDCSHYKKLPPGQQRFCHHMYDPICGSDGKTYKNDCFFCSKVKKTDGTLKFVHFGKC

SEQ ID NO: 12730 - protein, 107 aa, Homo Sapiens
MVFMNPSHHCFHYKTPPSSSGEHNEPRRLMGLTQPEHLQGIECAKQTKQMVDCSHYKKLPPGQQRFCHHMYDPICGSDGKTYKNDCFFCSKVKKTDGTLKFVHFGKC

SEQ ID NO: 12731 - protein, 294 aa, Homo Sapiens
ELWGLKEGTYLFQLTVTSSDHPEDTANVTVTVLSTKQTEDYCLASNKVGRCRGSFPRWYYDPTEQICKSFVYGGCLGNKNNYLREEECILACRGVQVCSGTCQPTQFRCSNGCCIDSFLECDDTPNCPDASDEAACEKYTSGFDELQRIHFPSDKGHCVDLPDTGLCKESIPRWYYNPFSEHCARFTYGGCYGNKNNFEEEQQCLESCRGISKKDVFGLRREIPIPSTGSVEMAVAVFLVICIVVVVAILGYCFFKNQRKDFHGHHHHPPPTPASSTVSTTEDTEHLVYNHTTR

SEQ ID NO: 12732 - protein, 529 aa, Homo Sapiens
MAPARTMARARLAPAGIPAVALWLLCTLGLQGTQAGPPPAPPGLPAGADCLNSFTAGVPGFVLDTNASVSNGATFLESPTVRRGWDCVRACCTTQNCNLALVELQPDRGEDAIAACFLINCLYEQNFVCKFAPREGFINYLTREVYRSYRQLRTQGFGGSGIPKAWAGIDLKVQPQEPLVLKDVENTDWRLLRGDTDVRVERKDPNQVELWGLKEGTYLFQLTVTSSDHPEDTANVTVTVLSTKQTEDYCLASNKVGRCRGSFPRWYYDPTEQICKSFVYGGCLGNKNNYLREEECILACRGVQGGPLRGSSGAQATFPQGPSMERRHPVCSGTCQPTQFRCSNGCCIDSFLECDDTPNCPDASDEAACEKYTSGFDELQRIHFPSDKGHCVDLPDTGLCKESIPRWYYNPFSEHCARFTYGGCYGNKNNFEEEQQCLESCRGISKKDVFGLRREIPIPSTGSVEMAVAVFLVICIVVVVAILGYCFFKNQRKDFHGHHHHPPPTPASSTVSTTEDTEHLVYNHTTRPL

SEQ ID NO: 12733 - protein, 513 aa, Homo Sapiens
MAPARTMARARLAPAGIPAVALWLLCTLGLQGTQAGPPPAPPGLPAGADCLNSFTAGVPGFVLDTNASVSNGATFLESPTVRRGWDCVRACCTTQNCNLALVELQPDRGEDAIAACFLINCLYEQNFVCKFAPREGFINYLTREVYRSYRQLRTQGFGGSGIPKAWAGIDLKVQPQEPLVLKDVENTDWRLLRGDTDVRVERKDPNQVELWGLKEGTYLFQLTVTSSDHPEDTANVTVTVLSTKQTEDYCLASNKVGRCRGSFPRWYYDPTEQICKSFVYGGCLGNKNNYLREEECILACRGVQGPSMERRHPVCSGTCQPTQFRCSNGCCIDSFLECDDTPNCPDASDEAACEKYTSGFDELQRIHFPSDKGHCVDLPDTGLCKESIPRWYYNPFSEHCARFTYGGCYGNKNNFEEEQQCLESCRGISKKDVFGLRREIPIPSTGSVEMAVAVFLVICIVVVVAILGYCFFKNQRKDFHGHHHHPPPTPASSTVSTTEDTEHLVYNHTTRPL

SEQ ID NO: 12734 - protein, 302 aa, Homo Sapiens
MAPARTMARARLAPAGIPAVALWLLCTLGLQGTQAGPPPAPPGLPAGADCLNSFTAGVPGFVLDTNASVSNGATFLESPTVRRGWDCVRACCTTQNCNLALVELQPDRGEDAIAACFLINCLYEQNFVCKFAPREGFINYLTREVYRSYRQLRTQGFGGSGIPKAWAGIDLKVQPQEPLVLKDVENTDWRLLRGDTDVRVERKDPNQVELWGLKEGTYLFQLTVTSSDHPEDTANVTVTVLSTKQTEDYCLASNKVGRCRGSFPRWYYDPTEQICKSFVYGGCLGNKNNYLREEECILACRG

SEQ ID NO: 12735 - protein, 472 aa, Homo Sapiens
PPGLPAGADCLNSFTAGVPGFVLDTNASVSNGATFLESPTVRRGWDCVRACCTTQNCNLALVELQPDRGEDAIAACFLINCLYEQNFVCKFAPREGFINYLTREVYRSYRQLRTQGFGGSGIPKAWAGIDLKVQPQEPLVLKDVENTDWRLLRGDTDVRVERKDPNQVELWGLKEGTYLFQLTVTSSDHPEDTANVTVTVLSTKQTEDYCLASNKVGRCRGSFPRWYYDPTEQICKSFVYGGCLGNKNNYLREEECILACRGVQGGPLRGSSGAQATFPQVCSGTCQPTQFRCSNGCCIDSFLECDDTPNCPDASDEAACEKYTSGFDELQRIHFPSDKGHCVDLPDTGLCKESIPRWYYNPFSEHCARFTYGGCYGNKNNFEEEQQCLESCRGISKKDVFGLRREIPIPSTGSVEMAVAVFLVICIVVVVAILGYCFFKNQRKDFHGHHHHPPPTPASSTVSTTEDTEHLV

SEQ ID NO: 12736 - protein, 313 aa, Homo Sapiens
  misc_feature (1)..(1): Xaa can be any naturally occurring amino acid
XEKAAEPQLSEHRVGSRDPSRAGSWDRNLGGPGPTQLTCAGHQHPRNPEARALKVTPLGRKAMAPARTMARARLAPAGIPAVALWLLCTLGLQGTQAGPPPAPPGLPAGADCLNSFTAGVPGFVLDTNASVSNGATFLESPTVRRGWDCVRACCTTQNCNLALVELQPDRGEDAIAACFLINCLYEQNFVCKFAPREGFINYLTREVYRSYRQLRTQGFGGSGIPKAWAGIDLKVQPQEPLVLKDVENTDWRLLRGDTDVRVELTVTSSDHPEDTANVTVTVLSTKQTEDYCLASNKVGRCRGSFPRWYYDPT

SEQ ID NO: 12737 - protein, 204 aa, Homo Sapiens
  misc_feature (1)..(1): Xaa can be any naturally occurring amino acid
XLGNKNNYLREEECILACRGVQGGPLRGSSGAQATFPQGPSMERRHPDTSGFDELQRIHFPSDKGHCVDLPDTGLCKESIPRWYYNPFSEHCARFTYGGCYGNKNNFEEEQQCLESCRGISKKDVFGLRREIPIPSTGSVEMAVAVFLVICIVVVVAILGYCFFKNQRKDFHGHHHHPPPTPASSTVSTTEDTEHLVYNHTTRP

SEQ ID NO: 12738 - protein, 240 aa, Homo Sapiens
  misc_feature (1)..(1): Xaa can be any naturally occurring amino acid
XVENTDWRLLRGDTDVRVERKDPNQVELWGLKEGTYLFQLTVTSSDHPEDTANVTVTVLSTKQTEDYCLASNKVGRCRGSFPRWYYDPTEQICKSFVYGGCLGNKNNYLREEECILACRGVQGPSMERRHPDTSGFDELQRIHFPSDKGHCVDLPDTGLCKESIPRWYYNPFSEHCARFTYGGCYGNKNNFEEEQQCLESCRGISKKDVFGLRREIPIPSTGSVEMAVAVFLVICIVVVV

SEQ ID NO: 12739 - protein, 175 aa, Homo Sapiens [sequence omitted]

SEQ ID NO: 12740 - protein, 252 aa, Homo Sapiens
MAQLCGLRRSRAFLALLGSLLLSGVLAADRERSIHDFCLVSKVVGRCRASMPRWWYNVTDGSCQLFVYGGCDGNSNNYLTKEECLKKCATVTENATGDLATSRNAADSSVPSAPRRQDSEDHSSDMFNYEEYCTANAVTGPCRASFPRWYFDVERNSCNNFIYGGCRGNKNSYRSEEACMLRCFRQQENPPLPLGSKVVVLAGLFVMVLILFLGASMVYLIRVARRNQERALRTVWSSGDDKEQLVKNTYVL

SEQ ID NO: 12741 - protein, 195 aa, Homo Sapiens
MAQLCGLRRSRAFLALLGSLLLSGVLAADRERSIHENATGDLATSRNAADSSVPSAPRRQDSEDHSSDMFNYEEYCTANAVTGPCRASFPRWYFDVERNSCNNFIYGGCRGNKNSYRSEEACMLRCFRQQENPPLPLGSKVVVLAGLFVMVLILFLGASMVYLIRVARRNQERALRTVWSSGDDKEQLVKNTYVL

SEQ ID NO: 12742 - protein, 52 aa, Homo Sapiens
MPRWWYNVTDGSCQLFVYGGCDGNSNNYLTKEECLKKCATVTENATGDLATS

SEQ ID NO: 12743 - protein, 62 aa, Homo Sapiens
MPRWWYNVTDGSCQLFVYGGCDGNSNNYLTKEECLKKCATVTENATGDLATSRNAADSSVPS

SEQ ID NO: 12744 - protein, 202 aa, Homo Sapiens
MPRWWYNVTDGSCQLFVYGGCDGNSNNYLTKEECLKKCATVTENATGDLATSRNAADSSVPSAPRRQDSEDHSSDMFNYEEYCTANAVTGPCRASFPRWYFDVERNSCNNFIYGGCRGNKNSYRSEEACMLRCFRQQENPPLPLGSKVVVLAGLFVMVLILFLGASMVYLIRVARRNQERALRTVWSSGDDKEQLVKNTYVL

SEQ ID NO: 12745 - protein, 130 aa, Homo Sapiens
  misc_feature (1)..(1): Xaa can be any naturally occurring amino acid
XPRRQDSEDHSSDMFNYEEYCTANAVTGPCRASFPRWYFDVERNSCNNFIYGGCRGNKNSYRSEEACMLRCFRQQENPPLPLGSKGKWPLTLLLPSACLLPSLTELSPAQLWFTLSFTVNIILAESHVSA

SEQ ID NO: 12746 - protein, 106 aa, Homo Sapiens
  misc_feature (1)..(1): Xaa can be any naturally occurring amino acid
XRGTPAITSSMEAAGAIRTATALRRPACSAASAVCSLPGQQENPPLPLGSKVVVLAGLFVMVLILFLGASMVYLIRVARRNQERALRTVWSSGDDKEQLVKNTYVL

SEQ ID NO: 12747 - protein, 89 aa, Homo Sapiens
MQLQASLSFLLILTLCLELRSELARDTIKDLLPNVCAFPMEKGPCQTYMTRWFFNFETGECELFAYGGCGGNSNNFLRKEKCEKFCKFT

SEQ ID NO: 12748 - protein, 99 aa, Homo Sapiens
MKSAKLGFLLRFFIFCSLNTLLLGGVNKIAEKICGDLKDPCKLDMNFGSCYEVHFRYFYNRTSKRCETFVFSGCNGNLNNFKLKIEREVACVAKYKPPR

SEQ ID NO: 12749 - protein, 377 aa, Homo Sapiens
DDYFRNWNPNKPFDQALDPSKDPCLKVKCSPHKVCVTQDYQTALCVSRKHLLPRQKKGNVAQKHWVGPSNLVKCKPCPVAQSAMVCGSDGHSYTSKCKLEFHACSTGKSLATLCDGPCPCLPEPEPPKHKAERSACTDKELRNLASRLKDWFGALHEDANRVIKPTSSNTAQGRFDTSILPICKDSLGWMFNKLDMNYDLLLDPSEINAIYLDKYEPCIKPLFNSCDSFKDGKLSNNEWCYCFQKPGGLPCQNEMNRIQKLSKGKSLLGAFIPRCNEEGYYKATQCHGSTGQCWCVDKYGNELAGSRKQGAVSCEEEQETSGDFGSGGSVVLLDDLEYERELGPKDKEGKLRVHTRAVTEDDEDEDDDKEDEVGYIW

SEQ ID NO: 12750 - protein, 139 aa, Homo Sapiens
MPAIAVLAAAAAAWCFLQVESRHLDALAGGAGPNHGNFLDNDQWLSTVSQYDRDKYWNRFRDDDYFRNWNPNKPFDQALDPSKDPCLKVKCSPHKVCVTQDYQTALCVSRKHLLPRQKKGNVAQKHWVGPSNLVKCKPC

SEQ ID NO: 12751 - protein, 439 aa, Homo Sapiens
MPAIAVLAAAAAAWCFLQVESRHLDALAGGAGPNHGNFLDNDQWLSTVSQYDRDKYWNRFRDDDYFRNWNPNKPFDQALDPSKDPCLKVKCSPHKVCVTQDYQTALCVSRKHLLPRQKKGNVAQKHWVGPSNLVKCKPCPVAQSAMVCGSDGHSYTSKCKLEFHACSTGKSLATLCDGPCPCLPEPEPPKHKAERSACTDKELRNLASRLKDWFGALHEDANRVIKPTSSNTAQGRFDTSILPICKDSLGWMFNKLDMNYDLLLDPSEINAIYLDKYEPCIKPLFNSCDSFKDGKLSNNEWCYCFQKPGGLPCQNEMNRIQKLSKGKSLLGAFIPRCNEEGYYKATQCHGSTGQCWCVDKYGNELAGSRKQGAVSCEEEQETSGDFGSGGSVVLLDDLEYERELGPKDKEGKLRVHTRAVTEDDEDEDDDKEDEVGYIW

SEQ ID NO: 12752 - protein, 67 aa, Homo Sapiens
MVCGSDGHSYTSKCKLEFHACSTGKSLATLCDGPCPCLPEPEPPKHKAERSACTDKELRNLASRLKD

SEQ ID NO: 12753 - protein, 424 aa, Homo Sapiens
MRAPGCGRLVLPLLLLAAAALAEGDAKGLKEGETPGNFMEDEQWLSSISQYSGKIKHWNRFRDEVEDDYIKSWEDNQQGDEALDTTKDPCQKVKCSRHKVCIAQGYQRAMCISRKKLEHRIKQPTVKLHGNKDSICKPCHMAQLASVCGSDGHTYSSVCKLEQQACLSSKQLAVRCEGPCPCPTEQAATSTADGKPETCTGQDLADLGDRLRDWFQLLHENSKQNGSASSVAGPASGLDKSLGASCKDSIGWMFSKLDTSADLFLDQTELAAINLDKYEVCIRPFFNSCDTYKDGRVSTAEWCFCFWREKPPCLAELERIQIQEAAKKKPGIFIPSCDEDGYYRKMQCDQSSGDCWCVDQLGLELTGTRTHGSPDCDDIVGFSGDFGSGVGWEDEEEKETEEAGEEAEEEEGEAGEADDGGYIW

SEQ ID NO: 12754 - protein, 424 aa, Homo Sapiens; identical to SEQ ID NO: 12753

SEQ ID NO: 12755 - protein, 423 aa, Homo Sapiens [sequence omitted]

SEQ ID NO: 12756 - protein, 77 aa, Homo Sapiens
MRAPGCGRLVLPLLLLAAAALAEGDAKGLKEGETPGNFMEDEQWLSSISQYSGKIKHWNRFRDVPSSDPPSTTQATP

SEQ ID NO: 12757 - protein, 385 aa, Homo Sapiens
MITQDHIHMSSGLSQDDYFRTWSPGKPFDQALDPAKDPCLKMKCSRHKVCIAQDSQTAVCISHRRLTHRMKEAGVDHRQWRGPILSTCKQCPVVYPSPVCGSDGHTYSFQCKLEYQACVLGKQISVKCEGHCPCPSDKPTSTSRNVKRACSDLEFREVANRLRDWFKALHESGSQNKKTKTLLRPERSRFDTSILPICKDSLGWMFNRLDTNYDLLLDQSELRSIYLDKNEQCTKAFFNSCDTYKDSLISNNEWCYCFQRQQDPPCQTELSNIQKRQGVKKLLGQYIPLCDEDGYYKPTQCHGSVGQCWCVDRYGNEVMGSRINGVADCAIDFEISGDFASGDFHEWTDDEDDEDDIMNDEDEIEDDDEDEGDDDDGGDDHDVYI

SEQ ID NO: 12758 - protein, 344 aa, Homo Sapiens
MKCSRHKVCIAQDSQTAVCISHRRLTHRMKEAGVDHRQWRGPILSTCKQCPVVYPSPVCGSDGHTYSFQCKLEYQACVLGKQISVKCEGHCPCPSDKPTSTSRNVKRACSDLEFREVANRLRDWFKALHESGSQNKKTKTLLRPERSRFDTSILPICKDSLGWMFNRLDTNYDLLLDQSELRSIYLDKNEQCTKAFFNSCDTYKDSLISNNEWCYCFQRQQDPPCQTELSNIQKRQGVKKLLGQYIPLCDEDGYYKPTQCHGSVGQCWCVDRYGNEVMGSRINGVADCAIDFEISGDFASGDFHEWTDDEDDEDDIMNDEDEIEDDDEDEGDDDDGGDDHDVYI

SEQ ID NO: 12759 - protein, 316 aa, Homo Sapiens
MKEAGVDHRQWRGPILSTCKQCPVVYPSPVCGSDGHTYSFQCKLEYQACVLGKQISVKCEGHCPCPSDKPTSTSRNVKRACSDLEFREVANRLRDWFKALHESGSQNKKTKTLLRPERSRFDTSILPICKDSLGWMFNRLDTNYDLLLDQSELRSIYLDKNEQCTKAFFNSCDTYKDSLISNNEWCYCFQRQQDPPCQTELSNIQKRQGVKKLLGQYIPLCDEDGYYKPTQCHGSVGQCWCVDRYGNEVMGSRINGVADCAIDFEISGDFASGDFHEWTDDEDDEDDIMNDEDEIEDDDEDEGDDDDGGDDHDVYI

SEQ ID NO: 12760 - protein, 63 aa, Homo Sapiens
MLKVSAVLCVCAAAWCSQSLAAAAAVAAAGGRSDGGNFLDDKQWLTTISQYDKEVGQWNKFRD

SEQ ID NO: 12761 - protein, 338 aa, Homo Sapiens
MLKVSAVLCVCAAAWCSQSLAAAAAVAAAGGRSDGGNFLDDKQWLTTISQYDKEVGQWNKFRDCKLEYQACVLGKQISVKCEGHCPCPSDKPTSTSRNVKRACSDLEFREVANRLRDWFKALHESGSQNKKTKTLLRPERSRFDTSILPICKDSLGWMFNRLDTNYDLLLDQSELRSIYLDKNEQCTKAFFNSCDTYKDSLISNNEWCYCFQRQQDPPCQTELSNIQKRQGVKKLLGQYIPLCDEDGYYKPTQCHGSVGQCWCVDRYGNEVMGSRINGVADCAIDFEISGDFASGDFHEWTDDEDDEDDIMNDEDEIEDDDEDEGDDDDGGDDHDVYI

SEQ ID NO: 12762 - protein, 173 aa, Homo Sapiens [sequence omitted]

SEQ ID NO: 12763 - protein, 161 aa, Homo Sapiens
MLKVSAVLCVCAAAWCSQSLAAAAAVAAAGGRSDGGNFLDDKQWLTTISQYDKEVGQWNKFRDDDYFRTWSPGKPFDQALDPAKDPCLKMKCSRHKVCIAQDSQTAVCISHRRLTHRMKEAGVDHRQWRGPILSTCKQCPVVYPSPVCGSDGHTYSFQCKL

SEQ ID NO: 12764 - protein, 433 aa, Homo Sapiens
MLKVSAVLCVCAAAWCSQSLAAAAAVAAAGGRSDGGNFLDDKQWLTTISQYDKEVGQWNKFRDDDYFRTWSPGKPFDQALDPAKDPCLKMKCSRHKVCIAQDSQTAVCISHRRLTHRMKEAGVDHRQWRGPILSTCKQCPVVYPSPVCGSDGHTYSFQCKLEYQACVLGKQISVKCEGHCPCPSDKPTSTSRNVKRACSDLEFREVANRLRDWFKALHESGSQNKKTKTLLRPERSRFDTSILPICKDSLGWMFNRLDTNYDLLLDQSELRSIYLDKNEQCTKAFFNSCDTYKDSLISNNEWCYCFQRQQDPPCQTELSNIQKRQGVKKLLGQYIPLCDEDGYYKPTQCHGSVGQCWCVDRYGNEVMGSRINGVADCAIDFEISGDFASGDFHEWTDDEDDEDDIMNDEDEIEDDDEDEGDDDDGGDDHDVYI

SEQ ID NO: 12765 - protein, 313 aa, Homo Sapiens
MLKVSAVLCVCAAAWCSQSLAAAAAVAAAGGRSDGGNFLDDKQWLTTISQYDKEVGQWNKFRDDDYFRTWSPGKPFDQALDPAKDPCLKMKCSRHKVCIAQDSQTAVCISHRRLTHRMKEAGVDHRQWRGPILSTCKQCPVVYPSPVCGSDGHTYSFQCKLEYQACVLGKQISVKCEGHCPCPSDKPTSTSRNVKRACSDLEFREVANRLRDWFKALHESGSQNKKTKTLLRPERSRFDTSILPICKDSLGWMFNRLDTNYDLLLDQSELRSIYLDKNEQCTKAFFNSCDTYKDSLISNNEWCYCFQRQQGKR

SEQ ID NO: 12766 - protein, 433 aa, Homo Sapiens; identical to SEQ ID NO: 12764

SEQ ID NO: 12767 - protein, 433 aa, Homo Sapiens; identical to SEQ ID NO: 12764

SEQ ID NO: 12768 - protein, 393 aa, Homo Sapiens
MLKVSAVLCVCAAAWCSQSLAAAAAVAAAGGRSDGGNFLDDKQWLTTISQYDKEVGQWNKFRDDDYFRTWSPGKPFDQALDPAKDPCLKMKCSRHKVCIAQDSQTAVCISHRRLTHRMKEAGVDHRQWRGPILSTCKQCPVVYPSPVCGSDGHTYSFQCKLEYQACVLGKQISVKCEGHCPCPSDKPTSTSRNVKRGFDTSILPICKDSLGWMFNRLDTNYDLLLDQSELRSIYLDKNEQCTKAFFNSCDTYKDSLISNNEWCYCFQRQQDPPCQTELSNIQKRQGVKKLLGQYIPLCDEDGYYKPTQCHGSVGQCWCVDRYGNEVMGSRINGVADCAIDFEISGDFASGDFHEWTDDEDDEDDIMNDEDEIEDDDEDEGDDDDGGDDHDVYI

SEQ ID NO: 12769 - protein, 89 aa, Homo Sapiens
MLKVSAVLCVCAAAWCSQSLAAAAAVAAAGGRSDGGNFLDDKQWLTTISQYDKEVGQWNKFRDDDYFRTWSPGKPFDQALSFHDLGIFV

SEQ ID NO: 12770 - protein, 79 aa, Homo Sapiens
MLKVSAVLCVCAAAWCSQSLAAAAAVAAAGGRSDGGNFLDDKQWLTTISQYDKEVGQWNKFRDDDYFRTWSPGKPFDQG

SEQ ID NO: 12771 - protein, 79 aa, Homo Sapiens; identical to SEQ ID NO: 12770

SEQ ID NO: 12772 - protein, 71 aa, Homo Sapiens
MLKVSAVLCVCAAAWCSQSLAAAAAVAAAGGRSDGGNFLDDKQWLTTISQYDKEVGQWNKFRDDERSRSRP

SEQ ID NO: 12773 - protein, 115 aa, Homo Sapiens
MLKVSAVLCVCAAAWCSQSLAAAAAVAAAGGRSDGGNFLDDKQWLTTISQYDKEVGQWNKFRDEVEDDYFRTWSPGKPFDQALDPAKDPCLKMKCSRHKVCIAQDSQTAVCISHR

SEQ ID NO: 12774 - protein, 115 aa, Homo Sapiens; identical to SEQ ID NO: 12773

SEQ ID NO: 12775 - protein, 436 aa, Homo Sapiens
MLKVSAVLCVCAAAWCSQSLAAAAAVAAAGGRSDGGNFLDDKQWLTTISQYDKEVGQWNKFRDEVEDDYFRTWSPGKPFDQALDPAKDPCLKMKCSRHKVCIAQDSQTAVCISHRRLTHRMKEAGVDHRQWRGPILSTCKQCPVVYPSPVCGSDGHTYSFQCKLEYQACVLGKQISVKCEGHCPCPSDKPTSTSRNVKRACSDLEFREVANRLRDWFKALHESGSQNKKTKTLLRPERSRFDTSILPICKDSLGWMFNRLDTNYDLLLDQSELRSIYLDKNEQCTKAFFNSCDTYKDSLISNNEWCYCFQRQQDPPCQTELSNIQKRQGVKKLLGQYIPLCDEDGYYKPTQCHGSVGQCWCVDRYGNEVMGSRINGVADCAIDFEISGDFASGDFHEWTDDEDDEDDIMNDEDEIEDDDEDEGDDDDGGDDHDVYI

SEQ ID NO: 12776 - protein, 436 aa, Homo Sapiens; identical to SEQ ID NO: 12775

SEQ ID NO: 12777 - protein, 436 aa, Homo Sapiens; identical to SEQ ID NO: 12775

SEQ ID NO: 12778 - protein, 436 aa, Homo Sapiens; identical to SEQ ID NO: 12775

SEQ ID NO: 12779 - protein, 122 aa, Homo Sapiens
MLKVSAVLCVCAAAWCSQSLAAAAAVAAAGGRSDGGNFLDDKQWLTTISQYDKEVGQWNKFRDEVEDDYFRTWSPGKPFDQALDPAKDPCLKMKCSRHKVCIAQDSQTAVCISHRRLTHSAN

SEQ ID NO: 12780 - protein, 122 aa, Homo Sapiens; identical to SEQ ID NO: 12779

SEQ ID NO: 12781 - protein, 64 aa, Homo Sapiens
MLKVSAVLCVCAAAWCSQSLAAAAAVAAAGGRSDGGNFLDDKQWLTTISQYDKEVGQWNKFRDL

SEQ ID NO: 12782 - protein, 83 aa, Homo Sapiens
NFLDDKQWLTTISQYDKEVGQWNKFRDDDYFRTWSPGKPFDQALDPAKDPCLKMKCSRHKVCIAQDSQTAVCISHRRLTHSAN

SEQ ID NO: 12783 - protein, 807 aa, Homo Sapiens
MRLSPAPLKLSRTPALLALALPLAAALAFSDETLDKVPKSEGYCSRILRAQGTRREGYTEFSLRVEGDPDFYKPGTSYRVTLSAAPPSYFRGFTLIALRENREGDKEEDHAGTFQIIDEEETQFMSNCPVAVTESTPRRRTRIQVFWIAPPAGTGCVILKASIVQKRIIYFQDEGSLTKKLCEQDSTFDGVTDKPILDCCACGTAKYRLTFYGNWSEKTHPKDYPRRANHWSAIIGGSHSKNYVLWEYGGYASEGVKQVAELGSPVKMEEEIRQQSDEVLTVIKAKAQWPAWQPLNVRAAPSAEFSVDRTRHLMSFLTMMGPSPDWNVGLSAEDLCTKECGWVQKVVQDLIPWDAGTDSGVTYESPNKPTIPQEKIRPLTSLDHPQSPFYDPEGGSITQVARVVIERIARKGEQCNIVPDNVDDIVADLAPEEKDEDDTPETCIYSNWSPWSACSSSTCDKGKRMRQRMLKAQLDLSVPCPDTQDFQPCMGPGCSDEDGSTCTMSEWITWSPCSISCGMGMRSRERYVKQFPEDGSVCTLPTEETEKCTVNEECSPSSCLMTEWGEWDECSATCGMGMKKRHRMIKMNPADGSMCKAETSQAEKCMMPECHTIPCLLSPWSEWSDCSVTCGKGMRTRQRMLKSLAELGDCNEDLEQVEKCMLPECPIDCELTEWSQWSECNKSCGKGHVIRTRMIQMEPQFGGAPCPETVQRKKCRIRKCLRNPSIQKLRWREARESRRSEQLKEESEGEQFPGCRMRPWTAWSECTKLCGGGIQERYMTVKKRFKSSQFTSCKDKKEIRACNVHPC

SEQ ID NO: 12784 - protein, 8 aa, Homo Sapiens
MENPSPAA

SEQ ID NO: 12785 - protein, 16 aa, Homo Sapiens
MENPSPAAALGKALCA

SEQ ID NO: 12786 - protein, 17 aa, Homo Sapiens
MENPSPAAALGKALCAL

SEQ ID NO: 12787 - protein, 24 aa, Homo Sapiens
MENPSPAAALGKALCALLLATLGA

SEQ ID NO: 12788 - protein, 61 aa, Homo Sapiens
MENPSPAAALGKALCALLLATLGAAGQPLGGESICSARALAKYSITFTGKWSQTAFPKQYP

SEQ ID NO: 12789 - protein, 64 aa, Homo Sapiens
MENPSPAAALGKALCALLLATLGAAGQPLGGESICSARALAKYSITFTGKWSQTAFPKQYPLFR

SEQ ID NO: 12790 - protein, 108 aa, Homo Sapiens
MENPSPAAALGKALCALLLATLGAAGQPLGGESICSARALAKYSITFTGKWSQTAFPKQYPLFRPPAQWSSLLGAAHSSDYSMWRKNQYVSNGLRDFAERGEAWALMK

SEQ ID NO: 12791 - protein, 331 aa, Homo Sapiens
MENPSPAAALGKALCALLLATLGAAGQPLGGESICSARALAKYSITFTGKWSQTAFPKQYPLFRPPAQWSSLLGAAHSSDYSMWRKNQYVSNGLRDFAERGEAWALMKEIEAAGEALQSVHAVFSAPAVPSGTGQTSAELEVQRRHSLVSFVVRIVPSPDWFVGVDSLDLCDGDRWREQAALDLYPYDAGTDSGFTFSSPNFATIPQDTVTEITSSSPSHPANSFYYPRLKALPPIARVTLVRLRQSPRAFIPPAPVLPSRDNEIVDSASVPETPLDCEVSLWSSWGLCGGHCGRLGTKSRTRYVRVQPANNGSPCPELEEEAECVPDNCV

SEQ ID NO: 12792 - protein, 331 aa, Homo Sapiens; identical to SEQ ID NO: 12791

SEQ ID NO: 12793 - protein, 331 aa, Homo Sapiens; identical to SEQ ID NO: 12791

SEQ ID NO: 12794 - protein, 314 aa, Homo Sapiens
MRIAVICFCLLGITCAIPVKQADSGSSEEKQLYNKYPDAVATWLNPDPSQKQNLLAPQNAVSSEETNDFKQETLPSKSNESHDHMDDMDDEDDDDHVDSQDSIDSNDSDDVDDTDDSHQSDESHHSDESDELVTDFPTDLPATEVFTPVVPTVDTYDGRGDSVVYGLRSKSKKFRRPDIQYPDATDEDITSHMESEELNGAYKAIPVAQDLNAPSDWDSRGKDSYETSQLDDQSAETHSHKQSRLYKRKANDESNEHSDVIDSQELSKVSREFHSHEFHSHEDMLVVDPKSKEEDKHLKFRISHELDSASSEVN

SEQ ID NO: 12795 - protein, 292 aa, Homo Sapiens
MRIAVICFCLLGITCAIPVKQADSGSSEEKQLYNKYPDAVATWLNPDPSQKQNLLAPQNAVSSEETNDFKQETLPSKSNESHDHMDDMDDEDDDSHQSDESHHSDESDELVTDFPTDLPATEVFTPVVPTVDTYDGRGDSVVYGLRSKSKKFRRPDIQYPDATDEDITSHMESEELNGAYKAIPVAQDLNAPSDWDSRGKDSYETSQLDDQSAETHSHKQSRLYKRKANDESNEHSDVIDSQELSKVSREFHSHEFHSHEDMLVVDPKSKEEDKHLKFRISHELDSASSEVN

SEQ ID NO: 12796 - protein, 300 aa, Homo Sapiens
MRIAVICFCLLGITCAIPVKQADSGSSEEKQLYNKYPDAVATWLNPDPSQKQNLLAPQTLPSKSNESHDHMDDMDDEDDDDHVDSQDSIDSNDSDDVDDTDDSHQSDESHHSDESDELVTDFPTDLPATEVFTPVVPTVDTYDGRGDSVVYGLRSKSKKFRRPDIQYPDATDEDITSHMESEELNGAYKAIPVAQDLNAPSDWDSRGKDSYETSQLDDQSAETHSHKQSRLYKRKANDESNEHSDVIDSQELSKVSREFHSHEFHSHEDMLVVDPKSKEEDKHLKFRISHELDSASSEVN

SEQ ID NO: 12797 - protein, 287 aa, Homo Sapiens
MRIAVICFCLLGITCAIPVKQADSGSSEEKQNAVSSEETNDFKQETLPSKSNESHDHMDDMDDEDDDDHVDSQDSIDSNDSDDVDDTDDSHQSDESHHSDESDELVTDFPTDLPATEVFTPVVPTVDTYDGRGDSVVYGLRSKSKKFRRPDIQYPDATDEDITSHMESEELNGAYKAIPVAQDLNAPSDWDSRGKDSYETSQLDDQSAETHSHKQSRLYKRKANDESNEHSDVIDSQELSKVSREFHSHEFHSHEDMLVVDPKSKEEDKHLKFRISHELDSASSEVN

SEQ ID NO: 12798 - protein, 241 aa, Homo Sapiens
MRIAVICFCLLGITCAIPVKQADSGSSEEKQTLPSKSNESHDHMDDMDDEDDDDHVDSQDSIDSNDSDDVDDTDDSHQSDESHHSDESDELVTDFPTDLPATEVFTPVVPTVDTYDGRGDSVVYGLRSKSKKFRRPDIQYPDATDEDITSHMESEELNGAYKAIPVAQDLNAPSDWDSRGKDSYETSQLDDQSAETHSHKQSRLYKRKANDESNEHSDVIDSQELSKVSREFHSHEFHSHE

SEQ ID NO: 12799 - protein, 211 aa, Homo Sapiens
MISRMEKMTMMMKILIMFALGMNYWSCSGFPVYDYDPSSLRDALSASVVKVNSQSLSPYLFRAFRSSLKRVEVLDENNLVMNLEFSIRETTCRKDSGEDPATCAFQRDYYVSTAVCRSTVKVSAQQVQGVHARCSWSSSTSESYSSEEMIFGDMLGSHKWRNNYLFGLISDESISEQFYDRSLGIMRRVLPPGNRRYPNHRHRARINTDFE

SEQ ID NO: 12800 - protein, 211 aa, Homo Sapiens; identical to SEQ ID NO: 12799

SEQ ID NO: 12801 - protein, 131 aa, Homo Sapiens
MNLEFSIRETTCRKDSGEDPATCAFQRDYYVSTAVCRSTVKVSAQQVQGVHARCSWSSSTSESYSSEEMIFGDMLGSHKWRNNYLFGLISDESISEQFYDRSLGIMRRVLPPGNRRYPNHRHRARINTDFE

SEQ ID NO: 12802 - protein, 151 aa, Homo Sapiens
MNWAPATCWALLLAAAFLCDSGAAKGGRGGARGSARGGVRGGARGASRVRVRPAQRYGAPGSSLRVAAAGAAAGAAAGAAAGLAAGSGWRRAAGPGERGLEDEEDGVPGGNGTGPGIYSYRAWTSGAGPTRGPRLCLVLGGALGALGLLRP

SEQ ID NO: 12803 - protein, 442 aa, Homo Sapiens
MRRTRRPRFVLMNKMDDLNLHYRFLNWRRRIREIREVRAFRYQERFKHILVDGDTLSYHGNSGEVGCYVASRPLTKDSNYFEVSIVDSGVRGTIAVGLVPQYYSLDHQPGWLPDSVAYHADDGKLYNGRAKGRQFGSKCNSGDRIGCGIEPVSFDVQTAQIFFTKNGKRVGSTIMPMSPDGLFPAVGMHSLGEEVRLHLNAELGREDDSVMMVDSYEDEWGRLHDVRVCGTLLEYLGKGKSIVDVGLAQARHPLSTRSHYFEVEIVDPGEKCYIALGLARKDYPKNRHPGWSRGSVAYHADDGKIFHGSGVGDPFGPRCYKGDIMGCGIMFPRDYILDSEGDSDDSCDTVILSPTARAVRNVRNVMYLHQEGEEEEEEEEEEEDGEEIEPEHEGRKVVVFFTRNGKIIGKKDAVVPSGGFFPTIGMLSCGEKVKVDLHPLSG

SEQ ID NO: 12804 - protein, 165 aa, Homo Sapiens
MRRTRRPRFVLMNKMDDLNLHYRFLNWRRRIREIREVRAFRYQERFKHILVDGDTLSYHGNSGEVGCYVASRPLTKDSNYFEVSIVDSGVRGTIAVGLVPQYYSLDHQPGWLPDSVAYHADDGKWALPSCPCPQMDCSQQWACTPWVRRCGCTSTLSWAVRTTAS

SEQ ID NO: 12805 - protein, 479 aa, Homo Sapiens
MRRTRRPRVLLCQPGWNVVAQSELTAALTCQTQAIFSLLSSWDYRFVLMNKMDDLNLHYRFLNWRRRIREIREVRAFRYQERFKHILVDGDTLSYHGNSGEVGCYVASRPLTKDSNYFEVSIVDSGVRGTIAVGLVPQYYSLDHQPGWLPDSVAYHADDGKLYNGRAKGRQFGSKCNSGDRIGCGIEPVSFDVQTAQIFFTKNGKRVGSTIMPMSPDGLFPAVGMHSLGEEVRLHLNAELGREDDSVMMVDSYEDEWGRLHDVRVCGTLLEYLGKGKSIVDVGLAQARHPLSTRSHYFEVEIVDPGEKCYIALGLARKDYPKNRHPGWSRGSVAYHADDGKIFHGSGVGDPFGPRCYKGDIMGCGIMFPRDYILDSEGDSDDSCDTVILSPTARAVRNVRNVMYLHQEGEEEEEEEEEEEDGEEIEPEHEGRKVVVFFTRNGKIIGKKDAVVPSGGFFPTIGMLSCGEKVKVDLHPLSG

SEQ ID NO: 12806 - protein, 60 aa, Homo Sapiens
  misc_feature (1)..(1): Xaa can be any naturally occurring amino acid
XDGEEIEPEHEGRKVVVFFTRNGKIIGKKDAVVPSGGFFPTIGMLSCGEKVKVDLHPLSG

SEQ ID NO: 12807 - protein, 207 aa, Homo Sapiens
MALLFARSLRLCRWGAKRLGVASTEAQRGVSFKLEEKTAHSSLALFRDDTGVKYGLVGLEPTKVALNVERFREWAVVLADTAVTSGRHYWEVTVKRSQQFRIGVADVDMSRDSCIGVDDRSWVFTYAQRKWYTMLANEKAPVEGIGQPEKVGLLLEYEAQKLSLVDVSQVSVVHTLQTDFRGPVVPAFALWDGELLTHSGLEVPEGL

SEQ ID NO: 12808 - protein, 59 aa, Homo Sapiens
MIVLGWMFFVGLVCYMGTFPELMPPTLKWQERWPVQESKTQLRRRALGEDLLQNHVEGI

SEQ ID NO: 12809 - protein, 59 aa, Homo Sapiens; identical to SEQ ID NO: 12808

SEQ ID NO: 12810 - protein, 56 aa, Homo Sapiens
MIVLGWMFFVGLVCYMGTFPELMPPTLKWQERWPVQESKTQLRRRALGLALPPRLE

SEQ ID NO: 12811 - protein, 76 aa, Homo Sapiens
MIVLGWMFFVGLVCYMGTFPELMPPTLKWQERWPVQESKTQLRRRALGTMWKGYKYPPGGTPVEVSKDDPGEVMQL

SEQ ID NO: 12812 - protein, 40 aa, Homo Sapiens
MIVVLWMLLIAGTMWKGYKYPPGGTPVEVSKDDPGEVMQL

SEQ ID NO: 12813 - protein, 40 aa, Homo Sapiens; identical to SEQ ID NO: 12812

SEQ ID NO: 12814 - protein, 116 aa, Homo Sapiens
MKGLRSLAATTLALFLVFVFLGNSSCAPQRLLERRNWTPQAMLYLKGAQGRRFISDQSRRKDLSDRPLPERRSPNPQLLTIPEAATILLASLQKSPEDEEKNFDQTRFLEDSLLNW

SEQ ID NO: 12815 - protein, 36 aa, Homo Sapiens
MLYLKGAQGRRFISDQSRRKDLSDRPLPDEAQIPNY

SEQ ID NO: 12816 - protein, 158 aa, Homo Sapiens
MMQKLLKCSRLVLALALILVLESSVQGYPTRRARYQWVRCNPDSNSANCLEEKGPMFELLPGESNKIPRLRTDLFPKTRIQDLNRIFPLSEDYSGSGFGSGSGSGSGSGSGFLTEMEQDYQLVDESDAFHDNLRSLDRNLPSDSQDLGQHGLEEDFML

SEQ ID NO: 12817 - protein, 431 aa, Homo Sapiens
MLNEDKPSDDYSAVLQRLRKIYHSSIKPLEQSYKYNELRQHEITDGEITSKPMVLFLGPWSVGKSTMINYLLGLENTRYQLYTGAEPTTSEFTVLMHGPKLKTIEGIVMAADSARSFSPLEKFGQNFLEKLIGIEVPHKLLERVTFVDTPGIIENRKQQERGYPFNDVCQWFIDRADLIFVVFDPTKLDVGLELEMLFRQLKGRESQIRIILNKADNLATQMLMRVYGALFWSLAPLINVTEPPRVYVSSFWPQEYKPDTHQELFLQEEISLLEDLNQVIENRLENKIAFIRQHAIRVRIHALLVDRYLQTYKDKMTFFSDGELVFKDIVEDPDKFYIFKTILAKTNVSKFDLPNREAYKDFFGINPISSFKLLSQQCSYMGGCFLEKIERAITQELPGLLGSLGLGKNPGALNCDKTGCSETPKNRYRKH

SEQ ID NO: 12818 - protein, 473 aa, Homo Sapiens
MRALVLLGCLLASLLFSGQAEETEDANEEAPLRDRSHIEKTLMLNEDKPSDDYSAVLQRLRKIYHSSIKPLEQSYKYNELRQHEITDGEITSKPMVLFLGPWSVGKSTMINYLLGLENTRYQLYTGAEPTTSEFTVLMHGPKLKTIEGIVMAADSARSFSPLEKFGQNFLEKLIGIEVPHKLLERVTFVDTPGIIENRKQQERGYPFNDVCQWFIDRADLIFVVFDPTKLDVGLELEMLFRQLKGRESQIRIILNKADNLATQMLMRVYGALFWSLAPLINVTEPPRVYVSSFWPQEYKPDTHQELFLQEEISLLEDLNQVIENRLENKIAFIRQHAIRVRIHALLVDRYLQTYKDKMTFFSDGELVFKDIVEDPDKFYIFKTILAKTNVSKFDLPNREAYKDFFGINPISSFKLLSQQCSYMGGCFLEKIERAITQELPGLLGSLGLGKNPGALNCDKTGCSETPKNRYRKH

SEQ ID NO: 12819 - protein, 486 aa, Homo Sapiens
MRALVLLGCLLASLLFSGQAELQVSASGGTEDVGNLLENHFSAGDASLEEKERALYADTAPQDKKLLLHYPDGREAESPKKTPASAASAGPDPEASLSNASATESPPPGERDDRDAAGPGEEKNGPPVASALPPGGAKGPVEEEWPEPSSGEGQGEEETGFGLPTEGTASGEAGGQAGGHELPEEVQEVQGDSLVQGAVAGTAEPKAEGASPHSEGDGVGPLNAEAEGSPGPGEEPAVPEGAPDVAAVGGESEPDIDTQASEGTEDQGEPGPAAEASAEPGGAQSVKAGDTEENQSPEMTEEDADEASSEEESGDGSGSEEEGGVPSEEESEEDSGDGASSEEAEGASEEATEPQEAGEPQEAREPQEGGDLQEAEESQEGGDPQEAEEPQEGGAPQEGGEPQEGGDPQEAREPQEAREPQEGAELPEATGTTSHRDRGAQPGPEELNTESMGSETLDMKAEEPEEGHQGEGESHHCCPGRDGGCK

SEQ ID NO: 12820 - protein, 56 aa, Homo Sapiens
MAYSNLLRANMDGLKKRDKKNKTKKTKAAAAAAAAAPAAAATAPTTAATTAATAAQ

SEQ ID NO: 12821 - protein, 56 aa, Homo Sapiens; identical to SEQ ID NO: 12820

SEQ ID NO: 12822 - protein, 136 aa, Homo Sapiens
MVLLESEQFLTELTRLFQKCRTSGSVYITLKKYDGRTKPIPKKGTVEGFEPADNKCLLRATDGKKKISTVVSSKEVNKFQMAYSNLLRANMDGLKKRDKKNKTKKTKAAAAAAAAAPAAAATAPTTAATTAATAAQ

SEQ ID NO: 12823 - protein, 115 aa, Homo Sapiens
MVLLESEQFLTELTRLFQKCRTSGSVYITLKKYDGRTKPIPKKGTVEGFEPADNKCLLRATDGKKKISTVVSSKEVNKFQMVSFGCSLCFPSQGKSQYDSEHWVRLILGFTALRR

SEQ ID NO: 12824 - protein, 444 aa, Homo Sapiens
MGSPAHRPALLLLLPPLLLLLLLRVPPSRSFPDTPWCSPIKVKYGDVYCRAPQGGYYKTALGTRCDIRCQKGYELHGSSLLICQSNKRWSDKVICKQKRCPTLAMPANGGFKCVDGAYFNSRCEYYCSPGYTLKGERTVTCMDNKAWSGRPASCVDMEPPRIKCPSVKERIAEPNKLTVRVSWETPEGRDTADGILTDVILKGLPPGSNFPEGDHKIQYTVYDRAENKGTCKFRVKVRVKRCGKLNAPENGYMKCSSDGDNYGATCEFSCIGGYELQGSPARVCQSNLAWSGTEPTCAAMNVNVGVRTAAALLDQFYEKRRLLIVSTPTARNLLYRLQLGMLQQAQCGLDLRHITVVELVGVFPTLIGRIGAKIMPPALALQLRLLLRIPLYSFSMVLVDKHGMDKERYVSLVMPVALFNLIDTFPLRKEEMVLQAEMSQTCNT

SEQ ID NO: 12825 - protein, 405 aa, Homo Sapiens
MGSPAHRPALLLLLPPLLLLLLLRVPPSRSFPGSGDSPLEDDEVGYSHPRYKDTPWCSPIKVKYGDVYCRAPQGGYYKTALGTRCDIRCQKGYELHGSSLLICQSNKRWSDKVICKHMEPPRIKCPSVKERIAEPNKLTVRVSWETPEGRDTADGILTDVILKGLPPGSNFPEGDHKIQYTVYDRAENKGTCKFRVKVRVKRCGKLNAPENGYMKCSSDGDNYGATCEFSCIGGYELQGSPARVCQSNLAWSGTEPTCAAMNVNVGVRTAAALLDQFYEKRRLLIVSTPTARNLLYRLQLGMLQQAQCGLDLRHITVVELVGVFPTLIGRIGAKIMPPALALQLRLLLRIPLYSFSMVLVDKHGMDKERYVSLVMPVALFNLIDTFPLRKEEMVLQAEMSQTCNT

SEQ ID NO: 12826 - protein, 464 aa, Homo Sapiens
MGSPAHRPALLLLLPPLLLLLLLRVPPSRSFPGSGDSPLEDDEVGYSHPRYKDTPWCSPIKVKYGDVYCRAPQGGYYKTALGTRCDIRCQKGYELHGSSLLICQSNKRWSDKVICKQKRCPTLAMPANGGFKCVDGAYFNSRCEYYCSPGYTLKGERTVTCMDNKAWSGRPASCVDMEPPRIKCPSVKERIAEPNKLTVRVSWETPEGRDTADGILTDVILKGLPPGSNFPEGDHKIQYTVYDRAENKGTCKFRVKVRVKRCGKLNAPENGYMKCSSDGDNYGATCEFSCIGGYELQGSPARVCQSNLAWSGTEPTCAAMNVNVGVRTAAALLDQFYEKRRLLIVSTPTARNLLYRLQLGMLQQAQCGLDLRHITVVELVGVFPTLIGRIGAKIMPPALALQLRLLLRIPLYSFSMVLVDKHGMDKERYVSLVMPVALFNLIDTFPLRKEEMVLQAEMSQTCNT

SEQ ID NO: 12827 - protein, 379 aa, Homo Sapiens
MGSPAHRPALLLLLPPLLLLLLLRVPPSRSFPGSGDSPLEDDEVGYSHPRYKDTPWCSPIKVKYGDVYCRAPQGGYYKTALGTRCDIRCQKGYELHGSSLLICQSNKRWSDKVICKQKRCPTLAMPANGGFKCVDGAYFNSRCEYYCSPGYTLKGERTVTCMDNKAWSGRPASCVDMEPPRIKCPSVKERIAEPNKLTVRVSWETPEGRDTADGILTDVILKGLPPGSNFPEGDHKIQYTVYDRAENKGTCKFRVKVRVKRCGKLNAPENGYMKCSSDGDNYGATCEFSCIGGYELQGSPARVCQSNLAWSGTEPTCAAMNVNVGVRTAAALLDQFYEKRRLLIVSTPTARNLLYRLQLGMLQAVAANPTLLLQYGASG

SEQ ID NO: 12828 - protein, 62 aa, Homo Sapiens
CAPMKINVNVNSAAGLLDQFYEKQRLLIISAPDPSNRYYKMQISMLQAISAPHSLLLQHGVD

SEQ ID NO: 12829 - protein, 312 aa, Homo Sapiens
MASQLTQRGALFLLFFLTPAVTPTWYAGSGYYPDESYNEVYAEEVPQAPALDYRACLSSIATVPRWCYTLNIQDGEATCYSPKGGNYHSSLGTRCELSCDRGFRLIGRRSVQCLPSRRWSGTAYCRQMRCHALPFITSGTYTCTNGVLLDSRCDYSCSSGYHLEGDRSRICMEDGRWSGGEPVCVDIDPPKIRCPHSREKMAEPEKLTARVYWDPPLVKDSADGTITRVTLRGPEPGSHFPEGEHVIRYTAYDRAYNRASCKFIVKVQVRRCPTLKPPQHGYLTCTSAGDNYGATCEYHCDGGYDRQGTPSR

SEQ ID NO: 12830 - protein, 224 aa, Homo Sapiens
MASQLTQRGALFLLFFLTPAVTPTWYAGSGYYPDESYNEVYAEEVPQAPALDYRVPRWCYTLNIQDGEATCYSPKGGNYHSSLGTRCELSCDRGFRLIGRRSVQCLPSRRWSGTAYCRQMRCHALPFITSGTYTCTNGVLLDSRCDYSCSSGYHLEGDRSRICMEDGRWSGGEPVCVDIDPPKIRCPHSREKMAEPEKLTARVYWDPPLVKDSADGTITRVTLR

SEQ ID NO: 12831 - protein, 465 aa, Homo Sapiens
MASQLTQRGALFLLFFLTPAVTPTWYAGSGYYPDESYNEVYAEEVPQAPALDYRVPRWCYTLNIQDGEATCYSPKGGNYHSSLGTRCELSCDRGFRLIGRRSVQCLPSRRWSGTAYCRQMRCHALPFITSGTYTCTNGVLLDSRCDYSCSSGYHLEGDRSRICMEDGRWSGGEPVCVDIDPPKIRCPHSREKMAEPEKLTARVYWDPPLVKDSADGTITRVTLRGPEPGSHFPEGEHVIRYTAYDRAYNRASCKFIVKVQVRRCPTLKPPQHGYLTCTSAGDNYGATCEYHCDGGYDRQGTPSRVCQSSRQWSGSPPICAPMKINVNVNSAAGLLDQFYEKQRLLIISAPDPSNRYYKMQISMLQQSTCGLDLRHVTIIELVGQPPQEVGRIREQQLSANIIEELRQFQRLTRSYFNMVLIDKQGIDRDRYMEPVTPEEIFTFIDDYLLSNQELTQRREQRDICE

SEQ ID NO: 12832 - protein, 575 aa, Homo Sapiens
MHKEAEMLIGPQLDEKRWGWRLGDGSAAPPFLPQALSFLLLLPLASALQPTPLPFQELRLVGGPSRCRGRLEVMHGGSWGSVCDDDWDVVDANVVCRQLGCGLALPVPRPLAFGQGRGPILLDNVECRGQEAALSECGSRGWGVHNCFHYEDVAVLCDEFLPTQPPTRKMLTSRAPPTTLPNGKSEGSVRLVGGANLCQGRVEILHSGLWGTVCDDDWGLPDAAVVCRQLGCGAAMAATTNAFFGYGTGHILLDNVHCEGGEPRLAACQSLGWGVHNCGHHEDAGALCAGLGPPTLTALPSSATREDWAWQTDPSATGVGPQPSRETALLTTAAWAAGKKSGRLRLVGGPGPCRGRVEVLHAGGWGTVCDDDWDFADARVACREAGCGPALGATGLGHFGYGRGPVLLDNVGCAGTEARLSDCFHLGWGQHNCGHHEDAGALCAGPEELGLQVQQDGSETTRVPTPRPRDGHLRLVNGAHRCEGRVELYLGQRWGTVCDDAWDLRAAGVLCRQLGCGQALAAPGEAHFGPGRGPILLDNVKCRGEESALLLCSHIRWDAHNCDHSEDASVLCQPS

SEQ ID NO: 12833 - protein, 118 aa, Homo Sapiens
DAGAVCDGMPLGYVPPTAPTDSNNSTPREAASRPPSTMTSQAPGTAGVSPPPASPTVLWEPGPEAGPPGLDSISDPFSWSWIPGLGRDRDAWLPGELATKPSASVTASVLEKTTTKAP

SEQ ID NO: 12834 - protein, 90 aa, Homo Sapiens
MRVLACLLAALVGIQAVERLRLADGPHGCAGRLEVWHGGRWGTVCDDGWDLRDAAVACRQLGCGGALAAPGGAFFGEGAGPVWLSELACR

SEQ ID NO: 12835 - protein, 1573 aa, Homo Sapiens
MRVLACLLAALVGIQAVERLRLADGPHGCAGRLEVWHGGRWGTVCDDGWDLRDAAVACRQLGCGGALAAPGGAFFGEGAGPVWLSELACRGNEGQLGLCHHRGWKAHICSHEEDAGVVCAGQRVANSRDDSTSPLDGAPWPGLLLELSPSTEEPLVTHAPRPAGNPQNASRKKSPRPKQAKSTRAPLLTTGAPRQERLRLVSGPHRCAGRLEVWHGGRWGTVCDDGWDLRDAAVACRELGCGGALAAPGGARFGPGAGPVWMDDVGCGGGEQALRDCPRSPWGRSNCDHSEDAGLVCTGPAPRLRLADGPHGCAGRLEVWHGGRWGSVCDDAWDLRDAAVACRELGCGGALAAPGGAFFGEGSGPIILDDLRCRGNETALRFCPARPWGQHDCHHREDAGAVCDGMPLGYVPPTAPTDSNNSTPREAASRPPSTMTSQAPGTAGVSPPPASPTVLWEPGPEAGSPQLRLVAGPSKCSGRLEVWHDQRWGTVCDDSWDMRDSAVVCRELGCGGPQQPDPAAGRFGWGAGPIWLDDVGCVGTEASLSDCPAAPWGKHNCAHNEDVGVTCTGPPGLDSISDPFSWSWIPGLGRDRDAWLPGELATKPSASVTASVLEKTTTKAPGKMPKSTKKWVTKNAKRPTTQPPVMPTTKHSRAQSPPDLTSQTTAALTTEASRRPTSEFTRRPTTEAPQRWTSHTTATLTPQAPRERTTKTMAMLTTQGPQEMTSESTIKSIPQASLEPSAEIPEGSPESPKDPAPSPSVSTTGESGLFRVRLADGPNRCAGRLEVWHAGRWGTVCDDNWDLRDATVACWELGCGKVRPRVGKTHYGPGTGPIWLDDMGCKGSEASLSDCPSGAWGKHNCDHEEDVGLTCTGYTDYDDYPPWTWDPTSREDLAKGTTTAGVPGHTLPWRTTRRPGSSSPAIRRLPDTGSKDGYKLPWTWDTPSGRGLAEGTPTAGKLGPTLGAGTTRSPGSPPTLRVHGDTGSPRKPWPERRPPRPAATRTAPPTPSPGPSASPGPPGPALTSDSSRELTPHSALTSEATSDAPDTSPPTPDPASRTNPDLILTSPDFALSTPDSSVVPALTPEPSPTPLPTLPKELTSDPSTPSEVTSLSPTSEQVPESDTTPDLDTTPYSSTVSEYSRSPDPSPSPHPTTTPDPTMAPDPITTLNPTVTPHFPTTPHPTTTPHPTTITHSTMIPDPTTTPQPFTTITHSTMIPDPTTTPQPFTTMQPTTTPHSTTPHPTTTPHPTTITHSTMIPDPTTTPQPFTTMQPTTMPHPTTTPHPTTTPHPTTTPHPTTTPHPTMTPDPTTTPYPTTTPDPTTTPHPTTPDPSSTPVITTVSLPTSLGTELSSPTLAPTVKPSLHPQLTFTAPAPHTSTSQIPTLEPSPALESSPSRSSTATSMDPLSTEDFKPPRSQSPNLTPPPTHTPHSASDLTVSPDPLLSPTAHPLDHPPLDPLTLGPTPGQSPGPHGPCVAPTPPVRVMACEPPALVELVAAVRDVGGQLQRLTQVVEQERQERQALLLGLTQLVEAARGLGQLGEAVKRLAEMAWTTSMPAPTTTTPEEEERPLRGDV

SEQ ID NO: 12836 - protein, 951 aa, Homo Sapiens
MRVLACLLAALVGIQAVERLRLADGPHGCAGRLEVWHGGRWGTVCDDGWDLRDAAVACRQLGCGGALAAPGGAFFGEGAGPVWLSELACRGNEGQLGLCHHRGWKAHICSHEEDAGVVCAGQRVANSRDDSTSPLDGAPWPGLLLELSPSTEEPLVTHAPRPAGNPQNASRKKSPRPKQAKSTRAPLLTTGAPRQERLRLVSGPHRCAGRLEVWHGGRWGTVCDDGWDLRDAAVACRELGCGGALAAPGGARFGPGAGPVWMDDVGCGGGEQALRDCPRSPWGRSNCDHSEDAGLVCTGPAPRLRLADGPHGCAGRLEVWHGGRWGSVCDDAWDLRDAAVACRELGCGGALAAPGGAFFGEGSGPIILDDLRCRGNETALRFCPARPWGQHDCHHREDAGAVCDGMPLGYVPPTAPTDSNNSTPREAASRPPSTMTSQAPGTAGVSPPPASPTVLWEPGPEAGSPQLRLVAGPSKCSGRLEVWHDQRWGTVCDDSWDMRDSAVVCRELGCGGPQQPDPAAGRFGWGAGPIWLDDVGCVGTEASLSDCPAAPWGKHNCAHNEDVGVTCTGPPGLDSISDPFSWSWIPGLGRDRDAWLPGELATKPSASVTASVLEKTTTKAPGKMPKSTKKWVTKNAKRPTTQPPVMPTTKHSRAQSPPDLTSQTTAALTTEASRRPTSEFTRRPTTEAPQRWTSHTTATLTPQAPRERTTKTMAMLTTQGPQEMTSESTIKSIPQASLEPSAEIPEGSPESPKDPAPSPSVSTTGESGLFRVRLADGPNRCAGRLEVWHAGRWGTVCDDNWDLRDATVACWELGCGKVRPRVGKTHYGPGTGPIWLDDMGCKGSEASLSDCPSGAWGKHNCDHEEDVGLTCTGYTDYDDYPPWTWDPTSREDLAKGTTTAGVPGHTLPWRTTRRPGSSSPAIRRLPDTEPEAGAPRGDAPRSRTARVAAPP

SEQ ID NO: 12837 - protein, 5150 aa, Homo Sapiens
MLLPALLFGMAWALADGRWCEWTETIRVEEEVAPRQEDLVPCASLDHYSRLGWRLDLPWSGRSGLTRSPAPGLCPIYKPPETRPAKWNRTVRTCCPGWGGAHCTEALAKASPEGHCFAMWQCQLQAGSANASAGSLEECCARPWGQSWWDGSSQACRSCSSRHLPGSASSPALLQPLAGAVGQLWSQHQRPSATCASWSGFHYRTFDGRHYHFLGRCTYLLAGAADSTWAVHLTPGDRCPQPGHCQRVTMGPEEVLIQAGNVSVKGQLVPEGQSWLLHGLSLQWLGDWLVLSGGLGVVVRLDRTGSISISVDHELWGQTQGLCGLYNGWPEDDFMEPGGGLAMLAATFGNSWRLPGSESGCLDAVEVAQGCDSPLGLIDADVEPGHLRAEAQDVCHQLLEGPFGQCHAQVSPAEYHEACLFAYCAGAMAGSGQEGRQQAVCATFASYVQACARRHIHIRWRKPGFCERLCPGGQLYSDCVSLCPPSCEAVGQGEEESCREECVSGCECPRGLFWNGTLCVPAAHCPCYYCRQRYVPGDTVRQLCNPCVCRDGRWHCAQALCPAECAVGGDGHYLTFDGRSYSFWGGQGCRYSLVQDYVKGQLLILLEHGACDAGSCLHAISVSLEDTHIQLRDSGAVLVNGQDVGLPWIGAEGLSVRRASSAFLLLRWPGAQVLWGLSDPVAYITLDPRHAHQVQGLCGTFTQNQQDDFLTPAGDVETSIAAFASKFQVAGKGRCPSEDSALLSPCTTHSQRHAFAEAACAILHSSVFQECHRLVDKEPFYLRCLAAVCGCDPGSDCLCPVLSAYARRCAQEGASPPWRNQTLCPVMCPGGQEYRECAPACGQHCGKPEDCGELGSCVAGCNCPLGLLWDPEGQCVPPSLCPCQLGARRYAPGSATMKECNRCICQERGLWNCTARHCPSQAFCPRELVYAPGACLLTCDSPSANHSCPAGSTDGCVCPPGTVLLDERCVPPDLCPCRHSGQWYLPNATIQEDCNVCVCRGRQWHCTGQRRSGRCQASGAPHYVTFDGLAFTYPGACEYLLVREASGLFTVSAQNLPCGASGLTCTKALAVRLEGTVVHMLRGRAVTVNGVSVTPPKVYTGPGLSLRRAGLFLLLSTHLGLTLLWDGGTRVLVQLSPQFRGRVAGLCGDFDGDASNDLRSRQGVLEPTAELAAHSWRLSPLCPEPGDLPHPCTMNTHRAGWARARCGALLQPLFTLCHAEVPPQQHYEWCLYDACGCDSGGDCECLCSAIATYADECARHGHHVRWRSQELCSLQCEGGQVYEACGPTCPPTCHEQHPEPGWHCQVVACVEGCFCPEGTLLHGGACLEPASCPCEWGRNSFPPGSVLQKDCGNCTCQEGQWHCGGDGGHCEELVPACAEGEALCQENGHCVPHGWLCDNQDDCGDGSDEEGCAAPGCGEGQMTCSSGHCLPLALLCDRQDDCGDGTDEPSYPCPQGLLACADGRCLPPALLCDGHPDCLDAADEESCLGQVTCVPGEVSCVDGTCLGAIQLCDGVWDCPDGADEGPGHCPLPSLPTPPASTLPGPSPGSLDTASSPLASASPAPPCGPFEFRCGSGECTPRGWRCDQEEDCADGSDERGCGGPCAPHHAPCARGPHCVSPEQLCDGVRQCPDGSDEGPDACGGLPALGGPNRTGLPCPEYTCPNGTCIGFQLVCDGQPDCGRPGQVGPSPEEQGCGAWGPWSPWGPCSRTCGPWGQGRSRRCSPLGLLVLQNCPGPEHQSQACFTAACPVDGEWSTWSPWSVCSEPCRGTMTRQRQCHSPQNGGRTCAALPGGLHSTRQTKPCPQDGCPNATCSGELMFQPCAPCPLTCDDISGQVTCPPDWPCGSPGCWCPEGQVLGSEGWCVWPRQCPCLVDGARYWPGQRIKADCQLCICQDGRPRRCRLNPDCAVDCGWSSWSPWAKCLGPCGSQSIQWSFRSSNNPRPSGRGRQCRGIHRKARRCQTEPCEGCEHQGQVHRVGERWHGGPCRVCQCLHNLTAHCSPYCPLGSCPQGWVLVEGTGESCCHCALPGENQTVQPMATPAAAPAPSPQIRFPLATYILPPSGDPCYSPLGLAGLAEGSLHASSQQLEHPTQAALLGAPTQGPSPQGWHAGGDAYAKWHTRPHYLQLDLLQPRNLTGILVPETGSSNAYASSFSLQFSSNGLHWHDYRDLLPGILPLPKLFPRNWDDLDPAVWTFGRMVQARFVRVWPHDVHHSDVPLQVELLGCEPGSPPAPLCPGVGLRCASGECVLRGGPCDGVLDCEDGSDEEGCVLLPEGTGRFHSTAKTLALSSAQPGQLLHWPREGLAETEHWPPGQESPTSPTETRPVSPGPASGVPHHGESVQMVTTTPIPQMEARTLPPGMAAVTVVPPHPVTPATPAGQSVAPGPFPPVQCGPGQTPCEVLGCVEQAQVCDGREDCLDGSDERHCARNLLMWLPSLPALWAASTVPFMMPTMALPGLPASRALCSPSQLSCGSGECLSAERRCDLRPDCQDGSDEDGCVDCVLAPWSVWSSCSRSCGLGLTFQRQELLRPPLPGGSCPRDRFRSQSCFVQACPVAGAWAMWEAWGPCSVSCGGGHQSRQRSCVDPPPKNGGAPCPGASQERAPCGLQPCSGGTDCELGRVYVSADLCQKGLVPPCPPSCLDPKANRSCSGHCVEGCRCPPGLLLHDTRCLPLSECPCLVGEELKWPGVSFLLGNCSQCVCEKGELLCQPGGCPLPCGWSAWSSWAPCDRSCGSGVRARFRSPSNPPAAWGGAPCEGDRQELQGCHTVCGTEVFGWTPWTSWSSCSQSCLAPGGGPGWRSRSRLCPSPGDSSCPGDATQEEPCSPPVCPVPSIWGLWAPWSTCSAPCDGGIQTRGRSCSSLAPGDTTCPGPHSQTRDCNTQPCTAQCPENMLFRSAEQCHQEGGPCPRLCLTQGPGIECTGFCAPGCTCPPGLFLHNASCLPRSQCPCQLHGQLYASGAMARLDSCNNCTCVSGKMACTSERCPVACGWSPWTLWSLCSCSCNVGIRRRFRAGTAPPAAFGGAECQGPTMEAEFCSLRPCPGPGGEWGPWSPCSVPCGGGYRNRTRGSSRSLMEFSTCGLQPCAGPVPGMCPRDKQWLDCAQGPASCAELSAPRGTNQTCHPGCHCPSGMLLLNNVCVPTQDCPCAHEGHLYPPGSTVVRPCENCSCVSGLIANCSSWPCAEGEPTWSPWTPWSQCSASCGPARCHRHRFCARSPSAVPSTVAPLPLPATPTPLCSGPEAEEEPCLLQGCDRAGGWGPWGPWSHCSRSCGGGLRSRTRACDQPPPQGLGDYCEGPRAQGEVCQALPCPVTNCTAIEGAEYSPCGPPCPRSCDDLVHCVWRCQPGCYCPPGQVLSSNGAICVQPGHCSCLDLLTGQRHHPGARLARPDGCNHCTCLEGRLNCTDLPCPVPGGWCPWSEWTMCSQPCRGQTRSRSRACACPTPQHGGAPCTGEAGEAGAQHQREACPSYATCPVDGAWGPWGPWSPCDMCLGQSHRSRACSRPPTPEGGRPCPGNHTQSRPCQENSTQCTDCGGGQSLHPCGQPCPRSCQDLSPGSVCQPGSVGCQPTCGCPLGQLSQDGLCVPPAHCRCQYQPGAMGIPENQSRSAGSRFSSWESLEPGEVVTGPCDNCTCVAGILQCQEVPDCPDPGVWSSWGPWEDCSVSCGGGEQLRSRRCARPPCPGPARQSRTCSTQVCREAGCPAGRLYRECQPGEGCPFSCAHVTQQVGCFSEGCEEGCHCPEGTFQHRLACVQECPCVLTAWLLQELGATIGDPGQPLGPGDELDSGQTLRTSCGNCSCAHGKLSCSLDDCFEADGGFGPWSPWGPCSRSCGGLGTRTRSRQCVLTMPTLSGQGCRGPRQDLEYCPSPDCPGAEGSTVEPVTGLPGGWGPWSSWSPCSRSCTDPARPAWRSRTRLCLANCTMGDPLQERPCNLPSCTELPVCPGPGCGAGNCSWTSWAPWEPCSRSCGVGQQRRLRAYRPPGPGGHWCPNILTAYQERRFCNLRACPVPGGWSRWSPWSWCDRSCGGGQSLRSRSCSSPPSKNGGAPCAGERHQARLCNPMPCEAGCPAGMEVVTCANRCPRRCSDLQEGIVCQDDQVCQKGCRCPKGSLEQDGGCVPIGHCDCTDAQGHSWAPGSQHQDACNNCSCQAGQLSCTAQPCPPPTHCAWSHWSAWSPCSHSCGPRGQQSRFRSSTSGSWAPECREEQSQSQPCPQPSCPPLCLQGTRSRTLGDSWLQGECQRCSCTPEGVICEDTECAVPEAWTLWSSWSDCPVSCGGGNQVRTRACRAAAPHHRSPPCLGPDTQTRQQPCPGLLEACSWGPWGPCSRSCGPGLASRSGSCPCLMAKADPTCNSTFLHLDTQGCYSGPCPEECVWSSWSSWTRCSCRVLVQQRYRHQGPASRGARAGAPCTRLDGHFRPCLISNCSEDSCTPPFEFHACGSPCAGLCATHLSHQLCQDLPPCQPGCYCPKGLLEQAGGCIPPEECNCWHTSAAGAGMTLAPGDRLQLGCKECECRRGELHCTSQGCQGLLPLSEWSEWSPCGPCLPPSALAPASRTALEEHWLRDPTGLSPTLAPLLASEQHRHRLCLDPATGRPWTGAPHLCTAPLSQQRLCPDPGACPDSCQWSLWGPWSPCQVPCSGGFRLRWREAEALCGGGCREPWAQESCNGGPCPESCEAQDTVFTLDCANQCPHSCADLWDRVQCLQGPCRPGCRCPPGQLVQDGRCVPISSCRCGLPSANASWELAPAQAVQLDCQNCTCVNESLVCPHQECPVLGPWSAWSSCSAPCGGGTMERHRTCEGGPGVAPCQAQDTEQRQECNLQPCPECPPGQVLSACATSCPCLCWHLQPGAICVQEPCQPGCGCPGGQLLHNGTCVPPTACPCTQHSLPWGLTLTLEEQAQELPPGTVLTRNCTRCVCHGGAFSCSLVDCQVPPGETWQQVAPGELGLCEQTCLEMNATKTQSNCSSARASGCVCQPGHFRSQAGPCVPEDHCECWHLGRPHLPGSEWQEACESCLCLSGRPVCTQHCSPLTCAQGEEMVLEPGSCCPSCRREAPEEQSPSCQLLTELRNFTKGTCYLDQVEVSYCSGYCPSSTHVMPEEPYLQSQCDCCSYRLDPESPVRILNLRCLGGHTEPVVLPVIHSCQCSSCQGGDFSKR

SEQ ID NO: 12838 - protein, 115 aa, Homo Sapiens [sequence omitted]

SEQ ID NO: 12839 - protein, 62 aa, Homo Sapiens
MRLLSFVVLALFAVTQAEEGARLLASKSLLNRYAVEGRDLTLQYNIYNVGSRHVHEEKLRQG

SEQ ID NO: 12840 - protein, 86 aa, Homo Sapiens
MRLLSFVVLALFAVTQAEEGARLLASKSLLNRYAVEGRDLTLQYNIYNVGSRLALPVHLDREESWLSGSLTGDSPLIFWTGQPLGS

SEQ ID NO: 12841 - protein, 147 aa, Homo Sapiens
MRLLSFVVLALFAVTQAEEGARLLASKSLLNRYAVEGRDLTLQYNIYNVGSSAALDVELSDDSFPPEDFGIVSGMLNVKWDRIAPASNVSHTVVLRPLKAGYFNFTSATITYLAQEDGPVVIGSTSAPGQGGILAQREFDRRFSPHF

SEQ ID NO: 12842 - protein, 183 aa, Homo Sapiens
MRLLSFVVLALFAVTQAEEGARLLASKSLLNRYAVEGRDLTLQYNIYNVGSSAALDVELSDDSFPPEDFGIVSGMLNVKWDRIAPASNVSHTVVLRPLKAGYFNFTSATITYLAQEDGPVVIGSTSAPGQGGILAQREFDRRFSPHFLDWAAFGVMTLPSIGIPLLLWYSSKRKYDTPKTKKN

SEQ ID NO: 12843 - protein, 183 aa, Homo Sapiens; identical to SEQ ID NO: 12842

SEQ ID NO: 12844 - protein, 133 aa, Homo Sapiens
MRLLSFVVLALFAVTQAEEGARLLASKSLLNRYAVEGRDLTLQYNIYNVGSSAALDVELSDDSFPPEDFGIVSGMLNVKWDRIAPASNVSHTVVLRPLKAGYFNFTSATITYLAQEDGPVVNQPQDSLVLPGS

SEQ ID NO: 12845 - protein, 133 aa, Homo Sapiens; identical to SEQ ID NO: 12844

SEQ ID NO: 12846 - protein, 93 aa, Homo Sapiens
MRLLSFVVLALFAVTQAEEGARLLASKSLLNRYAVEGRDLTLQYNIYNVGSSAALDVELSDDSFPPEDFGIVSGMLNVKWDRIAPWTGQPLGS

SEQ ID NO: 12847 - protein, 90 aa, Homo Sapiens
MRLLSFVVLALFAVTQAEEGARLLASKSLLNRYAVEGRDLTLQYNIYNVGSSAALDVELSDDSFPPEDFGIVSGMLNVKWDRIAPYPLGT

SEQ ID NO: 12848 - protein, 116 aa, Homo Sapiens
MLSCRLQCALAALSIVLALGCVTGAPSDPRLRQFLQKSLAAAAGKQELAKYFLAELLSEPNQTENDALEPEDLSQAAEQDEMRLELQRSANSNPAMAPRERKAGCKNFFWKTFTSC

SEQ ID NO: 12849 - protein, 46 aa, Homo Sapiens
MLEKRSVGCRRCAVVGNSGNLRESSYGPEIDSHDFVLRMNKAPTAG

SEQ ID NO: 12850 - protein, 97 aa, Homo Sapiens
MLEKRSVGCRRCAVVGNSGNLRESSYGPEIDSHDFVLRMNKAPTAGFEADVGTKTTHHLVYPESFRELGDNVSMILVPFKTIDLEWVVSAITTGTIS

SEQ ID NO: 12851 - protein, 47 aa, Homo Sapiens
MVTLRKRTLKVLTFLVLFIFLTSFFLNYSHTMVATTWFPKQMVLELS

SEQ ID NO: 12852 - protein, 49 aa, Homo Sapiens
MVTLRKRTLKVLTFLVLFIFLTSFFLNYSHTMVATTWFPKQMVLELSEN

SEQ ID NO: 12853 - protein, 72 aa, Homo Sapiens
MVTLRKRTLKVLTFLVLFIFLTSFFLNYSHTMVATTWFPKQMVLELSENLKRLIKHRPCTCTHCIGQRKLSA

SEQ ID NO: 12854 - protein, 340 aa, Homo Sapiens
MVTLRKRTLKVLTFLVLFIFLTSFFLNYSHTMVATTWFPKQMVLELSENLKRLIKHRPCTCTHCIGQRKLSAWFDERFNQTMQPLLTAQNALLEDDTYRWWLRLQREKKPNNLNDTIKELFRVVPGNVDPMLEKRSVGCRRCAVVGNSGNLRESSYGPEIDSHDFVLRMNKAPTAGFEADVGTKTTHHLVYPESFRELGDNVSMILVPFKTIDLEWVVSAITTGTISHTYIPVPAKIRVKQDKILIYHPAFIKYVFDNWLQGHGRYPSTGILSVIFSMHVCDEVDLYGFGADSKGNWHHYWENNPSAGAFRKTGVHDADFESNVTATLASINKIRIFKGR

SEQ ID NO: 12855 - protein, 340 aa, Homo Sapiens; identical to SEQ ID NO: 12854

SEQ ID NO: 12856 - protein, 340 aa, Homo Sapiens; identical to SEQ ID NO: 12854

SEQ ID NO: 12857 - protein, 332 aa, Homo Sapiens
MCPAGWKLLAMLALVLVVMVWYSISREDRYIELFYFPIPEKKEPCLQGEAESKASKLFGNYSRDQPIFLRLEDYFWVKTPSAYELPYGTKGSEDLLLRVLAITSSSIPKNIQSLRCRRCVVVGNGHRLRNSSLGDAINKYDVVIRLNNAPVAGYEGDVGSKTTMRLFYPESAHFDPKVENNPDTLLVLVAFKAMDFHWIETILSDKKRVRKGFWKQPPLIWDVNPKQIRILNPFFMEIAADKLLSLPMQQPRKIKQKPTTGLLAITLALHLCDLVHIAGFGYPDAYNKKQTIHYYEQITLKSMAGSGHNVSQEALAIKRMLEMGAIKNLTSF

SEQ ID NO: 12858 - protein, 328 aa, Homo Sapiens
MCPAGWKLLAMLALVLVVMVWYSISREDSFYFPIPEKKEPCLQGEAESKASKLFGNYSRDQPIFLRLEDYFWVKTPSAYELPYGTKGSEDLLLRVLAITSSSIPKNIQSLRCRRCVVVGNGHRLRNSSLGDAINKYDVVIRLNNAPVAGYEGDVGSKTTMRLFYPESAHFDPKVENNPDTLLVLVAFKAMDFHWIETILSDKKRVRKGFWKQPPLIWDVNPKQIRILNPFFMEIAADKLLSLPMQQPRKIKQKPTTGLLAITLALHLCDLVHIAGFGYPDAYNKKQTIHYYEQITLKSMAGSGHNVSQEALAIKRMLEMGAIKNLTSF

SEQ ID NO: 12859 - protein, 322 aa, Homo Sapiens
MLALVLVVMVWYSISREDRYIELFYFPIPEKKEPCLQGEAESKASKLFGNYSRDQPIFLRLEDYFWVKTPSAYELPYGTKGSEDLLLRVLAITSSSIPKNIQSLRCRRCVVVGNGHRLRNSSLGDAINKYDVVIRLNNAPVAGYEGDVGSKTTMRLFYPESAHFDPKVENNPDTLLVLVAFKAMDFHWIETILSDKKRVRKGFWKQPPLIWDVNPKQIRILNPFFMEIAADKLLSLPMQQPRKIKQKPTTGLLAITLALHLCDLVHIAGFGYPDAYNKKQTIHYYEQITLKSMAGSGHNVSQEALAIKRMLEMGAIKNLTSF

SEQ ID NO: 12860 - protein, 153 aa, Homo Sapiens
MRLFYPESAHFDPKVENNPDTLLVLVAFKAMDFHWIETILSDKKRVRKGFWKQPPLIWDVNPKQIRILNPFFMEIAADKLLSLPMQQPRKIKQKPTTGLLAITLALHLCDLVHIAGFGYPDAYNKKQTIHYYEQITLKSMAGSGHNVSQEALA

SEQ ID NO: 12861 - protein, 47 aa, Homo Sapiens
MSVLSGPGWTTGCPWPQNHPNPCHISGREVARGSRDDSSPQESCCLL

SEQ ID NO: 12862 - protein, 339 aa, Homo Sapiens
MVSKSRWKLLAMLALVLVVMVWYSISREDRYIELFYFPIPEKKEPCLQGEAESKASKLFGKLSPLCSYSRDQPIFLRLEDYFWVKTPSAYELPYGTKGSEDLLLRVLAITSSSIPKNIQSLRCRRCVVVGNGHRLRNSSLGDAINKYDVVIRLNNAPVAGYEGDVGSKTTMRLFYPESAHFDPKVENNPDTLLVLVAFKAMDFHWIETILSDKKRVRKGFWKQPPLIWDVNPKQIRILNPFFMEIAADKLLSLPMQQPRKIKQKPTTGLLAITLALHLCDLVHIAGFGYPDAYNKKQTIHYYEQITLKSMAGSGHNVSQEALAIKRMLEMGAIKNLTSF

SEQ ID NO: 12863 - protein, 93 aa, Homo Sapiens
MVSKSRWKLLAMLALVLVVMVWYSISREDRYIELFYFPIPEKKEPCLQGEAESKASKLFGNYSRDQPIFLRLEDYFWVKTPSAYELPYGTKGS

SEQ ID NO: 12864 - protein, 126 aa, Homo Sapiens
MVSKSRWKLLAMLALVLVVMVWYSISREDRYIELFYFPIPEKKEPCLQGEAESKASKLFGNYSRDQPIFLRLEDYFWVKTPSAYELPYGTKGSASGAAAVWSWGTGTGCGTAHWEMPSTSTMWSSD

SEQ ID NO: 12865 - protein, 111 aa, Homo Sapiens
MVSKSRWKLLAMLALVLVVMVWYSISREDRYIELFYFPIPEKKEPCLQGEAESKASKLFGNYSRDQPIFLRLEDYFWVKTPSAYELPYGTKGSEDLLLRVLAITSSSIPKN

SEQ ID NO: 12866 - protein, 209 aa, Homo Sapiens
MVSKSRWKLLAMLALVLVVMVWYSISREDRYIELFYFPIPEKKEPCLQGEAESKASKLFGNYSRDQPIFLRLEDYFWVKTPSAYELPYGTKGSEDLLLRVLAITSSSIPKNIQSLRCRRCVVVGNGHRLRNSSLGDAINKYDVVIRLNNAPVAGYEGDVGSKTTMRLFYPESAHFDPKVENNPDTLLVLVAFKAMDFHWIETILSDKKR

SEQ ID NO: 12867 - protein, 333 aa, Homo Sapiens
MVSKSRWKLLAMLALVLVVMVWYSISREDRYIELFYFPIPEKKEPCLQGEAESKASKLFGNYSRDQPIFLRLEDYFWVKTPSAYELPYGTKGSEDLLLRVLAITSSSIPKNIQSLRCRRCVVVGNGHRLRNSSLGDAINKYDVVIRLNNAPVAGYEGDVGSKTTMRLFYPESAHFDPKVENNPDTLLVLVAFKAMDFHWIETILSDKKRVRKGFWKQPPLIWDVNPKQIRILNPFFMEIAADKLLSLPMQQPRKIKQKPTTGLLAITLALHLCDLVHIAGFGYPDAYNKKQTIHYYEQITLKSMAGSGHNVSQEALAIKRMLEMGAIKNLTSF

SEQ ID NO: 12868 - protein, 333 aa, Homo Sapiens; identical to SEQ ID NO: 12867

SEQ ID NO: 12869 - protein, 333 aa, Homo Sapiens; identical to SEQ ID NO: 12867

SEQ ID NO: 12870 - protein, 333 aa, Homo Sapiens; identical to SEQ ID NO: 12867

SEQ ID NO: 12871 - protein, 329 aa, Homo Sapiens
MVSKSRWKLLAMLALVLVVMVWYSISREDSFYFPIPEKKEPCLQGEAESKASKLFGNYSRDQPIFLRLEDYFWVKTPSAYELPYGTKGSEDLLLRVLAITSSSIPKNIQSLRCRRCVVVGNGHRLRNSSLGDAINKYDVVIRLNNAPVAGYEGDVGSKTTMRLFYPESAHFDPKVENNPDTLLVLVAFKAMDFHWIETILSDKKRVRKGFWKQPPLIWDVNPKQIRILNPFFMEIAADKLLSLPMQQPRKIKQKPTTGLLAITLALHLCDLVHIAGFGYPDAYNKKQTIHYYEQITLKSMAGSGHNVSQEALAIKRMLEMGAIKNLTSF

SEQ ID NO: 12872 - protein, 329 aa, Homo Sapiens; identical to SEQ ID NO: 12871

SEQ ID NO: 12873 - protein, 178 aa, Homo Sapiens
LIPRLQKIWKNYLSMNKYKVSYKGPGPGIKFSAEALRCHLRDHVNVSMVEVTDFPFNTSEWEGYLPKESIRTKAGPWGRCAVVSSAGSLKSSQLGREIDDHDAVLRFNGAPTANFQQDVGTKTTIRLMNSQISVHHCARAARKVAHFPGYTTHPQESLSCCFLVGYHREALPQRQFVQ

SEQ ID NO: 12874 - protein, 25 aa, Homo Sapiens
MIHTNLKKKFSCCVLVFLLFAVICV

SEQ ID NO: 12875 - protein, 42 aa, Homo Sapiens
MIHTNLKKKFSCCVLVFLLFAVICVWKEKKKGSYYDSFKLQT

SEQ ID NO: 12876 - protein, 45 aa, Homo Sapiens
MIHTNLKKKFSCCVLVFLLFAVICVWKEKKKGSYYDSFKLQTKEF

SEQ ID NO: 12877 - protein, 75 aa, Homo Sapiens
MIHTNLKKKFSCCVLVFLLFAVICVWKEKKKGSYYDSFKLQTKEFQVLKSLGKLAMGSDSQSVSSSSTQDPHRGR

SEQ ID NO: 12878 - protein, 91 aa, Homo Sapiens
MIHTNLKKKFSCCVLVFLLFAVICVWKEKKKGSYYDSFKLQTKEFQVLKSLGKLAMGSDSQSVSSSSTQDPHRGRQTLGSLRGLAKAKPEA

SEQ ID NO: 12879 - protein, 97 aa, Homo Sapiens
MIHTNLKKKFSCCVLVFLLFAVICVWKEKKKGSYYDSFKLQTKEFQVLKSLGKLAMGSDSQSVSSSSTQDPHRGRQTLGSLRGLAKAKPEASFQVWN

SEQ ID NO: 12880 - protein, 98 aa, Homo Sapiens
MIHTNLKKKFSCCVLVFLLFAVICVWKEKKKGSYYDSFKLQTKEFQVLKSLGKLAMGSDSQSVSSSSTQDPHRGRQTLGSLRGLAKAKPEASFQVWNK

SEQ ID NO: 12881 - protein, 113 aa, Homo Sapiens
MIHTNLKKKFSCCVLVFLLFAVICVWKEKKKGSYYDSFKLQTKEFQVLKSLGKLAMGSDSQSVSSSSTQDPHRGRQTLGSLRGLAKAKPEASFQVWNKDSSSKNLIPRLQKIW

SEQ ID NO: 12882 - protein, 127 aa, Homo Sapiens
MIHTNLKKKFSCCVLVFLLFAVICVWKEKKKGSYYDSFKLQTKEFQVLKSLGKLAMGSDSQSVSSSSTQDPHRGRQTLGSLRGLAKAKPEASFQVWNKDSSSKNLIPRLQKIWKNYLSMNKYKVSYK

SEQ ID NO: 12883 - protein, 406 aa, Homo Sapiens
MIHTNLKKKFSCCVLVFLLFAVICVWKEKKKGSYYDSFKLQTKEFQVLKSLGKLAMGSDSQSVSSSSTQDPHRGRQTLGSLRGLAKAKPEASFQVWNKDSSSKNLIPRLQKIWKNYLSMNKYKVSYKGPGPGIKFSAEALRCHLRDHVNVSMVEVTDFPFNTSEWEGYLPKESIRTKAGPWGRCAVVSSAGSLKSSQLGREIDDHDAVLRFNGAPTANFQQDVGTKTTIRLMNSQLVTTEKRFLKDSLYNEGILIVWDPSVYHSDIPKWYQNPDYNFFNNYKTYRKLHPNQPFYILKPQMPWELWDILQEISPEEIQPNPPSSGMLGIIIMMTLCDQVDIYEFLPSKRKTDVCYYYQKFFDSACTMGAYHPLLYEKNLVKHLNQGTDEDIYLLGKATLPGFRTIHC

SEQ ID NO: 12884 - protein, 406 aa, Homo Sapiens; identical to SEQ ID NO: 12883

SEQ ID NO: 12885 - protein, 21 aa, Homo Sapiens
MNSQLVTTEKRFLKDSLYNEG

SEQ ID NO: 12886 - protein, 52 aa, Homo Sapiens
MNSQLVTTEKRFLKDSLYNEGILIVWDPSVYHSDIPKWYQNPDYNFFNNYKT

SEQ ID NO: 12887 - protein, 115 aa, Homo Sapiens
MNSQLVTTEKRFLKDSLYNEGILIVWDPSVYHSDIPKWYQNPDYNFFNNYKTYRKLHPNQPFYILKPQMPWELWDILQEISPEEIQPNPPSSGMLGIIIMMTLCDQVDIYEFLPS

SEQ ID NO: 12888 - protein, 175 aa, Homo Sapiens
MNSQLVTTEKRFLKDSLYNEGILIVWDPSVYHSDIPKWYQNPDYNFFNNYKTYRKLHPNQPFYILKPQMPWELWDILQEISPEEIQPNPPSSGMLGIIIMMTLCDQVDIYEFLPSKRKTDVCYYYQKFFDSACTMGAYHPLLYEKNLVKHLNQGTDEDIYLLGKATLPGFRTIHC

SEQ ID NO: 12889 - protein, 212 aa, Homo Sapiens
LSLLNGSESAKLFAPPRDTPPKCIRCAVVGNGGILNGSRQGPNIDAHDYVFRLNGAVIKGFERDVGTKTSFYGFTVNTMKNSLVSYWNLGFTSVPQGQDLQYIFIPSDIRDYVMLRSAILGVPVPEGLDKGDRFLKSKLINTHFGDLYMPSTGALMLLTALHTCDQVSAYGFITSNYWKFSDHYFERKMKPLIFYANHDLSLEAALWRDLHK

SEQ ID NO: 12890 - protein, 84 aa, Homo Sapiens
MGLPRGSFFWLLLLLTAACSGLLFALYFSAVQRYPGPAAGARARPADTCFTWPFSGTPTSVACSISPFQCCCGGTSSPQRSGTA

SEQ ID NO: 12891 - protein, 374 aa, Homo Sapiens
MGLPRGSFFWLLLLLTAACSGLLFALYFSAVQRYPGPAAGARDTTSFEAFFQSKASNSWTGKGQACRHLLHLAIQRHPHFRGLFNLSIPVLLWGDLFTPALWDRLSQHKAPYGWRGLSHQVIASTLSLLNGSESAKLFAPPRDTPPKCIRCAVVGNGGILNGSRQGPNIDAHDYVFRLNGAVIKGFERDVGTKTSFYGFTVNTMKNSLVSYWNLGFTSVPQGQDLQYIFIPSDIRDYVMLRSAILGVPVPEGLDKGDRPHAYFGPEASASKFKLLHPDFISYLTERFLKSKLINTHFGDLYMPSTGALMLLTALHTCDQVSAYGFITSNYWKFSDHYFERKMKPLIFYANHDLSLEAALWRDLHKAGILQLYQR

SEQ ID NO: 12892 - protein, 74 aa, Homo Sapiens
MGLPRGSFFWLLLLLTAACSGLLFALYFSAVQRYPGPAAGASCQPRVPSTCGCWGEGRGLREAWPPFERGHHII

SEQ ID NO: 12893 - protein, 38 aa, Homo Sapiens
  misc_feature (1)..(1): Xaa can be any naturally occurring amino acid
XDYVMLRSAILGVPVPEGLDKGDSPAPTAQGTAATPAP

SEQ ID NO: 12894 - protein, 336 aa, Homo Sapiens
MKTLMRHGLAVCLALTTMCTSLLLVYSSLGGQKERPPQQQQQQQQQQQQASATGSSQPAAESSTQQRPGVPAGPRPLDGYLGVADHKPLKMHCRDCALVTSSGHLLHSRQGSQIDQTECVIRMNDAPTRGYGRDVGNRTSLRVIAHSSIQRILRNRHDLLNVSQGTVFIFWGPSSYMRRDGKGQVYNNLHLLSQVLPRLKAFMITRHKMLQFDELFKQETGKDRKISNTWLSTGWFTMTIALELCDRINVYGMVPPDFCRDPNHPSVPYHYYEPFGPDECTMYLSHERGRKGSHHRFITEKRVFKNWARTFNIHFFQPDWKPESLAINHPENKPVF

SEQ ID NO: 12895 - protein, 236 aa, Homo Sapiens
MKTLMRHGLAVCLALTTMCTSLLLVYSSLGGQKERPPQQQQQQQQQQQQASATGSSQPAAESSTQQRPGVPAGPRPLDGYLGVADHKPLKMHCRDCALVTSSGHLLHSRQGSQIDQTECVIRMNDAPTRGYGRDVGNRTSLRVIAHSSIQRILRNRHDLLNVSQGTVFIFWGPSSYMRRDGKGQVYNNLHLLSQVLPRLKAFMITRHKMLQFDELFKQETGKDRYPTLGSALAGLQ

SEQ ID NO: 12896 - protein, 333 aa, Homo Sapiens
MACSRPPSQCEPTSLPPGPPAGRRHLPLSRRRREMSSNKEQRSAVFVILFALITILILYSSNSANEVFHYGSLRGRSRRPVNLKKWSITDGYVPILGNKTLPSRCHQCVIVSSSSHLLGTKLGPEIERAECTIRMNDAPTTGYSADVGNKTTYRVVAHSSVFRVLRRPQEFVNRTPETVFIFWGPPSKMQKPQGSLVRVIQRAGLVFPNMEAYAVSPGRMRQFDDLFRGETGKDREKSHSWLSTGWFTMVIAVELCDHVHVYGMVPPNYCSQRPRLQRMPYHYYEPKGPDECVTYIQNEHSRKGNHHRFITEKRVFSSWAQLYGITFSHPSWT

SEQ ID NO: 12897 - protein, 333 aa, Homo Sapiens; identical to SEQ ID NO: 12896

SEQ ID NO: 12898 - protein, 374 aa, Homo Sapiens
MACSRPPSQCEPTSLPPGPPAGRRHLPLSRRRREMSSNKEQRSAVFVILFALITILILYSSNSANEVFHYGSLRGRSRRPVNLKKWSITDGYVPILGNKTLPSRCHQCVIVSSSSHLLGTKLGPEIERAECTIRMNDAPTTGYSADVGNKTTYRVVAHSSVFRVLRRPQEFVNRTPETVFIFWGPPSKMQKPQGSLVRVIQRAGLVFPNMEAYAVSPGRMRQFDDLFRGETGKDREKSHSWLSTGWFTMVIAVELCDHVHVYGMVPPNYCSGPASSACPTTTTSPRGRTNVSPTSRMSTVARATTTASSPRKGSSHRGPSCMASPSPTPPGPRPPSLWDLRRVRGEAASAQPLGQGPSSGQSRLAGVSPSQSGP

SEQ ID NO: 12899 - protein, 86 aa, Homo Sapiens
MSSNKEQRSAVFVILFALITILILYSSNSANEVFHYGSLRGRSRRPVNLKKWSITDGYVPILGNKGEVSFVVEHRLVYHGDRGGVV

SEQ ID NO: 12900 - protein, 200 aa, Homo Sapiens
MSSNKEQRSAVFVILFALITILILYSSNSANEVFHYGSLRGRSRRPVNLKKWSITDGYVPILGNKTLPSRCHQCVIVSSSSHLLGTKLGPEIERAECTIRMNDAPTTGYSADVGNKTTYRVVAHSSVFRVLRRPQEFVNRTPETVFIFWGPPSKMQKPQGSLVRVIQRAGLVFPNMEAYAVSPGRMRQFDDLFRGETGKD

SEQ ID NO: 12901 - protein, 299 aa, Homo Sapiens
MSSNKEQRSAVFVILFALITILILYSSNSANEVFHYGSLRGRSRRPVNLKKWSITDGYVPILGNKTLPSRCHQCVIVSSSSHLLGTKLGPEIERAECTIRMNDAPTTGYSADVGNKTTYRVVAHSSVFRVLRRPQEFVNRTPETVFIFWGPPSKMQKPQGSLVRVIQRAGLVFPNMEAYAVSPGRMRQFDDLFRGETGKDREKSHSWLSTGWFTMVIAVELCDHVHVYGMVPPNYCSQRPRLQRMPYHYYEPKGPDECVTYIQNEHSRKGNHHRFITEKRVFSSWAQLYGITFSHPSWT

SEQ ID NO: 12902 - protein, 299 aa, Homo Sapiens; identical to SEQ ID NO: 12901

SEQ ID NO: 12903 - protein, 299 aa, Homo Sapiens; identical to SEQ ID NO: 12901

SEQ ID NO: 12904 - protein, 354 aa, Homo Sapiens
MQLQFRSWMLAALTLLVVFLIFADISEIEEEIGAEVVINGSSSPAVVDRSNESIKHNIQPASSKWRHNQTLSLRIRKQILKFLDAEKDISVLKGTLKPGDIIHYIFDRDSTMNVSQNLYELLPRTSPLKNKHFGTCAIVGNSGVLLNSGCGQEIDAHSFVIRCNLAPVQEYARDVGLKTDLVTMNPSVIQRAFEDLVNATWREKLLQRLHSLNGSILWIPAFMARGGKERVEWVNELILKHHVNVRTAYPSLRLLHAVRGYWLTNKVHIKRPTTGLLMYTLATRFCKQIYLYGFWPFPLDQNQNPVKYHYYDSLKYGYTSQASPHTMPLEFKALKSLHEQGALKLTVGQCDGAT

SEQ ID NO: 12905 - protein, 375 aa, Homo Sapiens
MQLQFRSWMLAALTLLVVFLIFADISEIEEEIGNSGGRGTIRSAVNSLHSKSNRAEVVINGSSSPAVVDRSNESIKHNIQPASSKWRHNQTLSLRIRKQILKFLDAEKDISVLKGTLKPGDIIHYIFDRDSTMNVSQNLYELLPRTSPLKNKHFGTCAIVGNSGVLLNSGCGQEIDAHSFVIRCNLAPVQEYARDVGLKTDLVTMNPSVIQRAFEDLVNATWREKLLQRLHSLNGSILWIPAFMARGGKERVEWVNELILKHHVNVRTAYPSLRLLHAVRGYWLTNKVHIKRPTTGLLMYTLATRFCKQIYLYGFWPFPLDQNQNPVKYHYYDSLKYGYTSQASPHTMPLEFKALKSLHEQGALKLTVGQCDGAT

SEQ ID NO: 12906 - protein, 332 aa, Homo Sapiens
MQLQFRSWMLAALTLLVVFLIFADISEIEEEIGNSGGRGTIRSAVNSLHSKSNRKQILKFLDAEKDISVLKGTLKPGDIIHYIFDRDSTMNVSQNLYELLPRTSPLKNKHFGTCAIVGNSGVLLNSGCGQEIDAHSFVIRCNLAPVQEYARDVGLKTDLVTMNPSVIQRAFEDLVNATWREKLLQRLHSLNGSILWIPAFMARGGKERVEWVNELILKHHVNVRTAYPSLRLLHAVRGYWLTNKVHIKRPTTGLLMYTLATRFCKQIYLYGFWPFPLDQNQNPVKYHYYDSLKYGYTSQASPHTMPLEFKALKSLHEQGALKLTVGQCDGAT

SEQ ID NO: 12907 - protein, 46 aa, Homo Sapiens
MRSIRKRWTICTISLLLIFYKTKEIARTEEHQETQLIGASGGGVDS

SEQ ID NO: 12908 - protein, 168 aa, Homo Sapiens
MRSIRKRWTICTISLLLIFYKTKEIARTEEHQETQLIGDGELSLSRSLVNSSDKIIRKAGSSIFQHNVEGWKINSSLVLEIRKNILRFLDAERDVSVVKSSFKPGDVIHYVLDRRRTLNISHDLHSLLPEVSPMKNRRFKTCAVVGNSGILLDSECGKEIDSHNFVIR

SEQ ID NO: 12909 - protein, 359 aa, Homo Sapiens
MRSIRKRWTICTISLLLIFYKTKEIARTEEHQETQLIGDGELSLSRSLVNSSDKIIRKAGSSIFQHNVEGWKINSSLVLEIRKNILRFLDAERDVSVVKSSFKPGDVIHYVLDRRRTLNISHDLHSLLPEVSPMKNRRFKTCAVVGNSGILLDSECGKEIDSHNFVIRCNLAPVVEFAADVGTKSDFITMNPSVVQRAFGGFRNESDREKFVHRLSMLNDSVLWIPAFMVKGGEKHVEWVNALILKNKLKVRTAYPSLRLIHAVRGYWLTNKVPIKRPSTGLLMYTLATRFCDEIHLYGFWPFPKDLNGKAVKYHYYDDLKYRYFSNASPHRMPLEFKTLNVLHNRGALKLTTGKCVKQ

SEQ ID NO: 12910 - protein, 398 aa, Homo Sapiens
MRPGGALLALLASLLLLLLLRLLWCPADAPGRARILVEESREATHGTPAALRTLRSPATAVPRATNSTYLNEKSLQLTEKCKNLQYGIESFSNKTKGYSENDYLQIITDIQSCPWKRQAEEYANFRAKLASCCDAVQNFVVSQNNTPVGTNMSYEVESKKEIPIKKNIFHMFPVSQPFVDYPYNQCAVVGNGGILNKSLCGTEIDKSDFVFRCNLPPTTGDVSKDVGSKTNLVTINPSIITLKYGNLKEKKALFLEDIATYGDAFFLLPAFSFRANTGTSFKVYYTLEESKARQKVLFFHPKYLKDLALFWRTKGVTAYRLSTGLMITSVAVELCKNVKLYGFWPFSKTVEDIPVSHHYYDNKLPKHGFHQMPKEYSQILQLHMKGILKLQFSKCEVA

SEQ ID NO: 12911 - protein, 128 aa, Homo Sapiens
  misc_feature (1)..(1): Xaa can be any naturally occurring amino acid
XYPYNQCAVVGNGGILNKSLCGTEIDKSDFVFRCNLPPTTGDVSKDVGSKTNLVTINPSIITLKYGNLKEKKALFLEDIATYGDAFFLLPAFSFRANTGTSFKVYYTLEESKARQKCKTKRKTINSIL

SEQ ID NO: 12912 - protein, 147 aa, Homo Sapiens
MKRLEEMSNMFQSSGVQHHPPEPKAQTEGNEDSEGKEQRWEMVMDKKHFKLWRRPITGTHLYQYRVFGTYTDVTPRQFFNVQLDTEYRKKWDALVIKLEVIERDVVSGSEVLHWVTHFPYPMYSRDYVYVRRYSVDQENNMMVLVSR

SEQ ID NO: 12913 - protein, 370 aa, Homo Sapiens
MLPRRLLAAWLAGTRGGGLLALLANQCRFVTGLRVRRAQQIAQLYGRLYSESSRRVLLGRLWRRLHGRPGHASALMAALAGVFVWDEERIQEEELQRSINEMKRLEEMSNMFQSSGVQHHPPEPKAQTEGNEDSEGKEQRWEMVMDKKHFKLWRRPITGTHLYQYRVFGTYTDVTPRQFFNVQLDTEYRKKWDALVIKLEVIERDVVSGSEVLHWVTHFPYPMYSRDYVYVRRYSVDQENNMMVLVSRAVEHPSVPESPEFVRVRSYESQMVIRPHKSFDENGFDYLLTYSDNPQTVFPRYCVSWMVSSGMPDFLEKLHMATLKAKNMEIKVKDYISAKPLEMSSEAKATSQSSERKNEGSCGPARIEYA

SEQ ID NO: 12914 - protein, 62 aa, Homo Sapiens
MKFLVFAFILALMVSMIGADSSEEKFLRRIGRFGYGYGPYQPVPEQPLYPQPYQPQYQQYTF

SEQ ID NO: 12915 - protein, 62 aa, Homo Sapiens; identical to SEQ ID NO: 12914

SEQ ID NO: 12916 - protein, 52 aa, Homo Sapiens
MKFLVFAFILALMVSMIGADSSEEYGYGPYQPVPEQPLYPQPYQPQYQQYTF

SEQ ID NO: 12917 - protein, 247 aa, Homo Sapiens
MLQNSAVLLVLVISASATHEAEQNDSVSPRKSRVAAQNSAEVVRCLNSALQVGCGAFACLENSTCDTDGMYDICKSFLYSAAKFDTQGKAFVKESLKCIANGVTSKVFLAIRRCSTFQRMIAEVQEECYSKLNVCSIAKRNPEAITEVVQLPNHFSNRYYNRLVRSLLECDEDTVSTIRDSLMEKIGPNMASLFHILQTDHCAQTHPRADFNRRRTNEPQKLKVLLRNLRGEEDSPSHIKRTSHESA

SEQ ID NO: 12918 - protein, 178 aa, Homo Sapiens
MYDICKSFLYSAAKFDTQGKAFVKESLKCIANGVTSKVFLAIRRCSTFQRMIAEVQEECYSKLNVCSIAKRNPEAITEVVQLPNHFSNRYYNRLVRSLLECDEDTVSTIRDSLMEKIGPNMASLFHILQTDHCAQTHPRADFNRRRTNEPQKLKVLLRNLRGEEDSPSHIKRTSHESA

SEQ ID NO: 12919 - protein, 302 aa, Homo Sapiens
MCAERLGQFMTLALVLATFDPARGTDATNPPEGPQDRSSQQKGRLSLQNTAEIQHCLVNAGDVGCGVFECFENNSCEIRGLHGICMTFLHNAGKFDAQGKSFIKDALKCKAHALRHRFGCISRKCPAIREMVSQLQRECYLKHDLCAAAQENTRVIVEMIHFKDLLLHEPYVDLVNLLLTCGEEVKEAITHSVQVQCEQNWGSLCSILSFCTSAIQKPPTAPPERQPQVDRTKLSRAHHGEAGHHLPEPSSRETGRGAKGERGSKSHPNAHARGRVGGLGAQGPSGSSEWEDEQSEYSDIRR

SEQ ID NO: 12920 - protein, 53 aa, Homo Sapiens
MTFLHNAGKFDAQGKSFIKDALKCKAHALRHRFGCISRKCPAIREMVSQLQRE

SEQ ID NO: 12921 - protein, 123 aa, Homo Sapiens
  misc_feature (1)..(1): Xaa can be any naturally occurring amino acid
XQNTAEIQHCLVNAGDVGCGVFECFENNSCEIRGLHGICMTFLHNAGKFDAQGKSFIKDALKCKAHALRHRFGCISRKCPAIREMVSQLQRECYLKHDLCAAAQENTRVIVEMIHFKDLLLHE

SEQ ID NO: 12922 - protein, 276 aa, Homo Sapiens
MGCGPSQPAEDRRRVRAPKKGWKEEFKADVSVPHTGENCSPRMEAALTKNTVDIAEGLEQVQMGSLPGTISENSPSPSERNRRVNSDLVTNGLINKPQSLESRERQKSSDILEELIVQGIIQSHSKVFRNGESYDVTLTTTEKPLRKPPSRLKKLKIKKQVKDFTMKDIEEKMEAAEERRKTKEEEIRKRLRSDRLLPSANHSDSAELDGAEVAFAKGLQRVRSAGFEPSDLQGGKPLKRKKSKCDATLIDRNESDESFGVVESDMSYNQADDIVY

SEQ ID NO: 12923 - protein, 200 aa, Homo Sapiens
MHVFFVFLSLLETLRRLPVADVSVPHTGENCSPRMEAALTKNTVDIAEGLEQVQMGSLPGTISENSPSPSERNRRVNSDLVTNGLINKPQSLESRERQKSSDILEELIVQGIIQSHSKVFRNGESYDVTLTTTEKPLRKPPSRLKKLKIKKQVKDFTMKDIEEKMEAAEERRKTKEEEIRKRLRSDRLLPSANHSDSAEL

SEQ ID NO: 12924 - protein, 45 aa, Homo Sapiens
MLQFLLGFTLGNVVGMYLAQNYDGIGSPSVSQAGVQWWDLGSLQL

SEQ ID NO: 12925 - protein, 47 aa, Homo Sapiens
MLQFLLGFTLGNVVGMYLAQNYDIPNLAKKLEEIKKDLDAKKKPPSA

SEQ ID NO: 12926 - protein, 310 aa, Homo Sapiens
MLARAARGTGALLLRGLNILIPVLDRIRYVQSLKEIVINVPEQSAVTLDNVTLQIDGVLYLRIMDPYKASYGVEDPEYAVTQLAQTTMRSELGKLSLDKVFRERESLNASIVDAINQAADCWGIRCLRYEIKDIHVPPRVKESMQMQVEAERRKRATVLESEGTRESAINVAEGKKQAQILASEAEKAEQINQAAGEASAVLAKAKAKAEAIRILAAALTQHNGDAAASLTVAEQYVSAFSKLAKDSNTILLPSNPGDVTSMVAQAMGVYGALTKAPVPGTPDSLSSGSSRDVQGTDASLDEELDRVKMS

SEQ ID NO: 12927 - protein, 356 aa, Homo Sapiens
MLARAARGTGALLLRGSLLASGRAPRRASSGLPRNTVVLFVPQQEAWVVERMGRFHRILEPGLNILIPVLDRIRYVQSLKEIVINVPEQSAVTLDNVTLQIDGVLYLRIMDPYKASYGVEDPEYAVTQLAQTTMRSELGKLSLDKVFRERESLNASIVDAINQAADCWGIRCLRYEIKDIHVPPRVKESMQMQVEAERRKRATVLESEGTRESAINVAEGKKQAQILASEAEKAEQINQAAGEASAVLAKAKAKAEAIRILAAALTQHNGDAAASLTVAEQYVSAFSKLAKDSNTILLPSNPGDVTSMVAQAMGVYGALTKAPVPGTPDSLSSGSSRDVQGTDASLDEELDRVKMS

SEQ ID NO: 12928 - protein, 311 aa, Homo Sapiens
MLARAARGTGALLLRGSLLASGRAPRRASSGLPRNTVVLFVPQQEAWVVERMGRFHRILEPGLNILIPVLDRIRYVQSLKEIVINVPEQSAVTLDNVTLQIDGVLYLRIMDPYKASYGVEDPEYAVTQLAQTTMRSELGKLSLDKVFRVEAERRKRATVLESEGTRESAINVAEGKKQAQILASEAEKAEQINQAAGEASAVLAKAKAKAEAIRILAAALTQHNGDAAASLTVAEQYVSAFSKLAKDSNTILLPSNPGDVTSMVAQAMGVYGALTKAPVPGTPDSLSSGSSRDVQGTDASLDEELDRVKMS

SEQ ID NO: 12929 - protein, 101 aa, Homo Sapiens
MQMQVEAERRKRATVLESEGTRESAINVAEGKKQAQILASEAEKAEQINQAAGEASAVLAKAKAKAEAIRILAAALTQHVRGPWVGMGTGIDSGRGSLIYA

SEQ ID NO: 12930 - protein, 169 aa, Homo Sapiens
MARPVQLAPGSLALVLCRLEAQKAAGAAEEPGGRAVFRAFRRANARCFWNARLARAASRLAFQGWLRRGVLLVRAPPACLQVLRDAWRRRALRPPRGFRIRAVGDVFPVQMNPITQSQFVPLGEVLCCAISDMNTAQIVVTQESLLERLMKHYPGHRVWDLIIQSFWMD

SEQ ID NO: 12931 - protein, 227 aa, Homo Sapiens
MARPVQLAPGSLALVLCRLEAQKAAGAAEEPGGRAVFRAFRRANARCFWNARLARAASRLAFQGWLRRGVLLVRAPPACLQVLRDAWRRRALRPPRGFRIRAVGDVFPVQMNPITQSQFVPLGEVLCCAISDMNTAQIVVTQESLLERLMKHYPGIAIPSEDILYTTLGTLIKERKIYHTGEGYFIVTPQTYFITNTTTQENKRMLPSDESRLMPASMTYLDTESGI

SEQ ID NO: 12932 - protein, 989 aa, Homo Sapiens
MARPVQLAPGSLALVLCRLEAQKAAGAAEEPGGRAVFRAFRRANARCFWNARLARAASRLAFQGWLRRGVLLVRAPPACLQVLRDAWRRRALRPPRGFRIRAVGDVFPVQMNPITQSQFVPLGEVLCCAISDMNTAQIVVTQESLLERLMKHYPGIAIPSEDILYTTLGTLIKERKIYHTGEGYFIVTPQTYFITNTTTQENKRMLPSDESRLMPASMTYLVSMESCAESAQENAAPISHCQSCQCFRDMHTQDVQEAPVAAEVTRKSHRGLGESVSWVQNGAVSVSAEHHICESTKPLPYTRDKEKGKKFGFSLLWRSLSRKEKPKTEHSSFSAQFPPEEWPVRDEDDLDNIPRDVEHEIIKRINPILTVDNLIKHTVLMQKYEEQKKYNSQGTSTDMLTIGHKYPSKEGVKKRQGLSAKPQGQGHSRRDRHKARNQGSEFQPGSIRLEKHPKLPATQPIPRIKSPNEMVGQKPLGEITTVLGSHLIYKKRISNPFQGLSHRGSTISKGHKIQKTSDLKPSQTGPKEKPFQKPRSLDSSRIFDGKAKEPYAEQPNDKMEAESIYINDPTVKPINDDFRGHLFSHPQQSMLQNDGKCCPFMESMLRYEVYGGENEVIPEVLRKSHSHFDKLGETKQTPHSLPSRGASFSDRTPSACRLVDNTIHQFQNLGLLDYPVGVNPLRQAARQDKDSEELLRKGFVQDAETTSLENEQLSNDDQALYQNEVEDDDGACSSLYLEEDDISENDDLRQMLPGHSQYSFTGGSQGNHLGKQKVIERSLTEYNSTMERVESQVLKRNECYKPTGLHATPGESQEPNLSAESCGLNSGAQFGFNYEEEPSVAKCVQASAPADERIFDYYSARKASFEAEVIQDTIGDTGKKPASWSQSPQNQEMRKHFPQKFQLFNTSHMPVLAQDVQYEHSHLEGTENHSMAGDSGIDSPRTQSLGSNNSVILDGLKRRQNFLQNVEGTKSSQPLTSNSLLPLTPVINV

SEQ ID NO: 12933 - protein, 989 aa, Homo Sapiens; identical to SEQ ID NO: 12932

SEQ ID NO: 12934 - protein, 1101 aa, Homo Sapiens
MARPVQLAPGSLALVLCRLEAQKAAGAAEEPGGRAVFRAFRRANARCFWNARLARAASRLAFQGWLRRGVLLVRAPPACLQVLRDAWRRRALRPPRGFRIRAVGECGTRRGGASRPVQLAPGSLALVLCRLEAQKAAGAAEEPGGRAVFRAFRRANARCFWNARLARAASRLAFQGWLRRGVLLVRAPPACLQVLRDAWRRRALRPPRGFRIRAVGDVFPVQMNPITQSQFVPLGEVLCCAISDMNTAQIVVTQESLLERLMKHYPGIAIPSEDILYTTLGTLIKERKIYHTGEGYFIVTPQTYFITNTTTQENKRMLPSDESRLMPASMTYLVSMESCAESAQENAAPISHCQSCQCFRDMHTQDVQEAPVAAEVTRKSHRGLGESVSWVQNGAVSVSAEHHICESTKPLPYTRDKEKGKKFGFSLLWRSLSRKEKPKTEHSSFSAQFPPEEWPVRDEDDLDNIPRDVEHEIIKRINPILTVDNLIKHTVLMQKYEEQKKYNSQGTSTDMLTIGHKYPSKEGVKKRQGLSAKPQGQGHSRRDRHKARNQGSEFQPGSIRLEKHPKLPATQPIPRIKSPNEMVGQKPLGEITTVLGSHLIYKKRISNPFQGLSHRGSTISKGHKIQKTSDLKPSQTGPKEKPFQKPRSLDSSRIFDGKAKEPYAEQPNDKMEAESIYINDPTVKPINDDFRGHLFSHPQQSMLQNDGKCCPFMESMLRYEVYGGENEVIPEVLRKSHSHFDKLGETKQTPHSLPSRGASFSDRTPSACRLVDNTIHQFQNLGLLDYPVGVNPLRQAARQDKDSEELLRKGFVQDAETTSLENEQLSNDDQALYQNEVEDDDGACSSLYLEEDDISENDDLRQMLPGHSQYSFTGGSQGNHLGKQKVIERSLTEYNSTMERVESQVLKRNECYKPTGLHATPGESQEPNLSAESCGLNSGAQFGFNYEEEPSVAKCVQASAPADERIFDYYSARKASFEAEVIQDTIGDTGKKPASWSQSPQNQEMRKHFPQKFQLFNTSHMPVLAQDVQYEHSHLEGTENHSMAGDSGIDSPRTQSLGSNNSVILDGLKRRQNFLQNVEGTKSSQPLTSNSLLPLTPVINV

SEQ ID NO: 12935 - protein, 969 aa, Homo Sapiens
MALSLWPLLLLLLLLLLLSFAVTLAPTGPHSLDPGLSFLKSLLSTLDQAPQGSLSRSRFFTFLANISSSFEPGRMGEGPVGEPPPLQPPALRLHDFLVTLRGSPDWEPMLGLLGDMLALLGQEQTPRDFLVHQAGVLGGLVEVLLGALVPGGPPTPTRPPCTRDGPSDCVLAADWLPSLLLLLEGTRWQALVQVQPSVDPTNATGLDGREAAPHFLQGLLGLLTPTGELGSKEALWGGLLRTVGAPLYAAFQEGLLRVTHSLQDEVFSILGQPEPDTNGQCQGGNLQQLLLWGVRHNLSWDVQALGFLSGSPPPPPALLHCLSTGVPLPRASQPSAHISPRQRRAITVEALCENHLGPAPPYSISNFSIHLLCQHTKPATPQPHPSTTAICQTAVWYAVSWAPGAQGWLQACHDQFPDEFLDAICSNLSFSALSGSNRRLVKRLCAGLLPPPTSCPEGLPPVPLTPDIFWGCFLENETLWAERLCGEASLQAVPPSNQAWVQHVCQGPTPDVTASPPCHIGPCGERCPDGGSFLVMVCANDTMYEVLVPFWPWLAGQCRISRGGNDTCFLEGLLGPLLPSLPPLGPSPLCLTPGPFLLGMLSQLPRCQSSVPALAHPTRLHYLLRLLTFLLGPGAGGAEAQGMLGRALLLSSLPDNCSFWDAFRPEGRRSVLRTIGEYLEQDEEQPTPSGFEPTVNPSSGISKMELLACFSPVLWDLLQREKSVWALQILVQAYLHMPPENLQQLVLSAEREAAQGFLTLMLQGKLQGKLQVPPSEEQALGRLTALLLQRYPRLTSQLFIDLSPLIPFLAVSDLMRFPPSLLANDSVQQGYRGSEENSLEEDKGLRPMTPRSLAAIRDYSPGMRPEQKEALAKRLLAPELFGEVPAWPQELLWAVLPLLPHLPLENFLQLSPHQIQALEDSWPAAGLGPGHARHVLRSLVNQSVQDGEEQVRRWHMNFWVCCAHLEERC

SEQ ID NO: 12936 - protein, 351 aa, Homo Sapiens
MALSLWPLLLLLLLLLLLSFAVTLAPTGPHSLDPGLSFLKSLLSTLDQAPQGSLSRSRFFTFLANISSSFEPGRMGEGPVGEPPPLQPPALRLHDFLVTLRGSPDWEPMLGLLGDMLALLGQEQTPRDFLVHQAGVLGGLVEVLLGALVPGGPPTPTRPPCTRDGPSDCVLAADWLPSLLLLLEGTRWQALVQVQPSVDPTNATGLDGREAAPHFLQGLLGLLTPTGELGSKEALWGGLLRTVGAPLYAAFQEGLLRVTHSLQDEVFSILGQPEPDTNGQCQGGNLQQLLLWGVRHNLSWDVQALGFLSGSPPPPPALLHCLSTGVPLPRASQPSAHISPRQRRAITVEAL

SEQ ID NO: 12937 - protein, 1775 aa, Homo Sapiens
MALSLWPLLLLLLLLLLLSFAVTLAPTGPHSLDPGLSFLKSLLSTLDQAPQGSLSRSRFFTFLANISSSFEPGRMGEGPVGEPPPLQPPALRLHDFLVTLRGSPDWEPMLGLLGDMLALLGQEQTPRDFLVHQAGVLGGLVEVLLGALVPGGPPTPTRPPCTRDGPSDCVLAADWLPSLLLLLEGTRWQALVQVQPSVDPTNATGLDGREAAPHFLQGLLGLLTPTGELGSKEALWGGLLRTVGAPLYAAFQEGLLRVTHSLQDEVFSILGQPEPDTNGQCQGGNLQQLLLWGVRHNLSWDVQALGFLSGSPPPPPALLHCLSTGVPLPRASQPSAHISPRQRRAITVEALCENHLGPAPPYSISNFSIHLLCQHTKPATPQPHPSTTAICQTAVWYAVSWAPGAQGWLQACHDQFPDEFLDAICSNLSFSALSGSNRRLVKRLCAGLLPPPTSCPEGLPPVPLTPDIFWGCFLENETLWAERLCGEASLQAVPPSNQAWVQHVCQGPTPDVTASPPCHIGPCGERCPDGGSFLVMVCANDTMYEVLVPFWPWLAGQCRISRGGNDTCFLEGLLGPLLPSLPPLGPSPLCLTPGPFLLGMLSQLPRCQSSVPALAHPTRLHYLLRLLTFLLGPGAGGAEAQGMLGRALLLSSLPDNCSFWDAFRPEGRRSVLRTIGEYLEQDEEQPTPSGFEPTVNPSSGISKMELLACFSPVLWDLLQREKSVWALQILVQAYLHMPPENLQQLVLSAEREAAQGFLTLMLQGKLQGKLQVPPSEEQALGRLTALLLQRYPRLTSQLFIDLSPLIPFLAVSDLMRFPPSLLANDSVLAAIRDYSPGMRPEQKEALAKRLLAPELFGEVPAWPQELLWAVLPLLPHLPLENFLQLSPHQIQALEDSWPAAGLGPGHARHVLRSLVNQSVQDGEEQVRRLGPLACFLSPEELQSLVPLSDPTGPVERGLLECAANGTLSPEGRVAYELLGVLRSSGGAVLSPRELRVWAPLFSQLGLRFLQELSEPQLRAMLPVLQGTSVTPAQAVLLLGRLLPRHDLSLEELCSLHLLLPGLSPQTLQAIPRRVLVGACSCLAPELSRLSACQTAALLQTFRVKDGVKNMGTTGAGPAVCIPGQPIPTTWPDCLLPLLPLKLLQLDSLALLANRRRYWELPWSEQQAQFLWKKMQVPTNLTLRNLQALGTLAGGMSCEFLQQINSMVDFLEVVHMIYQLPTRVRGSLRACIWAELQRRMAMPEPEWTTVGPELNGLDSKLLLDLPIQLMDRLSNESIMLVVELVQRAPEQLLALTPLHQAALAERALQNLAPKETPVSGEVLETLGPLVGFLGTESTRQIPLQILLSHLSQLQGFCLGETFATELGWLLLQESVLGKPELWSQDEVEQAGRLVFTLSTEAISLIPREALGPETLERLLEKQQSWEQSRVGQLCREPQLAAKKAALVAGVVRPAAEDLPEPVPNCADVRGTFPAAWSATQIAEMELSDFEDCLTLFAGDPGLGPEELRAAMGKAKQLWGPPRGFRPEQILQLGRLLIGLGDRELQELILVDWGVLSTLGQIDGWSTTQLRIVVSSFLRQSGRHVSHLDFVHLTALGYTLCGLRPEELQHISSWEFSQAALFLGTLHLQCSEEQLEVLAHLLVLPGGFGPISNWGPEIFTEIGTIAAGIPDLALSALLRGQIQGVTPLAISVIPPPKFAVVFSPIQLSSLTSAQAVAVTPEQMAFLSPEQRRAVAWAQHEGKESPEQQGRSTAWGLQDWSRPSWSLVLTISFLGHLL

SEQ ID NO: 12938 - protein, 1002 aa, Homo Sapiens
MELLACFSPVLWDLLQREKSVWALQILVQAYLHMPPENLQQLVLSAEREAAQGFLTLMLQGKLQGKLQVPPSEEQALGRLTALLLQRYPRLTSQLFIDLSPLIPFLAVSDLMRFPPSLLANDSVQQGYRGSEENSLEEDKGLRPMTPRSLAAIRDYSPGMRPEQKEALAKRLLAPELFGEVPAWPQELLWAVLPLLPHLPLENFLQLSPHQIQALEDSWPAAGLGPGHARHVLRSLVNQSVQDGEEQVRRLGPLACFLSPEELQSLVPLSDPTGPVERGLLECAANGTLSPEGRVAYELLGVLRSSGGAVLSPRELRVWAPLFSQLGLRFLQELSEPQLRAMLPVLQGTSVTPAQAVLLLGRLLPRHDLLQLDSLALLANRRRYWELPWSEQQAQFLWKKMQVPTNLTLRNLQALGTLAGGMSCEFLQQINSMVDFLEVVHMIYQLPTRVRGSLRACIWAELQRRMAMPEPEWTTVGPELNGLDSKLLLDLPIQLMDRLSNESIMLVVELVQRAPEQLLALTPLHQAALAERALQNLAPKETPVSGEVLETLGPLVGFLGTESTRQIPLQILLSHLSQLQGFCLGETFATELGWLLLQESVLGKPELWSQDEVEQAGRLVFTLSTEAISLIPREALGPETLERLLEKQQSWEQSRVGQLCREPQLAAKKAALVAGVVRPAAEDLPEPVPNCADVRGTFPAAWSATQIAEMELSDFEDCLTLFAGDPGLGPEELRAAMGKAKQLWGPPRGFRPEQILQLGRLLIGLGDRELQELILVDWGVLSTLGQIDGWSTTQLRIVVSSFLRQSGRHVSHLDFVHLTALGYTLCGLRPEELQHISSWEFSQAALFLGTLHLQCSEEQLEVLAHLLVLPGGFGPISNWGPEIFTEIGTIAAGIPDLALSALLRGQIQGVTPLAISVIPPPKFAVVFSPIQLSSLTSAQAVAVTPEQMAFLSPEQRRAVAWAQHEGKESPEQQGRSTAWGLQDWSRPSWSLVLTISFLGHLL

SEQ ID NO: 12939 - protein, 663 aa, Homo Sapiens
TFLANISSSFEPGRMGEGPVGEPPPLQPPALRLHDFLVTLRGSPDWEPMLGLLGDMLALLGQEQTPRDFLVHQAGVLGGLVEVLLGALVPGGPPTPTRPPCTRDGPSDCVLAADWLPSLLLLLEGTRWQALVQVQPSVDPTNATGLDGREAAPHFLQGLLGLLTPTGELGSKEALWGGLLRTVGAPLYAAFQEGLLRVTHSLQDEVFSILGQPEPDTNGQCQGGNLQQLLLWGVRHNLSWDVQALGFLSGSPPPPPALLHCLSTGVPLPRASQPSAHISPRQRRAITVEALCENHLGPAPPYSISNFSIHLLCQHTKPATPQPHPSTTAICQTAVWYAVSWAPGAQGWLQACHDQFPDEFLDAICSNLSFSALSGSNRRLVKRLCAGLLPPPTSCPEGLPPVPLTPDIFWGCFLENETLWAERLCGEASLQAVPPSNQAWVQHVCQGPTPDVTASPPCHIGPCGERCPDGGSFLVMVCANDTMYEVLVPFWPWLAGQCRISRGGNDTCFLEGLLGPLLPSLPPLGPSPLCLTPGPFLLGMLSQLPRCQSSVPALAHPTRLHYLLRLLTFLLGPGAGGAEAQGMLGRALLLSSLPDNCSFWDAFRPEGRRSVLRTIGEYLEQDEEQPTPSGFEPTVNPSSGISKMELLACFSVSALPEGKLLEQ

SEQ ID NO: 12940 - protein, 119 aa, Homo Sapiens
  misc_feature (1)..(1): Xaa can be any naturally occurring amino acid
XSLAAIRDYSPGMRPEQKEALAKRLLAPELFGEVPAWPQELLWAVLPLLPHLPLENFLQLSPHQIQALEDSWPAAGLGPGHARHVLRSLVNQSVQDGEEQVRRWHMNFWVCCAHLEERC

SEQ ID NO: 12941 - protein, 346 aa, Homo Sapiens
MTATLAAAADIATMVSGSSGLAAARLLSRSFLLPQNGIRHCSYTASRQHLYVDKNTKIICQGFTGKQGTFHSQQALEYGTKLVGGTTPGKGGQTHLGLPVFNTVKEAKEQTGATASVIYVPPPFAAAAINEAIEAEIPLVVCITEGIPQQDMVRVKHKLLRQEKTRLIGPNCPGVINPGECKIGIMPGHIHKKGRIGIVSRSGTLTYEAVHQTTQVGLGQSLCVGIGGDPFNGTDFIDCLEIFLNDSATEGIILIGEIGGNAEENAAEFLKQHNSGPNSKPVVSFIAGLTAPPGRRMGHAGAIIAGGKGGAKEKISALQSAGVVVSMSPAQLGTTIYKEFEKRKML

SEQ ID NO: 12942 - protein, 105 aa, Homo Sapiens
  misc_feature (1)..(1): Xaa can be any naturally occurring amino acid
XTLAAAADIATMVSGSSGLAAARLLSRSFLLPQNGIRHCSYTASRQHLYVDKNTKIICQGFTGKQELLLLTRHLSQPAGIGIWHQTRWRNHSRERRPDTSGLTCL

SEQ ID NO: 12943 - protein, 328 aa, Homo Sapiens
MSAAGLLAPAPAQAGAPPAPEYYPEEDEELESAEDDERSCRGRESDEDTEDASETDLAKHDEEDYVEMKEQMYQDKLASLKRQLQQLQEGTLQEYQKRMKKLDQQYKERIRNAELFLQLETEQVERNYIKEKKAAVKEFEDKKVELKENLIAELEEKKKMIENEKLTMELTGDSMEVKPIMTRKLRRRPNDPVPIPDKRRKPAPAQLNYLLTDEQIMEDLRTLNKLKSPKRPASPSSPEHLPATPAESPAQRFEARIEDGKLYYDKRWYHKSQAIYLESKDNQKLSCVISSVGANEIWVRKTSDSTKMRIYLGQLQRGLFVIRRRSAA

SEQ ID NO: 12944 - protein, 29 aa, Homo Sapiens
MKYSCCALVLAVLGTELLGSLCSTVRSPR

SEQ ID NO: 12945 - protein, 56 aa, Homo Sapiens
MKYSCCALVLAVLGTELLGSLCSTVRSPRFRGRIQQERKNIRPNIILVLTDDQDVE

SEQ ID NO: 12946 - protein, 76 aa, Homo Sapiens
MKYSCCALVLAVLGTELLGSLCSTVRSPRFRGRIQQERKNIRPNIILVLTDDQDVELGSLQVMNKTRKIMEHGGAT

SEQ ID NO: 12947 - protein, 85 aa, Homo Sapiens
MKYSCCALVLAVLGTELLGSLCSTVRSPRFRGRIQQERKNIRPNIILVLTDDQDVELGSLQVMNKTRKIMEHGGATFINAFVTTP

SEQ ID NO: 12948 - protein, 172 aa, Homo Sapiens
MKYSCCALVLAVLGTELLGSLCSTVRSPRFRGRIQQERKNIRPNIILVLTDDQDVELGSLQVMNKTRKIMEHGGATFINAFVTTPMCCPSRSSMLTGKYVHNHNVYTNNENCSSPSWQAMHEPRTFAVYLNNTGYRTAFFGKYLNEYNGSYIPPGWREWLGLIKNSRFYNYT

SEQ ID NO: 12949 - protein, 871 aa, Homo Sapiens
MKYSCCALVLAVLGTELLGSLCSTVRSPRFRGRIQQERKNIRPNIILVLTDDQDVELGSLQVMNKTRKIMEHGGATFINAFVTTPMCCPSRSSMLTGKYVHNHNVYTNNENCSSPSWQAMHEPRTFAVYLNNTGYRTAFFGKYLNEYNGSYIPPGWREWLGLIKNSRFYNYTVCRNGIKEKHGFDYAKDYFTDLITNESINYFKMSKRMYPHRPVMMVISHAAPHGPEDSAPQFSKLYPNASQHITPSYNYAPNMDKHWIMQYTGPMLPIHMEFTNILQRKRLQTLMSVDDSVERLYNMLVETGELENTYIIYTADHGYHIGQFGLVKGKSMPYDFDIRVPFFIRGPSVEPGSIVPQIVLNIDLAPTILDIAGLDTPPDVDGKSVLKLLDPEKPGNRFRTNKKAKIWRDTFLVERGKFLRKKEESSKNIQQSNHLPKYERVKELCQQARYQTACEQPGQKWQCIEDTSGKLRIHKCKGPSDLLTVRQSTRNLYARGFHDKDKECSCRESGYRASRSQRKSQRQFLRNQGTPKYKPRFVHTRQTRSLSVEFEGEIYDINLEEEEELQVLQPRNIAKRHDEGHKGPRDLQASSGGNRGRMLADSSNAVGPPTTVRVTHKCFILPNDSIHCERELYQSARAWKDHKAYIDKEIEALQDKIKNLREVRGHLKRRKPEECSCSKQSYYNKEKGVKKQEKLKSHLHPFKEAAQEVDSKLQLFKENNRRRKKERKEKRRQRKGEECSLPGLTCFTHDNNHWQTAPFWNLGSFCACTSSNNNTYWCLRTVNETHNFLFCEFATGFLEYFDMNTDPYQLTNTVHTVERGILNQLHVQLMELRSCQGYKQCNPRPKNLDVGNKDGGSYDLHRGQLWDGWEG

SEQ ID NO: 12950 - protein, 871 aa, Homo Sapiens; identical to SEQ ID NO: 12949

SEQ ID NO: 12951 - protein, 871 aa, Homo Sapiens; identical to SEQ ID NO: 12949

SEQ ID NO: 12952 - protein, 871 aa, Homo Sapiens; identical to SEQ ID NO: 12949

SEQ ID NO: 12953 - protein, 669 aa, Homo Sapiens
MVISHAAPHGPEDSAPQFSKLYPNASQHITPSYNYAPNMDKHWIMQYTGPMLPIHMEFTNILQRKRLQTLMSVDDSVERLYNMLVETGELENTYIIYTADHGYHIGQFGLVKGKSMPYDFDIRVPFFIRGPSVEPGSIVPQIVLNIDLAPTILDIAGLDTPPDVDGKSVLKLLDPEKPGNRFRTNKKAKIWRDTFLVERGKFLRKKEESSKNIQQSNHLPKYERVKELCQQARYQTACEQPGQKWQCIEDTSGKLRIHKCKGPSDLLTVRQSTRNLYARGFHDKDKECSCRESGYRASRSQRKSQRQFLRNQGTPKYKPRFVHTRQTRSLSVEFEGEIYDINLEEEEELQVLQPRNIAKRHDEGHKGPRDLQASSGGNRGRMLADSSNAVGPPTTVRVTHKCFILPNDSIHCERELYQSARAWKDHKAYIDKEIEALQDKIKNLREVRGHLKRRKPEECSCSKQSYYNKEKGVKKQEKLKSHLHPFKEAAQEVDSKLQLFKENNRRRKKERKEKRRQRKGEECSLPGLTCFTHDNNHWQTAPFWNLGSFCACTSSNNNTYWCLRTVNETHNFLFCEFATGFLEYFDMNTDPYQLTNTVHTVERGILNQLHVQLMELRSCQGYKQCNPRPKNLDVGNKDGGSYDLHRMLLFLVPCSAPLTSRAMVSDASF

SEQ ID NO: 12954 - protein, 131 aa, Homo Sapiens
  misc_feature (1)..(1): Xaa can be any naturally occurring amino acid
XREVRGHLKRRKPEECSCSKQSYYNKEKGVKKQEKLKSHLHPFKEAAQEVDSKLQLFKENNRRRKKERKEKRRQRKGEECSLPGLTCFTHDNNHWQTAPFWNPHKYSAHGRTRHFESATRTTNGAQKLSRI

SEQ ID NO: 12955 - protein, 189 aa, Homo Sapiens
MGPPSLVLCLLSATVFSLLGGSSAFLSHHRLKGRFQRDRRNIRPNIILVLTDDQDVELGSMQVMNKTRRIMEQGGAHFINAFVTTPMCCPSRSSILTGKYVHNHNTYTNNENCSSPSWQAQHESRTFAVYLNSTGYRTAFFGKYLNEYNGSYVPPGWKEWVGLLKNSRFYNYTLCRNGVKEKHGSDYSK

SEQ ID NO: 12956 - protein, 870 aa, Homo Sapiens
MGPPSLVLCLLSATVFSLLGGSSAFLSHHRLKGRFQRDRRNIRPNIILVLTDDQDVELGSMQVMNKTRRIMEQGGAHFINAFVTTPMCCPSRSSILTGKYVHNHNTYTNNENCSSPSWQAQHESRTFAVYLNSTGYRTAFFGKYLNEYNGSYVPPGWKEWVGLLKNSRFYNYTLCRNGVKEKHGSDYSKDYLTDLITNDSVSFFRTSKKMYPHRPVLMVISHAAPHGPEDSAPQYSRLFPNASQHITPSYNYAPNPDKHWIMRYTGPMKPIHMEFTNMLQRKRLQTLMSVDDSMETIYNMLVETGELDNTYIVYTADHGYHIGQFGLVKGKSMPYEFDIRVPFYVRGPNVEAGCLNPHIVLNIDLAPTILDIAGLDIPADMDGKSILKLLDTERPVNRFHLKKKMRVWRDSFLVERGKLLHKRDNDKVDAQEENFLPKYQRVKDLCQRAEYQTACEQLGQKWQCVEDATGKLKLHKCKGPMRLGGSRALSNLVPKYYGQGSEACTCDSGDYKLSLAGRRKKLFKKKYKASYVRSRSIRSVAIEVDGRVYHVGLGDAAQPRNLTKRHWPGAPEDQDDKDGGDFSGTGGLPDYSAANPIKVTHRCYILENDTVQCDLDLYKSLQAWKDHKLHIDHEIETLQNKIKNLREVRGHLKKKRPEECDCHKISYHTQHKGRLKHRGSSLHPFRKGLQEKDKVWLLREQKRKKKLRKLLKRLQNNDTCSMPGLTCFTHDNQHWQTAPFWTLGPFCACTSANNNTYWCMRTINETHNFLFCEFATGFLEYFDLNTDPYQLMNAVNTLDRDVLNQLHVQLMELRSCKGYKQCNPRTRNMDLGLKDGGSYEQYRQFQRRKWPEMKRPSSKSLGQLWEGWEG

SEQ ID NO: 12957 - protein, 870 aa, Homo Sapiens; identical to SEQ ID NO: 12956

SEQ ID NO: 12958 - protein, 867 aa, Homo Sapiens
MGPPSLVLCLLSATVFSLLGGSSAFLSHHRLKGRFQRDRRNIRPNIILVLTDDQDVELGSMQVMNKTRRIMEQGGAHFINAFVTTPMCCPSRSSILTGKYVHNHNTYTNNENCSSPSWQAQHESRTFAVYLNSTGYRTAFFGKYLNEYNGSYVPPGWKEWVGLLKNSRFYNYTLCRNGVKEKHGSDYSKDYLTDLITNDSVSFFRTSKKMYPHRPVLMVISHAAPHGPEDSAPQYSRLFPNASQHITPSYNYAPNPDKHWIMRYTGPMKPIHMEFTNMLQRKRLQTLMSVDDSMETIYNMLVETGELDNTYIVYTADHGYHIGQFGLVKGKSMPYEFDIRVPFYVRGPNVEAGCLNPHIVLNIDLAPTILDIAGLDIPADMDGKSILKLLDTERPVNRFHLKKKMRVWRDSFLVERGKLLHKRDNDKVDAQEENFLPKYQRVKDLCQRAEYQTACEQLGQKWQCVEDATGKLKLHKCKGPMRLGGSRALSNLVPKYYGQGSEACTCDSGDYKLSLAGRRKKLFKKKYKASYVRSRSIRSVAIEVDGRVYHVGLGDAAQPRNLTKRHWPGAPEDQDDKDGGDFSGTGGLPDYSAANPIKVTHRCYILENDTVQCDLDLYKSLQAWKDHKLHIDHEIETLQNKIKNLREVRGHLKKKRPEECDCHKISYHTQHKGRLKHRGSSLHPFRKGLQEKDKVWLLREQKRKKKLRKLLKRLQNNDTCSMPGLTCFTHDNQHWQTAPFWTLGPFCACTSANNNTYWCMRTINETHNFLFCEFATGFLEYFDLNTDPYQLMNAVNTLDRDVLNQLHVQLMELRSCKGYKQCNPRTRNMDLDGGSYEQYRQFQRRKWPEMKRPSSKSLGQLWEGWEG

SEQ ID NO: 12959 - protein, 207 aa, Homo Sapiens
  misc_feature (1)..(1): Xaa can be any naturally occurring amino acid
XEVRGHLKKKRPEECDCHKISYHTQHKGRLKHRGSSLHPFRKGLQEKDKVWLLREQKRKKKLRKLLKRLQNNDTCSMPGLTCFTHDNQHWQTAPFWTLGPFCACTSANNNTYWCMRTINETHNFLFCEFATGFLEYFDLNTDPYQLMNAVNTLDRDVLNQLHVQLMELRSCKGYKQCNPRTRNMDLGLKDGGSYEQYRGQLWEGWEG

SEQ ID NO: 12960 - protein, 374 aa, Homo Sapiens
MAAPALGLVCGRCPELGLVLLLLLLSLLCGAAGSQEAGTGAGAGSLAGSCGCGTPQRPGAHGSSAAAHRYSREANAPGPVPGERQLAHSKMVPIPAGVFTMGTDDPQIKQDGEAPARRVTIDAFYMDAYEVSNTEFEKFVNSTGYLTEAEKFGDSFVFEGMLSEQVKTNIQQAVAAAPWWLPVKGANWRHPEGPDSTILHRPDHPVLHVSWNDAVAYCTWAGKRLPTEAEWEYSCRGGLHNRLFPWGNKLQPKGQHYANIWQGEFPVTNTGEDGFQGTAPVDAFPPNGYGLYNIVGNAWEWTSDWWTVHHSVEETLNPKGPPSGKDRVKKGGSYMCHRSYCYRYRCAARSQNTPDSSASNLGFRCAADRLPTMD

SEQ ID NO: 12961 - protein, 354 aa, Homo Sapiens
MAAPALGLVCGRCPELGLVLLLLLLSLLCGAAGSQEAGTGAGAGSLAGSCGCGTPQRPGAHGSSAAAHRYSREANAPGPVPGERQLAHSKMVPIPAGVFTMGTDDPQIKQDGEAPARRVTIDAFYMDAYEVSNTEFEKFVNSTGYLTEAEKFGDSFVFEGMLSEQVKTNIQQAVAAAPWWLPVKGANWRHPEGPDSTILHRPDHPVLHVSWNDAVAYCTWAGKRLPTEAEWEYSCRGGLHNRLFPWGNKLQPKGQHYANIWQGEFPVTNTGEDGFQGTAPVDAFPPNGYGLYNIVGNAWEWTSDWWTVHHSVEETLNPSYCYRYRCAARSQNTPDSSASNLGFRCAADRLPTMD

SEQ ID NO: 12962 - protein, 426 aa, Homo Sapiens
MAAPALGLVCGRCPELGLVLLLLLLSLLCGAAGSQEAGTGAGAGSLAGSCGCGTPQRPGAHGSSAAAHRYSREANAPGPVPGERQLAHSKMVPIPAGVFTMGTDDPQIKQDGEAPARRVTIDAFYMDAYEVSNTEFEKFVNSTGYLTEAEKFGDSFVFEGMLSEQVKTNIQQAVAAAPWWLPVKGANWRHPEGPDSTILHRPDHPVLHVSWNDAVAYCTWAGKRLPTEAEWEYSCRGGLHNRLFPWGNKLQPKGQHYANIWQGEFPVTNTGEDGFQGTAPVDAFPPNGYGLYNIVGNAWEWTSDWWTVHHSVEETLNPKGPPSGKDRVKKGGSYMCHRSQEYYDPYFQDVASEMLRRHTASRWKAFSSLEPCCSIRRHQQYAAIERLTCGKFELRCASLRKIDCLNTNIACSYSMRQDGPRLHCVD

SEQ ID NO: 12963 - protein, 349 aa, Homo Sapiens
MAAPALGLVCGRCPELGLVLLLLLLSLLCGAAGSQEAGTGAGAGSLAGSCGCGTPQRPGAHGSSAAAHRYSREANAPGPVPGERQLAHSKMVPIPAGVFTMGTDDPQIKQDGEAPARRVTIDAFYMDAYEVSNTEFEKFVNSTGYLTEVAAAPWWLPVKGANWRHPEGPDSTILHRPDHPVLHVSWNDAVAYCTWAGKRLPTEAEWEYSCRGGLHNRLFPWGNKLQPKGQHYANIWQGEFPVTNTGEDGFQGTAPVDAFPPNGYGLYNIVGNAWEWTSDWWTVHHSVEETLNPKGPPSGKDRVKKGGSYMCHRSYCYRYRCAARSQNTPDSSASNLGFRCAADRLPTMD

SEQ ID NO: 12964 - protein, 242 aa, Homo Sapiens
MAAPALGLVCGRCPELGLVLLLLLLSLLCGAAGSQEAGTGAGAGSLAGSCGCGTPQRPGAHGSSAAAHRYSREANAPGPVPGERQLAHSKMVPIPAGVFTMGTDDPQIKQDGEAPARRVTIDAFYMDAYEVSNTEFEKFVNSTGYLTEVDAFPPNGYGLYNIVGNAWEWTSDWWTVHHSVEETLNPKGPPSGKDRVKKGGSYMCHRSYCYRYRCAARSQNTPDSSASNLGFRCAADRLPTMD

SEQ ID NO: 12965 - protein, 304 aa, Homo Sapiens
HGLPLLPLLSLLVGAWLKLGNGQATSMVQLQGGRFLMGTNSPDSRDGDGPVREATVKPFAIDIFPVTNKDFRDFVREKKYRTEAEMFGWSFVFEDFVSDELRNKATQPMKSGRCLCWAGASCSRSPSFSQSVLWWLPVEKAFWRQPAGPGSGIRERLEHPVLHVSWNDARAYCAWRGKRLPTEEEWEFAARGGLKGQVYPWGNWFQPNRTNLWQGKFPKGDKAEDGFHGVSPVNAFPAQNNYGLYDLLGNVWEWTASPYQAAEQDMRVLRGASWIDTADGSANHRARVTTRMGNTPDSASDNLG

SEQ ID NO: 12966 - protein, 51 aa, Homo Sapiens
MARHGLPLLPLLSLLVGAWLKLGILSGRKSIGQKLRCLDGALSLRTLSLMS

SEQ ID NO: 12967 - protein, 232 aa, Homo Sapiens
MARHGLPLLPLLSLLVGAWLKLGNGQATSMVQLQGGRFLMGTNSPDSRDGDGPVREATVKPFAIDIFPVTNKDFRDFVREKKYRTEAEMFGWSFVFEDFVSDELRNKATQPMKSVLWWLPVEKAFWRQGKFPKGDKAEDGFHGVSPVNAFPAQNNYGLYDLLGNVWEWTASPYQAAEQDMRVLRGASWIDTADGSANHRARVTTRMGNTPDSASDNLGFRCAADAGRPPGEL

SEQ ID NO: 12968 - protein, 183 aa, Homo Sapiens
MARHGLPLLPLLSLLVGAWLKLGNGQATSMVQLQGGRFLMGTNSPDSRDGDGPVREATVKPFAIDIFPVTNKDFRDFVREKKYRTEAEMFGWSFVFEDFVSDELRNKATQPMKSVLWWLPVEKAFWRQPAGPGSGIRERLEHPVLHVKFTHGGTGSSQTAPTCGRESSPRETKLRMASMESPQ

SEQ ID NO: 12969 - protein, 352 aa, Homo Sapiens
MARHGLPLLPLLSLLVGAWLKLGNGQATSMVQLQGGRFLMGTNSPDSRDGDGPVREATVKPFAIDIFPVTNKDFRDFVREKKYRTEAEMFGWSFVFEDFVSDELRNKATQPMKSVLWWLPVEKAFWRQPAGPGSGIRERLEHPVLHVSWNDARAYCAWRGKRLPTEEEWEFAARGGLKGQVYPWGNWFQPNRTNLWQGKFPKGDKAEDGFHGVSPVNAFPAQNNYGLYDLLGNVWEWTASPYQAAEQDMRVLRGASWIDTADGSANHRARVTTRVLLCCPGWSAVAQSQLTTASNCQALAILPPQLLKYLGLQDGQHSRFSLRQPRFPLCCRRRPAARGAVSSRVVTRRKAF

SEQ ID NO: 12970 - protein, 165 aa, Homo Sapiens
MARHGLPLLPLLSLLVGAWLKLGNGQATSMVQLQGGRFLMGTNSPDSRDGDGPVREATVKPFAIDIFPVTNKDFRDFVREKKYRTEAEMFGWSFVFEDFVSDELRNKATQPMKSVLWWLPVEKAFWRQVKFTHGGTGSSQTAPTCGRESSPRETKLRMASMESPQ

SEQ ID NO: 12971 - protein, 150 aa, Homo Sapiens
MARHGLPLLPLLSLLVGAWLKLGNGQATSMVQLQGGRFLMGTNSPDSRDGDGPVREATVKPFAIDIFPVTNKDFRDFVREKKYRTEAEMFGWSFVFEDFVSDELRNKATQPMKVKFTHGGTGSSQTAPTCGRESSPRETKLRMASMESPQ

SEQ ID NO: 12972 - protein, 102 aa, Homo Sapiens
MARHGLPLLPLLSLLVGAWLKLGNGQATSMVQLQGGRFLMGTNSPDSRDGDGPVREATVKPFAIDIFPVTNKDFRSSLPMGELVPAKPHQPVAGKVPQGRQS

SEQ ID NO: 12973 - protein, 213 aa, Homo Sapiens
MFGWSFVFEDFVSDELRNKATQPMKSVLWWLPVEKAFWRQPAGPGSGIRERLEHPVLHVSWNDARAYCAWRGKRLPTEEEWEFAARGGLKGQVYPWGNWFQPNRTNLWQGKFPKGDKAEDGFHGVSPVNAFPAQNNYGLYDLLGNVWEWTASPYQAAEQDMRVLRGASWIDTADGSANHRARVTTRMGNTPDSASDNLGFRCAADAGRPPGEL

SEQ ID NO: 12974 - protein, 236 aa, Homo Sapiens
MRAHAQRGRGCTRRSAAVLMARHGLPLLPLLSLLVGAWLKLGNGQATSMVQLQGGRFLMGTNSPDSRDGDGPVREATVKPFAIDIFPVTNKDFRDFVREKKYRTEAEMFGWSFVFEDFVSDELRNKATQPMKGKFPKGDKAEDGFHGVSPVNAFPAQNNYGLYDLLGNVWEWTASPYQAAEQDMRVLRGASWIDTADGSANHRARVTTRMGNTPDSASDNLGFRCAADAGRPPGEL

SEQ ID NO: 12975 - protein, 305 aa, Homo Sapiens
MRAHAQRGRGCTRRSAAVLMARHGLPLLPLLSLLVGAWLKLGNGQATSMVQLQGGRFLMGTNSPDSRDGDGPVREATVKPFAIDIFPVTNKDFRDFVREKKYRTEAEMFGWSFVFEDFVSDELRNKATQPMKPAGPGSGIRERLEHPVLHVSWNDARAYCAWRGKRLPTEEEWEFAARGGLKGQVYPWGNWFQPNRTNLWQGKFPKGDKAEDGFHGVSPVNAFPAQNNYGLYDLLGNVWEWTASPYQAAEQDMRVLRGASWIDTADGSANHRARVTTRMGNTPDSASDNLGFRCAADAGRPPGEL

SEQ ID NO: 12976 - protein, 320 aa, Homo Sapiens
MRAHAQRGRGCTRRSAAVLMARHGLPLLPLLSLLVGAWLKLGNGQATSMVQLQGGRFLMGTNSPDSRDGDGPVREATVKPFAIDIFPVTNKDFRDFVREKKYRTEAEMFGWSFVFEDFVSDELRNKATQPMKSVLWWLPVEKAFWRQPAGPGSGIRERLEHPVLHVSWNDARAYCAWRGKRLPTEEEWEFAARGGLKGQVYPWGNWFQPNRTNLWQGKFPKGDKAEDGFHGVSPVNAFPAQNNYGLYDLLGNVWEWTASPYQAAEQDMRVLRGASWIDTADGSANHRARVTTRMGNTPDSASDNLGFRCAADAGRPPGEL

SEQ ID NO: 12977 - protein, 358 aa, Homo Sapiens
MRAHAQRGRGCTRRSAAVLMARHGLPLLPLLSLLVGAWLKLGNGQATSMVQLQGGRFLMGTNSPDSRDGDGPVREATVKPFAIDIFPVTNKDFRDFVREKKYRTEAEMFGWSFVFEDFVSDELRNKATQPMKSVLWWLPVEKAFWRQPAGPGSGIRERLEHPVLHVSWNDARAYCAWRGKRLPTEEEWEFAARGGLKGQVYPWGNWFQPNRTNLWQGKFPKGDKAEDGFHGVSPVNAFPAQNNYGWATLQIQPQTTSVSAVLQTQAGRQGSCKQPGGDKEKSLLGSLSFPGHVANSAIPSSRASASGKNFPFPVSHPSVAGASHQGRRGLSLLCFGEGAQCVLTMAGGQVFLLEAKYY

SEQ ID NO: 12978 - protein, 294 aa, Homo Sapiens
MRAHAQRGRGCTRRSAAVLMARHGLPLLPLLSLLVGAWLKLGNGQATSMVQLQGGRFLMGTNSPDSRDGDGPVREATVKPFAIDIFPVTNKDFRYIRDFVREKKYRTEAEMFGWSFVFEDFVSDELRNKATQPMKSVLWWLPVEKAFWRQPAGPGSGIRERLEHPVLHVSWNDARAYCAWRGKRLPTEEEWEFAARGGLKGQVYPWGNWFQPNRTNLWQGKFPKGDKAEDGFHGVSPVNAFPAQNNYGLYDLLGNVWEWTASPYQAAEQDMRVLRGASWIDTADGSANHRARVT

SEQ ID NO: 12979 - protein, 747 aa, Homo Sapiens
MGRGPWDAGPSRRLLPLLLLLGLARGAAGAPGPDGLDVCATCHEHATCQQREGKKICICNYGFVGNGRTQCVDKNECQFGATLVCGNHTSCHNTPGGFYCICLEGYRATNNNKTFIPNDGTFCTDIDECEVSGLCRHGGRCVNTHGSFECYCMDGYLPRNGPEPFHPTTDATSCTEIDCGTPPEVPDGYIIGNYTSSLGSQVRYACREGFFSVPEDTVSSCTGLGTWESPKLHCQEINCGNPPEMRHAILVGNHSSRLGGVARYVCQEGFESPGGKITSVCTEKGTWRESTLTCTEILTKINDVSLFNDTCVRWQINSRRINPKISYVISIKGQRLDPMESVREETVNLTTDSRTPEVCLALYPGTNYTVNISTAPPRRSMPAVIGFQTAEVDLLEDDGSFNISIFNETCLKLNRRSRKVGSEHMYQFTVLGQRWYLANFSHATSFNFTTREQVPVVCLDLYPTTDYTVNVTLLRSPKRHSVQITIATPPAVKQTISNISGFNETCLRWRSIKTADMEEMYLFHIWGQRWYQKEFAQEMTFNISSSSRDPEVCLDLRPGTNYNVSLRALSSELPVVISLTTQITEPPLPEVEFFTVHRGPLPRLRLRKAKEKNGPISSYQVLVLPLALQSTFSCDSEGASSFFSNASDADGYVAAELLAKDVPDDAMEIPIGDRLYYGEYYNAPLKRGSDYCIILRITSEWNKVRRHSCAVWAQVKDSSLMLLQMAGVGLGSLAVVIILTFLSFSAV

SEQ ID NO: 12980 - protein, 757 aa, Homo Sapiens
MGRGPWDAGPSRRLLPLLLLLGLARGAAGAPGPDGLDVCATCHEHATCQQREGKKICICNYGFVGNGRTQCVDKNECQFGATLVCGNHTSCHNTPGGFYCICLEGYRATNNNKTFIPNDGTFCTDIDECEVSGLCRHGGRCVNTHGSFECYCMDGYLPRNGPEPFHPTTDATSCTEIDCGTPPEVPDGYIIGNYTSSLGSQVRYACREGFFSVPEDTVSSCTGLGTWESPKLHCQEINCGNPPEMRHAILVGNHSSRLGGVARYVCQEGFESPGGKITSVCTEKGTWRESTLTCTEILTKINDVSLFNDTCVRWQINSRRINPKISYVISIKGQRLDPMESVREETVNLTTDSRTPEVCLALYPGTNYTVNISTAPPRRSMPAVIGFQTAEVDLLEDDGSFNISIFNETCLKLNRRSRKVGSEHMYQFTVLGQRWYLANFSHATSFNFTTREQVPVVCLDLYPTTDYTVNVTLLRSPKRHSVQITIATPPAVKQTISNISGFNETCLRWRSIKTADMEEMYLFHIWGQRWYQKEFAQEMTFNISSSSRDPEVCLDLRPGTNYNVSLRALSSELPVVISLTTQITEPPLPEVEFFTVHRGPLPRLRLRKAKEKNGPISSYQVLVLPLALQSTFSCDSEGASSFFSNASDADGYVAAELLAKDVPDDAMEIPIGDRLYYGEYYNAPLKRGSDYCIILRITSEWNKVRRHSCAVWAQVKEIPCNCNFLRLHIHRANSGDTQIRHSCCCRWRVLDWVPWLL

SEQ ID NO: 12981 - protein, 722 aa, Homo Sapiens
MGRGPWDAGPSRRLLPLLLLLGLARGAAGAPGPDGLDVCATCHEHATCQQREGKKICICNYGFVGNGRTQCVDKNECQFGATLVCGNHTSCHNTPGGFYCICLEGYRATNNNKTFIPNDGTFCTDIDECEVSGLCRHGGRCVNTHGSFECYCMDGYLPRNGPEPFHPTTDATSCTEIDCGTPPEVPDGYIIGNYTSSLGSQVRYACREGFFSVPEDTVSSCTGLGTWESPKLHCQEINCGNPPEMRHAILVGNHSSRLGGVARYVCQEGFESPGGKITSVCTEKGTWRESTLTCTEILTKINDVSLFNDTCVRWQINSRRINPKISYVISIKGQRLDPMESVREETVNLTTDSRTPEVCLALYPGTNYTVNISTAPPRRSMPAVIGFQTAEVDLLEDDGSFNISIFNETCLKLNRRSRKVGSEHMYQFTVLGQRWYLANFSHATSFNFTTREQVPVVCLDLYPTTDYTVNVTLLRSPKRHSVQITIATPPAVKQTISNISGFNETCLRWRSIKTADMEEMYLFHIWGQRWYQKEFAQEMTFNISSSSRDPEVCLDLRPGTNYNVSLRALSSELPVVISLTTQITEPPLPEVEFFTVHRGPLPRLRLRKAKEKNGPISSYQVLVLPLALQSTFSCDSEGASSFFSNASDADGYVAAELLAKDVPDDAMEIPIGDRLYYGEYYNAPLKRGSDYCIILRITSEWNKIRHSCCCRWRVLDWVPWLL

SEQ ID NO: 12982 - protein, 45 aa, Homo Sapiens
VITALYYESQVNGISIKFILMRSVYIIVTGDQNPIHTTLSKELHS

SEQ ID NO: 12983 - protein, 281 aa, Homo Sapiens
  misc_feature (1)..(1): Xaa can be any naturally occurring amino acid
XGYIIGNYTSSLGSQVRYACREGFFSVPEDTVSSCTGLGTWESPKLHCQEINCGNPPEMRHAILVGNHSSRLGGVARYVCQEGFESPGGKITSVCTEKGTWRESTLTCTEILTKINDVSLFNDTCVRWQINSRRINPKISYVISIKGQRLDPMESVREETVNLTTDSRTPEVCLALYPGTNYTVNISTAPPRRSMPAVIGFQTAGSRNSHGRNTHIKEVDLLEDDGSFNISIFNETCLKLNRRSRKVGSEHMYQFTVLGQRWYLANFSHATSFNFTTREQV

SEQ ID NO: 12984 - protein, 706 aa, Homo Sapiens
  misc_feature (1)..(1): Xaa can be any naturally occurring amino acid
XLLLLGLARGAAGAPGPDGLDVCATCHEHATCQQREGKKICICNYGFVGNGRTQCVDKNECQFGATLVCGNHTSCHNTPGGFYCICLEGYRATNNNKTFIPNDGTFCTDIDECEVSGLCRHGGRCVNTHGSFECYCMDGYLPRNGPEPFHPTTDATSCTEIDCGTPPEVPDGYIIGNYTSSLGSQVRYACREGFFSVPEDTVSSCTGLGTWESPKLHCQEINCGNPPEMRHAILVGNHSSRLGGVARYVCQEGFESPGGKITSVCTEKGTWRESTLTCTEILTKINDVSLFNDTCVRWQINSRRINPKISYVISIKGQRLDPMESVREETVNLTTDSRTPEVCLALYPGTNYTVNISTAPPRRSMPAVIGFQTAEVDLLEDDGSFNISIFNETCLKLNRRSRKVGSEHMYQFTVLGQRWYLANFSHATSFNFTTREQVPVVCLDLYPTTDYTVNVTLLRSPKRHSVQITIATPPAVKQTISNISGFNETCLRWRSIKTADMEEMYLFHIWGQRWYQKEFAQEMTFNISSSSRDPEVCLDLRPGTNYNVSLRALSSELPVVISLTTQITEPPLPEVEFFTVHRGPLPRLRLRKAKEKNGPISSYQVLVLPLALQSTFSCDSEGASSFFSNASDADGYVAAELLAKDVPDDAMEIPIGDRLYYGEYYNAPLKRGSDYCIILRITSEWNKIRHSCCCRWRVLDWVPWLL

SEQ ID NO: 12985 - protein, 629 aa, Homo Sapiens
MTAEGPSPPARWHRRLPGLWAAALLLLGLPRLSVRADGKFFVLESQNGSQGLQLEAARLSCKSRGAHLASADELRRVVQDCSFAVCTTGWLADGTLGTTVCSKGSGEQQIMRAVDVRIESNPVPGGTYSALCIKDEEKPCGDPPSFPHTILQGRTGLEMGDELLYVCAPGHIMGHRETAFTLLCNSCGEWYGLVQACGKDEAEAHIDYEDNFPDDRSVSFRELMEDSRTEADEDRGQGDSSEEAPKQDRLVSISVGRENIARDKVFVPTTGLPGAGSSVPADSPGSRLLQKHLFWFPAEAFHKPGLEKEVDDDTKKQFSAGDNHSGVKLVPGEPETKVIYGNTDGPSGPFVGKNDSKAGDPVVSSSDESWLDGYPVTEGAWRKTEAEEEEDGDRGDGSVGLDENVLVTPDQPILVEVKKPKSSTLTPSEGMTHSSVLPSQMLDVEALALRPVNASETEGIGDGDLTKYQSTLPWRFITEESPMATLSYELTSSTLEILTVNTVKQTPNHIPSTIMATTQPPVETTVPEIQDSFPYLLSEDFFGQEGPGPGASEELHPTLESCVGDGCPGLSRGPVIATIVTVLCLLLLLAGVGMVWGYRKCQHKSSVYKLNVGQRQARHYHQQIEMEKV

SEQ ID NO: 12986 - protein, 243 aa, Homo Sapiens
  misc_feature (1)..(1): Xaa can be any naturally occurring amino acid
XAEGPSPPARWHRRLPGLWAAALLLLGLPRLSVRADGKFFVLESQNGSQGLQLEAARLSCKSRGAHLASADELRRVVQDCSFAVCTTGWLADGTLGTTVCSKGSGEQQIMRAVDVRIESNPVPGGTYSALCIKDEDEAEAHIDYEDNFPDDRSVSFRELMEDSRTEADEDRGQGDSSEEAPKQDRLVSISVGRENIARDKVFVPTTGLPGAGSSVPADSPGSRLLQKHLFWFPAEAFHKPGLE

SEQ ID NO: 12987 - protein, 3571 aa, Homo Sapiens
MWPRLAFCCWGLALVSGWATFQQMSPSRNFSFRLFPETAPGAPGSIPAPPAPGDEAAGSRVERLGQAFRRRVRLLRELSERLELVFLVDDSSSVGEVNFRSELMFVRKLLSDFPVVPTATRVAIVTFSSKNYVVPRVDYISTRRARQHKCALLLQEIPAISYRGGGTYTKGAFQQAAQILLHARENSTKVVFLITDGYSNGGDPRPIAASLRDSGVEIFTFGIWQGNIRELNDMASTPKEEHCYLLHSFEEFEALARRALHEDLPSGSFIQDDMVHCSYLCDEGKDCCDRMGSCKCGTHTGHFECICEKGYYGKGLQYECTACPSGTYKPEGSPGGISSCIPCPDENHTSPPGSTSPEDCVCREGYRASGQTCELVHCPALKPPENGYFIQNTCNNHFNAACGVRCHPGFDLVGSSIILCLPNGLWSGSESYCRVRTCPHLRQPKHGHISCSTREMLYKTTCLVACDEGYRLEGSDKLTCQGNSQWDGPEPRCVERHCSTFQMPKDVIISPHNCGKQPAKFGTICYVSCRQGFILSGVKEMLRCTTSGKWNVGVQAAVCKDVEAPQINCPKDIEAKTLEQQDSANVTWQIPTAKDNSGEKVSVHVHPAFTPPYLFPIGDVAIVYTATDLSGNQASCIFHIKVIDAEPPVIDWCRSPPPVQVSEKVHAASWDEPQFSDNSGAELVITRSHTQGDLFPQGETIVQYTATDPSGNNRTCDIHIVIKGSPCEIPFTPVNGDFICTPDNTGVNCTLTCLEGYDFTEGSTDKYYCAYEDGVWKPTYTTEWPDCAKKRFANHGFKSFEMFYKAARCDDTDLMKKFSEAFETTLGKMVPSFCSDAEDIDCRLEENLTKKYCLEYNYDYENGFAIGPGGWGAANRLDYSYDDFLDTVQETATSIGNAKSSRIKRSAPLSDYKIKLIFNITASVPLPDERNDTLEWENQQRLLQTLETITNKLKRTLNKDPMYSFQLASEILIADSNSLETKKASPFCRPGSVLRGRMCVNCPLGTYYNLEHFTCESCRIGSYQDEEGQLECKLCPSGMYTEYIHSRNISDCKAQCKQGTYSYSGLETCESCPLGTYQPKFGSRSCLSCPENTSTVKRGAVNISACGVPCPEGKFSRSGLMPCHPCPRDYYQPNAGKAFCLACPFYGTTPFAGSRSITECSSFSSTFSAAEESVVPPASLGHIKKRHEISSQVFHECFFNPCHNSGTCQQLGRGYVCLCPLGYTGLKCETDIDECSPLPCLNNGVCKDLVGEFICECPSGYTGQRCEENINECSSSPCLNKGICVDGVAGYRCTCVKGFVGLHCETEVNECQSNPCLNNAVCEDQVGGFLCKCPPGFLGTRCGKNVDECLSQPCKNGATCKDGANSFRCLCAAGFTGSHCELNINECQSNPCRNQATCVDELNSYSCKCQPGFSGKRCETEQSTGFNLDFEVSGIYGYVMLDGMLPSLHALTCTFWMKSSDDMNYGTPISYAVDNGSDNTLLLTDYNGWVLYVNGREKITNCPSVNDGRWHHIAITWTSANGIWKVYIDGKLSDGGAGLSVGLPIPGGGALVLGQEQDKKGEGFSPAESFVGSISQLNLWDYVLSPQQVKSLATSCPEELSKGNVLAWPDFLSGIVGKVKIDSKSIFCSDCPRLGGSVPHLRTASEDLKPGSKVNLFCDPGFQLVGNPVQYCLNQGQWTQPLPHCERISCGVPPPLENGFHSADDFYAGSTVTYQCNNGYYLLGDSRMFCTDNGSWNGVSPSCLDVDECAVGSDCSEHASCLNVDGSYICSCVPPYTGDGKNCAEPIKCKAPGNPENGHSSGEIYTVGAEVTFSCQEGYQLMGVTKITCLESGEWNHLIPYCKAVSCGKPAIPENGCIEELAFTFGSKVTYRCNKGYTLAGDKESSCLANSSWSHSPPVCEPVKCSSPENINNGKYILSGLTYLSTASYSCDTGYSLQGPSIIECTASGIWDRAPPACHLVFCGEPPAIKDAVITGNNFTFRNTVTYTCKEGYTLAGLDTIECLADGKWSRSDQQCLAVSCDEPPIVDHASPETAHRLFGDIAFYYCSDGYSLADNSQLLCNAQGKWVPPEGQDMPRCIAHFCEKPPSVSYSILESVSKAKFAAGSVVSFKCMEGFVLNTSAKIECMRGGQWNPSPMSIQCIPVRCGEPPSIMNGYASGSNYSFGAMVAYSCNKGFYIKGEKKSTCEATGQWSSPIPTCHPVSCGEPPKVENGFLEHTTGRIFESEVRYQCNPGYKSVGSPVFVCQANRHWHSESPLMCVPLDCGKPPPIQNGFMKGENFEVGSKVQFFCNEGYELVGDSSWTCQKSGKWNKKSNPKCMPAKCPEPPLLENQLVLKELTTEVGVVTFSCKEGHVLQGPSVLKCLPSQQWNDSFPVCKIVLCTPPPLISFGVPIPSSALHFGSTVKYSCVGGFFLRGNSTTLCQPDGTWSSPLPECVPVECPQPEEIPNGIIDVQGLAYLSTALYTCKPGFELVGNTTTLCGENGHWLGGKPTCKAIECLKPKEILNGKFSYTDLHYGQTVTYSCNRGFRLEGPSALTCLETGDWDVDAPSCNAIHCDSPQPIENGFVEGADYSYGAIIIYSCFPGFQVAGHAMQTCEESGWSSSIPTCMPIDCGLPPHIDFGDCTKLKDDQGYFEQEDDMMEVPYVTPHPPYHLGAVAKTWENTKESPATHSSNFLYGTMVSYTCNPGYELLGNPVLICQEDGTWNGSAPSCISIECDLPTAPENGFLRFTETSMGSAVQYSCKPGHILAGSDLRLCLENRKWSGASPRCEAISCKKPNPVMNGSIKGSNYTYLSTLYYECDPGYVLNGTERRTCQDDKNWDEDEPICIPVDCSSPPVSANGQVRGDEYTFQKEIEYTCNEGFLLEGARSRVCLANGSWSGATPDCVPVRCATPPQLANGVTEGLDYGFMKEVTFHCHEGYILHGAPKLTCQSDGNWDAEIPLCKPVNCGPPEDLAHGFPNGFSFIHGGHIQYQCFPGYKLHGNSSRRCLSNGSWSGSSPSCLPCRCSTPVIEYGTVNGTDFDCGKAARIQCFKGFKLLGLSEITCEADGQWSSGFPHCEHTSCGSLPMIPNAFISETSSWKENVITYSCRSGYVIQGSSDLICTEKGVWSQPYPVCEPLSCGSPPSVANAVATGEAHTYESEVKLRCLEGYTMDTDTDTFTCQKDGRWFPERISCSPKKCPLPENITHILVHGDDFSVNRQVSVSCAEGYTFEGVNISVCQLDGTWEPPFSDESCSPVSCGKPESPEHGFVVGSKYTFESTIIYQCEPGYELEGNRERVCQENRQWSGGVAICKETRCETPLEFLNGKADIENRTTGPNVVYSCNRGYSLEGPSEAHCTENGTWSHPVPLCKPNPCPVPFVIPENALLSEKEFYVDQNVSIKCREGFLLQGHGIITCNPDETWTQTSAKCEKISCGPPAHVENAIARGVHYQYGDMITYSCYSGYMLEGFLRSVCLENGTWTSPPICRAVCRFPCQNGGICQRPNACSCPEGWMGRLCEEPICILPCLNGGRCVAPYQCDCPPGWTGSRCHTAVCQSPCLNGGKCVRPNRCHCLSSWTGHNCSRKRRTGF

SEQ ID NO: 12988 - protein, 868 aa, Homo Sapiens
MWPRLAFCCWGLALVSGWATFQQMSPSRNFSFRLFPETAPGAPGSIPAPPAPGDEAAGSRVERLGQAFRRRVRLLRELSERLELVFLVDDSSSVGEVNFRSELMFVRKLLSDFPVVPTATRVAIVTFSSKNYVVPRVDYISTRRARQHKCALLLQEIPAISYRGGGTYTKGAFQQAAQILLHARENSTKVVFLITDGYSNGGDPRPIAASLRDSGVEIFTFGIWQGNIRELNDMASTPKEEHCYLLHSFEEFEALARRALHEDLPSGSFIQDDMVHCSYLCDEGKDCCDRMGSCKCGTHTGHFECICEKGYYGKGLQYECTACPSGTYKPEGSPGGISSCIPCPDENHTSPPGSTSPEDCVCREGYRASGQTCELVHCPALKPPENGYFIQNTCNNHFNAACGVRCHPGFDLVGSSIILCLPNGLWSGSESYCRVRTCPHLRQPKHGHISCSTREMLYKTTCLVACDEGYRLEGSDKLTCQGNSQWDGPEPRCVERHCSTFQMPKDVIISPHNCGKQPAKFGTICYVSCRQGFILSGVKEMLRCTTSGKWNVGVQAAVCKDVEAPQINCPKDIEAKTLEQQDSANVTWQIPTAKDNSGEKVSVHVHPAFTPPYLFPIGDVAIVYTATDLSGNQASCIFHIKVIDAEPPVIDWCRSPPPVQVSEKVHAASWDEPQFSDNSGAELVITRSHTQGDLFPQGETIVQYTATDPSGNNRTCDIHIVIKGSPCEIPFTPVNGDFICTPDNTGVNCTLTCLEGYDFTEGSTDKYYCAYEDGVWKPTYTTEWPDCAKKRFANHGFKSFEMFYKAARCDDTDLMKKFSEAFETTLGKMVPSFCSDAEDIDCRLEENLTKKYCLEYNYDYENGFAIGN

SEQ ID NO: 12989 - protein, 3574 aa, Homo Sapiens
MWPRLAFCCWGLALVSGWATFQQMSPSRNFSFRLFPETAPGAPGSIPAPPAPGDEAAGSRVERLGQAFRRRVRLLRELSERLELVFLVDDSSSVGEVNFRSELMFVRKLLSDFPVVPTATRVAIVTFSSKNYVVPRVDYISTRRARQHKCALLLQEIPAISYRGGGTYTKGAFQQAAQILLHARENSTKVVFLITDGYSNGGDPRPIAASLRDSGVEIFTFGIWQGNIRELNDMASTPKEEHCYLLHSFEEFEALARRALHEDLPSGSFIQDDMVHCSYLCDEGKDCCDRMGSCKCGTHTGHFECICEKGYYGKGLQYECTACPSGTYKPEGSPGGISSCIPCPDENHTSPPGSTSPEDCVCREGYRASGQTCELVHCPALKPPENGYFIQNTCNNHFNAACGVRCHPGFDLVGSSIILCLPNGLWSGSESYCRVRTCPHLRQPKHGHISCSTREMLYKTTCLVACDEGYRLEGSDKLTCQGNSQWDGPEPRCVERHCSTFQMPKDVIISPHNCGKQPAKFGTICYVSCRQGFILSGVKEMLRCTTSGKWNVGVQAAVCKDVEAPQINCPKDIEAKTLEQQDSANVTWQIPTAKDNSGEKVSVHVHPAFTPPYLFPIGDVAIVYTATDLSGNQASCIFHIKVIDAEPPVIDWCRSPPPVQVSEKVHAASWDEPQFSDNSGAELVITRSHTQGDLFPQGETIVQYTATDPSGNNRTCDIHIVIKGSPCEIPFTPVNGDFICTPDNTGVNCTLTCLEGYDFTEGSTDKYYCAYEDGVWKPTYTTEWPDCAKKRFANHGFKSFEMFYKAARCDDTDLMKKFSEAFETTLGKMVPSFCSDAEDIDCRLEENLTKKYCLEYNYDYENGFAIGPGGWGAANRLDYSYDDFLDTVQETATSIGNAKSSRIKRSAPLSDYKIKLIFNITASVPLPDERNDTLEWENQQRLLQTLETITNKLKRTLNKDPMYSFQLASEILIADSNSLETKKASPFCRPGSVLRGRMCVNCPLGTYYNLEHFTCESCRIGSYQDEEGQLECKLCPSGMYTEYIHSRNISDCKAQCKQGTYSYSGLETCESCPLGTYQPKFGSRSCLSCPENTSTVKRGAVNISACGVPCPEGKFSRSGLMPCHPCPRDYYQPNAGKAFCLACPFYGTTPFAGSRSITECSSFSSTFSAAEESVVPPASLGHIKKRHEISSQVFHECFFNPCHNSGTCQQLGRGYVCLCPLGYTGLKCETDIDECSPLPCLNNGVCKDLVGEFICECPSGYTGQRCEENINECSSSPCLNKGICVDGVAGYRCTCVKGFVGLHCETEVNECQSNPCLNNAVCEDQVGGFLCKCPPGFLGTRCGKNVDECLSQPCKNGATCKDGANSFRCLCAAGFTGSHCELNINECQSNPCRNQATCVDELNSYSCKCQPGFSGKRCETEQSTGFNLDFEVSGIYGYVMLDGMLPSLHALTCTFWMKSSDDMNYGTPISYAVDNGSDNTLLLTDYNGWVLYVNGREKITNCPSVNDGRWHHIAITWTSANGIWKVYIDGKLSDGGAGLSVGLPIPGMLGGGALVLGQEQDKKGEGFSPAESFVGSISQLNLWDYVLSPQQVKSLATSCPEELSKGNVLAWPDFLSGIVGKVKIDSKSIFCSDCPRLGGSVPHLRTASEDLKPGSKVNLFCDPGFQLVGNPVQYCLNQGQWTQPLPHCERISCGVPPPLENGFHSADDFYAGSTVTYQCNNGYYLLGDSRMFCTDNGSWNGVSPSCLDVDECAVGSDCSEHASCLNVDGSYICSCVPPYTGDGKNCAEPIKCKAPGNPENGHSSGEIYTVGAEVTFSCQEGYQLMGVTKITCLESGEWNHLIPYCKAVSCGKPAIPENGCIEELAFTFGSKVTYRCNKGYTLAGDKESSCLANSSWSHSPPVCEPVKCSSPENINNGKYILSGLTYLSTASYSCDTGYSLQGPSIIECTASGIWDRAPPACHLVFCGEPPAIKDAVITGNNFTFRNTVTYTCKEGYTLAGLDTIECLADGKWSRSDQQCLAVSCDEPPIVDHASPETAHRLFGDIAFYYCSDGYSLADNSQLLCNAQGKWVPPEGQDMPRCIAHFCEKPPSVSYSILESVSKAKFAAGSVVSFKCMEGFVLNTSAKIECMRGGQWNPSPMSIQCIPVRCGEPPSIMNGYASGSNYSFGAMVAYSCNKGFYIKGEKKSTCEATGQWSSPIPTCHPVSCGEPPKVENGFLEHTTGRIFESEVRYQCNPGYKSVGSPVFVCQANRHWHSESPLMCVPLDCGKPPPIQNGFMKGENFEVGSKVQFFCNEGYELVGDSSWTCQKSGKWNKKSNPKCMPAKCPEPPLLENQLVLKELTTEVGVVTFSCKEGHVLQGPSVLKCLPSQQWNDSFPVCKIVLCTPPPLISFGVPIPSSALHFGSTVKYSCVGGFFLRGNSTTLCQPDGTWSSPLPECVPVECPQPEEIPNGIIDVQGLAYLSTALYTCKPGFELVGNTTTLCGENGHWLGGKPTCKAIECLKPKEILNGKFSYTDLHYGQTVTYSCNRGFRLEGPSALTCLETGDWDVDAPSCNAIHCDSPQPIENGFVEGADYSYGAIIIYSCFPGFQVAGHAMQTCEESGWSSSIPTCMPIDCGLPPHIDFGDCTKLKDDQGYFEQEDDMMEVPYVTPHPPYHLGAVAKTWENTKESPATHSSNFLYGTMVSYTCNPGYELLGNPVLICQEDGTWNGSAPSCISIECDLPTAPENGFLRFTETSMGSAVQYSCKPGHILAGSDLRLCLENRKWSGASPRCEAISCKKPNPVMNGSIKGSNYTYLSTLYYECDPGYVLNGTERRTCQDDKNWDEDEPICIPVDCSSPPVSANGQVRGDEYTFQKEIEYTCNEGFLLEGARSRVCLANGSWSGATPDCVPVRCATPPQLANGVTEGLDYGFMKEVTFHCHEGYILHGAPKLTCQSDGNWDAEIPLCKPVNCGPPEDLAHGFPNGFSFIHGGHIQYQCFPGYKLHGNSSRRCLSNGSWSGSSPSCLPCRCSTPVIEYGTVNGTDFDCGKAARIQCFKGFKLLGLSEITCEADGQWSSGFPHCEHTSCGSLPMIPNAFISETSSWKENVITYSCRSGYVIQGSSDLICTEKGVWSQPYPVCEPLSCGSPPSVANAVATGEAHTYESEVKLRCLEGYTMDTDTDTFTCQKDGRWFPERISCSPKKCPLPENITHILVHGDDFSVNRQVSVSCAEGYTFEGVNISVCQLDGTWEPPFSDESCSPVSCGKPESPEHGFVVGSKYTFESTIIYQCEPGYELEGNRERVCQENRQWSGGVAICKETRCETPLEFLNGKADIENRTTGPNVVYSCNRGYSLEGPSEAHCTENGTWSHPVPLCKPNPCPVPFVIPENALLSEKEFYVDQNVSIKCREGFLLQGHGIITCNPDETWTQTSAKCEKISCGPPAHVENAIARGVHYQYGDMITYSCYSGYMLEGFLRSVCLENGTWTSPPICRAVCRFPCQNGGICQRPNACSCPEGWMGRLCEEPICILPCLNGGRCVAPYQCDCPPGWTGSRCHTAVCQSPCLNGGKCVRPNRCHCLSSWTGHNCSRKRRTGF

SEQ ID NO: 12990 - protein, 229 aa, Homo Sapiens
MPAAGPPLLLLGTPGSGKTALLFAAALEAAGEGQGPVLFLTRRPLQSMPRGTGTTLDPMRLQKIRFQYPPSTRELFRLLCSAHEAPGPAPSLLLLDGLEEYLAEDPEPQEAAYLIALLLDTAAHFSHRLGPGRDCGLMVALQTQEEAGSGDVLHLALLQRYFPAQCWLQPDAPGPGEHGLRACLEPGGLGPRTEWWVTFRSDGEMMIAPWPTQAGDPSSGKGSSSGGQP

SEQ ID NO: 12991 - protein, 352 aa, Homo Sapiens
MFRGLSSWLGLQQPVAGGGQPNGDAPPEQPSETVAESAEEELQQAGDQELLHQAKDFGNYLFNFASAATKKITESVAETAQTIKKSVEEGKIDGIIDKTIIGDFQKEQKKFVEEQHTKKSEAAVPPWVDTNDEETIQQQILALSADKRNFLRDPPAGVQFNFDFDQMYPVALVMLQEDELLSKMRFALVPKLVKEEVFWRNYFYRVSLIKQSAQLTALAAQQQAAGKEEKSNGREQDLPLAEAVRPKTPPVVIKSQLKTQEDEEEISTSPGVSEFVSDAFDACNLNQEDLRKEMEQLVLDKKQEETAVLEEDSADWEKELQQELQEYEVVTESEKRDENWDKEIEKMLQEEN

SEQ ID NO: 12992 - protein, 134 aa, Homo Sapiens
MSPLRPLLLALALASVPCAQGACPASADLKHSDGTRTCAKLYDKSDPYYENCCGGAELSLESGADLPYLPSNWANTASSLVVAPRCELTVWSRQGKAGKTHKFSAGTYPRLEEYRRGILGDWSNAISALYCRCS

SEQ ID NO: 12993 - protein, 111 aa, Homo Sapiens
MKILVALAVFFLVSTQLFAEEIGANDDLNYWSDWYDSDQIKEELPEPFEHLLQRIARRPKPQQFFGLMGKRDADSSIEKQVALLKALYGHGQISHKMAYERSAMQNYERRR

SEQ ID NO: 12994 - protein, 129 aa, Homo Sapiens
MKILVALAVFFLVSTQLFAEEIGANDDLNYWSDWYDSDQIKEELPEPFEHLLQRIARRPKPQQFFGLMGKRDADSSIEKQVALLKALYGHGQISHKRHKTDSFVGLMGKRALNSVAYERSAMQNYERRR

SEQ ID NO: 12995 - protein, 114 aa, Homo Sapiens
MKILVALAVFFLVSTQLFAEEIGANDDLNYWSDWYDSDQIKEELPEPFEHLLQRIARRPKPQQFFGLMGKRDAGHGQISHKRHKTDSFVGLMGKRALNSVAYERSAMQNYERRR

SEQ ID NO: 12996 - protein, 103 aa, Homo Sapiens
MRIMLLFTAILAFSLAQSFGAVCKEPQEEVVPGGGRSKRDPDLYQLLQRLFKSHSSLEGLLKALSQASTDPKESTSPEKHSPTDVNQENVPSFGILKYPPRAE

SEQ ID NO: 12997 - protein, 103 aa, Homo Sapiens; identical to SEQ ID NO: 12996

SEQ ID NO: 12998 - protein, 103 aa, Homo Sapiens; identical to SEQ ID NO: 12996

SEQ ID NO: 12999 - protein, 121 aa, Homo Sapiens
MRIMLLFTAILAFSLAQSFGAVCKEPQEEVVPGGGRSKRDPDLYQLLQRLFKSHSSLEGLLKALSQASTDPKESTSPEKRDMHDFFVGLMGKRSVQPDSPTDVNQENVPSFGILKYPPRAE

SEQ ID NO: 13000 - protein, 121 aa, Homo Sapiens; identical to SEQ ID NO: 12999

SEQ ID NO: 13001 - protein, 121 aa, Homo Sapiens; identical to SEQ ID NO: 12999

SEQ ID NO: 13002 - protein, 121 aa, Homo Sapiens; identical to SEQ ID NO: 12999

SEQ ID NO: 13003 - protein, 135 aa, Homo Sapiens
MRIMLLFTAILAFSLAQSFGAVCKEPQEEVVPGGGRSKRDPDLYQLLQRLFKSHSSLEGLLKALSQASTDPKESTSPEKRDMHDFFVGLMGKRSVQPEGKTGPFLPSVRVPRPLHPNQLGSTGKSSLGTEEQRPL

SEQ ID NO: 13004 - protein, 135 aa, Homo Sapiens; identical to SEQ ID NO: 13003

SEQ ID NO: 13005 - protein, 135 aa, Homo Sapiens; identical to SEQ ID NO: 13003

SEQ ID NO: 13006 - protein, 96 aa, Homo Sapiens
MLPCLALLLLMELSVCTVAGDGGEEQTLSTEAETWEGAGPSIQLQLQEVKTGKASQFFGLMGKRVGAYQLEHTFQGLLGKRSLFTEGREDEAQGSE

SEQ ID NO: 13007 - protein, 76 aa, Homo Sapiens
MLPCLALLLLMELSVCTVAGDGGEEQTLSTEAETWEGAGPSIQLQLQEVKTGKASQFFGLMGKRVGGREDEAQGSE

SEQ ID NO: 13008 - protein, 107 aa, Homo Sapiens
MLPCLALLLLMELSVCTVAGDGGEEQTLSTEAETWEGAGPSIQLQLQEVKTGKASQFFGLMGKRVGGRPLIQPRRKKAYQLEHTFQGLLGKRSLFTEGREDEAQGSE

SEQ ID NO: 13009 - protein, 87 aa, Homo Sapiens
MLPCLALLLLMELSVCTVAGDGGEEQTLSTEAETWEGAGPSIQLQLQEVKTGKASQFFGLMGKRVGGRPLIQPRRKKGREDEAQGSE

SEQ ID NO: 13010 - protein, 113 aa, Homo Sapiens
MLPCLALLLLMELSVCTVAGDGGEEQTLSTEAETWVIVALEEGAGPSIQLQLQEVKTGKASQFFGLMGKRVGGRPLIQPRRKKAYQLEHTFQGLLGKRSLFTEGREDEAQGSE

SEQ ID NO: 13011 - protein, 53 aa, Homo Sapiens
MLPCLALLLLMELSVCTVAGDGGEEQTLSTEAETWVIVALEVLLGRGSDEGRG

SEQ ID NO: 13012 - protein, 187 aa, Homo Sapiens
MANRGPAYGLSREVQQKIEKQYDADLEQILIQWITTQCRKDVGRPQPGRENFQNWLKDGTVLCELINALYPEGQAPVKKIQASTMAFKQMEQISQFLQAAERYGINTTDIFQTVDLWEGKNMACVQRTLMNLGGLAVARDDGLFSGDPNWFPKKSKENPRNFSDNQLQEGKNVIGLQMGTNRGASQA

SEQ ID NO: 13013 - protein, 199 aa, Homo Sapiens
MANRGPAYGLSREVQQKIEKQYDADLEQILIQWITTQCRKDVGRPQPGRENFQNWLKDGTVLCELINALYPEGQAPVKKIQASTMAFKQMEQISQFLQAAERYGINTTDIFQTVDLWEGKNMACVQRTLMNLGGLAVARDDGLFSGDPNWFPKKSKENPRNFSDNQLQEGKNVIGLQMGTNRGASQAGMTGYGMPRQIL

SEQ ID NO: 13014 - protein, 199 aa, Homo Sapiens; identical to SEQ ID NO: 13013

SEQ ID NO: 13015 - protein, 220 aa, Homo Sapiens
MSAFSLALALVSSPQPPPPIGMANRGPAYGLSREVQQKIEKQYDADLEQILIQWITTQCRKDVGRPQPGRENFQNWLKDGTVLCELINALYPEGQAPVKKIQASTMAFKQMEQISQFLQAAERYGINTTDIFQTVDLWEGKNMACVQRTLMNLGGLAVARDDGLFSGDPNWFPKKSKENPRNFSDNQLQEGKNVIGLQMGTNRGASQAGMTGYGMPRQIL

SEQ ID NO: 13016 - protein, 192 aa, Homo Sapiens
MKSLSLLLAVALDPAGALQAAFRRYPRGAPAPHCEMSRFVPLPASAKWASGLTPAQNCPRALDGAWLMVSISSPVLSLSSLLRPQPEPQQEPVLITMATVVLTVLTHTPAPRVRLGQDALLDLSFAYMPPTSEAASSLAPGPPPFGLEWRRQHLGKGHLLLAATPGLNGQMPAAQEGAVAFAAWDDDEPWGP

SEQ ID NO: 13017 - protein, 156 aa, Homo Sapiens
MKSLSLLLAVALGLATAVSAGPAVIECWFVEDASGKGLAKRPGALLLRQGPGEPPPRPDLDPELYLSVHDPAGALQAAFRRYPRGAPAPHCEMSRFVPLPASAKWASGLTPAQNCPRALDGAWLMVSISSMGHAMPVEFTIPACLPRGAALRSPWR

SEQ ID NO: 13018 - protein, 466 aa, Homo Sapiens
MKSLSLLLAVALGLATAVSAGPAVIECWFVEDASGKGLAKRPGALLLRQGPGEPPPRPDLDPELYLSVHDPAGALQAAFRRYPRGAPAPHCEMSRFVPLPASAKWASGLTPAQNCPRALDGAWLMVSISSPVLSLSSLLRPQPEPQQEPVLITMATVEMGFHHVGQAALELLTSVVLTVLTHTPAPRVRLGQDALLDLSFAYMPPTSEAASSLAPGPPPFGLEWRRQHLGKGHLLLAATPGLNGQMPAAQEGAVAFAAWDDDEPWGPWTGNGTFWLPTVQPFQEGTYLATIHLPYLQGQVTLELAVYKPPKVSLMPATLARAAPGEAPPELLCLVSHFYPSGGLEVEWELRGGPGGRSQKAEGQRWLSALRHHSDGSVSLSGHLQPPPVTTEQHGARYACRIHHPSLPASGRSAEVTLEVAGLSGPSLEDSVGLFLSAFLLLGLFKALGWAAVYLSTCKDSKKKAE

SEQ ID NO: 13019 - protein, 504 aa, Homo Sapiens
MKSLSLLLAVALGLATAVSAGPAVIECWFVEDASGKGLAKRPGALLLRQGPGEPPPRPDLDPELYLSVHDPAGALQAAFRRYPRGAPAPHCEMSRFVPLPASAKWASGLTPAQNCPRALDGAWLMVSISSPVLSLSSLLRPQPEPQQEPVLITMATVVLTVLTHTPAPRVRLGQDALLDLSFAYMPPTSEAASSLAPGPPPFGLEWRRQHLGKGHLLLAATPGLNGQMPAAQEGAVAFAAWDDDEPWGPWTGNGTFWLPTVQPFQEGTYLATIHLPYLQGQVTLELAVYKPPKVSLMPATLARAAPGEAPPELLCLVSHFYPSGGLEVEWELRGGPGGRSQKAEGQRWLSALRHHSDGSVSLSGHLQPPPVTTEQHGARYACRIHHPSLPASGRSAEVTLEVAGLSGPSLEDSVGLFLSAFLLLGLFKALGWAAVYLSTCKDSKKVQCSTSLYLSLVTLSPHPISKPMEGGCWCGRQNLGLEFTLIWVKTWHYILTVGLFEHAT

SEQ ID NO: 13020 - protein, 448 aa, Homo Sapiens
MKSLSLLLAVALGLATAVSAGPAVIECWFVEDASGKGLAKRPGALLLRQGPGEPPPRPDLDPELYLSVHDPAGALQAAFRRYPRGAPAPHCEMSRFVPLPASAKWASGLTPAQNCPRALDGAWLMVSISSPVLSLSSLLRPQPEPQQEPVLITMATVVLTVLTHTPAPRVRLGQDALLDLSFAYMPPTSEAASSLAPGPPPFGLEWRRQHLGKGHLLLAATPGLNGQMPAAQEGAVAFAAWDDDEPWGPWTGNGTFWLPTVQPFQEGTYLATIHLPYLQGQVTLELAVYKPPKVSLMPATLARAAPGEAPPELLCLVSHFYPSGGLEVEWELRGGPGGRSQKAEGQRWLSALRHHSDGSVSLSGHLQPPPVTTEQHGARYACRIHHPSLPASGRSAEVTLEVAGLSGPSLEDSVGLFLSAFLLLGLFKALGWAAVYLSTCKDSKKKAE

SEQ ID NO: 13021 - protein, 361 aa, Homo Sapiens
MKSLSLLLAVALGLATAVSAGPAVIECWFVEDASGKGLAKRPGALLLRQGPGEPPPRPDLDPELYLSVHVVLTVLTHTPAPRVRLGQDALLDLSFAYMPPTSEAASSLAPGPPPFGLEWRRQHLGKGHLLLAATPGLNGQMPAAQEGAVAFAAWDDDEPWGPWTGNGTFWLPTVQPFQEGTYLATIHLPYLQGQVTLELAVYKPPKVSLMPATLARAAPGEAPPELLCLVSHFYPSGGLEVEWELRGGPGGRSQKAEGQRWLSALRHHSDGSVSLSGHLQPPPVTTEQHGARYACRIHHPSLPASGRSAEVTLEVAGLSGPSLEDSVGLFLSAFLLLGLFKALGWAAVYLSTCKDSKKKAE

SEQ ID NO: 13022 - protein, 468 aa, Homo Sapiens
MGTQEGWCLLLCLALSGAAETKPHPAEGQWRAVDVVLDCFLAKDGAHRGALASSEDRARASLVLKQVPVLDDGSLEDFTDFQGGTLAQDDPPIIFEASVDLVQIPQAEALLHADCSGKEVTCEISRYFLQMTETTVKTAAWFMANMQVSGGGPSISLVMKTPRVTKNEALWHPTLNLPLSPQGTVRTAVEFQVMTQTQSLSFLLGSSASLDCGFSMAPGLDLISVEWRLQHKGRGQLVYSWTAGQGQAVRKGATLEPAQLGMARDASLTLPGLTIQDEGTYICQITTSLYRAQQIIQLNIQASPKVRLSLANEALLPTLICDIAGYYPLDVVVTWTREELGGSPAQVSGASFSSLRQSVAGTYSISSSLTAEPGSAGATYTCQVTHISLEEPLGASTQVVPPERRTALGVIFASSLFLLALMFLGLQRRQAPTGLGLLQAERWETTSCADTQSSHLHEDRTARVSQPS

SEQ ID NO: 13023 - protein, 185 aa, Homo Sapiens
MGTQEGWCLLLCLALSGAAETMDLVQIPQAEALLHADCSGKEVTCEISRYFLQMTETTVKTAAWFMANMQVSGGGPSISLVMKTPRVTKNEALWHPTLNLPLSPQGTVRTAVEFQVMTQTQSLSFLLGSSASLDCGFSMAPGLDLISVEWRLQHKGRGRGDLHLPDHHLSVPSSADHPAQHPSFP

SEQ ID NO: 13024 - protein, 96 aa, Homo Sapiens
MDFSSNGKYLATCADDRTIRIWSTKDFLQREHRSMRANVELDHATLVRFSPDCRAFIVWLANGDTLRVFKMTKREDGGYTFTATPEDFPKKHKAPV

SEQ ID NO: 13025 - protein, 43 aa, Homo Sapiens
MELSQMSELMGLSVLLGLLALMATAAVARGWLRAGEERSGRPA

SEQ ID NO: 13026 - protein, 43 aa, Homo Sapiens; identical to SEQ ID NO: 13025

SEQ ID NO: 13027 - protein, 46 aa, Homo Sapiens
MELSQMSELMGLSVLLGLLALMATAAVARGWLRAGEERSGRPACGQ

SEQ ID NO: 13028 - protein, 107 aa, Homo Sapiens
MELSQMSELMGLSVLLGLLALMATAAVARGWLRAGEERSGRPACQKANGFPPDKSSGSKKQKQYQRIRKEKPQQHNFTHRLLAAALKMIAPSASGAPRTSCSESTAA

SEQ ID NO: 13029 - protein, 176 aa, Homo Sapiens
MELSQMSELMGLSVLLGLLALMATAAVARGWLRAGEERSGRPACQKANGFPPDKSSGSKKQKQYQRIRKEKPQQHNFTHRLLAAALKSHSGNISCMDFSSNGKYLATCADDRTIRIWSTKDFLQREHRSMRANVELDHATLSLHRLAGQRGHPPCLQDDQAGGWGLHLHSHPRGLP

SEQ ID NO: 13030 - protein, 447 aa, Homo Sapiens
MELSQMSELMGLSVLLGLLALMATAAVARGWLRAGEERSGRPACQKANGFPPDKSSGSKKQKQYQRIRKEKPQQHNFTHRLLAAALKSHSGNISCMDFSSNGKYLATCADDRTIRIWSTKDFLQREHRSMRANVELDHATLVRFSPDCRAFIVWLANGDTLRVFKMTKREDGGYTFTATPEDFPKKHKAPVIDIGIANTGKFIMTASSDTTVLIWSLKGQVLSTINTNQMNNTHAAVSPCGRFVASCGFTPDVKVWEVCFGKKGEFQEVVRAFELKGHSAAVHSFAFSNDSRRMASVSKDGTWKLWDTDVEYKKKQDPYLLKTGRFEEAAGAAPCRLALSPNAQVLALASGSSIHLYNTRRGEKEECFERVHGECIANLSFDITGRFLASCGDRAVRLFHNTPGHRAMVEEMQGHLKRASNESTRQRLQQQLTQAQETLKSLGALKK

SEQ ID NO: 13031 - protein, 446 aa, Homo Sapiens [sequence omitted]

SEQ ID NO: 13032 - protein, 75 aa, Homo Sapiens
MELSQMSELMGLSVLLGLLALMATAAVARGWLRAGEERSGRPAWPRSFFPVGIGEHLQSFTTCQLCDSIKYLLQK

SEQ ID NO: 13033 - protein, 54 aa, Homo Sapiens
MELSQMSELMGLSVLLGLLALMATAAVARGWLRAGEERSGRPAWSCSVTQDGMQ

SEQ ID NO: 13034 - protein, 64 aa, Homo Sapiens
MGLSFSSGNVSFASRDGDPPCRAKKQMDFHLTNLRDPRSRNNISGFGRRSLNNTTSPTASWLQL

SEQ ID NO: 13035 - protein, 39 aa, Homo Sapiens
MGLSFSSGPRSFFPVGIGEHLQSFTTCQLCDSIKYLLQK

SEQ ID NO: 13036 - protein, 411 aa, Homo Sapiens
MGLSFSSGQKANGFPPDKSSGSKKQKQYQRIRKEKPQQHNFTHRLLAAALKSHSGNISCMDFSSNGKYLATCADDRTIRIWSTKDFLQREHRSMRANVELDHATLVRFSPDCRAFIVWLANGDTLRVFKMTKREDGGYTFTATPEDFPKKHKAPVIDIGIANTGKFIMTASSDTTVLIWSLKGQVLSTINTNQMNNTHAAVSPCGRFVASCGFTPDVKVWEVCFGKKGEFQEVVRAFELKGHSAAVHSFAFSNDSRRMASVSKDGTWKLWDTDVEYKKKQDPYLLKTGRFEEAAGAAPCRLALSPNAQVLALASGSSIHLYNTRRGEKEECFERVHGECIANLSFDITGRFLASCGDRAVRLFHNTPGHRAMVEEMQGHLKRASNESTRQRLQQQLTQAQETLKSLGALKK

SEQ ID NO: 13037 - protein, 385 aa, Homo Sapiens
MAAFLSAGLGILAPSETYPLPTTSSGWEPRLGSPFPSGPCTSSTGAQAVAEPTGQGPKNPRVSRVTVQLEMKPLWEEFNQLGTEMIVTKAGRRMFPPFQVKILGMDSLADYALLMDFIPLDDKRYRYAFHSSAWLVAGKADPATPGRVHFHPDSPAKGAQWMRQIVSFDKLKLTNNLLDDNGHIILNSMHRYQPRFHVVFVDPRKDSERYAQENFKSFIFTETQFTAVTAYQNHRITQLKIASNPFAKGFRESDLDSWPVAPRPLLSVPARSHSSLSPCVLKGATDREKDPNKASASTSKTPAWLHHQLLPPPEVLLAPATYRPVTYQSLYSGAPSHLGIPRTRPAPYPLPNIRADRDQGGLPLPAGLGLLSPTVVCLGPGQDSQ

SEQ ID NO: 13038 - protein, 446 aa, Homo Sapiens
MGKRYMHHPQIQMISTVNLLVIHLLSHQPVCSLALSLCKSYPPHSVSPTDINTSLPPMSSFHRGSTSSSPYVAASHTPPINGSDSILGTRGNAAGSSQTGDALGKALASIYSPDHTSSSFPSNPSTPVGSPSPLTGTSQWPRPGGQAPSSPSYENSLHSLQSRMEDRLDRLDDAIHVLRNHAVGPSTSLPAGHSDIHSLLGPSHNAPIGSLNSNYGGSSLVASSRSASMVGTHREDSVSLNGNHSVLSSTVTTSSTDLNHKTQENYRGGLQSQSGTVVTTEIKTENKEKDENLHEPPSSDDMKSDDESSQKDIKVSSRGRTSSTNEDEDLNPEQKIEREKERRMANNARERLRVRDINEAFKELGRMCQLHLKSEKPQTKLLILHQAVAVILSLEQQVRERNLNPKAACLKRREEEKVSAVSAEPPTTLPGTHPGLSETTNPMGHM

SEQ ID NO: 13039 - protein, 58 aa, Homo Sapiens
MNPQQQRMAAIGTDKELSDLLDFSAMFSPPVNSGKTRPTTLGSSQFSGSGFYRQPSLQ

SEQ ID NO: 13040 - protein, 157 aa, Homo Sapiens
MNPQQQRMAAIGTDKELSDLLDFSAMFSPPVNSGKTRPTTLGSSQFSGSGIDERGGTTSWGTSGQPSPSYDSSRGFTDSPHYSDHLNDSRLGAHEGLSPTPFMNSNLMGKTSERGSFSLYSRDTGLPGCQSSLLRQDLGLGSPAQLSSSGKPGTAYY

SEQ ID NO: 13041 - protein, 682 aa, Homo Sapiens
MNPQQQRMAAIGTDKELSDLLDFSAMFSPPVNSGKTRPTTLGSSQFSGSGIDERGGTTSWGTSGQPSPSYDSSRGFTDSPHYSDHLNDSRLGAHEGLSPTPFMNSNLMGKTSERGSFSLYSRDTGLPGCQSSLLRQDLGLGSPAQLSSSGKPGTAYYSFSATSSRRRPLHDSAALDPLQAKKVRKVPPGLPSSVYAPSPNSDDFNRESPSYPSPKPPTSMFASTFFMQDGTHNSSDLWSSSNGMSQPGFGGILGTSTSHMSQSSSYGNLHSHDRLSYPPHSVSPTDINTSLPPMSSFHRGSTSSSPYVAASHTPPINGSDSILGTRGNAAGSSQTGDALGKALASIYSPDHTSSSFPSNPSTPVGSPSPLTGTSQWPRPGGQAPSSPSYENSLHSLQSRMEDRLDRLDDAIHVLRNHAVGPSTSLPAGHSDIHSLLGPSHNAPIGSLNSNYGGSSLVASSRSASMVGTHREDSVSLNGNHSVLSSTVTTSSTDLNHKTQENYRGGLQSQSGTVVTTEIKTENKEKDENLHEPPSSDDMKSDDESSQKDIKVSSRGRTSSTNEDEDLNPEQKIEREKERRMANNARERLRVRDINEAFKELGRMCQLHLKSEKPQTKLLILHQAVAVILSLEQQVRERNLNPKAACLKRREEEKVSAVSAEPPTTLPGTHPGLSETTNPMGHM

SEQ ID NO: 13042 - protein, 706 aa, Homo Sapiens
MNPQQQRMAAIGTDKELSDLLDFSAMFSPPVNSGKTRPTTLGSSQFSGSGIDERGGTTSWGTSGQPSPSYDSSRGFTDSPHYSDHLNDSRLGAHEGLSPTPFMNSNLMGKTSERGSFSLYSRDTGLPGCQSSLLRQDLGLGSPAQLSSSGKPGTAYYSFSATSSRRRPLHDSAALDPLQAKKVRKVPPGLPSSVYAPSPNSDDFNRESPSYPSPKPPTSMFASTFFMQDGTHNSSDLWSSSNGMSQPGFGGILGTSTSHMSQSSSYGNLHSHDRLSYPPHSVSPTDINTSLPPMSSFHRGSTSSSPYVAASHTPPINGSDSILGTRGNAAGSSQTGDALGKALASIYSPDHTSSSFPSNPSTPVGSPSPLTGTSQWPRPGGQAPSSPSYENSLHSLKNRVEQQLHEHLQDAMSFLKDVCEQSRMEDRLDRLDDAIHVLRNHAVGPSTSLPAGHSDIHSLLGPSHNAPIGSLNSNYGGSSLVASSRSASMVGTHREDSVSLNGNHSVLSSTVTTSSTDLNHKTQENYRGGLQSQSGTVVTTEIKTENKEKDENLHEPPSSDDMKSDDESSQKDIKVSSRGRTSSTNEDEDLNPEQKIEREKERRMANNARERLRVRDINEAFKELGRMCQLHLKSEKPQTKLLILHQAVAVILSLEQQVRERNLNPKAACLKRREEEKVSAVSAEPPTTLPGTHPGLSETTNPMGHM

SEQ ID NO: 13043 - protein, 706 aa, Homo Sapiens; identical to SEQ ID NO: 13042

SEQ ID NO: 13044 - protein, 682 aa, Homo Sapiens; identical to SEQ ID NO: 13041

SEQ ID NO: 13045 - protein, 666 aa, Homo Sapiens
MNPQQQRMAAIGTDKELSDLLDFSAMFSPPVNSGKTRPTTLGSSQFSGSGTIHEMKQLNSKARQKGQRIKGFTDSPHYSDHLNDSRLGAHEGLSPTPFMNSNLMGKTSERGSFSLYSRDTGLPGCQSSLLRQDLGLGSPAQLSSSGKPGTAYYSFSATSSRRRPLHDSAALDPLQAKKVRKVPPGLPSSVYAPSPNSDDFNRESPSYPSPKPPTSMFASTFFMQDGTHNSSDLWSSSNGMSQPGFGGILGTSTSHMSQSSSYGNLHSHDRLSYPPHSVSPTDINTSLPPMSSFHRGSTSSSPYVAASHTPPINGSDSILGTRGNAAGSSQTGDALGKALASIYSPDHTSSSFPSNPSTPVGSPSPLTGTSQWPRPGGQAPSSPSYENSLHSLKNRVEQQLHEHLQDAMSFLKDVCEQSRMEDRLDRLDDAIHVLRNHAVGPSTSLPAGHSDIHSLLGPSHNAPIGSLNSNYGGSSLVASSRSASMVGTHREDSVSLNGNHSVLSSTVTTSSTDLNHKTQENYRGGLQSQSGTVVTTEIKTENKEKDENLHEPPSSDDMKSDDESSQKDIKVSSRGRTSSTNEDEDLNPEQKIEREKERRMANNARERLRVRDINEAFKELGRMCQLHLKSEKPQTKLLILHQAVAVILSLEQQVRERNLNPKAACL

SEQ ID NO: 13046 - protein, 339 aa, Homo Sapiens
MSSNSSTSQWPRPGGQAPSSPSYENSLHSLKNRVEQQLHEHLQDAMSFLKDVCEQSRMEDRLDRLDDAIHVLRNHAVGPSTSLPAGHSDIHSLLGPSHNAPIGSLNSNYGGSSLVASSRSASMVGTHREDSVSLNGNHSVLSSTVTTSSTDLNHKTQENYRGGLQSQSGTVVTTEIKTENKEKDENLHEPPSSDDMKSDDESSQKDIKVSSRGRTSTNEDEDLNPEQKIEREKERRMANNARERLRVRDINEAFKELGRMCQLHLKSEKPQTKLLILHQAVAVILSLEQQVRERNLNPKAACLKRREEEKVSAVSAEPPTTLPGTHPGLSETTNPMGHM

SEQ ID NO: 13047 - protein, 316 aa, Homo Sapiens
MSSNSSTSQWPRPGGQAPSSPSYENSLHSLQSRMEDRLDRLDDAIHVLRNHAVGPSTSLPAGHSDIHSLLGPSHNAPIGSLNSNYGGSSLVASSRSASMVGTHREDSVSLNGNHSVLSSTVTTSSTDLNHKTQENYRGGLQSQSGTVVTTEIKTENKEKDENLHEPPSSDDMKSDDESSQKDIKVSSRGRTSSTNEDEDLNPEQKIEREKERRMANNARERLRVRDINEAFKELGRMCQLHLKSEKPQTKLLILHQAVAVILSLEQQVRERNLNPKAACLKRREEEKVSAVSAEPPTTLPGTHPGLSETTNPMGHM

SEQ ID NO: 13048 - protein, 536 aa, Homo Sapiens
MYCAYPVPGMGSNSLMYYYNGKTVYAPSPNSDDFNRESPSYPSPKPPTSMFASTFFMQDGTHNSSDLWSSSNGMSQPGFGGILGTSTSHMSQSSSYGNLHSHDRLSYPPHSVSPTDINTSLPPMSSFHRGSTSSSPYVAASHTPPINGSDSILGTRGNAAGSSQTGDALGKALASIYSPDHTSSSFPSNPSTPVGSPSPLTGTSQWPRPGGQAPSSPSYENSLHSLKNRVEQQLHEHLQDAMSFLKDVCEQSRMEDRLDRLDDAIHVLRNHAVGPSTSLPAGHSDIHSLLGPSHNAPIGSLNSNYGGSSLVASSRSASMVGTHREDSVSLNGNHSVLSSTVTTSSTDLNHKTQENYRGGLQSQSGTVVTTEIKTENKEKDENLHEPPSSDDMKSDDESSQKDIKVSSRGRTSSTNEDEDLNPEQKIEREKERRMANNARERLRVRDINEAFKELGRMCQLHLKSEKPQTKLLILHQAVAVILSLEQQVRERNLNPKAACLKRREEEKVSAVSAEPPTTLPGTHPGLSETTNPMGHM

SEQ ID NO: 13049 - protein, 512 aa, Homo Sapiens
MYCAYPVPGMGSNSLMYYYNGKTVYAPSPNSDDFNRESPSYPSPKPPTSMFASTFFMQDGTHNSSDLWSSSNGMSQPGFGGILGTSTSHMSQSSSYGNLHSHDRLSYPPHSVSPTDINTSLPPMSSFHRGSTSSSPYVAASHTPPINGSDSILGTRGNAAGSSQTGDALGKALASIYSPDHTSSSFPSNPSTPVGSPSPLTGTSQWPRPGGQAPSSPSYENSLHSLQSRMEDRLDRLDDAIHVLRNHAVGPSTSLPAGHSDIHSLLGPSHNAPIGSLNSNYGGSSLVASSRSASMVGTHREDSVSLNGNHSVLSSTVTTSSTDLNHKTQENYRGGLQSQSGTVVTTEIKTENKEKDENLHEPPSSDDMKSDDESSQKDIKVSSRGRTSSTNEDEDLNPEQKIEREKERRMANNARERLRVRDINEAFKELGRMCQLHLKSEKPQTKLLILHQAVAVILSLEQQVRERNLNPKAACLKRREEEKVSAVSAEPPTTLPGTHPGLSETTNPMGHM

SEQ ID NO: 13050 - protein, 48 aa, Homo Sapiens
  misc_feature (1)..(1): Xaa can be any naturally occurring amino acid
XERNLNPKAACLKRREEEKVSAVSAEPPTTLPGTHPGLSETTNPMGHM

SEQ ID NO: 13051 - protein, 44 aa, Homo Sapiens
  misc_feature (1)..(1): Xaa can be any naturally occurring amino acid
XNPKAACLKRREEEKVSAVSAEPPTTLPGTHPGLSETTNPMGHM

SEQ ID NO: 13052 - protein, 433 aa, Homo Sapiens
MRQSHQLPLVGLLLFSFIPSQLCEICEVSEENYIRLKPLLNTMIQSNYNRGTSAVNVVLSLKLVGIQIQTLMQKMIQQIKYNVKSRLSDVSSGELALIILALGVCRNAEENLIYDYHLIDKLENKFQAEIENMEAHNGTPLTNYYQLSLDVLALCLFNGNYSTAEVVNHFTPENKNYYFGSQFSVDTGAMAVLALTCVKKSLINGQIKADEGSLKNISIYTKSLVEKILSEKKENGLIGNTFSTGEAMQALFVSSDYYNENDWNCQQTLNTVLTEISQGAFSNPNAAAQVLPALMGKTFLDINKDSSCVSASGNFNISADEPITVTPPDSQSYISVNYSVRINETYFTNVTVLNGSVFLSVMEKAQKMNDTIFGFTMEERSWGPYITCIQGLCANNNDRTYWELLSGGEPLSQGAGSYVVRNGENLEVRWSKY

SEQ ID NO: 13053 - protein, 402 aa, Homo Sapiens
MDSHLVEKLGQHLLPWMDRLSLEHLNPSIYVGLRLSSLQAGTKEDLYLHSLKLGYQQCLLGSAFSEDDGDCQGKPSMGQLALYLLALRANCEFVRGHKGDRLVSQLKWFLEDEKRAIGHDHKGHPHTSYYQYGLGILALCLHQKRVHDSVVDKLLYAVEPFHQGHHSVDTAAMAGLAFTCLKRSNFNPGRRQRITMAIRTVREEILKAQTPEGHFGNVYSTPLALQFLMTSPMRGAELGTACLKARVALLASLQDGAFQNALMISQLLPVLNHKTYIDLIFPDCLAPRVMLEPAAETIPQTQEIISVTLQVLSLLPPYRQSISVLAGSTVEDVLKKAHELGGFTYETQASLSGPYLTSVMGKAAGEREFWQLLRDPNTPLLQGIADYRPKDGETIELRLVSW

SEQ ID NO: 13054 - protein, 423 aa, Homo Sapiens
MRHLGAFLFLLGVLGALTEMCEIPEMDSHLVEKLGQHLLPWMDRLSLEHLNPSIYVGLRLSSLQAGTKEDLYLHSLKLGYQQCLLGEDDGDCQGKPSMGQLALYLLALRANCEFVRGHKGDRLVSQLKWFLEDEKRAIGHDHKGHPHTSYYQYGLGILALCLHQKRVHDSVVDKLLYAVEPFHQGHHSVDTAAMAGLAFTCLKRSNFNPGRRQRITMAIRTVREEILKAQTPEGHFGNVYSTPLALQFLMTSPMRGAELGTACLKARVALLASLQDGAFQNALMISQLLPVLNHKTYIDLIFPDCLAPRVMLEPAAETIPQTQEIISVTLQVLSLLPPYRQSISVLAGSTVEDVLKKAHELGGFTYETQASLSGPYLTSVMGKAAGEREFWQLLRDPNTPLLQGIADYRPKDGETIELRLVSW

SEQ ID NO: 13055 - protein, 427 aa, Homo Sapiens
MRHLGAFLFLLGVLGALTEMCEIPEMDSHLVEKLGQHLLPWMDRLSLEHLNPSIYVGLRLSSLQAGTKEDLYLHSLKLGYQQCLLGSAFSEDDGDCQGKPSMGQLALYLLALRANCEFVRGHKGDRLVSQLKWFLEDEKRAIGHDHKGHPHTSYYQYGLGILALCLHQKRVHDSVVDKLLYAVEPFHQGHHSVDTAAMAGLAFTCLKRSNFNPGRRQRITMAIRTVREEILKAQTPEGHFGNVYSTPLALQFLMTSPMRGAELGTACLKARVALLASLQDGAFQNALMISQLLPVLNHKTYIDLIFPDCLAPRVMLEPAAETIPQTQEIISVTLQVLSLLPPYRQSISVLAGSTVEDVLKKAHELGGFTYETQASLSGPYLTSVMGKAAGEREFWQLLRDPNTPLLQGIADYRPKDGETIELRLVSW

SEQ ID NO: 13056 - protein, 400 aa, Homo Sapiens
MRHLGAFLFLLGVLGALTEMCEIPEMDSHLVEKLGQHLLPWMDRLSLEHLNPSIYVGLRLSSLQAGTKEDLYLHSLKLGYQQCLLGSAFSEDDGDCQGKPSMGQLALYLLALRANWHDHKGHPHTSYYQYGLGILALCLHQKRVHDSVVDKLLYAVEPFHQGHHSVDTAAMAGLAFTCLKRSNFNPGRRQRITMAIRTVREEILKAQTPEGHFGNVYSTPLALQFLMTSPMRGAELGTACLKARVALLASLQDGAFQNALMISQLLPVLNHKTYIDLIFPDCLAPRVMLEPAAETIPQTQEIISVTLQVLSLLPPYRQSISVLAGSTVEDVLKKAHELGGFTYETQASLSGPYLTSVMGKAAGEREFWQLLRDPNTPLLQGIADYRPKDGETIELRLVSW

SEQ ID NO: 13057 - protein, 94 aa, Homo Sapiens
DTDVLQPTLVNAGHFSLCVNVVLETDWSSPVSARSTEGEEPAVGPGLPRLRGPFWKFPGPGHAGLGAHPLHHPVIQQEGFLPAPRGFGYRSEVD

SEQ ID NO: 13058 - protein, 483 aa, Homo Sapiens [sequence omitted]

SEQ ID NO: 13059 - protein, 73 aa, Homo Sapiens
MKGRFLFPLRLLLWMCLHLQRQASELHQPSMPGCPLTSSSRLFDNAQMHQFLNIHVKFENCTFGEIKFYIQLA

SEQ ID NO: 13060 - protein, 88 aa, Homo Sapiens
MRPRGLPPLLVVLLGCWASVSAQTDATPAVTTEGLNSTEAALATFGTFPSTRPPGTPRAPGPSSGPRPTPVTDGATASFVVKKQSSIH

SEQ ID NO: 13061 - protein, 88 aa, Homo Sapiens; identical to SEQ ID NO: 13060

SEQ ID NO: 13062 - protein, 75 aa, Homo Sapiens
MRPRGLPPLLVVLLGCWASVSAQTDATPAVTTEGLNSTEAALATFGTFPSTRPPGTPRAPGPSSGPRPTPVTDGG

SEQ ID NO: 13063 - protein, 100 aa, Homo Sapiens
MRPRGLPPLLVVLLGCWASVSAQTDATPAVTTEGLNSTEAALATFGTFPSTRPPGTPRAPGPSSGPRPTPVTDGGYHVPAPGVHSDPTSRGQPRCCSLCL

SEQ ID NO: 13064 - protein, 100 aa, Homo Sapiens; identical to SEQ ID NO: 13063

SEQ ID NO: 13065 - protein, 100 aa, Homo Sapiens; identical to SEQ ID NO: 13063

SEQ ID NO: 13066 - protein, 106 aa, Homo Sapiens
MRPRGLPPLLVVLLGCWASVSAQTDATPAVTTEGLNSTEAALATFGTFPSTRPPGTPRAPGPSSGPRPTPVTDGHATCRYRSRRLTVSGELDGKLQVASGSVGGEE

SEQ ID NO: 13067 - protein, 83 aa, Homo Sapiens
MRPRGLPPLLVVLLGCWASVSAQTDATPAVTTEGLNSTEAALATFGTFPSTRPPGTPRAPGPSSGPRPTPVTDGSHSVTQAGV

SEQ ID NO: 13068 - protein, 162 aa, Homo Sapiens
MRPRGLPPLLVVLLGCWASVSAQTDATPAVTTEGLNSTEAALATFGTFPSTRPPGTPRAPGPSSGPRPTPVTDVAVLCVCDLSPAQCDINCCCDPDCSSVDFSVFSACSVPVVTGDSQFCSQKAVIYSLNFTANPPQRVFELVDQINPSIFCIHITNCRCSV

SEQ ID NO: 13069 - protein, 179 aa, Homo Sapiens
MRPRGLPPLLVVLLGCWASVSAQTDATPAVTTEGLNSTEAALATFGTFPSTRPPGTPRAPGPSSGPRPTPVTDVAVLCVCDLSPAQCDINCCCDPDCSSVDFSVFSACSVPVVTGDSQFCSQKAVIYSLNFTANPPQRVFELVDQINPSIFCIHITNSHFTPGLSRWLCESRSRILSFP

SEQ ID NO: 13070 - protein, 245 aa, Homo Sapiens
MRPRGLPPLLVVLLGCWASVSAQTDATPAVTTEGLNSTEAALATFGTFPSTRPPGTPRAPGPSSGPRPTPVTDVAVLCVCDLSPAQCDINCCCDPDCSSVDFSVFSACSVPVVTGDSQFCSQKAVIYSLNFTANPPQRVFELVDQINPSIFCIHITNYKPALSFINPEVPDENNFDTLMKTSDGFTLNAESYVSFTTKLDIPTAAKYEVSLNLIDSFHPITNIFPCKLIFKVTRKTGFLETELIL

SEQ ID NO: 13071 - protein, 592 aa, Homo Sapiens
MRPRGLPPLLVVLLGCWASVSAQTDATPAVTTEGLNSTEAALATFGTFPSTRPPGTPRAPGPSSGPRPTPVTDVAVLCVCDLSPAQCDINCCCDPDCSSVDFSVFSACSVPVVTGDSQFCSQKAVIYSLNFTANPPQRVFELVDQINPSIFCIHITNYKPALSFINPEVPDENNFDTLMKTSDGFTLNAESYVSFTTKLDIPTAAKYEYGVPLQTSDSFLRFPSSLTSSLCTDNNPAAFLVNQAVKCTRKINLEQCEEIEALSMAFYSSPEILRVPDSRKKVPITVQSIVIQSLNKTLTRREDTDVLQPTLVNAGHFSLCVNVVLEVKYSLTYTDAGEVTKADLSFVLGTVSSVVVPLQQKFEIHFLQENTQPVPLSGNPGYVVGLPLAAGFQPHKGSGIIQTTNRYGQLTILHSTTEQDCLALEGVRTPVLFGYTMQSGCKLRLTGALPCQLVAQKVKSLLWGQGFPDYVAPFGNSQAQDMLDWVPIHFITQSFNRKHFVLQDSCQLPGALVIEVKWTKYGSLLNPQAKIVNVTANLISSSFPEANSGNERTILISTAVTFVDVSAPAEAGFRAPPAINARLPFNFFFPFV

SEQ ID NO: 13072 - protein, 587 aa, Homo Sapiens
MRPRGLPPLLVVLLGCWASVSAQTDATPAVTTEGLNSTEAALATFGTFPSTRPPGTPRAPGPSSGPRPTPVTDVAVLCVCDLSPAQCDINCCCDPDCSSVDFSVFSACSVPVVTGDSQFCSQKAVIYSLNFTANPPQRVFELVDQINPSIFCIHITNYKPALSFINPEVPDENNFDTLMKTSDGFTLNAESYVSFTTKLDIPTAAKYEYGVPLQTSDSFLRFPSSLTSSLCTDNNPAAFLVNQAVKCTRKINLEQCEEIEALSMAFYSSPEILRVPDSRKKVPITVQSIVIQSLNKTLTRREDTDVLQPTLVNAGHFSLCVNVVLEVKYSLTYTDAGEVTKADLSFVLGTVSSVVVPLQQKFEIHFLQENTQPVPLSGNPGYVVGLPLAAGFQPHKGSGIIQTTNRYGQLTILHSTTEQDCLALEGVRTPVLFGYTMQSGCKLRLTGALPCQLVAQKVKSLLWGQGFPDYVAPFGNSQAQDMLDWVPIHFITQSFNRKDSCQLPGALVIEVKWTKYGSLLNPQAKIVNVTANLISSSFPEANSGNERTILISTAVTFVDVSAPAEAGFRAPPAINARLPFNFFFPFV

SEQ ID NO: 13073 - protein, 573 aa, Homo Sapiens
MRPRGLPPLLVVLLGCWASVSAQTDATPAVTTEGLNSTEAALATFGTFPSTRPPGTPRAPGPSSGPRPTPVTDVAVLCVCDLSPAQCDINCCCDPDCSSVDFSVFSACSVPVVTGDSQFCSQKAVIYSLNFTANPPQRVFELVDQINPSIFCIHITNYKPALSFINPEVPDENNFDTLMKTSDGFTLNAESYVSFTTKLDIPTAAKYEYGVPLQTSDSFLRFPSSLTSSLCTDNNPAGQAYWFTPVIPALWEAEARGSLEVPDSRKKVPITVQSIVIQSLNKTLTRREDTDVLQPTLVNAGHFSLCVNVVLEVKYSLTYTDAGEVTKADLSFVLGTVSSVVVPLQQKFEIHFLQENTQPVPLSGNPGYVVGLPLAAGFQPHKGSGIIQTTNRYGQLTILHSTTEQDCLALEGVRTPVLFGYTMQSGCKLRLTGALPCQLVAQKVKSLLWGQGFPDYVAPFGNSQAQDMLDWVPIHFITQSFNRKDSCQLPGALVIEVKWTKYGSLLNPQAKIVNVTANLISSSFPEANSGNERTILISTAVTFVDVSAPAEAGFRAPPAINARLPFNFFFPFV

SEQ ID NO: 13074 - protein, 263 aa, Homo Sapiens
MRPRGLPPLLVVLLGCWASVSAQTDATPAVTTEGLNSTEAALATFGTFPSTRPPGTPRAPGPSSGPRPTPVTDVAVLCVCDLSPAQCDINCCCDPDCSSVDFSVFSACSVPVVTGDSQFCSQKAVIYSLNFTANPPQRVFELVDQINPSIFCIHITNYKPALSFINPEVPDENNFDTLMKTSDGFTLNAESYVSFTTKLDIPTAAKYEYGVPLQTSDSFLRFPSSLTSSLCTDNNPAGQAYWFTPVIPALWEAEARGSLERFW

SEQ ID NO: 13075 - protein, 573 aa, Homo Sapiens [sequence omitted]

SEQ ID NO: 13076 - protein, 625 aa, Homo Sapiens
MRLETAEAYVGPGGPECPMRTPQLALLQVFFLVFPDGVRPQPSSSPSGAVPTSLELQRGTDGGTLQSPSEATATRPAVPGLPTVVPTLVTPSAPGNRTVDLFPVLPICVCDLTPGACDINCCCDRDCYLLHPRTVFSFCLPGSVRSSSWVCVDNSVIFRSNSPFPSRVFMDSNGIRQFCVHVNNSNLNYFQKLQKVNATNFQALAAEFGGESFTSTFQTQSPPSFYRAGDPILTYFPKWSVISLLRQPAGVGAGGLCAESNPAGFLESKSTTCTRFFKNLASSCTLDSALNAASYYNFTVLKVPRSMTDPQNMEFQVPVILTSQANAPLLAGNTCQNVVSQVTYEIETNGTFGIQKVSVSLGQTNLTVEPGASLQQHFILRFRAFQQSTAASLTSPRSGNPGYIVGKPLLALTDDISYSMTLLQSQGNGSCSVKRHEVQFGVNAISGCKLRLKKADCSHLQQEIYQTLHGRPRPEYVAIFGNADPAQKGGWTRILNRHCSISAINCTSCCLIPVSLEIQVLWAYVGLLSNPQAHVSGVRFLYQCQSIQDSQQVTEVSLTTLVNFVDITQKPQPPRGQPKMDWKWPFDFFPFKVAFSRGVFSQKCSVSPILILCLLLLGVLNLETM

SEQ ID NO: 13077 - protein, 459 aa, Homo Sapiens
MRTPQLALLQVFFLVFPDGVRPQPSSSPSGAVPTSLELQRGTDGGTLQSPSEATATRPAVPGLPTVVPTLVTPSAPGNRTVDLFPVLPICVCDLTPGACDINCCCDRDCYLLHPRTVFSFCLPGSVRSSSWVCVDNSVIFRSNSPFPSRVFMDSNGIRQFCVHVNNCFLESKSTTCTRFFKNLASSCTLDSALNAASYYNFTVLKVPRSMTDPQNMEAFQQSTAASLTSPRSGNPGYIVGKPLLALTDDISYSMTLLQSQGNGSCSVKRHEVQFGVNAISGCKLRLKKADCSHLQQEIYQTLHGRPRPEYVAIFGNADPAQKGGWTRILNRHCSISAINCTSCCLIPVSLEIQVLWAYVGLLSNPQAHVSGVRFLYQCQSIQDSQQVTEVSLTTLVNFVDITQKPQPPRGQPKMDWKWPFDFFPFKVAFSRGVFSQKCSVSPILILCLLLLGVLNLETM

SEQ ID NO: 13078 - protein, 443 aa, Homo Sapiens
MRTPQLALLQVFFLVFPDGVRPQPSSSPSGAVPTSLELQRGTDGGTLQSPSEATATRPAVPGLPTVVPTLVTPSAPGNRTVDLFPVLPICVCDLTPGACDINCCCDRDCYLLHPRTVFSFCLPGSVRSSSWVCVDNSVIFRSNSPFPSRVFMDSNGIRQFCVHVNNSNLNYFQKLQKVNATNFQALAAEFGGESFTSTFQTQSPPSFYRAGDPILTYFPKWSVISLLRQPAGVGAGGLCAESNPAGFLESKSTTCTRFFKNLASSCTLDSALNAASYYNFTVLKVPRSMTDPQNMEFQVPVILTSQANAPLLAGNTCQNVVSQVTYEIETNGTFGIQKVSVSLGQTNLTVEPGASLQQHFILRFRAFQQSTAASLTSPRSGNPGYIVGKPLLALTDDISYSVSFLELGGLLQPNEKSCKGFQTYVRLAKGEEFFVHYNEVLIY

SEQ ID NO: 13079 - protein, 607 aa, Homo Sapiens
MRTPQLALLQVFFLVFPDGVRPQPSSSPSGAVPTSLELQRGTDGGTLQSPSEATATRPAVPGLPTVVPTLVTPSAPGNRTVDLFPVLPICVCDLTPGACDINCCCDRDCYLLHPRTVFSFCLPGSVRSSSWVCVDNSVIFRSNSPFPSRVFMDSNGIRQFCVHVNNSNLNYFQKLQKVNATNFQALAAEFGGESFTSTFQTQSPPSFYRAGDPILTYFPKWSVISLLRQPAGVGAGGLCAESNPAGFLESKSTTCTRFFKNLASSCTLDSALNAASYYNFTVLKVPRSMTDPQNMEFQVPVILTSQANAPLLAGNTCQNVVSQVTYEIETNGTFGIQKVSVSLGQTNLTVEPGASLQQHFILRFRAFQQSTAASLTSPRSGNPGYIVGKPLLALTDDISYSMTLLQSQGNGSCSVKRHEVQFGVNAISGCKLRLKKADCSHLQQEIYQTLHGRPRPEYVAIFGNADPAQKGGWTRILNRHCSISAINCTSCCLIPVSLEIQVLWAYVGLLSNPQAHVSGVRFLYQCQSIQDSQQVTEVSLTTLVNFVDITQKPQPPRGQPKMDWKWPFDFFPFKVAFSRGVFSQKCSVSPILILCLLLLGVLNLETM

SEQ ID NO: 13080 - protein, 607 aa, Homo Sapiens; identical to SEQ ID NO: 13079

SEQ ID NO: 13081 - protein, 304 aa, Homo Sapiens
MATWKSPCFLYCLFILGPRLTGQNNSVDLTNEETTDSTTSKISPSEDTQQENGSMFSLITWNIDGLDLNNLSERARGVCSYLALYSPDVIFLQEVIPPYYSYLKKRSSNYEIITGHEEGYFTAIMLKKSRVKLKSQEIIPFPSTKMMRNLLCVHVNVSGNELCLMTSHLESTRGHAAERMNQLKMVLKKMQEAPESATVIFAGDTNLRDREVTRCGGLPNNIVDVWEFLGKPKHCQYTWDTQMNSNLGITAACKLRFDRIFFRAAAEEGHIIPRSLDLLGLEKLDCGRFPSDHWGLLCNLDIIL

SEQ ID NO: 13082 - protein, 362 aa, Homo Sapiens
MELGSCLEGGREAAEEEGEPEVKKRRLLCVEFASVASCDAAVAQCFLAENDWEMERALNSYFEPPVEESALERRPETISEPKTYVDLTNEETTDSTTSKISPSEDTQQENGSMFSLITWNIDGLDLNNLSERARGVCSYLALYSPDVIFLQEVIPPYYSYLKKRSSNYEIITGHEEGYFTAIMLKKSRVKLKSQEIIPFPSTKMMRNLLCVHVNVSGNELCLMTSHLESTRGHAAERMNQLKMVLKKMQEAPESATVIFAGDTNLRDREVTRCGGLPNNIVDVWEFLGKPKHCQYTWDTQMNSNLGITAACKLRFDRIFFRAAAEEGHIIPRSLDLLGLEKLDCGRFPSDHWGLLCNLDIIL

SEQ ID NO: 13083 - protein, 426 aa, Homo Sapiens
MGRRRQRVDPAAGARAGALPEAIAALSRSLPSGPSPEIFRRAKFDRPEATSALWQLLFRVLSPLPAGNALASLALEVQARLVKSALCSQGYPRLALAQLPEDGSQGSRELLLALSWLLARGPVPEQMLAQARVPLGDEMTVCQCEALASPGPPAPHMEAEGPVDVRHVQWLMGKLRFRWRQLVSSQQEQCALLSKIHLYTRGCHSDQSLSHLSVTEAEMLRDPEGGQQLLRTLERENQRLEAVLAWRRSELVFWRWMDTVLGTCAPEVPAAASQPTFLPWVPERGGGELDLVVRELQALEEELREAAERRRAAWEAKAGGCGRGPEWSAARRASREAVEKELGALQQCWERDGGPAQPHGPHRLVRREDGAAGDRDLRAAVVIRTLRSQEACLEAVLRRLQGQCRQELARLVGARPGLIWIPPPGR

SEQ ID NO: 13084 - protein, 495 aa, Homo Sapiens
MGRRRQRVDPAAGARAGALPEAIAALSRSLPSGPSPEIFRRAKFDRPEATSALWQLLFRVLSPLPAGNALASLALEVQARLVKSALCSQGYPRLALAQLPEDGSQGSRELLLALSWLLARGPVPEQMLAQARVPLGDEMTVCQCEALASPGPPAPHMEAEGPVDVRHVQWLMGKLRFRWRQLVSSQQEQCALLSKIHLYTRGCHSDQSLSHLSVTEAEMLRDPEGGQQVSGAGAAQNLDLAYPKCLHSFCTPGMGPRTFWNDLWLVCEQPGLLPGDWAAPLDPGGASACSLLSPFRALLRTLERENQRLEAVLAWRRSELVFWRWMDTVLGTCAPEVPAAASQPTFLPWVPERGGGELDLVVRELQALEEELREAAERRRAAWEAKAGGCGRGPEWSAARRASREAVEKELGALQQCWERDGGPAQPHGPHRLVRREDGAAGDRDLRAAVVIRTLRSQEACLEAVLRRLQGQCRQELARLVGARPGLIWIPPPGR

SEQ ID NO: 13085 - protein, 393 aa, Homo Sapiens
MGRRRQRVDPAAGARAGALPEAIAALSRSLPSGPSPEIFRRAKFDRPEATSALWQLLFRVLSPLPAGNALASLALEVQARLVKSALCSQGYPRLALAQLPEDGSQGSRELLLALSWLLARGPVPEQMLAQARVPLGDEMTVCQCEALASPGPPAPHMEAEGPVDVRHVQWLMGKLRFRWRQLVSSQQEQCALLSKLLRTLERENQRLEAVLAWRRSELVFWRWMDTVLGTCAPEVPAAASQPTFLPWVPERGGGELDLVVRELQALEEELREAAERRRAAWEAKAGGCGRGPEWSAARRASREAVEKELGALQQCWERDGGPAQPHGPHRLVRREDGAAGDRDLRAAVVIRTLRSQEACLEAVLRRLQGQCRQELARLVGARPGLIWIPPPGR

SEQ ID NO: 13086 - protein, 119 aa, Homo Sapiens
MGRRRQRVDPAAGARAGALPEAIAALSRSLPSGPSPEIFRRAKFDRPEATSALWQLLFRVLSPLPAGNALATRGWHWHNYLRMARRAVGSCCWLCPGSWPEDLCPSRCWPRPECLWVTR

SEQ ID NO: 13087 - protein, 54 aa, Homo Sapiens
MLAQARVPLGDEMTVCQCEALASPGPPAPHMEAEGPVDVRHVQWLMGKLRFRWR

SEQ ID NO: 13088 - protein, 157 aa, Homo Sapiens
MLAQARVPLGDEMTVCQCEALASPGPPAPHMEAEGPVDVRHVQWLMGKLRFRWRQLVSSQQEQCALLSKIHLYTRGCHSDQSLSHLSVTEAEMLRDPEGGQQLLRTLERENQRLEAVLAWRRSELVFWRWMDTVLGTCAPEVPAAASQPTFLPWVPE

SEQ ID NO: 13089 - protein, 248 aa, Homo Sapiens
MLAQARVPLGDEMTVCQIHLYTRGCHSDQSLSHLSVTEAEMLRDPEGGQQLLRTLERENQRLEAVLAWRRSELVFWRWMDTVLGTCAPEVPAAASQPTFLPWVPERGGGELDLVVRELQALEEELREAAERRRAAWEAKAGGCGRGPEWSAARRASREAVEKELGALQQCWERDGGPAQPHGPHRLVRREDGAAGDRDLRAAVVIRTLRSQEACLEAVLRRLQGQCRQELARLVGARPGLIWIPPPGR

SEQ ID NO: 13090 - protein, 248 aa, Homo Sapiens; identical to SEQ ID NO: 13089

SEQ ID NO: 13091 - protein, 80 aa, Homo Sapiens
MSGQRGDWTSALWQLLFRVLSPLPAGNALASLALEVQARLVKSALCSQGYPRLALAQLPEDGSQGSRELLLALSWLLARG

SEQ ID NO: 13092 - protein, 110 aa, Homo Sapiens
MSGQRGDWTSALWQLLFRVLSPLPAGNALASLALEVQARLVKSALCSQGYPRLALAQLPEDGSQGSRELLLALSWLLARGPVPEQMLAQARVPLGDEMTVCQCEALASPG

SEQ ID NO: 13093 - protein, 216 aa, Homo Sapiens
MSGQRGDWTSALWQLLFRVLSPLPAGNALASLALEVQARLVKSALCSQGYPRLALAQLPEDGSQGSRELLLALSWLLARGPVPEQMLAQARVPLGDEMTVCQCEALASPGPPAPHMEAEGPVDVRHVQWLMGKLRFRWRQLVSSQQEQCALLSKIHLYTRGCHSDQSLSHLSVTEAEMLRDPEGGQQLLRTLERENQRLEAVLAWRRSELVFWRWM

SEQ ID NO: 13094 - protein, 303 aa, Homo Sapiens [sequence omitted]

SEQ ID NO: 13095 - protein, 352 aa, Homo Sapiens
MSGQRGDWTSALWQLLFRVLSPLPAGNALASLALEVQARLVKSALCSQGYPRLALAQLPEDGSQGSRELLLALSWLLARGPVPEQMLAQARVPLGDEMTVCQCEALASPGPPAPHMEAEGPVDVRHVQWLMGKLRFRWRQLVSSQQEQCALLSKLLRTLERENQRLEAVLAWRRSELVFWRWMDTVLGTCAPEVPAAASQPTFLPWVPERGGGELDLVVRELQALEEELREAAERRRAAWEAKAGGCGRGPEWSAARRASREAVEKELGALQQCWERDGGPAQPHGPHRLVRREDGAAGDRDLRAAVVIRTLRSQEACLEAVLRRLQGQCRQELARLVGARPGLIWIPPPGR

SEQ ID NO: 13096 - protein, 354 aa, Homo Sapiens
MSGQRGDWVQTSALWQLLFRVLSPLPAGNALASLALEVQARLVKSALCSQGYPRLALAQLPEDGSQGSRELLLALSWLLARGPVPEQMLAQARVPLGDEMTVCQCEALASPGPPAPHMEAEGPVDVRHVQWLMGKLRFRWRQLVSSQQEQCALLSKLLRTLERENQRLEAVLAWRRSELVFWRWMDTVLGTCAPEVPAAASQPTFLPWVPERGGGELDLVVRELQALEEELREAAERRRAAWEAKAGGCGRGPEWSAARRASREAVEKELGALQQCWERDGGPAQPHGPHRLVRREDGAAGDRDLRAAVVIRTLRSQEACLEAVLRRLQGQCRQELARLVGARPGLIWIPPPGR

SEQ ID NO: 13097 - protein, 976 aa, Homo Sapiens
MDSLASLVLCGVSLLLSASFLPATLTMTVDKGDNVNISFKKVLIKEEDAVIYKNGSFIHSVPRHEVPDILEVHLPHAQPQDAGVYSARYIGGNLFTSAFTRLIVRRCEAQKWGPECNHLCTACMNNGVCHEDTGECICPPGFMGRTCEKACELHTFGRTCKERCSGQEGCKSYVFCLPDPYGCSCATGWKGLQCNEGIQRMTPKIVDLPDHIEVNSGKFNPICKASGWPLPTNEEMTLVKPDGTVLHPKDFNHTDHFSVAIFTIHRILPPDSGVWVCSVNTVAGMVEKPFNISVKVLPKPLNAPNVIDTGHNFAVINISSEPYFGDGPIKSKKLLYKPVNHYEAWQHIQVTNEIVTLNYLEPRTEYELCVQLVRRGEGGEGHPGPVRRFTTASIGLPPPRGLNLLPKSQTTLNLTWQPIFPSSEDDFYVEVERRSVQKSDQQNIKVPGNLTSVLLNNLHPREQYVVRARVNTKAQGEWSEDLTAWTLSDILPPQPENIKISNITHSSAVISWTILDGYSISSITIRYKVQGKNEDQHVDVKIKNATITQYQLKGLEPETAYQVDIFAENNIGSSNPAFSHELVTLPESQAPADLGGGKMLLIAILGSAGMTCLTVLLAFLIILQLKRANVQRRMAQAFQNREEPAVQFNSGTLALNRKVKNNPDPTIYPVLDWNDIKFQDVIGEGNFGQVLKARIKKDGLRMDAAIKRMKEYASKDDHRDFAGELEVLCKLGHHPNIINLLGACEHRGYLYLAIEYAPHGNLLDFLRKSRVLETDPAFAIANSTASTLSSQQLLHFAADVARGMDYLSQKQFIHRDLAARNILVGENYVAKIADFGLSRGQEVYVKKTMGRLPVRWMAIESLNYSVYTTNSDVWSYGVLLWEIVSLGGTPYCGMTCAELYEKLPQGYRLEKPLNCDDEVYDLMRQCWREKPYERPSFAQILVSLNRMLEERKTYVNTTLYEKFTYAGIDCSAEEAA

SEQ ID NO: 13098 - protein, 1124 aa, Homo Sapiens
MDSLASLVLCGVSLLLSGTVEGAMDLILINSLPLVSDAETSLTCIASGWRPHEPITIGRDFEALMNQHQDPLEVTQDVTREWAKKVVWKREKASKINGAYFCEGRVRGEAIRIRTMKMRQQASFLPATLTMTVDKGDNVNISFKKVLIKEEDAVIYKNGSFIHSVPRHEVPDILEVHLPHAQPQDAGVYSARYIGGNLFTSAFTRLIVRRCEAQKWGPECNHLCTACMNNGVCHEDTGECICPPGFMGRTCEKACELHTFGRTCKERCSGQEGCKSYVFCLPDPYGCSCATGWKGLQCNEACHPGFYGPDCKLRCSCNNGEMCDRFQGCLCSPGWQGLQCEREGIQRMTPKIVDLPDHIEVNSGKFNPICKASGWPLPTNEEMTLVKPDGTVLHPKDFNHTDHFSVAIFTIHRILPPDSGVWVCSVNTVAGMVEKPFNISVKVLPKPLNAPNVIDTGHNFAVINISSEPYFGDGPIKSKKLLYKPVNHYEAWQHIQVTNEIVTLNYLEPRTEYELCVQLVRRGEGGEGHPGPVRRFTTASIGLPPPRGLNLLPKSQTTLNLTWQPIFPSSEDDFYVEVERRSVQKSDQQNIKVPGNLTSVLLNNLHPREQYVVRARVNTKAQGEWSEDLTAWTLSDILPPQPENIKISNITHSSAVISWTILDGYSISSITIRYKVQGKNEDQHVDVKIKNATITQYQLKGLEPETAYQVDIFAENNIGSSNPAFSHELVTLPESQAPADLGGGKMLLIAILGSAGMTCLTVLLAFLIILQLKRANVQRRMAQAFQNVREEPAVQFNSGTLALNRKVKNNPDPTIYPVLDWNDIKFQDVIGEGNFGQVLKARIKKDGLRMDAAIKRMKEYASKDDHRDFAGELEVLCKLGHHPNIINLLGACEHRGYLYLAIEYAPHGNLLDFLRKSRVLETDPAFAIANSTASTLSSQQLLHFAADVARGMDYLSQKQFIHRDLAARNILVGENYVAKIADFGLSRGQEVYVKKTMGRLPVRWMAIESLNYSVYTTNSDVWSYGVLLWEIVSLGGTPYCGMTCAELYEKLPQGYRLEKPLNCDDEVYDLMRQCWREKPYERPSFAQILVSLNRMLEERKTYVNTTLYEKFTYAGIDCSAEEAA

SEQ ID NO: 13099 - protein, 1081 aa, Homo Sapiens
MDSLASLVLCGVSLLLSGTVEGAMDLILINSLPLVSDAETSLTCIASGWRPHEPITIGRDFEALMNQHQDPLEVTQDVTREWAKKVVWKREKASKINGAYFCEGRVRGEAIRIRTMKMRQQASFLPATLTMTVDKGDNVNISFKKVLIKEEDAVIYKNGSFIHSVPRHEVPDILEVHLPHAQPQDAGVYSARYIGGNLFTSAFTRLIVRRCEAQKWGPECNHLCTACMNNGVCHEDTGECICPPGFMGRTCEKACELHTFGRTCKERCSGQEGCKSYVFCLPDPYGCSCATGWKGLQCNEGIQRMTPKIVDLPDHIEVNSGKFNPICKASGWPLPTNEEMTLVKPDGTVLHPKDFNHTDHFSVAIFTIHRILPPDSGVWVCSVNTVAGMVEKPFNISVKVLPKPLNAPNVIDTGHNFAVINISSEPYFGDGPIKSKKLLYKPVNHYEAWQHIQVTNEIVTLNYLEPRTEYELCVQLVRRGEGGEGHPGPVRRFTTASIGLPPPRGLNLLPKSQTTLNLTWQPIFPSSEDDFYVEVERRSVQKSDQQNIKVPGNLTSVLLNNLHPREQYVVRARVNTKAQGEWSEDLTAWTLSDILPPQPENIKISNITHSSAVISWTILDGYSISSITIRYKVQGKNEDQHVDVKIKNATITQYQLKGLEPETAYQVDIFAENNIGSSNPAFSHELVTLPESQAPADLGGGKMLLIAILGSAGMTCLTVLLAFLIILQLKRANVQRRMAQAFQNVREEPAVQFNSGTLALNRKVKNNPDPTIYPVLDWNDIKFQDVIGEGNFGQVLKARIKKDGLRMDAAIKRMKEYASKDDHRDFAGELEVLCKLGHHPNIINLLGACEHRGYLYLAIEYAPHGNLLDFLRKSRVLETDPAFAIANSTASTLSSQQLLHFAADVARGMDYLSQKQFIHRDLAARNILVGENYVAKIADFGLSRGQEVYVKKTMGRLPVRWMAIESLNYSVYTTNSDVWSYGVLLWEIVSLGGTPYCGMTCAELYEKLPQGYRLEKPLNCDDEVYDLMRQCWREKPYERPSFAQILVSLNRMLEERKTYVNTTLYEKFTYAGIDCSAEEAA

SEQ ID NO: 13100 - protein, 468 aa, Homo Sapiens
MDSLASLVLCGVSLLLSGTVEGAMDLILINSLPLVSDAETSLTCIASGWRPHEPITIGRDFEALMNQHQDPLEVTQDVTREWAKKVVWKREKASKINGAYFCEGRVRGEAIRIRTMKMRQQASFLPATLTMTVDKGDNVNISFKKVLIKEEDAVIYKNGSFIHSVPRHEVPDILEVHLPHAQPQDAGVYSARYIGGNLFTSAFTRLIVRRCEAQKWGPECNHLCTACMNNGVCHEDTGECICPPGFMGRTCEKACELHTFGRTCKERCSGQEGCKSYVFCLPDPYGCSCATGWKGLQCNEGIQRMTPKIVDLPDHIEVNSGKFNPICKASGWPLPTNEEMTLVKPDGTVLHPKDFNHTDHFSVAIFTIHRILPPDSGVWVCSVNTVAGMVEKPFNISVKVLPKPLNAPNVIDTGHNFAVINISSEPYFGDGPIKSKKLLYKPVNHYEAWQHIQVSMEKQRLTKANSDK

SEQ ID NO: 13101 - protein, 468 aa, Homo Sapiens
MDSLASLVLCGVSLLLSVPRHEVPDILEVHLPHAQPQDAGVYSARYIGGNLFTSAFTRLIVRRCEAQKWGPECNHLCTACMNNGVCHEDTGECICPPGFMGRTCEKACELHTFGRTCKERCSGQEGCKSYVFCLPDPYGCSCATGWKGLQCNEGIQRMTPKIVDLPDHIEVNSGKFNPICKASGWPLPTNEEMTLVKPDGTVLHPKDFNHTDHFSVAIFTIHRILPPDSGVWVCSVNTVAGMVEKPFNISVKVLPKPLNAPNVIDTGHNFAVINISSEPYFGDGPIKSKKLLYKPVNHYEAWQHIQVTNEIVTLNYLEPRTEYELCVQLVRRGEGGEGHPGPVRRFTTASIGLPPPRGLNLLPKSQTTLNLTWQPIFPSSEDDFYVEVERRSVQKSDQQNIKVPGNLTSVLLNNLHPREQYVVRARVNTKAQGEWSEDLTAWTLSDILPPQPENIKISNITHSSAVIS

SEQ ID NO: 13102 - protein, 298 aa, Homo Sapiens
MGIVCAQCSFILLLSIIRARPPPFLFCPLSSQRTESPYKPVHLGLGPTDKVAAIAMARIIDLVPWDDGSTHVYASPAILLPMERQRNQLAGVKQQLYHPALPTLRHMDRDTVKACLPDEHCQSTTYCRKDEFDNAHFTLLGVPNKPLQCLDITATGQKLRNRYHEGKLAPIAPGINRVDWPCFTRAIEDWSHFVSSAGEFKLPCLRKRAEGLSGYAVRYLKPDVTQTWRQEALCGAWAGRPCSPDSPRPYPCCPPQYCLSQNPSLDRYGQKPLPFDSLNTFRSFGSSYSRVNYLTPWH

SEQ ID NO: 13103 - protein, 271 aa, Homo Sapiens
MGIVCAQCSFILLLSIIRARPPPFLFCPLSSQRTESPYKPVHLGLGPTDKVAAIAMARIIDLVPWDDGSTHVYASPAILLPMERQRNQLAGVKQQLYHPALPTLRHMDRDTVKACLPDEHCQSTTYCRKDEFDNAHFTLLGVPNKPLQCLDITATGQKLRNRYHEGKLAPIAPGINRVDWPCFTRAIEDWSHFVSSAGEFKLPCLRKRAEGLSGYAVRYLKPDVTQTWRYCLSQNPSLDRYGQKPLPFDSLNTFRSFGSSYSRVNYLTPWH

SEQ ID NO: 13104 - protein, 267 aa, Homo Sapiens
MGARQIQTSSSQTSPEEAMGTPRIQHLLILLVLGASLLTSGLELYCQKGLSMTVEADPANMFNWTTEEVETCDKGALCQETILIIKAGTETAILATKGCIPEGEEAITIVQHSSPPGLIVTSYSNYCEDSFCNDKDSLSQFWEFSETTASTVSTTLHCPTCVALGTCFSAPSLPCPNGTTRCYQGKLEITGGGIESSVEVKGCTAMIGCRLMSGILAVGPMFVREACPHQLLTQPRKTENGATCLPIPVWGLQLLLPLLLPSFIHFS

SEQ ID NO: 13105 - protein, 249 aa, Homo Sapiens
MGTPRIQHLLILLVLGASLLTSGLELYCQKGLSMTVEADPANMFNWTTEEVETCDKGALCQETILIIKAGTETAILATKGCIPEGEEAITIVQHSSPPGLIVTSYSNYCEDSFCNDKDSLSQFWEFSETTASTVSTTLHCPTCVALGTCFSAPSLPCPNGTTRCYQGKLEITGGGIESSVEVKGCTAMIGCRLMSGILAVGPMFVREACPHQLLTQPRKTENGATCLPIPVWGLQLLLPLLLPSFIHFS

SEQ ID NO: 13106 - protein, 239 aa, Homo Sapiens
MSDLLLLGLIGGLTLLLLLTLLAFAGYSGLLAGVEVSAGSPPIRNVTVAYKFHMGLYGETGRLFTESCSISPKLRSIAVYYDNPHMERKLCAYPRLEIYQEDQIHFMCPLARQGDFYVPEMKETEWKWRGLVEAIDTQVDGTGADTMSDTSSVSLEVSPGSRETSAATLSPGASSRGWDDGDTRSEHSYSESGASGSSFEELDLEGEGPLGESRLDPGTEPLGTTKWLWEPTAPEKGKE

SEQ ID NO: 13107 - protein, 104 aa, Homo Sapiens
MSDLLLLGLIGGLTLLLLLTLLAFAGYSGLLAGVEVSAGSPPIRNVTVAYKFHMGLYGETGRLFTESCSISPKLRSIAVYYDNPHMVPPDKCRCAVGSILSEGE

SEQ ID NO: 13108 - protein, 140 aa, Homo Sapiens
MSDLLLLGLIGGLTLLLLLTLLAFAGYSGLLAGVEVSAGSPPIRNVTVAYKFHMGLYGETGRLFTESCSISPKLRSIAVYYDNPHMVPPDKCRCAVGSILSEGEESPSPELIDLYQKFGFKVFSFPAPSHVVTATFPYTT

SEQ ID NO: 13109 - protein, 151 aa, Homo Sapiens
MSDLLLLGLIGGLTLLLLLTLLAFAGYSGLLAGVEVSAGSPPIRNVTVAYKFHMGLYGETGRLFTESCSISPKLRSIAVYYDNPHMVPPDKCRCAVGSILSEGEESPSPELIDLYQKFGFKVFSFPAPSHVVTATFPYTTILSIWLATRRV

SEQ ID NO: 13110 - protein, 216 aa, Homo Sapiens
MSDLLLLGLIGGLTLLLLLTLLAFAGYSGLLAGVEVSAGSPPIRNVTVAYKFHMGLYGETGRLFTESCSISPKLRSIAVYYDNPHMVPPDKCRCAVGSILSEGEESPSPELIDLYQKFGFKVFSFPAPSHVVTATFPYTTILSIWLATRRVHPALDTYIKERKLCAYPRLEIYQEDQIHFMCPLARQGDFYVPEMKETEWKWRGLVEAIDTQVDGT

SEQ ID NO: 13111 - protein, 217 aa, Homo Sapiens
MSDLLLLGLIGGLTLLLLLTLLAFAGYSGLLAGVEVSAGSPPIRNVTVAYKFHMGLYGETGRLFTESCSISPKLRSIAVYYDNPHMVPPDKCRCAVGSILSEGEESPSPELIDLYQKFGFKVFSFPAPSHVVTATFPYTTILSIWLATRRVHPALDTYIKERKLCAYPRLEIYQEDQIHFMCPLARQGDFYVPEMKETEWKWRGLVEAIDTQVDGTG

SEQ ID NO: 13112 - protein, 313 aa, Homo Sapiens
MSDLLLLGLIGGLTLLLLLTLLAFAGYSGLLAGVEVSAGSPPIRNVTVAYKFHMGLYGETGRLFTESCSISPKLRSIAVYYDNPHMVPPDKCRCAVGSILSEGEESPSPELIDLYQKFGFKVFSFPAPSHVVTATFPYTTILSIWLATRRVHPALDTYIKERKLCAYPRLEIYQEDQIHFMCPLARQGDFYVPEMKETEWKWRGLVEAIDTQVDGTGADTMSDTSSVSLEVSPGSRETSAATLSPGASSRGWDDGDTRSEHSYSESGASGSSFEELDLEGEGPLGESRLDPGTEPLGTTKWLWEPTAPEKGKE

SEQ ID NO: 13113 - protein, 313 aa, Homo Sapiens; identical to SEQ ID NO: 13112

SEQ ID NO: 13114 - protein, 313 aa, Homo Sapiens; identical to SEQ ID NO: 13112

SEQ ID NO: 13115 - protein, 313 aa, Homo Sapiens; identical to SEQ ID NO: 13112

SEQ ID NO: 13116 - protein, 313 aa, Homo Sapiens; identical to SEQ ID NO: 13112

SEQ ID NO: 13117 - protein, 313 aa, Homo Sapiens; identical to SEQ ID NO: 13112

SEQ ID NO: 13118 - protein, 121 aa, Homo Sapiens
MSLHGILASAGTIGAVAAWLMSYKPALFGFLFLLLLLSNWLVKYEHKLTLPEPQQDEILQRLLFSEMKMKVLENQMFIIWNKMNHHGRSSRHRNFPMKKHRMRRHESICPTLSDCTSSSPS

SEQ ID NO: 13119 - protein, 121 aa, Homo Sapiens
RSLHGILASAGTIGAVAAWLMSYKPALFGFLFLLLLLSNWLVKYEHKLTLPEPQQDEILQRLLFSEMKMKVLENQMFIIWNKMNHHGRSSRHRNFPMKKHRMRRHESICPTLSDCTSSSPS

SEQ ID NO: 13120 - protein, 147 aa, Homo Sapiens
  misc_feature (1)..(1): Xaa can be any naturally occurring amino acid
XSAGTIGAVAAWLMSYKPALFGFLFLLLLLSNWLVKYEHKLTLPEPQQEEEKPKTSENDSKNSKAVNTKEVNRTHACFALQDEILQRLLFSEMKMKVLENQMFIIWNKMNHHGRSSRHRNFPMKKHRMRRHESICPTLSDCTSSSPS

SEQ ID NO: 13121 - protein, 76 aa, Homo Sapiens
MKSVIPSDGPSVACVKKASYLDCIRAIAANEADAVTLDAGLVYDAYLAPNNLKPVVAEFYGSKEDPQTFYYAVAVV

SEQ ID NO: 13122 - protein, 134 aa, Homo Sapiens
MNQLRGKKSCHTGLGRSAGWNIPIGLLYCDLPEPRKPLEKAVANFFSGSCAPCADGTDFPQLCQLCPGCGCSTLNQYFGYSGAFKCLKDGAGDVAFVKHSTIFENLANKADRDQYELLCLDNTRKPVDEYKDCH

SEQ ID NO: 13123 - protein, 102 aa, Homo Sapiens
MRLAVGALLVCAVLGLCLAVPDKTVRWCAVSEHEATKCQSFRDHMKSVIPSDGPFSYRRGPKYGRQGGLDLGASQPGPGTFWQRQIKRIPTIQLSSWEGPAV

SEQ ID NO: 13124 - protein, 120 aa, Homo Sapiens
MRLAVGALLVCAVLGLCLAVPDKTVRWCAVSEHEATKCQSFRDHMKSVIPSDGPSVACVKKASYLDCIRAIAANEADAVTLDAGLVYDAYLAPNNLKPVVAEFYGSKEDFLLCCCCGEEG

SEQ ID NO: 13125 - protein, 698 aa, Homo Sapiens
MRLAVGALLVCAVLGLCLAVPDKTVRWCAVSEHEATKCQSFRDHMKSVIPSDGPSVACVKKASYLDCIRAIAANEADAVTLDAGLVYDAYLAPNNLKPVVAEFYGSKEDPQTFYYAVAVVKKDSGFQMNQLRGKKSCHTGLGRSAGWNIPIGLLYCDLPEPRKPLEKAVANFFSGSCAPCADGTDFPQLCQLCPGCGCSTLNQYFGYSGAFKCLKDGAGDVAFVKHSTIFENLANKADRDQYELLCLDNTRKPVDEYKDCHLAQVPSHTVVARSMGGKEDLIWELLNQAQEHFGKDKSKEFQLFSSPHGKDLLFKDSAHGFLKVPPRMDAKMYLGYEYVTAIRNLREGTCPEAPTDECKPVKWCALSHHERLKCDEWSVNSVGKIECVSAETTEDCIAKIMNGEADAMSLDGGFVYIAGKCGLVPVLAENYNKSDNCEDTPEAGYFAIAVVKKSASDLTWDNLKGKKSCHTAVGRTAGWNIPMGLLYNKINHCRFDEFFSEGCAPGSKKDSSLCKLCMGSGLNLCEPNNKEGYYGYTGAFRCLVEKGDVAFVKHQTVPQNTGGKNPDPWAKNLNEKDYELLCLDGTRKPVEEYANCHLARAPNHAVVTRKDKEACVHKILRQQQHLFGSNVTDCSGNFCLFRSETKDLLFRDDTVCLAKLHDRNTYEKYLGEEYVKAVGNLRKCSTSSLLEACTFRRP

SEQ ID NO: 13126 - protein, 115 aa, Homo Sapiens
MRLAVGALLVCAVLGLCLAVPDKTVRWCAVSEHEATKCQSFRDHMKSVIPSDGPSVACVKKASYLDCIRAIAVSRCCLKESGRKPYFLCFQSLWNNSLLTGKRSGCCDTGCRFGV

SEQ ID NO: 13127 - protein, 143 aa, Homo Sapiens
  misc_feature (1)..(1): Xaa can be any naturally occurring amino acid
XYFAIAVVKKSASDLTWDNLKGKKSCHTAVGRTAGWNIPMGLLYNKINHCRFDEFFSEGCAPGSKKDSSLCKLCMGSGLNLCEPNNKEGYYGYTGAFRCLVEKGDVAFVKHQTVPQNTGETIQKRRGKGAEMGYRPVSHRKKP

SEQ ID NO: 13128 - protein, 214 aa, Homo Sapiens
MAFLRSMWGVLSALGRSGAELCTGCGSRLRSPFSFVYLPRWFSSVLASCPKKPVSSYLRFSKEQLPIFKAQNPDAKTTELIRRIAQRWRELPDSKKKIYQDAYRAEWQVYKEEISRFKEQLTPSQIMSLEKEIMDKHLKRKAMTKKKEKLKTVKENWKNLSDSEKELYIQHAKEDETRYHNEMKSWEEQMIEVGRKDLLRRTIKKQRKYGAEEC

SEQ ID NO: 13129 - protein, 246 aa, Homo Sapiens
MAFLRSMWGVLSALGRSGAELCTGCGSRLRSPFSFVYLPRWFSSVLASCPKKPVSSYLRFSKEQLPIFKAQNPDAKTTELIRRIAQRWRELPDSKKKIYQDAYRAEWQVYKEEISRFKEQLTPSQIMSLEKEIMDKHLKRKAMTKKKELTLLGKPKRPRSAYNVYVAERFQEAKGDSPQEKLKTVKENWKNLSDSEKELYIQHAKEDETRYHNEMKSWEEQMIEVGRKDLLRRTIKKQRKYGAEEC

SEQ ID NO: 13130 - protein, 219 aa, Homo Sapiens
  misc_feature (1)..(1): Xaa can be any naturally occurring amino acid
XELCTGCGSRLRSPFSFVYLPRWFSSVLASCPKKPVSSYLRFSKEQLPIFKAQNPDAKTTELIRRIAQRWRELPDSKKKIYQDAYRAEWQVYKEEISRFKEQLTPSQIMSLEKEIMDKHLKRKAMTKKKELTLLGKPKRPRSAYNVYVAERFQEAKGDSPQEKLKTVKENWKNLSDSEKEVSITVVSLKCLLRISVRECIRARLDSCEDNLVLLIIQVF

SEQ ID NO: 13131 - protein, 84 aa, Homo Sapiens
MATMENKVICALVLVSMLALGTLAEAQTETCTVAPRERQNCGFPGVTPSQCANKGCCFDDTVRGVPWCFYPNTIDVPPEEECEF

SEQ ID NO: 13132 - protein, 129 aa, Homo Sapiens
MGRRDAQLLAALLVLGLCALAGSEKPSPCQCSRLSPHNRTNCGFPGITSDQCFDNGCCFDSSVTGVPWCFHPLPKQESDQCVMEVSDRRNCGYPGISPEECASRKCCFSNFIFEVPWCFFPKSVEDCHY

SEQ ID NO: 13133 - protein, 94 aa, Homo Sapiens
MKRVLSCVPEPTVVMAARALCMLGLVLALLSSSSAEEYVGLSANQCAVPAKDRVDCGYPHVTPKECNNRGCCFDSRIPGVPWCFKPLQEAECTF

SEQ ID NO: 13134 - protein, 74 aa, Homo Sapiens [sequence omitted]

SEQ ID NO: 13135 - protein, 125 aa, Homo Sapiens
  misc_feature (1)..(1): Xaa can be any naturally occurring amino acid
XALLSSSSAEEYVGLSQQGLWQLTGLCLGQLQTSVPCQPRTGWTAATPMSPPRSATTGAAALTPGSLECLGVSSPCRKQNAPSEAPPAAPGRGMRGSEHPCPAVIAARHCSSQLFCPFAPGKRFC

SEQ ID NO: 13136 - protein, 61 aa, Homo Sapiens
MIYTMKKVHALWASVCLLLNLAPAPLNADSEEDEEHTIITDTELPPLKLMHSFCAFKADDG

SEQ ID NO: 13137 - protein, 76 aa, Homo Sapiens
MIYTMKKVHALWASVCLLLNLAPAPLNADSEEDEEHTIITDTELPPLKLMHSFCAFKADDGPCKAIMKRFFFNIFT

SEQ ID NO: 13138 - protein, 105 aa, Homo Sapiens
MIYTMKKVHALWASVCLLLNLAPAPLNADSEEDEEHTIITDTELPPLKLMHSFCAFKADDGPCKAIMKRFFFNIFTRQCEEFIYGGCEGNQNRFESLEECKKMCT

SEQ ID NO: 13139 - protein, 106 aa, Homo Sapiens
MIYTMKKVHALWASVCLLLNLAPAPLNADSEEDEEHTIITDTELPPLKLMHSFCAFKADDGPCKAIMKRFFFNIFTRQCEEFIYGGCEGNQNRFESLEECKKMCTR

SEQ ID NO: 13140 - protein, 106 aa, Homo Sapiens; identical to SEQ ID NO: 13139

SEQ ID NO: 13141 - protein, 304 aa, Homo Sapiens
MIYTMKKVHALWASVCLLLNLAPAPLNADSEEDEEHTIITDTELPPLKLMHSFCAFKADDGPCKAIMKRFFFNIFTRQCEEFIYGGCEGNQNRFESLEECKKMCTRDNANRIIKTTLQQEKPDFCFLEEDPGICRGYITRYFYNNQTKQCERFKYGGCLGNMNNFETLEECKNICEDGPNGFQVDNYGTQLNAVNNSLTPQSTKVPSLFEFHGPSWCLTPADRGLCRANENRFYYNSVIGKCRPFKYSGCGGNENNFTSKQECLRACKKGFIQRISKGGLIKTKRKRKKQRVKIAYEEIFVKNM

SEQ ID NO: 13142 - protein, 304 aa, Homo Sapiens; identical to SEQ ID NO: 13141

SEQ ID NO: 13143 - protein, 251 aa, Homo Sapiens
MIYTMKKVHALWASVCLLLNLAPAPLNADSEEDEEHTIITDTELPPLKLMHSFCAFKADDGPCKAIMKRFFFNIFTRQCEEFIYGGCEGNQNRFESLEECKKMCTRDNANRIIKTTLQQEKPDFCFLEEDPGICRGYITRYFYNNQTKQCERFKYGGCLGNMNNFETLEECKNICEDGPNGFQVDNYGTQLNAVNNSLTPQSTKVPSLFVTKEGTNDGWKNAAHIYQVFLNAFCIHASMFFLGLDSISCLC

SEQ ID NO: 13144 - protein, 251 aa, Homo Sapiens; identical to SEQ ID NO: 13143

SEQ ID NO: 13145 - protein, 215 aa, Homo Sapiens
MIYTMKKVHALWASVCLLLNLAPAPLNADSEEDEEHTIITDTELPPLKLMHSFCAFKADDGPCKAIMKRFFFNIFTRQCEEFIYGGCEGNQNRFESLEECKKMCTREKPDFCFLEEDPGICRGYITRYFYNNQTKQCERFKYGGCLGNMNNFETLEECKNICEDGPNGFQVDNYGTQLNAVNNSLTPQSTKVPSLFEFHGPSWCLTPADRGLCRA

SEQ ID NO: 13146 - protein, 107 aa, Homo Sapiens
EACDDACWRIEKVPKVCRLQVSVDDQCEGSTEKYFFNLSSMTCEKFFSGGCHRNRIENRFPDEATCMGFCAPKKNTEPVMLSPILAVEGMTITLLAGRIANVHVQKL

SEQ ID NO: 13147 - protein, 235 aa, Homo Sapiens
MDPARPLGLSILLLFLTEAALGDAAQEPTGNNAEICLLPLDYGPCRALLLRYYYDRYTQSCRQFLYGGCEGNANNFYTWEACDDACWRIEKVPKVCRLQVSVDDQCEGSTEKYFFNLSSMTCEKFFSGGCHRNRIENRFPDEATCMGFCAPKKIPSFCYSPKDEGLCSANVTRYYFNPRYRTCDAFTYTGCGGNDNNFVSREDCKRACAKALKKKKKMPKLRFASRIRKIRKKQF

SEQ ID NO: 13148 - protein, 59 aa, Homo Sapiens
MALVLEIFTLLASICWVSANIFEYQVDAQPLRPCELQRETAFLKQADYVPQCAEDGSFQ

SEQ ID NO: 13149 - protein, 2768 aa, Homo Sapiens
MALVLEIFTLLASICWVSANIFEYQVDAQPLRPCELQRETAFLKQADYVPQCAEDGSFQTVQCQNDGRSCWCVGANGSEVLGSRQPGRPVACLSFCQLQKQQILLSGYINSTDTSYLPQCQDSGDYAPVQCDVQQVQCWCVDAEGMEVYGTRQLGRPKRCPRSCEIRNRRLLHGVGDKSPPQCSAEGEFMPVQCKFVNTTDMMIFDLVHSYNRFPDAFVTFSSFQRRFPEVSGYCHCADSQGRELAETGLELLLDEIYDTIFAGLDLPSTFTETTLYRILQRRFLAVQSVISGRFRCPTKCEVERFTATSFGHPYVPSCRRNGDYQAVQCQTEGPCWCVDAQGKEMHGTRQQGEPPSCAEGQSCASERQQALSRLYFGTSGYFSQHDLFSSPEKRWASPRVARFATSCPPTIKELFVDSGLLRPMVEGQSQQFSVSENLLKEAIRAIFPSRGLARLALQFTTNPKRLQQNLFGGKFLVNVGQFNLSGALGTRGTFNFSQFFQQLGLASFLNGGRQEDLAKPLSVGLDSNSSTGTPEAAKKDGTMNKPTVGSFGFEINLQENQNALKFLASLLELPEFLLFLQHAISVPEDVARDLGDVMETVLSSQTCEQTPERLFVPSCTTEGSYEDVQCFSGECWCVNSWGKELPGSRVRGGQPRCPTDCEKQRARMQSLMGSQPAGSTLFVPACTSEGHFLPVQCFNSECYCVDAEGQAIPGTRSAIGKPKKCPTPCQLQSEQAFLRTVQALLSNSSMLPTLSDTYIPQCSTDGQWRQVQCNGPPEQVFELYQRWEAQNKGQDLTPAKLLVKIMSYREAASGNFSLFIQSLYEAGQQDVFPVLSQYPSLQDVPLAALEGKRPQPRENILLEPYLFWQILNGQLSQYPGSYSDFSTPLAHFDLRNCWCVDEAGQELEGMRSEPSKLPTCPGSCEEAKLRVLQFIRETEEIVSASNSSRFPLGESFLVAKGIRLRNEDLGLPPLFPPREAFAEQFLRGSDYAIRLAAQSTLSFYQRRRFSPDDSAGASALLRSGPYMPQCDAFGSWEPVQCHAGTGHCWCVDEKGGFIPGSLTARSLQIPQCPTTCEKSRTSGLLSSWKQARSQENPSPKDLFVPACLETGEYARLQASGAGTWCVDPASGEELRPGSSSSAQCPSLCNVLKSGVLSRRVSPGYVPACRAEDGGFSPVQCDQAQGSCWCVMDSGEEVPGTRVTGGQPACESPRCPLPFNASEVVGGTILCETISGPTGSAMQQCQLLCRQGSWSVFPPGPLICSLESGRWESQLPQPRACQRPQLWQTIQTQGHFQLQLPPGKMCSADYADLLQTFQVFILDELTARGFCQIQVKTFGTLVSIPVCNNSSVQVGCLTRERLGVNVTWKSRLEDIPVASLPDLHDIERALVGKDLLGRFTDLIQSGSFQLHLDSKTFPAETIRFLQGDHFGTSPRTWFGCSEGFYQVLTSEASQDGLGCVKCPEGSYSQDEECIPCPVGFYQEQAGSLACVPCPVGRTTISAGAFSQTHCVTDCQRNEAGLQCDQNGQYRASQKDRGSGKAFCVDGEGRRLPWWETEAPLEDSQCLMMQKFEKVPESKVIFDANAPVAVRSKVPDSEFPVMQCLTDCTEDEACSFFTVSTTEPEISCDFYAWTSDNVACMTSDQKRDALGNSKATSFGSLRCQVKVRSHGQDSPAVYLKKGQGSTTTLQKRFEPTGFQNMLSGLYNPIVFSASGANLTDAHLFCLLACDRDLCCDGFVLTQVQGGAIICGLLSSPSVLLCNVKDWMDPSEAWANATCPGVTYDQESHQVILRLGDQEFIKSLTPLEGTQDTFTNFQQVYLWKDSDMGSRPESMGCRKDTVPRPASPTEAGLTTELFSPVDLNQVIVNGNQSLSSQKHWLFKHLFSAQQANLWCLSRCVQEHSFCQLAEITESASLYFTCTLYPEAQVCDDIMESNAQGCRLILPQMPKALFRKKVILEDKVKNFYTRLPFQKLMGISIRNKVPMSEKSISNGFFECERRCDADPCCTGFGFLNVSQLKGGEVTCLTLNSLGIQMCSEENGGAWRILDCGSPDIEVHTYPFGWYQKPIAQNNAPSFCPLVVLPSLTEKVSLDSWQSLALSSVVVDPSIRHFDVAHVSTAATSNFSAVRDLCLSECSQHEACLITTLQTQPGAVRCMFYADTQSCTHSLQGQNCRLLLREEATHIYRKPGISLLSYEASVPSVPISTHGRLLGRSQAIQVGTSWKQVDQFLGVPYAAPPLAERRFQAPEPLNWTGSWDASKPRASCWQPGTRTSTSPGVSEDCLYLNVFIPQNVAPNASVLVFFHNTMDREESEGWPAIDGSFLAAVGNLIVVTASYRVGVFGFLSSGSGEVSGNWGLLDQVAALTWVQTHIRGFGGDPRRVSLAADRGGADVASIHLLTARATNSQLFRRAVLMGGSALSPAAVISHERAQQQAIALAKEVSCPMSSSQEVVSCLRQKPANVLNDAQTKLLAVSGPFHYWGPVIDGHFLREPPARALKRSLWVEVDLLIGSSQDDGLINRAKAVKQFEESRGRTSSKTAFYQALQNSLGGEDSDARVEAAATWYYSLEHSTDDYASFSRALENATRDYFIICPIIDMASAWAKRARGNVFMYHAPENYGHGSLELLADVQFALGLPFYPAYEGQFSLEEKSLSLKIMQYFSHFIRSGNPNYPYEFSRKVPTFATPWPDFVPRAGGENYKEFSELLPNRQGLKKADCSFWSKYISSLKTSADGAKGGQSAESEEEELTAGSGLREDLLSLQEPGSKTYSK

SEQ ID NO: 13150 - protein, 901 aa, Homo Sapiens
MLPGLTTELFSPVDLNQVIVNGNQSLSSQKHWLFKHLFSAQQANLWCLSRCVQEHSFCQLAEITESASLYFTCTLYPEAQVCDDIMESNAQGCRLILPQMPKALFRKKVILEDKVKNFYTRLPFQKLMGISIRNKVPMSEKSISNGFFECERRCDADPCCTGFGFLNVSQLKGGEVTCLTLNSLGIQMCSEENGGAWRILDCGSPDIEVHTYPFGWYQKPMSLDSWQSLALSSVVVDPSIRHFDVAHVSTAATSNFSAVRDLCLSECSQHEACLITTLQTQPGAVRCMFYADTQSCTHSLQGQNCRLLLREEATHIYRKPGISLLSYEASVPSVPISTHGRLLGRSQAIQVGTSWKQVDQFLGVPYAAPPLAERRFQAPEPLNWTGSWDASKPRASCWQPGTRTSTSPGVSEDCLYLNVFIPQNVAPNASVLVFFHNTMDREESEGWPAIDGSFLAAVGNLIVVTASYRVGVFGFLSSGSGEVSGNWGLLDQVAALTWVQTHIRGFGGDPRRVSLAADRGGADVASIHLLTARATNSQLFRRAVLMGGSALSPAAVISHERAQQQAIALAKEVSCPMSSSQEVVSCLRQKPANVLNDAQTKLLAVSGPFHYWGPVIDGHFLREPPARALKRSLWVEVDLLIGSSQDDGLINRAKAVKQFEESRGRTSSKTAFYQALQNSLGGEDSDARVEAAATWYYSLEHSTDDYASFSRALENATRDYFIICPIIDMASAWAKRARGNVFMYHAPENYGHGSLELLADVQFALGLPFYPAYEGQFSLEEKSLSLKIMQYFSHFIRSGNPNYPYEFSRKVPTFATPWPDFVPRAGGENYKEFSELLPNRQGLKKADCSFWSKYISSLKTSADGAKGGQSAESEEEELTAGSGLREDLLSLQEPGSKTYSK

SEQ ID NO: 13151 - protein, 172 aa, Homo Sapiens
SDARVEAAATWYYSLEHSTDDYASFSRALENATRDYFIICPIIDMASAWAKRARGNVFMYHAPENYGHGRNPNYPYEFSRKVPTFATPWPDFVPRAGGENYKEFSELLPNRQGLKKADCSFWSKYISSLKTSADGAKGGQSAESEEEELTAGSGLREDLLSLQEPGSKTYSK

SEQ ID NO: 13152 - protein, 74 aa, Homo Sapiens
  misc_feature (1)..(1): Xaa can be any naturally occurring amino acid
XGIQMCSEENGGAWRILDCGSPDIEVHTYPFGWYQKPIAQNNAPSFCPLVVLPSLTEKVFKVREVRGTQLKRME

SEQ ID NO: 13153 - protein, 226 aa, Homo Sapiens
  misc_feature (1)..(1): Xaa can be any naturally occurring amino acid
XGSWEPVQCHAGTGHCWCVDEKGGFIPGSLTARSLQIPQCPTTCEKSRTSGLLSSWKQARSQENPSPKDLFVPACLETGEYARLQASGAGTWCVDPASGEELRPGSSSSAQSCRAEDGGFSPVQCDQAQGSCWCVMDSGEEVPGTRVTGGQPACESPRCPLPFNASEVVGGTILCETISGPTGSAMQQCQLLCRQGSWSVFPPGPLICSLESGRWESQLPQPRACQ

SEQ ID NO: 13154 - protein, 194 aa, Homo Sapiens
  misc_feature (1)..(1): Xaa can be any naturally occurring amino acid
XHSECQWREHSLRPLPFLTPFSSLSQQESLCSAMRHLYLLCPFPPMAGCWAGPRPSRASCWQPGTRTSTSPGVSEDCLYLNVFIPQNVAPNASVLVFFHNTMDREESEGWPAIDGSFLAAVGNLIVVTASYRVGVFGFLSSGSGEVSGNWGLLDQVAALTWVQTHIRGFGGDPRRVSLAADRGGADVASIHLLT

SEQ ID NO: 13155 - protein, 1224 aa, Homo Sapiens
  misc_feature (1)..(1): Xaa can be any naturally occurring amino acid
XQEQAGSLACVPCPVGRTTISAGAFSQTHCVTDCQRNEAGLQCDQNGQYRASQKDRGSGKAFCVDGEGRRLPWWETEAPLEDSQCLMMQKFEKVPESKVIFDANAPVAVRSKVPDSEFPVMQCLTDCTEDEACSFFTVSTTEPEISCDFYAWTSDNVACMTSDQKRDALGNSKATSFGSLRCQVKVRSHGQDSPAVYLKKGAIICGLLSSPSVLLCNVKDWMDPSEAWANATCPGVTYDQESHQVILRLGDQEFIKSLTPLEGTQDTFTNFQQVYLWKDSDMGSRPESMGCRKDTVPRPASPTEAGLTTELFSPVDLNQVIVNGNQSLSSQKHWLFKHLFSAQQANLWCLSRCVQEHSFCQLAEITESASLYFTCTLYPEAQVCDDIMESNAQGCRLILPQMPKALFRKKVILEDKVKNFYTRLPFQKLMGISIRNKVPMSEKSISNGFFECERRCDADPCCTGFGFLNVSQLKGGEVTCLTLNSLGIQMCSEENGGAWRILDCGSPDIEVHTYPFGWYQKPIAQNNAPSFCPLVVLPSLTEKVSLDSWQSLALSSVVVDPSIRHFDVAHVSTAATSNFSAVRDLCLSECSQHEACLITTLQTQPGAVRCMFYADTQSCTHSLQGQNCRLLLREEATHIYRKPGISLLSYEASVPSVPISTHGRLLGRSQAIQVGTSWKQVDQFLGVPYAAPPLAERRFQAPEPLNWTGSWDASKPRASCWQPGTRTSTSPGVSEDCLYLNVFIPQNVAPNASVLVFFHNTMDREESEGWPAIDGSFLAAVGNLIVVTASYRVGVFGFLSSGSGEVSGNWGLLDQVAALTWVQTHIRGFGGDPRRVSLAADRGGADVASIHLLTARATNSQLFRRAVLMGGSALSPAAVISHERAQQQAIALAKEVSCPMSSSQEVVSCLRQKPANVLNDAQTKLLAVSGPFHYWGPVIDGHFLREPPARALKRSLWVEVDLLIGSSQDDGLINRAKAVKQFEESRGRTSSKTAFYQALQNSLGGEDSDARVEAAATWYYSLEHSTDDYASFSRALENATRDYFIICPIIDMASAWAKRARGNVFMYHAPENYGHGSLELLADVQFALGLPFYPAYEGQFSLEEKSLSLKIMQYFSHFIRSGNPNYPYEFSRKVPTFATPWPDFVPRAGGENYKEFSELLPNRQGLKKADCSFWSKYISSLKTSADGAKGGQSAESEEEELTAGSGLREDLLSLQEPGSKTYSK

SEQ ID NO: 13156 - protein, 147 aa, Homo Sapiens
  misc_feature (1)..(1): Xaa can be any naturally occurring amino acid
XSAGASALLRSGPYMPQCDAFGSWEPVQCHAGTGHCWCVDEKGGFIPGSLTARSLQIPQCPTTCEKSRTSGLLSSWKQARSQENPSPKDLFVPACLEARGVRCHSTRRRWLVEQSCVRQSRAPQALPCSSANCCAARAPGACFHQGH

SEQ ID NO: 13157 - protein, 62 aa, Homo Sapiens
  misc_feature (1)..(1): Xaa can be any naturally occurring amino acid
XSDMGSRPESMGCRKDTVPRPASPTEAGCVQEHSFCQLAEITESASLYFTCTLYPEAQVCDD

SEQ ID NO: 13158 - protein, 390 aa, Homo Sapiens
MPPSGLRLLPLLLPLLWLLVLTPGRPAAGLSTCKTIDMELVKRKRIEAIRGQILSKLRLASPPSQGEVPPGPLPEAVLALYNSTRDRVAGESAEPEPEPEADYYAKEVTRVLMVETHNEIYDKFKQSTHSIYMFFNTSELREAVPEPVLLSRAELRLLRLKLKVEQHVELYQKYSNNSWRYLSNRLLAPSDSPEWLSFDVTGVVRQWLSRGGEIEGFRLSAHCSCDSRDNTLQVDINGFTTGRRGDLATIHGMNRPFLLLMATPLERAQHLQSSRHRRALDTNYCFSSTEKNCCVRQLYIDFRKDLGWKWIHEPKGYHANFCLGPCPYIWSLDTQYSKVLALYNQHNPGASAAPCCVPQALEPLPIVYYVGRKPKVEQLSNMIVRSCKCS

SEQ ID NO: 13159 - protein, 120 aa, Homo Sapiens
  misc_feature (1)..(1): Xaa can be any naturally occurring amino acid
XFTTGRRGDLATIHGMNRPFLLLMATPLERAQHLQSSRHRRALDTNYCFSSTEKNCCVRQLYIDFRKDLGWKWIHEPKGYHANFCLGPCPYIWSLDTQYSKLNEQNLIQEVPNIWQREVG

SEQ ID NO: 13160 - protein, 414 aa, Homo Sapiens
MHYCVLSAFLILHLVTVALSLSTCSTLDMDQFMRKRIEAIRGQILSKLKLTSPPEDYPEPEEVPPEVISIYNSTRDLLQEKASRRAAACERERSDEEYYAKEVYKIDMPPFFPSENAIPPTFYRPYFRIVRFDVSAMEKNASNLVKAEFRVFRLQNPKARVPEQRIELYQILKSKDLTSPTQRYIDSKVVKTRAEGEWLSFDVTDAVHEWLHHKDRNLGFKISLHCPCCTFVPSNNYIIPNKSEELEARFAGIDGTSTYTSGDQKTIKSTRKKNSGKTPHLLLMLLPSYRLESQQTNRRKKRALDAAYCFRNVQDNCCLRPLYIDFKRDLGWKWIHEPKGYNANFCAGACPYLWSSDTQHSRVLSLYNTINPEASASPCCVSQDLEPLTILYYIGKTPKIEQLSNMIVKSCKCS

SEQ ID NO: 13161 - protein, 442 aa, Homo Sapiens
MHYCVLSAFLILHLVTVALSLSTCSTLDMDQFMRKRIEAIRGQILSKLKLTSPPEDYPEPEEVPPEVISIYNSTRDLLQEKASRRAAACERERSDEEYYAKEVYKIDMPPFFPSETVCPVVTTPSGSVGSLCSRQSQVLCGYLDAIPPTFYRPYFRIVRFDVSAMEKNASNLVKAEFRVFRLQNPKARVPEQRIELYQILKSKDLTSPTQRYIDSKVVKTRAEGEWLSFDVTDAVHEWLHHKDRNLGFKISLHCPCCTFVPSNNYIIPNKSEELEARFAGIDGTSTYTSGDQKTIKSTRKKNSGKTPHLLLMLLPSYRLESQQTNRRKKRALDAAYCFRNVQDNCCLRPLYIDFKRDLGWKWIHEPKGYNANFCAGACPYLWSSDTQHSRVLSLYNTINPEASASPCCVSQDLEPLTILYYIGKTPKIEQLSNMIVKSCKCS

SEQ ID NO: 13162 - protein, 412 aa, Homo Sapiens
MKMHLQRALVVLALLNFATVSLSLSTCTTLDFGHIKKKRVEAIRGQILSKLRLTSPPEPTVMTHVPYQVLALYNSTRELLEEMHGEREEGCTQENTESEYYAKEIHKFDMIQGLAEHNELAVCPKGITSKVFRFNVSSVEKNRTNLFRAEFRVLRVPNPSSKRNEQRIELFQILRPDEHIAKQRYIGGKNLPTRGTAEWLSFDVTDTVREWLLRRESNLGLEISIHCPCHTFQPNGDILENIHEVMEIKFKGVDNEDDHGRGDLGRLKKQKDHHNPHLILMMIPPHRLDNPGQGGQRKKRALDTNYCFRNLEENCCVRPLYIDFRQDLGWKWVHEPKGYYANFCSGPCPYLRSADTTHSTVLGLYNTLNPEASASPCCVPQDLEPLTILYYVGRTPKVEQLSNMVVKSCKCS

SEQ ID NO: 13163 - protein, 309 aa, Homo Sapiens
MKMHLQRALVVLALLNFATVSLSLSTCTTLDFGHIKKKRVEAIRGQILSKLRLTSPPEPTVMTHVPYQVLALYNSTRELLEEMHGEREEGCTQENTESEYYAKEIHKFDMIQGLAEHNELAVCPKGITSKVFRFNVSSVEKNRTNLFRAEFRVLRVPNPSSKRNEQRIELFQILRPDEHIAKQRYIGGKNLPTRGTAEWLSFDVTDTVREWLLRRESNLGLEISIHCPCHTFQPNGDILENIHEVMEIKFKGVDNEDDHGRGDLGRLKKQKDHHNPHLILMMIPPHRLDNPGQGGQRKKRALDTNYCFR

SEQ ID NO: 13164 - protein, 683 aa, Homo Sapiens
MALFVRLLALALALALGPAATLAGPAKSPYQLVLQHSRLRGRQHGPNVCAVQKVIGTNRKYFTNCKQWYQRKICGKSTVISYECCPGYEKVPGEKGCPAALPLSNLYETLGVVGSTTTQLYTDRTEKLRPEMEGPGSFTIFAPSNEAWASLPAEVLDSLVSNVNIELLNALRYHMVGRRVLTDELKHGMTLTSMYQNSNIQIHHYPNGIVTVNCARLLKADHHATNGVVHLIDKVISTITNNIQQIIEIEDTFETLRAAVAASGLNTMLEGNGQYTLLAPTNEAFEKIPSETLNRILGDPEALRDLLNNHILKSAMCAEAIVAGLSVETLEGTTLEVGCSGDMLTINGKAIISNKDILATNGVIHYIDELLIPDSAKTLFELAAESDVSTAIDLFRQAGLGNHLSGSERLTLLAPLNSVFKDGTPPIDAHTRNLLRNHIIKDQLASKYLYHGQTLETLGGKKLRVFVYRNSLCIENSCIAAHDKRGRYGTLFTMDRVLTPPMGTVMDVLKGDNRFSMLVAAIQSAGLTETLNREGVYTVFAPTNEAFRALPPRERSRLLGDAKELANILKYHIGDEILVSGGIGALVRLKSLQGDKLEVSLKNNVVSVNKEPVAEPDIMATNGVVHVITNVLQPPANRPQERGDELADSALEIFKQASAFSRASQRSVRLAPVYQKLLERMKH

SEQ ID NO: 13165 - protein, 65 aa, Homo Sapiens
MATNGVVHVITNVLQPPANRPQERGDELADSALEIFKQASAFSRASQRSVRLAPVYQKLLERMKH

SEQ ID NO: 13166 - protein, 219 aa, Homo Sapiens
RAAVAASGLNTMLEGNGQYTLLAPTNEAFEKIPSETLNRILGDPEALRDLLNNHILKSAMCAEAIVAGLSVETLEGTTLEVGCSGDMLTINGKAIISNKDILATNGVIHYIDELLIPDSAKTLFELAAESDVSTAIDLFRQAGLGNHLSGSERLTLLAPLNSVFKDGTPPIDAHTRNLLRNHIIKDQLASKYLYHGQTLETLGGKKLRVFVYRNVSSGS

SEQ ID NO: 13167 - protein, 366 aa, Homo Sapiens
  misc_feature (1)..(1): Xaa can be any naturally occurring amino acid
XAFEKIPSETLNRILGDPEALRDLLNNHILKSAMCAEAIVAGLSVETLEGTTLEVGCSGDMLTINGKAIISNKDILATNGVIHYIDELLIPDSAKTLFELAAESDVSTAIDLFRQAGLGNHLSGSERLTLLAPLNSVFKDGTPPIDAHTRNLLRNHIIKDQLASKYLYHGQTLETLGGKKLRVFVYRNSLCIENSCIAAHDKRGRYGTLFTMDRVLTPPMGTVMDVLKGDNRFSMLVAAIQSAGLTETLNREGVYTVFAPTNEAFRALPPRERSRLLGDAKELANILKYHIGDEILVSGGIGALVRLKSLQGDKLEVSLKNNVVSVNKEPVAEPDIMATNGVVHVITNVLQPPAPVYQKLLERMKH

SEQ ID NO: 13168 - protein, 59 aa, Homo Sapiens
  misc_feature (1)..(1): Xaa can be any naturally occurring amino acid
XKTLFELAAESDVSTAIDLFRQAGLGNHLSGSERLTLLAPLNSVFKGAHLSGPNHHPFL

SEQ ID NO: 13169 - protein, 194 aa, Homo Sapiens
  misc_feature (1)..(1): Xaa can be any naturally occurring amino acid
XNGVVHLIDKVISTITNNIQQIIEIEDTFETLRAAVAASGLNTMLEGNGQYTLLAPTNEAFEKIPSETLNRILGDPEALRDMLTINGKAIISNKDILATNGVIHYIDELLIPDSAKTLFELAAESDVSTAIDLFRQAGLGNHLSGSERLTLLAPLNSVFKDGTPPIDAHTRNLLRNHIIKDQLASKYLYHGQTL

SEQ ID NO: 13170 - protein, 128 aa, Homo Sapiens
  misc_feature (1)..(1): Xaa can be any naturally occurring amino acid
XPYQLVLQHSRLRGRQHGPNVCAVQKVIGTNRKYFTNCKQWYQRKICGKSTVISYECCPGYEKVPGEKGCPAALPLSNLYETLGVVGSTTTQLYTDRTEKLRPEMEGPGSFTIFAPSNEAWASLPAVR

SEQ ID NO: 13171 - protein, 78 aa, Homo Sapiens
  misc_feature (1)..(1): Xaa can be any naturally occurring amino acid
XQGDKLEVSLKNNVVSVNKEPVAEPDIMATNGVVHVITNVLQPPANRPQERGDELADSALEIFKQASAFSRPLSIKSY

SEQ ID NO: 13172 - protein, 114 aa, Homo Sapiens
MCIAEIDLIPRDRPFVCAPSSKTGSVTTTYCCNQDHCNKIELPTTGLPLLVQRTIARTIVLQESIGKGRFGEVWRGKWRGEEVAVKIFSSREERSWFREAEIYQTVMLRHENIL

SEQ ID NO: 13173 - protein, 114 aa, Homo Sapiens
MCIAEIDLIPRDRPFVCAPSSKTGSVTTTYCCNQDHCNKIELPTTGPFSVKSSPGLGPVELAAVIAGPVCFVCISLMLMVYICHNRTVIHHRVPNEEDPSLDRPFISEGTTLKD

SEQ ID NO: 13174 - protein, 126 aa, Homo Sapiens
MCIAEIDLIPRDRPFVCAPSSKTGSVTTTYCCNQDHCNKIELPTTGPFSVKSSPGLGPVELAAVIAGPVCFVCISLMLMVYICHNRTVIHHRVPNEEDPSLDRPFISEGTTLKDLIYDMTTSGSGS

SEQ ID NO: 13175 - protein, 118 aa, Homo Sapiens
MCIAEIDLIPRDRPFVCAPSSKTGSVTTTYCCNQDHCNKIELPTTVKSSPGLGPVELAAVIAGPVCFVCISLMLMVYICHNRTVIHHRVPNEEDPSLDRPFISEGTTLKDLIYDMTTS

SEQ ID NO: 13176 - protein, 122 aa, Homo Sapiens
MCIAEIDLIPRDRPFVCAPSSKTGSVTTTYCCNQDHCNKIELPTTVKSSPGLGPVELAAVIAGPVCFVCISLMLMVYICHNRTVIHHRVPNEEDPSLDRPFISEGTTLKDLIYDMTTSGSGS

SEQ ID NO: 13177 - protein, 434 aa, Homo Sapiens
MCIAEIDLIPRDRPFVCAPSSKTGSVTTTYCCNQDHCNKIELPTTVKSSPGLGPVELAAVIAGPVCFVCISLMLMVYICHNRTVIHHRVPNEEDPSLDRPFISEGTTLKDLIYDMTTSGSGSGLPLLVQRTIARTIVLQESIGKGRFGEVWRGKWRGEEVAVKIFSSREERSWFREAEIYQTVMLRHENILGFIAADNKDNGTWTQLWLVSDYHEHGSLFDYLNRYTVTVEGMIKLALSTASGLAHLHMEIVGTQGKPAIAHRDLKSKNILVKKNGTCCIADLGLAVRHDSATDTIDIAPNHRVGTKRYMAPEVLDDSINMKHFESFKRADIYAMGLVFWEIARRCSIGGIHEDYQLPYYDLVPSDPSVEEMRKVVCEQKLRPNIPNRWQSCEALRVMAKIMRECWYANGAARLTALRIKKTLSQLSQQEGIKM

SEQ ID NO: 13178 - protein, 426 aa, Homo Sapiens
MEAAVAAPRPRLLLLVLAAAAAAAAALLPGATALQCFCHLCTKDNFTCVTDGLCFVSVTETTDKVIHNSMCIAEIDLIPRDRPFVCAPSSKTGSVTTTYCCNQDHCNKIELPTTGLPLLVQRTIARTIVLQESIGKGRFGEVWRGKWRGEEVAVKIFSSREERSWFREAEIYQTVMLRHENILGFIAADNKDNGTWTQLWLVSDYHEHGSLFDYLNRYTVTVEGMIKLALSTASGLAHLHMEIVGTQGKPAIAHRDLKSKNILVKKNGTCCIADLGLAVRHDSATDTIDIAPNHRVGTKRYMAPEVLDDSINMKHFESFKRADIYAMGLVFWEIARRCSIGGIHEDYQLPYYDLVPSDPSVEEMRKVVCEQKLRPNIPNRWQSCEALRVMAKIMRECWYANGAARLTALRIKKTLSQLSQQEGIKM

SEQ ID NO: 13179 - protein, 383 aa, Homo Sapiens
MEAAVAAPRPRLLLLVLAAAAAAAAALLPGATALQCFCHLCTKDNFTCVTDGLCFVSVTETTDKVIHNSMCIAEIDLIPRDRPFVCAPSSKTGSVTTTYCCNQDHCNKIELPTTGPFSVKSSPGLGPVELAAVIAGPVCFVCISLMLMVYICHNRTVIHHRVPNEEDPSLDRPFISEGTTLKDLIYDMTTSGSGSGLPLLVQRTIARTIVLQESIGKGRFGEVWRGKWRGEEVAVKIFSSREERSWFREAEIYQTVMLRHENILGFIAADNKDNGTWTQLWLVSDYHEHGSLFDYLNRYTVTVEGMIKLALSTASGLAHLHMEIVGTQGKPAIAHRDLKSKNILVKKNGTCCIADLGLAVRHDSATDTIDIAPNHRVGTKRNS

SEQ ID NO: 13180 - protein, 507 aa, Homo Sapiens
MEAAVAAPRPRLLLLVLAAAAAAAAALLPGATALQCFCHLCTKDNFTCVTDGLCFVSVTETTDKVIHNSMCIAEIDLIPRDRPFVCAPSSKTGSVTTTYCCNQDHCNKIELPTTGPFSVKSSPGLGPVELAAVIAGPVCFVCISLMLMVYICHNRTVIHHRVPNEEDPSLDRPFISEGTTLKDLIYDMTTSGSGSGLPLLVQRTIARTIVLQESIGKGRFGEVWRGKWRGEEVAVKIFSSREERSWFREAEIYQTVMLRHENILGFIAADNKDNGTWTQLWLVSDYHEHGSLFDYLNRYTVTVEGMIKLALSTASGLAHLHMEIVGTQGKPAIAHRDLKSKNILVKKNGTCCIADLGLAVRHDSATDTIDIAPNHRVGTKRYMAPEVLDDSINMKHFESFKRADIYAMGLVFWEIARRCSIGGIHEDYQLPYYDLVPSDPSVEEMRKVVCEQKLRPNIPNRWQSCEALRVMAKIMRECWYANGAARLTALRIKKTLSQLSQQEGIKM

SEQ ID NO: 13181 - protein, 503 aa, Homo Sapiens
MEAAVAAPRPRLLLLVLAAAAAAAAALLPGATALQCFCHLCTKDNFTCVTDGLCFVSVTETTDKVIHNSMCIAEIDLIPRDRPFVCAPSSKTGSVTTTYCCNQDHCNKIELPTTVKSSPGLGPVELAAVIAGPVCFVCISLMLMVYICHNRTVIHHRVPNEEDPSLDRPFISEGTTLKDLIYDMTTSGSGSGLPLLVQRTIARTIVLQESIGKGRFGEVWRGKWRGEEVAVKIFSSREERSWFREAEIYQTVMLRHENILGFIAADNKDNGTWTQLWLVSDYHEHGSLFDYLNRYTVTVEGMIKLALSTASGLAHLHMEIVGTQGKPAIAHRDLKSKNILVKKNGTCCIADLGLAVRHDSATDTIDIAPNHRVGTKRYMAPEVLDDSINMKHFESFKRADIYAMGLVFWEIARRCSIGGIHEDYQLPYYDLVPSDPSVEEMRKVVCEQKLRPNIPNRWQSCEALRVMAKIMRECWYANGAARLTALRIKKTLSQLSQQEGIKM

SEQ ID NO: 13182 - protein, 35 aa, Homo Sapiens
MTSHYVIAIFALMSSCLATAGPEPGALCELSPVSA

SEQ ID NO: 13183 - protein, 89 aa, Homo Sapiens
MTSHYVIAIFALMSSCLATAGPEPGALCELSPVSASHPVQALMESFTVLSGCASRGTTGLPQEVHVLNLRTAGQGPGQLQREACSMNHY

SEQ ID NO: 13184 - protein, 851 aa, Homo Sapiens
MTSHYVIAIFALMSSCLATAGPEPGALCELSPVSASHPVQALMESFTVLSGCASRGTTGLPQEVHVLNLRTAGQGPGQLQREVTLHLNPISSVHIHHKSVVFLLNSPHPLVWHLKTERLATGVSRLFLVSEGSVVQFSSANFSLTAETEERNFPHGNEHLLNWARKEYGAVTSFTELKIARNIYIKVGEDQVFPPKCNIGKNFLSLNYLAEYLQPKAAEGCVMSSQPQNEEVHIIELITPNSNPYSAFQVDITIDIRPSQEDLEVVKNLILILKCKKSVNWVIKSFDVKGSLKIIAPNSIGFGKESERSMTMTKSIRDDIPSTQGNLVKWALDNGYSPITSYTMAPVANRFHLRLENNAEEMGDEEVHTIPPELRILLDPGALPALQNPPIRGGEGQNGGLPFPFPDISRRVWNEEGEDGLPRPKDPVIPSIQLFPGLREPEEVQGSVDIALSVKCDNEKMIVAVEKDSFQASGYSGMDVTLLDPTCKAKMNGTHFVLESPLNGCGTRPRWSALDGVVYYNSIVIQVPALGDSSGWPDGYEDLESGDNGFPGDMDEGDASLFTRPEIVVFNCSLQQVRNPSSFQEQPHGNITFNMELYNTDLFLVPSQGVFSVPENGHVYVEVSVTKAEQELGFAIQTCFISPYSNPDRMSHYTIIENICPKDESVKFYSPKRVHFPIPQADMDKKRFSFVFKPVFNTSLLFLQCELTLCTKMEKHPQKLPKCVPPDEACTSLDASIIWAMMQNKKTFTKPLAVIHHEAESKEKGPSMKEPNPISPPIFHGLDTLTVMGIAFAAFVIGALLTGALWYIYSHTGETAGRQQVPTSPPASENSSAAHSIGSTQSTPCSSSSTA

SEQ ID NO: 13185 - protein, 850 aa, Homo Sapiens
MTSHYVIAIFALMSSCLATAGPEPGALCELSPVSASHPVQALMESFTVLSGCASRGTTGLPQEVHVLNLRTAGQGPGQLQREVTLHLNPISSVHIHHKSVVFLLNSPHPLVWHLKTERLATGVSRLFLVSEGSVVQFSSANFSLTAETEERNFPHGNEHLLNWARKEYGAVTSFTELKIARNIYIKVGEDQVFPPKCNIGKNFLSLNYLAEYLQPKAAEGCVMSSQPQNEEVHIIELITPNSNPYSAFQVDITIDIRPSQEDLEVVKNLILILKCKKSVNWVIKSFDVKGSLKIIAPNSIGFGKESERSMTMTKSIRDDIPSTQGNLVKWALDNGYSPITSYTMAPVANRFHLRLENNEEMGDEEVHTIPPELRILLDPGALPALQNPPIRGGEGQNGGLPFPFPDISRRVWNEEGEDGLPRPKDPVIPSIQLFPGLREPEEVQGSVDIALSVKCDNEKMIVAVEKDSFQASGYSGMDVTLLDPTCKAKMNGTHFVLESPLNGCGTRPRWSALDGVVYYNSIVIQVPALGDSSGWPDGYEDLESGDNGFPGDMDEGDASLFTRPEIVVFNCSLQQVRNPSSFQEQPHGNITFNMELYNTDLFLVPSQGVFSVPENGHVYVEVSVTKAEQELGFAIQTCFISPYSNPDRMSHYTIIENICPKDESVKFYSPKRVHFPIPQADMDKKRFSFVFKPVFNTSLLFLQCELTLCTKMEKHPQKLPKCVPPDEACTSLDASIIWAMMQNKKTFTKPLAVIHHEAESKEKGPSMKEPNPISPPIFHGLDTLTVMGIAFAAFVIGALLTGALWYIYSHTGETAGRQQVPTSPPASENSSAAHSIGSTQSTPCSSSSTA

SEQ ID NO: 13186 - protein, 850 aa, Homo Sapiens; identical to SEQ ID NO: 13185

SEQ ID NO: 13187 - protein, 851 aa, Homo Sapiens; identical to SEQ ID NO: 13184

SEQ ID NO: 13188 - protein, 49 aa, Homo Sapiens
MTSHYVIAIFALMSSCLATAGWSAMARSWLTATSASRVQAILLPQPPEY

SEQ ID NO: 13189 - protein, 94 aa, Homo Sapiens
MGLAWGLGVLFLMHVCGTNRIPESGGDNSVFDIFELTGAARKGSGRRLVKGPDPSSPAFRIEDANLIPPVPDDKFQDLVDAVRAEKGFLLLASL

SEQ ID NO: 13190 - protein, 1170 aa, Homo Sapiens
MGLAWGLGVLFLMHVCGTNRIPESGGDNSVFDIFELTGAARKGSGRRLVKGPDPSSPAFRIEDANLIPPVPDDKFQDLVDAVRAEKGFLLLASLRQMKKTRGTLLALERKDHSGQVFSVVSNGKAGTLDLSLTVQGKQHVVSVEEALLATGQWKSITLFVQEDRAQLYIDCEKMENAELDVPIQSVFTRDLASIARLRIAKGGVNDNFQGVLQNVRFVFGTTPEDILRNKGCSSSTSVLLTLDNNVVNGSSPAIRTNYIGHKTKDLQAICGISCDELSSMVLELRGLRTIVTTLQDSIRKVTEENKELANELRRPPLCYHNGVQYRNNEEWTVDSCTECHCQNSVTICKKVSCPIMPCSNATVPDGECCPRCWPSDSADDGWSPWSEWTSCSTSCGNGIQQRGRSCDSLNNRCEGSSVQTRTCHIQECDKRFKQDGGWSHWSPWSSCSVTCGDGVITRIRLCNSPSPQMNGKPCEGEARETKACKKDACPINGGWGPWSPWDICSVTCGGGVQKRSRLCNNPTPQFGGKDCVGDVTENQICNKQDCPIDGCLSNPCFAGVKCTSYPDGSWKCGACPPGYSGNGIQCTDVDECKEVPDACFNHNGEHRCENTDPGYNCLPCPPRFTGSQPFGQGVEHATANKQVCKPRNPCTDGTHDCNKNAKCNYLGHYSDPMYRCECKPGYAGNGIICGEDTDLDGWPNENLVCVANATYHCKKDNCPNLPNSGQEDYDKDGIGDACDDDDDNDKIPDDRDNCPFHYNPAQYDYDRDDVGDRCDNCPYNHNPDQADTDNNGEGDACAADIDGDGILNERDNCQYVYNVDQRDTDMDGVGDQCDNCPLEHNPDQLDSDSDRIGDTCDNNQDIDEDGHQNNLDNCPYVPNANQADHDKDGKGDACDHDDDNDGIPDDKDNCRLVPNPDQKDSDGDGRGDACKDDFDHDSVPDIDDICPENVDISETDFRRFQMIPLDPKGTSQNDPNWVVRHQGKELVQTVNCDPGLAVGYDEFNAVDFSGTFFINTERDDDYAGFVFGYQSSSRFYVVMWKQVTQSYWDTNPTRAQGYSGLSVKVVNSTTGPGEHLRNALWHTGNTPGQVRTLWHDPRHIGWKDFTAYRWRLSHRPKTGFIRVVMYEGKKIMADSGPIYDKTYAGGRLGLFVFSQEMVFFSDLKYECRDP

SEQ ID NO: 13191 - protein, 83 aa, Homo Sapiens
MVWRLVLLALWVWPSTQAGHQDKDTTFDLFSISNINRKTIGAKQFRGPDPGVPAYRFVRFDYIPPVNADDLSKITKIMRQKEG

SEQ ID NO: 13192 - protein, 1172 aa, Homo Sapiens
MVWRLVLLALWVWPSTQAGHQDKDTTFDLFSISNINRKTIGAKQFRGPDPGVPAYRFVRFDYIPPVNADDLSKITKIMRQKEGFFLTAQLKQDGKSRGTLLALEGPGLSQRQFEIVSNGPADTLDLTYWIDGTRHVVSLEDVGLADSQWKNVTVQVAGETYSLHVGCDLIDSFALDEPFYEHLQAEKSRMYVAKGSARESHFRGLLQNVHLVFENSVEDILSKKGCQQGQGAEINAISENTETLRLGPHVTTEYVGPSSERRPEVCERSCEELGNMVQELSGLHVLVNQLSENLKRVSNDNQFLWELIGGPPKTRNMSACWQDGRFFAENETWVVDSCTTCTCKKFKTICHQITCPPATCASPSFVEGECCPSCLHSVDGEEGWSPWAEWTQCSVTCGSGTQQRGRSCDVTSNTCLGPSIQTRACSLSKCDTRIRQDGGWSHWSPWSSCSVTCGVGNITRIRLCNSPVPQMGGKNCKGSGRETKACQGAPCPIDGRWSPWSPWSACTVTCAGGIRERTRVCNSPEPQYGGKACVGDVQERQMCNKRSCPVDGCLSNPCFPGAQCSSFPDGSWSCGSCPVGFLGNGTHCEDLDECALVPDICFSTSKVPRCVNTQPGFHCLPCPPRYRGNQPVGVGLEAAKTEKQVCEPENPCKDKTHNCHKHAECIYLGHFSDPMYKCECQTGYAGDGLICGEDSDLDGWPNLNLVCATNATYHCIKDNCPHLPNSGQEDFDKDGIGDACDDDDDNDGVTDEKDNCQLLFNPRQADYDKDEVGDRCDNCPYVHNPAQIDTDNNGEGDACSVDIDGDDVFNERDNCPYVYNTDQRDTDGDGVGDHCDNCPLVHNPDQTDVDNDLVGDQCDNNEDIDDDGHQNNQDNCPYISNANQADHDRDGQGDACDPDDDNDGVPDDRDNCRLVFNPDQEDLDGDGRGDICKDDFDNDNIPDIDDVCPENNAISETDFRNFQMVPLDPKGTTQIDPNWVIRHQGKELVQTANSDPGIAVGFDEFGSVDFSGTFYVNTDRDDDYAGFVFGYQSSSRFYVVMWKQVTQTYWEDQPTRAYGYSGVSLKVVNSTTGTGEHLRNALWHTGNTPGQVRTLWHDPRNIGWKDYTAYRWHLTHRPKTGYIRVLVHEGKQVMADSGPIYDQTYAGGRLGLFVFSQEMVYFSDLKYECRDI

SEQ ID NO: 13193 - protein, 1172 aa, Homo Sapiens; identical to SEQ ID NO: 13192

SEQ ID NO: 13194 - protein, 485 aa, Homo Sapiens
MDNNKHCKQDNCLLTPNSGQEDADNDGVGDQCDDDADGDGIKNVEDNCRLFPNKDQQNSDTDSFGDACDNCPNVPNNDQKDTDGNGEGDACDNDVDGDGIPNGLDNCPKVPNPLQTDRDEDGVGDACDSCPEMSNPTQTDADSDLVGDVCDTNEDSDGDGHQDTKDNCPQLPNSSQLDSDNDGLGDECDGDDDNDGIPDYVPPGPDNCRLVPNPNQKDSDGNGVGDVCEDDFDNDAVVDPLDVCPESAEVTLTDFRAYQTVVLDPEGDAQIDPNWVVLNQGMEIVQTMNSDPGLAVGYTAFNGVDFEGTFHVNTVTDDDYAGFLFSYQDSGRFYVVMWKQTEQTYWQATPFRAVAQPGLQLKAVTSVSGPGEHLRNALWHTGHTPDQVRLLWTDPRNVGWRDKTSYRWQLLHRPQVGYIRVKLYEGPQLVADSGVIIDTSMRGGRLGVFCFSQENIIWSNLQYRCNDTVPEDFEPFRRQLLQGRV

SEQ ID NO: 13195 - protein, 947 aa, Homo Sapiens
METQELRGALALLLLCFFTSASQDLQVIDLLTVGESRQMVAVAEKIRTALLTAGDIYLLSTFRLPPKQGGVLFGLYSRQDNTRWLEASVVGKINKVLVRYQREDGKVHAVNLQQAGLADGRTHTVLLRLRGPSRPSPALHLYVDCKLGDQHAGLPALAPIPPAEVDGLEIRTGQKAYLRMQGFVESMKIILGGSMARVGALSECPFQGDESIHSAGEQTKALVTQLTLFNQILVELRDDIRDQVKEMSLIRNTIMECQVCGFHEQRSHCSPNPCFRGVDCMEVYEYPGYRCGPCPPGLQGNGTHCSDINECAHADPCFPGSSCINTMPGFHCEACPRGYKGTQVSGVGIDYARASKQVCNDIDECNDGNNGGCDPNSICTNTVGSFKCGPCRLGFLGNQSQGCLPARTCHSPAHSPCHIHAHCLFERNGAVSCQCNVGWAGNGNVCGTDTDIDGYPDQALPCMDNNKHCKQDNCLLTPNSGQEDADNDGVGDQCDDDADGDGIKNVEDNCRLFPNKDQQNSDTDSFGDACDNCPNVPNNDQKDTDGNGEGDACDNDVDGDGIPNGLDNCPKVPNPLQTDRDEDGVGDACDSCPEMSNPTQTDADSDLVGDVCDTNEDSDGDGHQDTKDNCPQLPNSSQLDSDNDGLGDECDGDDDNDGIPDYVPPGPDNCRLVPNPNQKDSDGNGVGDVCEDDFDNDAVVDPLDVCPESAEVTLTDFRAYQTVVLDPEGDAQIDPNWVVLNQGMEIVQTMNSDPGLAVGYTAFNGVDFEGTFHVNTVTDDDYAGFLFSYQDSGRFYVVMWKQTEQTYWQATPFRAVAQPGLQLKAVTSVSGPGEHLRNALWHTGHTPDQVRLLWTDPRNVGWRDKTSYRWQLLHRPQVGYIRVKLYEGPQLVADSGVIIDTSMRGGRLGVFCFSQENIIWSNLQYRCNDTVPEDFEPFRRQLLQGRV

SEQ ID NO: 13196 - protein, 956 aa, Homo Sapiens
METQELRGALALLLLCFFTSASQDLQVIDLLTVGESRQMVAVAEKIRTALLTAGDIYLLSTFRLPPKQGGVLFGLYSRQDNTRWLEASVVGKINKVLVRYQREDGKVHAVNLQQAGLADGRTHTVLLRLRGPSRPSPALHLYVDCKLGDQHAGLPALAPIPPAEVDGLEIRTGQKAYLRMQGFVESMKIILGGSMARVGALSECPFQGDESIHSAVTNALHSILGEQTKALVTQLTLFNQILVELRDDIRDQVKEMSLIRNTIMECQVCGFHEQRSHCSPNPCFRGVDCMEVYEYPGYRCGPCPPGLQGNGTHCSDINECAHADPCFPGSSCINTMPGFHCEACPRGYKGTQVSGVGIDYARASKQVCNDIDECNDGNNGGCDPNSICTNTVGSFKCGPCRLGFLGNQSQGCLPARTCHSPAHSPCHIHAHCLFERNGAVSCQCNVGWAGNGNVCGTDTDIDGYPDQALPCMDNNKHCKQDNCLLTPNSGQEDADNDGVGDQCDDDADGDGIKNVEDNCRLFPNKDQQNSDTDSFGDACDNCPNVPNNDQKDTDGNGEGDACDNDVDGDGIPNGLDNCPKVPNPLQTDRDEDGVGDACDSCPEMSNPTQTDADSDLVGDVCDTNEDSDGDGHQDTKDNCPQLPNSSQLDSDNDGLGDECDGDDDNDGIPDYVPPGPDNCRLVPNPNQKDSDGNGVGDVCEDDFDNDAVVDPLDVCPESAEVTLTDFRAYQTVVLDPEGDAQIDPNWVVLNQGMEIVQTMNSDPGLAVGYTAFNGVDFEGTFHVNTVTDDDYAGFLFSYQDSGRFYVVMWKQTEQTYWQATPFRAVAQPGLQLKAVTSVSGPGEHLRNALWHTGHTPDQVRLLWTDPRNVGWRDKTSYRWQLLHRPQVGYIRVKLYEGPQLVADSGVIIDTSMRGGRLGVFCFSQENIIWSNLQYRCNDTVPEDFEPFRRQLLQGRV

SEQ ID NO: 13197 - protein, 400 aa, Homo Sapiens
METQELRGALALLLLCFFTSASQDLQVIDLLTVGESRQMVAVAEKIRTALLTAGDIYLLSTFRLPPKQGGVLFGLYSRQDNTRWLEASVVGKINKVTNALHSILGEGNVPDPKHHYGVSGFHEQRSHCSPNPCFRGVDCMEVYEYPGYRCGPCPPGLQGNGTHCSDINECAHADPCFPGSSCINTMPGFHCEACPRGYKGTQVSGVGIDYARASKQVCNDIDECNDGNNGGCDPNSICTNTVGSFKCGPCRLGFLGNQSQGCLPARTCHSPAHSPCHIHAHCLFERNGAVSCQCNVGWAGNGNVCGTDTDIDGYPDQALPCMDNNKHCKQDNCLLTPNSGQEDADNDGVGDQCDDDADGDGIKNVEASPMDWTIALKSPTHYRQTGMRTGWEMLATAALK

SEQ ID NO: 13198 - protein, 836 aa, Homo Sapiens
METQELRGALALLLLCFFTSASQDLQVIDLLTVGESRQMVAVAEKIRTALLTAGDIYLLSTFRLPPKQGGVLFGLYSRQDNTRWLEASVVGKINKVTNALHSILGEQTKALVTQLTLFNQILVELRDDIRDQVKEMSLIRNTIMECQVCGFHEQRSHCSPNPCFRGVDCMEVYEYPGYRCGPCPPGLQGNGTHCSDINECAHADPCFPGSSCINTMPGFHCEACPRGYKGTQVSGVGIDYARASKQVCNDIDECNDGNNGGCDPNSICTNTVGSFKCGPCRLGFLGNQSQGCLPARTCHSPAHSPCHIHAHCLFERNGAVSCQCNVGWAGNGNVCGTDTDIDGYPDQALPCMDNNKHCKQDNCLLTPNSGQEDADNDGVGDQCDDDADGDGIKNVEDNCRLFPNKDQQNSDTDSFGDACDNCPNVPNNDQKDTDGNGEGDACDNDVDGDGIPNGLDNCPKVPNPLQTDRDEDGVGDACDSCPEMSNPTQTDADSDLVGDVCDTNEDSDGDGHQDTKDNCPQLPNSSQLDSDNDGLGDECDGDDDNDGIPDYVPPGPDNCRLVPNPNQKDSDGNGVGDVCEDDFDNDAVVDPLDVCPESAEVTLTDFRAYQTVVLDPEGDAQIDPNWVVLNQGMEIVQTMNSDPGLAVGYTAFNGVDFEGTFHVNTVTDDDYAGFLFSYQDSGRFYVVMWKQTEQTYWQATPFRAVAQPGLQLKAVTSVSGPGEHLRNALWHTGHTPDQVRLLWTDPRNVGWRDKTSYRWQLLHRPQVGYIRVKLYEGPQLVADSGVIIDTSMRGGRLGVFCFSQENIIWSNLQYRCNDTVPEDFEPFRRQLLQGRV

SEQ ID NO: 13199 - protein, 870 aa, Homo Sapiens
MGRLNKAILRYLKNDGKVHLVVFNNLQLADGRRHRILLRLSNLQRGAGSLELYLDCIQVDSVHNLPRAFAGPSQKPETIELRTFQRKPQDFLEELKLVVRGSLFQVASLQDCFLQQSEPLAATGTGDFNRQFLGQMTQLNQLLGEVKDLLRQQVKETSFLRNTIAECQACGPLKFQSPTPSTVVPPAPPAPPTRPPRRCDSNPCFRGVQCTDSRDGFQCGPCPEGYTGNGITCIDVDECKYHPCYPGVHCINLSPGFRCDACPVGFTGPMVQGVGISFAKSNKQVCTDIDECRNGACVPNSICVNTLGSYRCGPCKPGYTGDQIRGCKAERNCRNPELNPCSVNAQCIEERQGDVTCVCGVGWAGDGYICGKDVDIDSYPDEELPCSARNCKKDNCKYVPNSGQEDADRDGIGDACDEDADGDGILNEQDNCVLIHNVDQRNSDKDIFGDACDNCLSVLNNDQKDTDGDGRGDACDDDMDGDGIKNILDNCPKFPNRDQRDKDGDGVGDACDSCPDVSNPNQSDVDNDLVGDSCDTNQDSDGDGHQDSTDNCPTVINSAQLDTDKDGIGDECDDDDDNDGIPDLVPPGPDNCRLVPNPAQEDSNSDGVGDICESDFDQDQVIDRIDVCPENAEVTLTDFRAYQTVVLDPEGDAQIDPNWVVLNQGMEIVQTMNSDPGLAVGYTAFNGVDFEGTFHVNTQTDDDYAGFIFGYQDSSSFYVVMWKQTEQTYWQATPFRAVAEPGIQLKAVKSKTGPGEHLRNSLWHTGDTSDQVRLLWKDSRNVGWKDKVSYRWFLQHRPQVGYIRVRFYEGSELVADSGVTIDTTMRGGRLGVFCFSQENIIWSNLKYRCNDTIPEDFQEFQTQNFDRFDN

SEQ ID NO: 13200 - protein, 961 aa, Homo Sapiens
MLAPRGAAVLLLHLVLQRWLAAGAQATPQVFDLLPSSSQRLNPGALLPVLTDPALNDLYVISTFKLQTKSSATIFGLYSSTDNSKYFEFTVMGRLNKAILRYLKNDGKVHLVVFNNLQLADGRRHRILLRLSNLQRGAGSLELYLDCIQVDSVHNLPRAFAGPSQKPETIELRTFQRKPQDFLEELKLVVRGSLFQVASLQDCFLQQSEPLAATGTGDFNRQFLGQMTQLNQLLGEVKDLLRQQVKETSFLRNTIAECQACGPLKFQSPTPSTVVPPAPPAPPTRPPRRCDSNPCFRGVQCTDSRDGFQCGPCPEGYTGNGITCIDVDECKYHPCYPGVHCINLSPGFRCDACPVGFTGPMVQGVGISFAKSNKQVCTDIDECRNGACVPNSICVNTLGSYRCGPCKPGYTGDQIRGCKAERNCRNPELNPCSVNAQCIEERQGDVTCVCGVGWAGDGYICGKDVDIDSYPDEELPCSARNCKKDNCKYVPNSGQEDADRDGIGDACDEDADGDGILNEQDNCVLIHNVDQRNSDKDIFGDACDNCLSVLNNDQKDTDGDGRGDACDDDMDGDGIKNILDNCPKFPNRDQRDKDGDGVGDACDSCPDVSNPNQSDVDNDLVGDSCDTNQDSDGDGHQDSTDNCPTVINSAQLDTDKDGIGDECDDDDDNDGIPDLVPPGPDNCRLVPNPAQEDSNSDGVGDICESDFDQDQVIDRIDVCPENAEVTLTDFRAYQTVVLDPEGDAQIDPNWVVLNQGMEIVQTMNSDPGLAVGYTAFNGVDFEGTFHVNTQTDDDYAGFIFGYQDSSSFYVVMWKQTEQTYWQATPFRAVAEPGIQLKAVKSKTGPGEHLRNSLWHTGDTSDQVRLLWKDSRNVGWKDKVSYRWFLQHRPQVGYIRVRFYEGSELVADSGVTIDTTMRGGRLGVFCFSQENIIWSNLKYRCNDTIPEDFQEFQTQNFDRFDN

SEQ ID NO: 13201 - protein, 57 aa, Homo Sapiens
HDGKMLASASEDHFIDIAEVETVQQTHSASQKAAGPLAKRPVCSIVIIPPSLLPFES

SEQ ID NO: 13202 - protein, 105 aa, Homo Sapiens
MAVPAAAMGPSALGQSGPGSMAPWCSVSSGPSRYVLGMQELFRGHSKTREFLAHSAKVHSVAWSCDGRRLASGSFDKTASVFLLEKDRLGRTLISAGVLMGRPLL

SEQ ID NO: 13203 - protein, 105 aa, Homo Sapiens; identical to SEQ ID NO: 13202

SEQ ID NO: 13204 - protein, 351 aa, Homo Sapiens
MAVPAAAMGPSALGQSGPGSMAPWCSVSSGPSRYVLGMQELFRGHSKTREFLAHSAKVHSVAWSCDGRRLASGSFDKTASVFLLEKDRLVKENNYRGHGDSVDQLCWHPSNPDLFVTASGDKTIRIWDVRTTKCIATVNTKGENINICWSPDGQTIAVGNKDDVVTFIDAKTHRSKAEEQFKFEVNEISWNNDNNMFFLTNGNGCINILSYPELKPVQSINAHPSNCICIKFDPMGKYFATGSADALVSLWDVDELVCVRCFSRLDWPVRTLSFSHDGKMLASASEDHFIDIAEVETGDKLWEVQCESPTFTVAWHPKRPLLAFACDDKDGKYDSSREAGTVKLFGLPNDS

SEQ ID NO: 13205 - protein, 327 aa, Homo Sapiens
MAVPAAAMGPSALGQSGPGSMAPWCSVSSGPSRYVLGMQELFRGHSKTREFLAHSAKVHSVAWSCDGRRLASGSFDKTASVFLLEKDRLVKENNYRGHGDSVDQLCWHPSNPDLFVTASGDKTIRIWDVRTTKCIATVNTKGENINICWSPDGQTIAVGNKDDVVTFIDAKTHRSKAEEQFKFEVNEISWNNDNNMFFLTNGNGCINILSYPELKPVQSINAHPSNCICIKFDPMGKYFATGSADALVSLWDVDELVCVRCFSRLDWPVRTLSFSHDGKMLASASEDHFIDIAEVETGNFMRIYRLSPLAVRTSLVISSLHVTTSPA

SEQ ID NO: 13206 - protein, 166 aa, Homo Sapiens
MAWLCGSLPVVVAVTAMETAARQECYPELKPVQSINAHPSNCICIKFDPMGKYFATGSADALVSLWDVDELVCVRCFSRLDWPVRTLSFSHDGKMLASASEDHFIDIAEVETGDKLWEVQCESPTFTVAWHPKRPLLAFACDDKDGKYDSSREAGTVKLFGLPNDS

SEQ ID NO: 13207 - protein, 13 aa, Homo Sapiens
VAVTAMETAARQE

SEQ ID NO: 13208 - protein, 55 aa, Homo Sapiens
VVVAVTAMETAARQEWSKKTIIGDMGIVWTSFVGIQVILTYLLRRPEIKPFASGM

SEQ ID NO: 13209 - protein, 56 aa, Homo Sapiens
  misc_feature (1)..(1): Xaa can be any naturally occurring amino acid
XQSINAHPSNCICIKFDPMGKYFATGSADALVSLWDVDELVCVRCFSRGQTMGGTV

SEQ ID NO: 13210 - protein, 75 aa, Homo Sapiens
  misc_feature (1)..(1): Xaa can be any naturally occurring amino acid
XVSLWDVDELVCVRCFSRLDWPVRTLSFSHDGKMLASASEDHFIDIAEVETDRVSFCHPAWCAVVQAILLPQPPK

SEQ ID NO: 13211 - protein, 349 aa, Homo Sapiens
MELTELLLVVMLLLTARLTLSSPAPPACDLRVLSKLLRDSHVLHSRLSQCPEVHPLPTPVLLPAVDFSLGEWKTQMEETKAQDILGAVTLLLEGVMAARGQLGPTCLSSLLGQLSGQVRLLLGALQSLLGTQGRTTAHKDPNAIFLSFQHLLRGKVRFLMLVGGSTLCVRRAPPTTAVPSRTSLVLTLNELPNRTSGLLETNFTASARTTGSGLLKWQQGFRAKIPGLLNQTSRSLDQIPGYLNRIHELLNGTRGLFPGPSRRTLGAPDISSGTSDTGSLPPNLQPGYSPSPTHPPTGQYTLFPLPPTLPTPVVQLHPLLPDPSAPTPTPTSPLLNTSYTHSQNLSQEG

SEQ ID NO: 13212 - protein, 286 aa, Homo Sapiens
MELTELLLVVMLLLTARLTLSSPAPPACDLRVLSKLLRDSHVLHSRLSQCPEVHPLPTPVLLPAVDFSLGEWKTQMEETKAQDILGAVTLLLEGVMAARGQLGPTCLSSLLGQLSGQVRLLLGALQSLLGTQLPPQGRTTAHKDPNAIFLSFQHLLRGKDFWIVGDKLHCLSQNYWLWASEVAAGIQSQDSWSAEPNLQVPGPNPRIPEQDTRTLEWNSWTLSWTLTQDPRSPGHFLRNIRHRLPATQPPAWIFSFPNPSSYWTVYALPSSTHLAHPCGPAPPPAS

SEQ ID NO: 13213 - protein, 353 aa, Homo Sapiens
MELTELLLVVMLLLTARLTLSSPAPPACDLRVLSKLLRDSHVLHSRLSQCPEVHPLPTPVLLPAVDFSLGEWKTQMEETKAQDILGAVTLLLEGVMAARGQLGPTCLSSLLGQLSGQVRLLLGALQSLLGTQLPPQGRTTAHKDPNAIFLSFQHLLRGKVRFLMLVGGSTLCVRRAPPTTAVPSRTSLVLTLNELPNRTSGLLETNFTASARTTGSGLLKWQQGFRAKIPGLLNQTSRSLDQIPGYLNRIHELLNGTRGLFPGPSRRTLGAPDISSGTSDTGSLPPNLQPGYSPSPTHPPTGQYTLFPLPPTLPTPVVQLHPLLPDPSAPTPTPTSPLLNTSYTHSQNLSQEG

SEQ ID NO: 13214 - protein, 353 aa, Homo Sapiens; identical to SEQ ID NO: 13213

SEQ ID NO: 13215 - protein, 353 aa, Homo Sapiens; identical to SEQ ID NO: 13213

SEQ ID NO: 13216 - protein, 12 aa, Homo Sapiens
  misc_feature (1)..(1): Xaa can be any naturally occurring amino acid
XQSLLGTQTREA

SEQ ID NO: 13217 - protein, 219 aa, Homo Sapiens
MFVSYLILTLLHVQTAVLARPGGESIGCDDYLGSDKVVDKCGVCGGDNTGCQVVSGVFKHALTSLGYHRVVEIPEGATKINITEMYKSNKKKSHLKPATRGSQFSSVKVCSVPAACKLLGTPGRARQPVPAPRELEHDKNSPHCAYLSLYLTSLAQSSWRVFSLFSYVLIYLFSKYLAFNTLFALKRMALQRDRKEKTRAWCIFIKLCGREIQILPGPV

SEQ ID NO: 13218 - protein, 658 aa, Homo Sapiens
MFVSYLILTLLHVQTAVLARPGGESIGCDDYLGSDKVVDKCGVCGGDNTGCQVVSGVFKHALTSLGYHRVVEIPEGATKINITEMYKSNNYLALRSRSGRSIINGNWAIDRPGKYEGGGTMFTYKRPNEISSTAGESFLAEGPTNEILDVYMIHQQPNPGVHYEYVIMGTNAISPQVPPHRRPGEPFNGQMVTEGRSQEEGEQKGRNEEKEDLRGEAPEMFTSESAQTFPVRHPDRFSPHRPDNLVPPAPQPPRRSRDHNWKQLGTTECSTTCGKGSQYPIFRCVHRSTHEEAPESYCDSSMKPTPEEEPCNIFPCPAFWDIGEWSECSKTCGLGMQHRQVLCRQVYANRSLTVQPYRCQHLEKPETTSTCQLKICSEWQIRTDWTSCSVPCGVGQRTRDVKCVSNIGDVVDDEECNMKLRPNDIENCDMGPCAKSWFLTEWSERCSAECGAGVRTRSVVCMTNHVSSLPLEGCGNNRPAEATPCDNGPCTGKVEWFAGSWSQCSIECGSGTQQREVICVRKNADTFEVLDPSECSFLEKPPSQQSCHLKPCGAKWFSTEWSMCSKSCQGGFRVREVRCLSDDMTLSNLCDPQLKPEERESCNPQDCVPEVDENCKDKYYNCNVVVQARLCVYNYYKTACCASCTRVANRQTGFLGSR

SEQ ID NO: 13219 - protein, 101 aa, Homo Sapiens
MVSHFMGSLSVLCFLLLLGFQFVCPQPSTQHRKVPQRMAAEGAPEDDGGGGAPGVWGAWGPWSACSRSCSGGVMEQTRPCLPRSYRLRGGQRPGAPARAFA

SEQ ID NO: 13220 - protein, 1018 aa, Homo Sapiens
MVSHFMGSLSVLCFLLLLGFQFVCPQPSTQHRKVPQRMAAEGAPEDDGGGGAPGVWGAWGPWSACSRSCSGGVMEQTRPCLPRSYRLRGGQRPGAPARAFADHVVSAVRTSVPLHRSRDETPALAGTDASRQGPTVLRGSRHPQPQGLEVTGDRRSRTRGTIGPGKYGYGKAPYILPLQTDTAHTPQRLRRQKLSSRHSRSQGASSARHGYSSPAHQVPQHGPLYQSDSGPRSGLQAAEAPIYQLPLTHDQGYPAASSLFHSPETSNNHGVGTHGATQSFSQPARSTAISCIGAYRQYKLCNTNVCPESSRSIREVQCASYNNKPFMGRFYEWEPFAEVKGNRKCELNCQAMGYRFYVRQAEKVIDGTPCDQNGTAICVSGQCKSIGCDDYLGSDKVVDKCGVCGGDNTGCQVVSGVFKHALTSLGYHRVVEIPEGATKINITEMYKSNNYLALRSRSGRSIINGNWAIDRPGKYEGGGTMFTYKRPNEISSTAGESFLAEGPTNEILDVYMIHQQPNPGVHYEYVIMGTNAISPQVPPHRRPGEPFNGQMVTEGRSQEEGEQKGRNEEKEDLRGEAPEMFTSESAQTFPVRHPDRFSPHRPDNLVPPAPQPPRRSRDHNWKQLGTTECSTTCGKGSQYPIFRCVHRSTHEEAPESYCDSSMKPTPEEEPCNIFPCPAFWDIGEWSECSKTCGLGMQHRQVLCRQVYANRSLTVQPYRCQHLEKPETTSTCQLKICSEWQIRTDWTSCSVPCGVGQRTRDVKCVSNIGDVVDDEECNMKLRPNDIENCDMGPCAKSWFLTEWSERCSAECGAGVRTRSVVCMTNHVSSLPLEGCGNNRPAEATPCDNGPCTGKVEWFAGSWSQCSIECGSGTQQREVICVRKNADTFEVLDPSECSFLEKPPSQQSCHLKPCGAKWFSTEWSMCSKSCQGGFRVREVRCLSDDMTLSNLCDPQLKPEERESCNPQDCVPEVDENCKDKYYNCNVVVQARLCVYNYYKTACCASCTRVANRQTGFLGSR

SEQ ID NO: 13221 - protein, 37 aa, Homo Sapiens
MNLAISIALLLTGLPRAEGDQPNGLPSGPEPSSGLPP

SEQ ID NO: 13222 - protein, 144 aa, Homo Sapiens
MNLAISIALLLTVDQSLRLDCRHENTSSSPIQYEFSLTRETKKHVLFGTVGVPEHTYRSRTNFTSKYNMKVLYLSAFTSKDEGTYTCALHHSGHSPPISSQNVTVLRDKLVKCEGISLLAQNTSWLLLLLLSLSLLQATDFMSL

SEQ ID NO: 13223 - protein, 153 aa, Homo Sapiens
MNLAISIALLLTVLQVSRGQKVTSLTACLVDQSLRLDCRHENTSSSPIQYEFSLTRETKKHVLFGTVGVPEHTYRSRTNFTSKYNMKVLYLSAFTSKDEGTYTCALHHSGHSPPISSQNVTVLRDKLVKCEGISLLAQNTSWLLLLLLSLSLL

SEQ ID NO: 13224 - protein, 161 aa, Homo Sapiens
MNLAISIALLLTVLQVSRGQKVTSLTACLVDQSLRLDCRHENTSSSPIQYEFSLTRETKKHVLFGTVGVPEHTYRSRTNFTSKYNMKVLYLSAFTSKDEGTYTCALHHSGHSPPISSQNVTVLRDKLVKCEGISLLAQNTSWLLLLLLSLSLLQATDFMSL

SEQ ID NO: 13225 - protein, 161 aa, Homo Sapiens; identical to SEQ ID NO: 13224

SEQ ID NO: 13226 - protein, 165 aa, Homo Sapiens
MNLAISIALLLTVLQVSRGQKVTSLTACLVDQSLRLDCRHENTSSSPIQYEFSLTRETKKHVLFGTVGVPEHTYRSRTNFTSKYNMKVLYLSAFTSKDEGTYTCALHHSGHSPPISSQNVTVLRGHGFHVPVTGGAHGGDRKPQVPVQRSYFSESADPLPPIPQT

SEQ ID NO: 13227 - protein, 1138 aa, Homo Sapiens
MVWRVPPFLLPILFLASHVGAAVDLTLLANLRLTDPQRFFLTCVSGEAGAGRGSDAWGPPLLLEKDDRIVRTPPGPPLRLARNGSHQVTLRGFSKPSDLVGVFSCVGGAGARRTRVIYVHNSPGAHLLPDKVTHTVNKGDTAVLSARVHKEKQTDVIWKSNGSYFYTLDWHEAQDGRFLLQLPNVQPPSSGIYSATYLEASPLGSAFFRLIVRGCGAGRWGPGCTKECPGCLHGGVCHDHDGECVCPPGFTGTRCEQACREGRFGQSCQEQCPGISGCRGLTFCLPDPYGCSCGSGWRGSQCQEACAPGHFGADCRLQCQCQNGGTCDRFSGCVCPSGWHGVHCEKSDRIPQILNMASELEFNLETMPRINCAAAGNPFPVRGSIELRKPDGTVLLSTKAIVEPEKTTAEFEVPRLVLADSGFWECRVSTSGGQDSRRFKVNVKVPPVPLAAPRLLTKQSRQLVVSPLVSFSGDGPISTVRLHYRPQDSTMDWSTIVVDPSENVTLMNLRPKTGYSVRVQLSRPGEGGEGAWGPPTLMTTDCPEPLLQPWLEGWHVEGTDRLRVSWSLPLVPGPLVGDGFLLRLWDGTRGQERRENVSSPQARTALLTGLTPGTHYQLDVQLYHCTLLGPASPPAHVLLPPSGPPAPRHLHAQALSDSEIQLTWKHPEALPGPISKYVVEVQVAGGAGDPLWIDVDRPEETSTIIRGLNASTRYLFRMRASIQGLGDWSNTVEESTLGNGLQAEGPVQESRAAEEGLDQQLILAVVGSVSATCLTILAALLTLVCIRRSCLHRRRTFTYQSGSGEETILQFSSGTLTLTRRPKLQPEPLSYPVLEWEDITFEDLIGEGNFGQVIRAMIKKDGLKMNAAIKMLKEYASENDHRDFAGELEVLCKLGHHPNIINLLGACKNRGYLYIAIEYAPYGNLLDFLRKSRVLETDPAFAREHGTASTLSSRQLLRFASDAANGMQYLSEKQFIHRDLAARNVLVGENLASKIADFGLSRGEEVYVKKTMGRLPVRWMAIESLNYSVYTTKSDVWSFGVLLWEIVSLGGTPYCGMTCAELYEKLPQGYRMEQPRNCDDEVYELMRQCWRDRPYERPPFAQIALQLGRMLEARKAYVNMSLFENFTYAGIDATAEEA

SEQ ID NO: 13228 - protein, 379 aa, Homo Sapiens
MVWRVPPFLLPILFLASHVGAAVDLTLLANLRLTDPQRFFLTCVSGEAGAGRGSDAWGPPLLLEKDDRIVRTPPGPPLRLARNGSHQVTLRGFSKPSDLVGVFSCVGGAGARRTRVIYVHNSPGAHLLPDKVTHTVNKGDTAVLSARVHKEKQTDVIWKSNGSYFYTLDWHEAQDGRFLLQLPNVQPPSSGIYSATYLEASPLGSAFFRLIVRGCGAGRWGPGCTKECPGCLHGGVCHDHDGECVCPPGFTGTRCEQACREGRFGQSCQEQCPGISGCRGLTFCLPDPYGCSCGSGWRGSQCQEACAPGHFGADCRLQCQCQNGGTCDRFSGCVCPSGWHGVHCEKSGWRDWVDTSTEKQNTDEGRFGGHVSAPVGAPG

SEQ ID NO: 13229 - protein, 71 aa, Homo Sapiens
MEVPPPAPRSFLCRALCLFPRVFAAEAVTADSEVLEERQKRLPYVPEPYYPESGWDRLRELFGKDCHGKSF

SEQ ID NO: 13230 - protein, 175 aa, Homo Sapiens
MEVPPPAPRSFLCRALCLFPRVFAAEAVTADSEVLEERQKRLPYVPEPYYPESGWDRLRELFGKDEQQRISKDLANICKTAATAGIIGWVYGGIPAFIHAKQQYIEQSQAEIYHNRFDAVQSAHRAATRGFIRYGWRWGWRTAVFVTIFNTVNTSLNVYRNKDALSHFVIAGALL

SEQ ID NO: 13231 - protein, 285 aa, Homo Sapiens
MEVPPPAPRSFLCRALCLFPRVFAAEAVTADSEVLEERQKRLPYVPEPYYPESGWDRLRELFGKDEQQRISKDLANICKTAATAGIIGWVYGGIPAFIHAKQQYIEQSQAEIYHNRFDAVQSAHRAATRGFIRYGWRWGWRTAVFVTIFNTVNTSLNVYRNKDALSHFVIAGAVTGSLFRINVGLRGLVAGGIIGALLGTPVGGLLMAFQKYSGETVQERKQKDRKALHELKLEEWKGRLQVTEHLPEKIESSLQEDEPENDAKKIEALLNLPRNPSVIDKQDKD

SEQ ID NO: 13232 - protein, 90 aa, Homo Sapiens
MEVPPPAPRSFLCRALCLFPRVFAAEAVTADSEVLEERQKRLPYVPEPYYPESGWDRLRELFGKDNLHIVLPHEASFVMAGAGVGELQCL

SEQ ID NO: 13233 - protein, 151 aa, Homo Sapiens
MEVPPPAPRSFLCRALCLFPRVFAAEAVTADSEVLEERQKRLPYVPEPYYPESGWDRLRELFGKDTPVGGLLMAFQKYSGETVQERKQKDRKALHELKLEEWKGRLQVTEHLPEKIESSLQEDEPENDAKKIEALLNLPRNPSVIDKQDKD

SEQ ID NO: 13234 - protein, 150 aa, Homo Sapiens
MEVPPPAPRSFLCRALCLFPRVFAAEAVTADSEVLEERQKRLPYVPEPYYPESGWDRLRELFGKDTVNTSLNVYRNKDALSHFVIAGAVTGSLFRINVGLRGLVAGGIIGALLGTPVGGLLMAFQKYSGETVQERKQKDRKALHELKLEE

SEQ ID NO: 13235 - protein, 65 aa, Homo Sapiens
MEVPPPAPRSFLCRALCLFPRVFAAEAVTADSEVLEERQKRLPYVPEPYYPESGWDRLRELFGKE

SEQ ID NO: 13236 - protein, 38 aa, Homo Sapiens
  misc_feature (1)..(1): Xaa can be any naturally occurring amino acid
XTADSEVLEERQKRLPYVPEPYYPESGWDRLRELFGKE

SEQ ID NO: 13237 - protein, 136 aa, Homo Sapiens
MAPFEPLASGILLLLWLIAPSRACTCVPPHPQTAFCNSDLVIRAKFVGTPEVNQTTLYQRYEIKMTKMYKGFQALGDAADIRFVYTPAMESVCGYFHRSHNRSEEFLIAGEAPSPRPVPHQPVPGARPSNHEGARL

SEQ ID NO: 13238 - protein, 207 aa, Homo Sapiens
MAPFEPLASGILLLLWLIAPSRACTCVPPHPQTAFCNSDLVIRAKFVGTPEVNQTTLYQRYEIKMTKMYKGFQALGDAADIRFVYTPAMESVCGYFHRSHNRSEEFLIAGKLQDGLLHITTCSFVAPWNSLSLAQRRGFTKTYTVGCEECTVFPCLSIPCKLQSGTHCLWTDQLLQGSEKGFQSRHLACLPREPGLCTWQSLRSQIA

SEQ ID NO: 13239 - protein, 96 aa, Homo Sapiens [sequence omitted]

SEQ ID NO: 13240 - protein, 143 aa, Homo Sapiens
MTKMYKGFQALGDAADIRFVYTPAMESVCGYFHRSHNRSEEFLIAGKLQDGLLHITTCSFVAPWNSLSLAQRRGFTKTYTVGCEECTVFPCLSIPCKLQSGTHCLWTDQLLQGSEKGFQSRHLACLPREPGLCTWQSLRSQIA

SEQ ID NO: 13241 - protein, 165 aa, Homo Sapiens
  misc_feature (1)..(1): Xaa can be any naturally occurring amino acid
XPRALCHTNQSLGRGLATTRGRGSDGNGPTGNGDHPNFSLSEGRAFGSLAAQPITSCLSVPAPPFSLGKLQDGLLHITTCSFVAPWNSLSLAQRRGFTKTYTVGCEECTVFPCLSIPCKLQSGTHCLWTDQLLQGSEKGFQSRHLACLPREPGLCTWQSLRSQIA

SEQ ID NO: 13242 - protein, 143 aa, Homo Sapiens
MFKGPEKDIEFIYTAPSSAVCGVSLDVGGKKEYLIAGKAEGDGKMHITLCDFIVPWDTLSTTQKKSLNHRYQMGCECKITRCPMIPCYISSPDECLWMDWVTEKNINGHQAKFFACIKRSDGSCAWYRGAAPPKQEFLDIEDP

SEQ ID NO: 13243 - protein, 143 aa, Homo Sapiens; identical to SEQ ID NO: 13242

SEQ ID NO: 13244 - protein, 143 aa, Homo Sapiens; identical to SEQ ID NO: 13242

SEQ ID NO: 13245 - protein, 109 aa, Homo Sapiens
MFKGPEKDIEFIYTAPSSAVCGVSLDVGGKKEYLIAGKAEGDGKMHITLCDFIVPWDTLSTTQKKSLNHRYQMGCECKVSRSCLCWSIASSQCLQMDGRDFDPWLSRTR

SEQ ID NO: 13246 - protein, 220 aa, Homo Sapiens
MGAAARTLRLALGLLLLATLLRPADACSCSPVHPQQAFCNADVVIRAKAVSEKEVDSGNDIYGNPIKRIQYEIKQIKMFKGPEKDIEFIYTAPSSAVCGVSLDVGGKKEYLIAGKAEGDGKMHITLCDFIVPWDTLSTTQKKSLNHRYQMGCECKITRCPMIPCYISSPDECLWMDWVTEKNINGHQAKFFACIKRSDGSCAWYRGAAPPKQEFLDIEDP

SEQ ID NO: 13247 - protein, 211 aa, Homo Sapiens
MTPWLGLIVLLGSWSLGDWGAEACTCSPSHPQDAFCNSDIVIRAKVVGKKLVKEGPFGTLVYTIKQMKMYRGFTKMPHVQYIHTEASESLCGLKLEVNKYQYLLTGRVYDGKMYTGLCNFVERWDQLTLSQRKGLNYRYHLGCNCKIKSCYYLPCFVTSKNECLWTDMLSNFGYPGYQSKHYACIRQKGGYCSWYRGWAPPDKSIINATDP

SEQ ID NO: 13248 - protein, 224 aa, Homo Sapiens
MPGSPRPAPSWVLLLRLLALLRPPGLGEACSCAPAHPQQHICHSALVIRAKISSEKVVPASADPADTEKMLRYEIKQIKMFKGFEKVKDVQYIYTPFDSSLCGVKLEANSQKQYLLTGQVLSDGKVFIHLCNYIEPWEDLSLVQRESLNHHYHLNCGCQITTCYTVPCTISAPNECLWTDWLLERKLYGYQAQHYVCMKHVDGTCSWYRGHLPLRKEFVDIVQP

SEQ ID NO: 13249 - protein, 362 aa, Homo Sapiens
MHGGRIYPVLGTYWDNCNRCTCQENRQWQCDQEPCLVDPDMIKAINQGNYGWQAGNHSAFWGMTLDEGIRYRLGTIRPSSSVMNMHEIYTVLNPGEVLPTAFEASEKWPNLIHEPLDQGNCAGSWAFSTAAVASDRVSIHSLGHMTPVLSPQNLLSCDTHQQQGCRGGRLDGAWWFLRRRGVVSDHCYPFSGRERDEAGPAPPCMMHSRAMGRGKRQATAHCPNSYVNNNDIYQVTPVYRLGSNDKEIMKELMENGPVQALMEVHEDFFLYKGGIYSHTPVSLGRPERYRRHGTHSVKITGWGEETLPDGRTLKYWTAANSWGPAWGERGHFRIVRGVNECDIESFVLGVWGRVGMEDMGHH

SEQ ID NO: 13250 - protein, 467 aa, Homo Sapiens
MWRCPLGLLLLLPLAGHLALGAQQGRGRRELAPGLHLRGIRDAGGRYCQEQDLCCRGRADDCALPYLGAICYCDLFCNRTVSDCCPDFWDFCLGVPPPFPPIQGCMHGGRIYPVLGTYWDNCNRCTCQENRQWQCDQEPCLVDPDMIKAINQGNYGWQAGNHSAFWGMTLDEGIRYRLGTIRPSSSVMNMHEIYTVLNPGEVLPTAFEASEKWPNLIHEPLDQGNCAGSWAFSTAAVASDRVSIHSLGHMTPVLSPQNLLSCDTHQQQGCRGGRLDGAWWFLRRRGVVSDHCYPFSGRERDEAGPAPPCMMHSRAMGRGKRQATAHCPNSYVNNNDIYQVTPVYRLGSNDKEIMKELMENGPVQALMEVHEDFFLYKGGIYSHTPVSLGRPERYRRHGTHSVKITGWGEETLPDGRTLKYWTAANSWGPAWGERGHFRIVRGVNECDIESFVLGVWGRVGMEDMGHH

SEQ ID NO: 13251 - protein, 436 aa, Homo Sapiens
MWRCPLGLLLLLPLAGHLALGAQQGRGRRELAPGLHLRGIRDAGGRYCQEQDLCCRGRADDCALPYLGAICYCDLFCNRTVSDCCPDFWDFCLGVPPPFPPIQGCMHGGRIYPVLGTYWDNCNRCWQAGNHSAFWGMTLDEGIRYRLGTIRPSSSVMNMHEIYTVLNPGEVLPTAFEASEKWPNLIHEPLDQGNCAGSWAFSTAAVASDRVSIHSLGHMTPVLSPQNLLSCDTHQQQGCRGGRLDGAWWFLRRRGVVSDHCYPFSGRERDEAGPAPPCMMHSRAMGRGKRQATAHCPNSYVNNNDIYQVTPVYRLGSNDKEIMKELMENGPVQALMEVHEDFFLYKGGIYSHTPVSLGRPERYRRHGTHSVKITGWGEETLPDGRTLKYWTAANSWGPAWGERGHFRIVRGVNECDIESFVLGVWGRVGMEDMGHH

SEQ ID NO: 13252 - protein, 85 aa, Homo Sapiens
GGRALKENPVDLPATEQKENCLDCYMDPLRLSLLPPRARKPVCPPSLCSSVITIGDLVLDSDEEENGQGEGKVSGKEQKAGKGDG

SEQ ID NO: 13253 - protein, 71 aa, Homo Sapiens
MATPLVAGPAALRFAAAASWQVVRGRCVEHFPRVLEFLRSLRAVAPGLVRYRHHERLCMGLKAKSALLLTQ

SEQ ID NO: 13254 - protein, 416 aa, Homo Sapiens
MATPLVAGPAALRFAAAASWQVVRGRCVEHFPRVLEFLRSLRAVAPGLVRYRHHERLCMGLKAKTKQDLRKILEAQETFYQQVKQLSEAPVDLASKLQELEQEYGEPFLAAMEKLLFEYLCQLEKALPTPQAQQLQDVLSWMQPGVSITSSLAWRQYGVDMGWLLPECSVTDSVNLAEPMEQNPPQQQRLALHNPLPKAKPGTHLPQGPSSRTHPEPLAGRHFNLAPLGRRRVQSQWASTRGGHKERPTVMLFPFRNLGSPTQVISKPESKEEHAIYTADLAMGTRAASTGKSKSPCQTLGGRALKENPVDLPATEQKENCLDCYMDPLRLSLLPPRARKPVCPPSLCSSVITIGDLVLDSDEEENGQGEGKESLENYQKTKFDTLIPTLCEYLPPSGHGAIPVSSCDCRDSSRPL

SEQ ID NO: 13255 - protein, 451 aa, Homo Sapiens
MATPLVAGPAALRFAAAASWQVVRGRCVEHFPRVLEFLRSLRAVAPGLVRYRHHERLCMGLKAKVVVELILQGRPWAQVLKALNHHFPESGPIVRDPKATKQDLRKILEAQETFYQQVKQLSEAPVDLASKLQELEQEYGEPFLAAMEKLLFEYLCQLEKALPTPQAQQLQDVLSWMQPGVSITSSLAWRQYGVDMGWLLPECSVTDSVNLAEPMEQNPPQQQRLALHNPLPKAKPGTHLPQGPSSRTHPEPLAGRHFNLAPLGRRRVQSQWASTRGGHKERPTVMLFPFRNLGSPTQVISKPESKEEHAIYTADLAMGTRAASTGKSKSPCQTLGGRALKENPVDLPATEQKENCLDCYMDPLRLSLLPPRARKPVCPPSLCSSVITIGDLVLDSDEEENGQGEGKESLENYQKTKFDTLIPTLCEYLPPSGHGAIPVSSCDCRDSSRPL

SEQ ID NO: 13256 - protein, 354 aa, Homo Sapiens
MATPLVAGPAALRFAAAASWQVVRGRCVEHFPRVLEFLRSLRAVAPGLVRYRHHERLCMGLKAKVVVELILQGRPWAQVLKALNHHFPESGPIVRDPKATKQDLRKILEAQETFYQQVKQLSEAPVDLASKLQELEQEYGEPFLAAMEKLLFEYLCQLEKALPTPQAQQLQDVLSWMQPGVSITSSLAWRQYGVDMGWLLPECSVTDSVNLAEPMEQNPPQQQRLALHNPLPKAKPGTHLPQGPSSRTHPEPLAGRHFNLAPLGRRRVQSQWASTRGGHKERPTVMLFPFRNLGSPTQVISKPESKEEHAIYTADLAMGTRAASTGKSKSPCQTLGGRALKENPVDLPATEQKE

SEQ ID NO: 13257 - protein, 451 aa, Homo Sapiens; identical to SEQ ID NO: 13255

SEQ ID NO: 13258 - protein, 290 aa, Homo Sapiens
MATPLVAGPAALRFAAAASWQVVRGRCVEHFPRVLEFLRSLRAVAPGLVRYRHHERLCMGLKAKVVVELILQGRPWAQVLKALNHHFPESGPIVRDPKATKQDLRKILEAQETFYQQVKQLSEAPVDLASKLQLQDVLSWMQPGVSITSSLAWRQYGVDMGWLLPECSVTDSVNLAEPMEQNPPQQQRLALHNPLPKAKPGTHLPQGPSSRTHPEPLAGRHFNLAPLGRRRVQSQWASTRGGHKERPTVMLFPFRNLGSPTQVISKPESKEEHAIYTADLAMGTRAASTG

SEQ ID NO: 13259 - protein, 140 aa, Homo Sapiens
MATPLVAGPAALRFAAAASWQVVRGRCVEHFPRVLEFLRSLRAVAPGLVRYRHHERLCMGLKAKVVVELILQGRPWAQVLKALNHHFPESGPIVRDPKATKQDLRKILEAQETFYQQVKQLSEAPVDLASKLQSALLLTQ

SEQ ID NO: 13260 - protein, 140 aa, Homo Sapiens; identical to SEQ ID NO: 13259

SEQ ID NO: 13261 - protein, 146 aa, Homo Sapiens
MEKLLFEYLCQLEKALPTPQAQQLQDVLSWMQPGVSITSSLAWRQYGVDMGWLLPECSVTDSVNLAEPMEQNPPQQQRLALHNPLPKAKPGTHLPQGPSSRTHPEPLAGRHFNLAPLGRRRVQSQWASTRGGHKERPTVMLFPFRN

SEQ ID NO: 13262 - protein, 1015 aa, Homo Sapiens
MPRATALGALVSLLLLLPLPRGAGGLGERPDATADYSELDGEEGTEQQLEHYHDPCKAAVFWGDIALDEDDLKLFHIDKARDWTKQTVGATGHSTGGLEEQASESSPDTTAMDTGTKEAGKDGRENTTLLHSPGTLHAAAKTFSPRVRRATTSRTERIWPGGVIPYVIGGNFTGSQRAIFKQAMRHWEKHTCVTFIERTDEESFIVFSYRTCGCCSYVGRRGGGPQAISIGKNCDKFGIVAHELGHVVGFWHEHTRPDRDQHVTIIRENIQPGQEYNFLKMEAGEVSSLGETYDFDSIMHYARNTFSRGVFLDTILPRQDDNGVRPTIGQRVRLSQGDIAQARKLYKCPACGETLQDTTGNFSAPGFPNGYPSYSHCVWRISVTPGEKIVLNFTSMDLFKSRLCWYDYVEVRDGYWRKAPLLGRFCGDKIPEPLVSTDSRLWVEFRSSSNILGKGFFAAYEATCGGDMNKDAGQIQSPNYPDDYRPSKECVWRITVSEGFHVGLTFQAFEIERHDSCAYDYLEVRDGPTEESALIGHFCGYEKPEDVKSSSNRLWMKFVSDGSINKAGFAANFFKEVDECSWPDHGGCEHRCVNTLGSYKCACDPGYELAADKKMCEVACGGFITKLNGTITSPGWPKEYPTNKNCVWQVVAPAQYRISLQFEVFELEGNDVCKYDFVEVRSGLSPDAKLHGRFCGSETPEVITSQSNNMRVEFKSDNTVSKRGFRAHFFSDKDECAKDNGGCQHECVNTFGSYLCRCRNGYWLHENGHDCKEAGCAHKISSVEGTLASPNWPDKYPSRRECTWNISSTAGHRVKLTFNEFEIEQHQECAYDHLEMYDGPDSLAPILGRFCGSKKPDPTVASGSSMFLRFYSDASVQRKGFQAVHSTECGGRLKAEVQTKELYSHAQFGDNNYPSEARCDWVIVAEDGYGVELTFRTFEVEEEADCGYDYMEAYDGYDSSAPRLGRFCGSGPLEEIYSAGDSLMIRFRTDDTINKKGFHARYTSTKFQDALHMKK

SEQ ID NO: 13263 - protein, 23 aa, Homo Sapiens
MTSIFHFAIIFMLILQIRIQLSE

SEQ ID NO: 13264 - protein, 48 aa, Homo Sapiens
MTSIFHFAIIFMLILQIRIQLSEESEFLVDRSKNGLIHVPKDLSQKTT

SEQ ID NO: 13265 - protein, 90 aa, Homo Sapiens
MTSIFHFAIIFMLILQIRIQLSEESEFLVDRSKNGLIHVPKDLSQKTTILNISQNYISELWTSDILSLSKLRILIISHNRIQYLDISVFK

SEQ ID NO: 13266 - protein, 161 aa, Homo Sapiens
MTSIFHFAIIFMLILQIRIQLSEESEFLVDRSKNGLIHVPKDLSQKTTILNISQNYISELWTSDILSLSKLRILIISHNRIQYLDISVFKFNQELEYLDLSHNKLVKISCHPTVNLKHLDLSFNAFDALPICKEFGNMSQLKFLGLSTTHLEKSSVLPIAH

SEQ ID NO: 13267 - protein, 786 aa, Homo Sapiens
MTSIFHFAIIFMLILQIRIQLSEESEFLVDRSKNGLIHVPKDLSQKTTILNISQNYISELWTSDILSLSKLRILIISHNRIQYLDISVFKFNQELEYLDLSHNKLVKISCHPTVNLKHLDLSFNAFDALPICKEFGNMSQLKFLGLSTTHLEKSSVLPIAHLNISKVLLVLGETYGEKEDPEGLQDFNTESLHIVFPTNKEFHFILDVSVKTVANLELSNIKCVLEDNKCSYFLSILAKLQTNPKLSNLTLNNIETTWNSFIRILQLVWHTTVWYFSISNVKLQGQLDFRDFDYSGTSLKALSIHQVVSDVFGFPQSYIYEIFSNMNIKNFTVSGTRMVHMLCPSKISPFLHLDFSNNLLTDTVFENCGHLTELETLILQMNQLKELSKIAEMTTQMKSLQQLDISQNSVSYDEKKGDCSWTKSLLSLNMSSNILTDTIFRCLPPRIKVLDLHSNKIKSIPKQVVKLEALQELNVAFNSLTDLPGCGSFSSLSVLIIDHNSVSHPSADFFQSCQKMRSIKAGDNPFQCTCELGEFVKNIDQVSSEVLEGWPDSYKCDYPESYRGTLLKDFHMSELSCNITLLIVTIVATMLVLAVTVTSLCSYLDLPWYLRMVCQWTQTRRRARNIPLEELQRNLQFHAFISYSGHDSFWVKNELLPNLEKEGMQICLHERNFVPGKSIVENIITCIEKSYKSIFVLSPNFVQSEWCHYELYFAHHNLFHEGSNSLILILLEPIPQYSIPSSYHKLKSLMARRTYLEWPKEKSKRGLFWANLRAAINIKLTEQAKK

SEQ ID NO: 13268 - protein, 786 aa, Homo Sapiens; identical to SEQ ID NO: 13267

SEQ ID NO: 13269 - protein, 627 aa, Homo Sapiens
MLDLSYNNLNVVGNDSFAWLPQLEYFFLEYNNIQHLFSHSLHGLFNVRYLNLKRSFTKQSISLASLPKIDDFSFQWLKCLEHLNMEDNDIPGIKSNMFTGLINLKYLSLSNSFTSLRTLTNETFVSLAHSPLHILNLTKNKISKIESDAFSWLGHLEVLDLGLNEIGQELTGQEWRGLENIFEIYLSYNKYLQLTRNSFALVPSLQRLMLRRVALKNVDSSPSPFQPLRNLTILDLSNNNIANINDDMLEGLEKLEILDLQHNNLARLWKHANPGGPIYFLKGLSHLHILNLESNGFDEIPVEVFKDLFELKIIDLGLNNLNTLPASVFNNQVSLKSLNLQKNLITSVEKKVFGPAFRNLTELDMRFNPFDCTCESIAWFVNWINETHTNIPELSSHYLCNTPPHYHGFPVRLFDTSSCKDSAPFELFFMINTSILLIFIFIVLLIHFEGWRISFYWNVSVHRVLGFKEIDRQTEQFEYAAYIIHAYKDKDWVWEHFSSMEKEDQSLKFCLEERDFEAGVFELEAIVNSIKRSRKIIFVITHHLLKDPLCKRFKVHHAVQQAIEQNLDSIILVFLEEIPDYKLNHALCLRRGMFKSHCILNWPVQKERIGAFRHKLQVALGSKNSVH

SEQ ID NO: 13270 - protein, 904 aa, Homo Sapiens
MRQTLPCIYFWGGLLPFGMLCASSTTKCTVSHEVADCSHLKLTQVPDDLPTNITVLNLTHNQLRRLPAANFTRYSQLTSLDVGFNTISKLEPELCQKLPMLKVLNLQHNELSQLSDKTFAFCTNLTELHLMSNSIQKIKNNPFVKQKNLITLDLSHNGLSSTKLGTQVQLENLQELLLSNNKIQALKSEELDIFANSSLKKLELSSNQIKEFSPGCFHAIGRLFGLFLNNVQLGPSLTEKLCLELANTSIRNLSLSNSQLSTTSNTTFLGLKWTNLTMLDLSYNNLNVVGNDSFAWLPQLEYFFLEYNNIQHLFSHSLHGLFNVRYLNLKRSFTKQSISLASLPKIDDFSFQWLKCLEHLNMEDNDIPGIKSNMFTGLINLKYLSLSNSFTSLRTLTNETFVSLAHSPLHILNLTKNKISKIESDAFSWLGHLEVLDLGLNEIGQELTGQEWRGLENIFEIYLSYNKYLQLTRNSFALVPSLQRLMLRRVALKNVDSSPSPFQPLRNLTILDLSNNNIANINDDMLEGLEKLEILDLQHNNLARLWKHANPGGPIYFLKGLSHLHILNLESNGFDEIPVEVFKDLFELKIIDLGLNNLNTLPASVFNNQVSLKSLNLQKNLITSVEKKVFGPAFRNLTELDMRFNPFDCTCESIAWFVNWINETHTNIPELSSHYLCNTPPHYHGFPVRLFDTSSCKDSAPFELFFMINTSILLIFIFIVLLIHFEGWRISFYWNVSVHRVLGFKEIDRQTEQFEYAAYIIHAYKDKDWVWEHFSSMEKEDQSLKFCLEERDFEAGVFELEAIVNSIKRSRKIIFVITHHLLKDPLCKRFKVHHAVQQAIEQNLDSIILVFLEEIPDYKLNHALCLRRGMFKSHCILNWPVQKERIGAFRHKLQVALGSKNSVH

SEQ ID NO: 13271 - protein, 351 aa, Homo Sapiens
MRQTLPCIYFWGGLLPFGMLCASSTTKCTVSHEVADCSHLKLTQVPDDLPTNITVLNLTHNQLRRLPAANFTRYSQLTSLDVGFNTISKLEPELCQKLPMLKVLNLQHNELSQLSDKTFAFCTNLTELHLMSNSIQKIKNNPFVKQKNLITLDLSHNGLSSTKLGTQVQLENLQELLLSNNKIQALKSEELDIFANSSLKKLELSSNQIKEFSPGCFHAIGRLFGLFLNNVQLGPSLTEKLCLELANTSIRNLSLSNSQLSTTSNTTFLGLKWTNLTMLDLSYNNLNVWLKCLEHLNMEDNDIPGIKSNMFTGLINLKYLSLSNSFTSLRTLTNETFVSLAHSPLHILNLT

SEQ ID NO: 13272 - protein, 45 aa, Homo Sapiens
MKKCLLPVLITCMQTAICKDRMMMIMILLVNYRPDEFIECEDPVD

SEQ ID NO: 13273 - protein, 121 aa, Homo Sapiens
MKKCLLPVLITCMQTAICKDRMMMIMILLVNYRPDEFIECEDPVDHVGNATASQELGYGCLKFGGQAYSDVEHTSVQCHALDGIECASPRTFLRENKPCIKYTGHYFITTLLYSFFLGCFG

SEQ ID NO: 13274 - protein, 171 aa, Homo Sapiens
MKKCLLPVLITCMQTAICKDRMMMIMILLVNYRPDEFIECEDPVDHVGNATASQELGYGCLKFGGQAYSDVEHTSVQCHALDGIECASPRTFLRENKPCIKYTGHYFITTLLYSFFLGCFGVDRFCLGHTGTAVGKLLTLGGLGIWWFVDLILLITGGLMPSDGSNWCTVY

SEQ ID NO: 13275 - protein, 171 aa, Homo Sapiens; identical to SEQ ID NO: 13274

SEQ ID NO: 13276 - protein, 63 aa, Homo Sapiens
MKKCLLPVLITCMQTAICKDRMMMIMILLVNYRPDEFIECEDPVDHVGNATASQELGYGCLKV

SEQ ID NO: 13277 - protein, 214 aa, Homo Sapiens
MVLGGCPVSYLLLCGQAALLLGNLLLLHCVSRSHSQNATAEPELTSAGAAQPEGPGGAASWEYGDPHSPVILCSYLPDEFIECEDPVDHVGNATASQELGYGCLKFGGQAYSDVEHTSVQCHALDGIECASPRTFLRENKPCIKYTGHYFITTLLYSFFLGCFGVDRFCLGHTGTAVGKLLTLGGLGIWWFVDLILLITGGLMPSDGSNWCTVY

SEQ ID NO: 13278 - protein, 247 aa, Homo Sapiens
MAGGVLPLRGLRALCRVLLFLSQFCILSGGEQSQALAQSIKDPGPTRTFTVVPRAAESTEIPPYVMKCPSNGLCSRLPADCIDCTTNFSCTYGKPVTFDCAVKPSVTCVDQDFKSQKNFIINMTCRFCWQLPETDYECTNSTSCMTVSCPRQRYPANCTVRDHVHCLGNRTFPKMLYCNWTGGYKWSTALALSITLGGFGADRFYLGQWREGLGKLFSFGGLGIWTLIDVLLIGVGYVGPADGSLYI

SEQ ID NO: 13279 - protein, 209 aa, Homo Sapiens
MAGGVLPLRGLRALCRVLLFLSQFCILSGGEQSQALAQSIKDPGPTRTFTVVPRAAESTEIPPYVMKCPSNGLCSRLPADCIDCTTNFSCTYGKPVTFDCAVKPSVTCVDQDFKSQKNFIINMTCRFCWQLPETDYECTNSTSCMTVSCPRQRYPANCTVRDHVHCLGNRTFPKMLYCNWTGGYKWSTALALSLQAQVGLHVQLTVGLH

SEQ ID NO: 13280 - protein, 221 aa, Homo Sapiens
MAGGVLPLRGLRALCRVLLFLSQFCILSGGESTEIPPYVMKCPSNGLCSRLPADCIDCTTNFSCTYGKPVTFDCAVKPSVTCVDQDFKSQKNFIINMTCRFCWQLPETDYECTNSTSCMTVSCPRQRYPANCTVRDHVHCLGNRTFPKMLYCNWTGGYKWSTALALSITLGGFGADRFYLGQWREGLGKLFSFGGLGIWTLIDVLLIGVGYVGPADGSLYI

SEQ ID NO: 13281 - protein, 183 aa, Homo Sapiens
MAGGVLPLRGLRALCRVLLFLSQFCILSGGESTEIPPYVMKCPSNGLCSRLPADCIDCTTNFSCTYGKPVTFDCAVKPSVTCVDQDFKSQKNFIINMTCRFCWQLPETDYECTNSTSCMTVSCPRQRYPANCTVRDHVHCLGNRTFPKMLYCNWTGGYKWSTALALSLQAQVGLHVQLTVGLH

SEQ ID NO: 13282 - protein, 42 aa, Homo Sapiens
MAGGVLPLRGLRALCRVLLFLSQFCILSGGGESKAGFSAGWG

SEQ ID NO: 13283 - protein, 182 aa, Homo Sapiens
MKCPSNGLCSRLPADCIDCTTNFSCTYGKPVTFDCAVKPSVTCVDQDFKSQKNFIINMTCRFCWQLPETDYECTNSTSCMTVSCPRQRYPANCTVRDHVHCLGNRTFPKMLYCNWTGGYKWSTALALSITLGGFGADRFYLGQWREGLGKLFSFGGLGIWTLIDVLLIGVGYVGPADGSLYI

SEQ ID NO: 13284 - protein, 21 aa, Homo Sapiens
  misc_feature (1)..(1): Xaa can be any naturally occurring amino acid
XQFCILSGGGESKAGFSAGWG

SEQ ID NO: 13285 - protein, 161 aa, Homo Sapiens
  misc_feature (1)..(1): Xaa can be any naturally occurring amino acid
XSTEIPPYVMKCPSNGLCSRLPADCIDCTTNFSCTYGKPVTFDCAVKPSVTCVDQDFKSQKNFIINMTCRFCWQLPETDYECTNSTSCMTVSCPRQRYPANCTVRDHVHCLGNRTFPKMLYCNWTGGYKWSTALALRVGLFIDTVTTPLHSSLSHRARHCL

SEQ ID NO: 13286 - protein, 152 aa, Homo Sapiens
ETTIKFAPANLGYARGVDPPPCDAGTDQDSRWRLQYDVYQYFLPENDLTEEMLLKHLQRMVSVPQVKASALKVVTLTANDKTSVSFSSLPGQGVIYNVIVWDPFLNTSAAYIPAHTYACSFEAGEGSCASLAVLYLLLCLSTSSPSFITGLF

SEQ ID NO: 13287 - protein, 81 aa, Homo Sapiens
FYILITRLTPIKYDGNLKIFHDDGVFWVTFSCIAILIPVVFMGCLRILNILTCGVIGSYSVVLAIDSYWSTSLSYITLNVL

SEQ ID NO: 13288 - protein, 37 aa, Homo Sapiens
MAILLSYSERDPVPGGCNLEFDLDIDPNIYLEYNFFE

SEQ ID NO: 13289 - protein, 66 aa, Homo Sapiens
MAILLSYSERDPVPGGCNLEFDLDIDPNIYLEYNFFETTIKFAPANLGYARGVDPPPCDAGTDQDS

SEQ ID NO: 13290 - protein, 86 aa, Homo Sapiens
MAILLSYSERDPVPGGCNLEFDLDIDPNIYLEYNFFETTIKFAPANLGYARGVDPPPCDAGTDQDSRWRLQYDVYQYFLPENDLTE

SEQ ID NO: 13291 - protein, 129 aa, Homo Sapiens [sequence omitted]

SEQ ID NO: 13292 - protein, 49 aa, Homo Sapiens
MGFLQLLVVAVLASEHRVAGAAEVFGNSSEDSPFQFLGNRHCQWTGFHP

SEQ ID NO: 13293 - protein, 570 aa, Homo Sapiens
MGFLQLLVVAVLASEHRVAGAAEVFGNSSEGLIEFSVGKFRYFELNRPFPEEAILHDISSNVTFLIFQIHSQYQNTTVSFSPTLLSNSSETGTASGLVFILRPEQSTCTWYLGTSGIQPVQNMAILLSYSERDPVPGGCNLEFDLDIDPNIYLEYNFFETTIKFAPANLGYARGVDPPPCDAGTDQDSRWRLQYDVYQYFLPENDLTEEMLLKHLQRMVSVPQVKASALKVVTLTANDKTSVSFSSLPGQGVIYNVIVWDPFLNTSAAYIPAHTYACSFEAGEGSCASLGRVSSKVFFTLFALLGFFICFFGHRFWKTELFFIGFIIMGFFFYILITRLTPIKYDVNLILTAVTGSVGGMFLVAVWWRFGILSICMLCVGLVLGFLISSVTFFTPLGNLKIFHDDGVFWVTFSCIAILIPVVFMGCLRILNILTCGVIGSYSVVLAIDSYWSTSLSYITLNVLKRALNKDFHRAFTNVPFQTNDFIILAVWGMLAVSGITLQIRRERGRPFFPPHPYKLWKQERERRVTNILDPSYHIPPLRERLYGRLTQIKGLFQKEQPAGERTPLLL

SEQ ID NO: 13294 - protein, 116 aa, Homo Sapiens
MGFLQLLVVAVLASEHRVAGAAEVFGNSSEVYLVVGLIEFSVGKFRYFELNRPFPEEAILHDISSNVTFLIFQIHSQYQNTTVSFSPTLLSNSSETGTASGLVFILRPEQSTCTWY

SEQ ID NO: 13295 - protein, 136 aa, Homo Sapiens
MLLKHLQRMVSVPQVKASALKVVTLTANDKTSVSFSSLPGQGVIYNVIVWDPFLNTSAAYIPAHTYACSFEAGEGSCASLGRVSSKVFFTLFALLGFFICFFGHRFWKTELFFIGFIIMGFFFYILITRLTPIKYD

SEQ ID NO: 13296 - protein, 136 aa, Homo Sapiens; identical to SEQ ID NO: 13295

SEQ ID NO: 13297 - protein, 115 aa, Homo Sapiens
MSHRARPISGLIEFSVGKFRYFELNRPFPEEAILHDISSNVTFLIFQIHSQYQNTTVSFSPTLLSNSSETGTASGLVFILRPEQSTCTWYLGTSGIQPVQNMAILLSYSERDPVP

SEQ ID NO: 13298 - protein, 222 aa, Homo Sapiens
VWDPFLNTSAAYIPAHTYACSFEAGEGSCASLELFFIGFIIMGFFFYILITRLTPIKYDVNLILTAVTGSVGGMFLVAVWWRFGILSICMLCVGLVLGFLISSVTFFTPLGNLKIFHDDGVFWVTFSCIAILIPVVFMGCLRILNILTCGVIGSYSVVLAIDSYWSTSLSYITLNVLKRALNKDFHRAFTNVPFQTNDFIILAVWGMLAVSGITLQIRRERG

SEQ ID NO: 13299 - protein, 200 aa, Homo Sapiens
  misc_feature (1)..(1): Xaa can be any naturally occurring amino acid
XLLKHLQRMVSVPQVKASALKVVTLTANDKTSVSFSSLPGQGVIYNVIVWDPFLNTSAAYIPAHTYACSFEAGEGSCASLGRVSSKVFFTLFALLGFFICFFGHRFWKTELFFIGFIIMGFFFYILITRLTPIKYDVNLILTAVTGSVGGMFLVAVWWRFGILSICMLCVGLVLGFLISSVTFFTPLETGSLSVTHAGLQ

SEQ ID NO: 13300 - protein, 144 aa, Homo Sapiens
  misc_feature (1)..(1): Xaa can be any naturally occurring amino acid
XVPQVKASALKVVTLTANDKTSVSFSSLPGQGVIYNVIVWDPFLNTSAAYIPAHTYACSFEAGEGSCASLGRVSSKVFFTLFALLGFFICFFGHRFWKTELFFIGFIIMGFFFYILITRLTPIKYDAEHTDLWSHWLLFGGFSH

SEQ ID NO: 13301 - protein, 208 aa, Homo Sapiens
MAESLYEIRFRENVEKRILCHMQLSSAQVEQLRQAIEELYYFEFVVDDLPIRGFVGYMEESGFLPHSHKIGLWTHLDFHLEFHGDRIIFANVSVRDVKPHSLDGLRPDEFLGLTHTYSVRWSETSVERRSDRRRGDDGGFFPRTLEIHWLSIINSMVLVFLLVGFVAVILMRVLRNDLARYNLDEETTSAGSGDDFDQGDNGWKIIHT

SEQ ID NO: 13302 - protein, 519 aa, Homo Sapiens
MAESLYEIRFRENVEKRILCHMQLSSAQVEQLRQAIEELYYFEFVVDDLPIRGFVGYMEESGFLPHSHKIGLWTHLDFHLEFHGDRIIFANVSVRDVKPHSLDGLRPDEFLGLTHTYSVRWSETSVERRSDRRRGDDGGFFPRTLEIHWLSIINSMVLVFLLVGFVAVILMRVLRNDLARYNLDEETTSAGSGDDFDQGDNGWKIIHTDVFRFPPYRGLLCAVLGVGAQFLALGTGIIVMALLGMFNVHRHGAINSAAILLYALTCCISGYVSSHFYRQIGGERWVWNIILTTSLFSVPFFLTWSVVNSVHWANGSTQALPATTILLLLTVWLLVGFPLTVIGGIFGKNNASPFDAPCRTKNIAREIPPQPWYKSTVIHMTVGGFLPFSAISVELYYIFATVWGREQYTLYGILFFVFAILLSVGACISIALTYFQLSGEDYRWWWRSVLSVGSTGLFIFLYSVFYYARRSNMSGAVQTVEFFGYSLLTGYVFFLMLGTISFFSSLKFIRYIYVNLKMD

SEQ ID NO: 13303 - protein, 133 aa, Homo Sapiens
MTVVGNPRSWSCQWLPILILLLGTALVQVYCHPHDCWRLPAFQCHLCGAVLHLCHSMGSGAVHFVRHPLLCLRHPAECGGLHLHCTHLLPVVWGGLPLVVAICAECWLHRPLHLPLLSFLLCPALQHVWGSTD

SEQ ID NO: 13304 - protein, 210 aa, Homo Sapiens
MTVVGNPRSWSCQWLPILILLLGTGHGPGVEGVTHYKAGDPVILYVNKVGPYHNPQETYHYYQLPVCCPEKIRHKSLSLGEVLDGDRMAESLYEIRFRENVEKRILCHMQLSSAQVEQLRQAIEELYYFEFVVDDLPIRGFVGYMEESGFLPHSHKIGLWTHLDFHLEFHGDRIIFANVSVRDVKPHSLDGLRPDEFLGLTHTYSVRWSE

SEQ ID NO: 13305 - protein, 242 aa, Homo Sapiens
MTVVGNPRSWSCQWLPILILLLGTGHGPGVEGVTHYKAGDPVILYVNKVGPYHNPQETYHYYQLPVCCPEKIRHKSLSLGEVLDGDRMAESLYEIRFRENVEKRILCHMQLSSAQVEQLRQAIEELYYFEFVVDDLPIRGFVGYMEESGFLPHSHKIGLWTHLDFHLEFHGDRIIFANVSVRDVKPHSLDGLRPDEFLGLTHTYSVRWSETSVERRSDRRRGDDGGFFPRTLEIHWLSIINS

SEQ ID NO: 13306 - protein, 606 aa, Homo Sapiens
MTVVGNPRSWSCQWLPILILLLGTGHGPGVEGVTHYKAGDPVILYVNKVGPYHNPQETYHYYQLPVCCPEKIRHKSLSLGEVLDGDRMAESLYEIRFRENVEKRILCHMQLSSAQVEQLRQAIEELYYFEFVVDDLPIRGFVGYMEESGFLPHSHKIGLWTHLDFHLEFHGDRIIFANVSVRDVKPHSLDGLRPDEFLGLTHTYSVRWSETSVERRSDRRRGDDGGFFPRTLEIHWLSIINSMVLVFLLVGFVAVILMRVLRNDLARYNLDEETTSAGSGDDFDQGDNGWKIIHTDVFRFPPYRGLLCAVLGVGAQFLALGTGIIVMALLGMFNVHRHGAINSAAILLYALTCCISGYVSSHFYRQIGGERWVWNIILTTSLFSVPFFLTWSVVNSVHWANGSTQALPATTILLLLTVWLLVGFPLTVIGGIFGKNNASPFDAPCRTKNIAREIPPQPWYKSTVIHMTVGGFLPFSAISVELYYIFATVWGREQYTLYGILFFVFAILLSVGACISIALTYFQLSGEDYRWWWRSVLSVGSTGLFIFLYSVFYYARRSNMSGAVQTVEFFGYSLLTGYVFFLMLGTISFFSSLKFIRYIYVNLKMD

SEQ ID NO: 13307 - protein, 489 aa, Homo Sapiens
MTVVGNPRSWSCQWLPILILLLGTGHGPGVEGVTHYKAGDPVILYVNKVGPYHNPQETYHYYQLPVCCPEKIRHKSLSLGEVLDGDRMAESLYEIRFRENVEKRILCHMQLSSAQVEQLRQAIEELYYFEFVVDDLPIRGFVGYMEESGFLPHSHKIGLWTHLDFHLEFHGDRIIFANVSVRDVKPHSLDGLRPDEFLGLTHTYSVRWSETSVERRSDRRRGDDGGFFPRTLEIHWLSIINSMVLVFLLVGFVAVILMRVLRNDLARYNLDEETTSAGSGDDFDQGDNGWKIIHTDVFRFPPYRGLLCAVLGVGAQFLALGTGIIVMALLGMFNVHRHGAINSAAILLYALTCCISGYVSSHFYRQIGGERWVWNIILTTSLFSVPFFLTWSVVNSVHWANGSTQALPATTILLLLTVWLLVGFPLTVIGGIFGKNNASPFDAPCRTKNIAREIPPQPWYKSTVIHMTVGGFLPFRYPPFIPWLLLSGS

SEQ ID NO: 13308 - protein, 257 aa, Homo Sapiens
MTVVGNPRSWSCQWLPILILLLGTGHGPGVEGVTHYKAGDPVILYVNKVGPYHNPQETYHYYQLPVCCPEKIRHKSLSLGEVLDGDRMAESLYEIRFRENVEKRILCHMQLSSAQVEQLRQAIEELYYFEFVVDDLPIRGFVGYMEESGFLPHSHKIGLWTHLDFHLEFHGDRIIFANVSVRDVKPHSLDGLRPDEFLGLTHTYSVRWSETSVERRSDRRRGDDGGFFPRTLEIHWLSIINSMVLVFLLVGFVAVIL

SEQ ID NO: 13309 - protein, 420 aa, Homo Sapiens
MTVVGNPRSWSCQWLPILILLLGTGHGPGVEGVTHYKAGDPVILYVNKVGPYHNPQETYHYYQLPVCCPEKIRHKSLSLGEVLDGDRMAESLYEIRFRENVEKRILCHMQLSSAQVEQLRQAIEELYYFEFVVDDLPIRGFVGYMEESGFLPHSHKIGLWTHLDFHLEFHGDRIIFANVSVRDVKPHSLDGLRPDEFLGLTHTYSVRWSETSVERRSDRRRGDDGGFFPRTLEIHWLSIINSMVLVFLLVGFVAVILMRVLRNDLARYNLDEETTSAGSGDDFDQGDNGWKIIHTDVFRFPPYRGLLCAVLGVGAQFLALGTGIIVMALLGMFNVHRHGAINSAAILLYALTCCISGYVSSHFYRQIGGERWVWNIILTTSLFSGSASHNHPAASDGLAAGGLSPHCHWRHLWEEQRQPL

SEQ ID NO: 13310 - protein, 589 aa, Homo Sapiens
MTVVGNPRSWSCQWLPILILLLGTGHGPGVEGVTHYKAGDPVILYVNKVGPYHNPQETYHYYQLPVCCPEKIRHKSLSLGEVLDGDRMAESLYEIRFRENVEKRILCHMQLSSAQVEQLRQAIEELYYFEFVVDDLPIRGFVGYMEESGFLPHSHKIGLWTHLDFHLEFHGDRIIFANVSVRDVKPHSLDGLRPDEFLGLTHTYSVRWSETSVERRSDRRRGDDGGFFPRTLEIHWLSIINSMVLVFLLVGFVAVILMRVLRNDLARYNLDEETTSAGSGDDFDQGDNGWKIIHTDVFRFPPYRGLLCAVLGVGAQFLALGTGIIVMALLGMFNVHRHGAINSAAILLYALTCCISGYVSSHFYRQIGGERWVWNIILTTSLFSVPFFLTWSVVNSVHWANGSTQALPATTILLLLTVWLLVGFPLTVIGGIFGKNNASPFDAPCRTKNIAREIPPQPCAISVELYYIFATVWGREQYTLYGILFFVFAILLSVGACISIALTYFQLSGEDYRWWWRSVLSVGSTGLFIFLYSVFYYARRSNMSGAVQTVEFFGYSLLTGYVFFLMLGTISFFSSLKFIRYIYVNLKMD

SEQ ID NO: 13311 - protein, 301 aa, Homo Sapiens
MTVVGNPRSWSCQWLPILILLLGTGHGPGVEGVTHYKAGDPVILYVNKVGPYHNPQETYHYYQLPVCCPEKIRHKSLSLGEVLDGDRMAESLYEIRFRENVEKRILCHMQLSSAQVEQLRQAIEELYYFEFVVDDLPIRGFVGYMEESGFLPHSHKIGLWTHLDFHLEFHGDRIIFANVSVRDVKPHSLDGLRPDEFLGLTHTYSVRWSETSVERRSDRRRGDDGGFFPRTLEIHWLSIINSMVLVFLLVGFVAVILMRVLRNDLARYNLDEETTSAGSGDDFDQGDNGWKIIHTDVFRFP

SEQ ID NO: 13312 - protein, 57 aa, Homo Sapiens
MRTLVGLLTSNQALLQLEAARCLHELSHSEQSTVAEACLPATSYLLTYLSSHSSDFI

SEQ ID NO: 13313 - protein, 499 aa, Homo Sapiens
MWSRRQGRLRPTVCGVEELRRRRREREAALRKARREQQLVSKRLLRNDAPEEAGEGCVAAILGETEVQQFLRQAQRGTEEKEREGALVSLRRGLQHPETQQTFIRLEGSMRTLVGLLTSNQALLQLEAARCLHELSHSEQSTVAEACLPATSYLLTYLSSHSSDFIELCLYTLGNLIVESEAVRRQLLPQGIVPALAACIQSPHVAVLEALGYALSQLLQAEEAPEKIIPPASASSSILASTLPQHMLQMLQPGPKLNPGVAVEFAWCLHYIICSQVSNPLLIGHGALSTLGLLLLDLAGAVQKTEDAGLELLACPVLRCLSNLLTEAAVETVGGQMQLRDERVVAALFILLQFFFQKQPSLLPEGLWLLNNLTANSPSFCTSLLSLDLIEPLLQLLPVSNVVSVMVLTVLCNVAEKGPAYCQRLWPGPLLPALLHTLAFSDTEVVGQSLELLHLLFLYQPEAVQVFLQQSGLQALERHQEEAQLQDRVYALQQTALQG

SEQ ID NO: 13314 - protein, 493 aa, Homo Sapiens
MWSRRQGRLRPTVCGVEELRRRRREREAALRKARREQQLVSKRLLRNDAPEEAGEGCVAAILGETEVQQFLRQAQRGTEEKEREGALVSLRRGLQHPETQQTFIRLEGSMRTLVGLLTSNQALLQLEAARCLHELSHSEQSTVAEACLPATSYLLTYLSSHSSDFIELCLYTLGNLIVESEAVRRQLLPQGIVPALAACIQSPHVAVLEALGYALSQLLQAEEAPEKIIPSILASTLPQHMLQMLQPGPKLNPGVAVEFAWCLHYIICSQVSNPLLIGHGALSTLGLLLLDLAGAVQKTEDAGLELLACPVLRCLSNLLTEAAVETVGGQMQLRDERVVAALFILLQFFFQKQPSLLPEGLWLLNNLTANSPSFCTSLLSLDLIEPLLQLLPVSNVVSVMVLTVLCNVAEKGPAYCQRLWPGPLLPALLHTLAFSDTEVVGQSLELLHLLFLYQPEAVQVFLQQSGLQALERHQEEAQLQDRVYALQQTALQG

SEQ ID NO: 13315 - protein, 101 aa, Homo Sapiens
MWSRRQGRLRPTVCGVEELRRRRREREAALRKARREQQLVSKRLLRNDAPEEAGEGCVAAILGETEVRGQGAAVPAASPAGDRGKGERGGSGQPSSRLAAP

SEQ ID NO: 13316 - protein, 43 aa, Homo Sapiens
MWSRRQGRLRPTVCGVEELRRRRREREHCGRRGGSSSWSARGC

SEQ ID NO: 13317 - protein, 43 aa, Homo Sapiens; identical to SEQ ID NO: 13316

SEQ ID NO: 13318 - protein, 43 aa, Homo Sapiens; identical to SEQ ID NO: 13316

SEQ ID NO: 13319 - protein, 43 aa, Homo Sapiens; identical to SEQ ID NO: 13316

SEQ ID NO: 13320 - protein, 82 aa, Homo Sapiens
MLDVKMEDIKESIETMRTRLERSIQMLTLLRAFEARDRNLQEGNLERVNFWSAVNVAVLLLVAVLQVCTLKRFFQDKRPVPT

SEQ ID NO: 13321 - protein, 74 aa, Homo Sapiens
MMAAGAALALALWLLMPPVEVGGAGPPPIQDGEFTFLLPAGRKQCFYQSAPANASLETEYQGGANGGRGLQAVL

SEQ ID NO: 13322 - protein, 95 aa, Homo Sapiens
MMAAGAALALALWLLMPPVEVGGAGPPPIQDGEFTFLLPAGRKQCFYQSAPANASLETEYQVIGGAGLDVDFTLESPQGVLLGGANGGRGLQAVL

SEQ ID NO: 13323 - protein, 185 aa, Homo Sapiens
MMAAGAALALALWLLMPPVEVGGAGPPPIQDGEFTFLLPAGRKQCFYQSAPANASLETEYQVIGGAGLDVDFTLESPQGVLLVSESRKADGVHTSPLRPCGPGWSAASRCSRYCGPSRHVTATCKRATWSGSTSGQLSTWRCCCWWLCCRSARSSASSRTSARCPRSPCHGRKNGTKEGQQGVCI

SEQ ID NO: 13324 - protein, 191 aa, Homo Sapiens
MMAAGAALALALWLLMPPVEVGGAGPPPIQDGEFTFLLPAGRKQCFYQSAPANASLETEYQVIGGAGLDVDFTLESPQGVLLVSESRKADGVHTTISEKLVFFELIFDSLQDDEEVEGWAEAVEPEEMLDVKMEDIKESIETMRTRLERSIQMLTLLRAFEARDRNLQEGNLERVNFWSAVNVAVLLLVAV

SEQ ID NO: 13325 - protein, 227 aa, Homo Sapiens
MMAAGAALALALWLLMPPVEVGGAGPPPIQDGEFTFLLPAGRKQCFYQSAPANASLETEYQVIGGAGLDVDFTLESPQGVLLVSESRKADGVHTVEPTEAGDYKLCFDNSFSTISEKLVFFELIFDSLQDDEEVEGWAEAVEPEEMLDVKMEDIKESIETMRTRLERSIQMLTLLRAFEARDRNLQEGNLERVNFWSAVNVAVLLLVAVLQVCTLKRFFQDKRPVPT

SEQ ID NO: 13326 - protein, 65 aa, Homo Sapiens
  misc_feature (1)..(1): Xaa can be any naturally occurring amino acid
XEVEGWAEAVEPEEMLDVKMEDIKVCPGCAGATPSRSLGFTWGAPLGLTQPPLRSCALQLNYRVH

SEQ ID NO: 13327 - protein, 116 aa, Homo Sapiens
MDGTYKFCFSNRMSTMTPKIVMFTIDIGEAPKGQDMETEAHQNKLEEMINELAVAMTAVKHEQEYMEVRERIHRAINDNTNSRVVLWSFFEALVLVAMTLGQIYYLKRFFEVRRVV

SEQ ID NO: 13328 - protein, 201 aa, Homo Sapiens
MVTLAELLVLLAALLATVSGYFVSIDAHAEECFFERVTSGTKMGLIFEVAEGGFLDIDVEITGPDNKGIYKGDRESSGKYTFAAHMDGTYKFCFSNRMSTMTPKIVMFTIDIGEAPKGQDMETEAHQNKLEEMINELAVAMTAVKHEQEYMEVRERIHRAINDNTNSRVVLWSFFEALVLVAMTLGQIYYLKRFFEVRRVV

SEQ ID NO: 13329 - protein, 166 aa, Homo Sapiens
MVTLAELLVLLAALLATVSGYFVSIDAHAEECFFERVTSGTKMGLIFEVAEGGFLDIDVEITGPDNKGIYKGDRESSGKYTFAAHMDGTYKFCFSNRMSTMTPKIVMFTIDIGEAPKGQDMETEGGGDTWDAHQNKLEEMINELAVAMTAVKHEQEYMEVRERIHR

SEQ ID NO: 13330 - protein, 146 aa, Homo Sapiens
MGSTVPRSASVLLLLLLLRRAEQPCGAELTFELPDNAKQCFHEEVEQGVKFSLDYQVITGGHYDVDCYVEDPQGNTIYRETKKQYDSFTYRAEVKGVYQFCFSNEFSTFSHKTVYFDFQVGDEPPILPDMGNRVTALTQGFRVFCL

SEQ ID NO: 13331 - protein, 155 aa, Homo Sapiens
MGSTVPRSASVLLLLLLLRRAEQPCGAELTFELPDNAKQCFHEEVEQGVKFSLDYQVITGGHYDVDCYVEDPQGNTIYRETKKQYDSFTYRAEVKGVYQFCFSNEFSTFSHKTVYFDFQVGDEPPILPDMGNRVTALTQGPSASPTPTPPLRVPV

SEQ ID NO: 13332 - protein, 217 aa, Homo Sapiens
MGSTVPRSASVLLLLLLLRRAEQPCGAELTFELPDNAKQCFHEEVEQGVKFSLDYQVITGGHYDVDCYVEDPQGNTIYRETKKQYDSFTYRAEVKGVYQFCFSNEFSTFSHKTVYFDFQVGDEPPILPDMGNRVTALTQMESACVTIHEALKTVIDSQTHYRLREAQDRARAEDLNSRVSYWSVGETIALFVVSFSQVLLLKSFFTEKRPISRAVHS

SEQ ID NO: 13333 - protein, 173 aa, Homo Sapiens
MGSTVPRSASVLLLLLLLRRAEQPCGAELTFELPDNAKQCFHEEVEQGVKFSLDYQVITGGHYDVDCYVEDPQGNTIYRETKKQYDSFTYRAEVKGVYQFCFSNEFSTFSHKTVYFDFQVGDEPPILPDMGNRVTALTQRFRGAYWKEVDKMVDYMQPGGTPATEGLGRLAPS

SEQ ID NO: 13334 - protein, 186 aa, Homo Sapiens
MAGVGAGPLRAMGRQALLLLALCATGAQGLYFHIGETEKRCFIEEIPDETMVIGNYRTQMWDKQKEVFLPSTPGLGMHVEVKDPDGKVVLSRQYGSEGRFTFTSHTPGDHQICLHSNSTRMALFAGGKLRVHLDIQVGEHANNYPEIAAKDKLTELQLRARQLLDQVEQIQKEQDYQRASAYLLVI

SEQ ID NO: 13335 - protein, 227 aa, Homo Sapiens
MAGVGAGPLRAMGRQALLLLALCATGAQGLYFHIGETEKRCFIEEIPDETMVIGNYRTQMWDKQKEVFLPSTPGLGMHVEVKDPDGKVVLSRQYGSEGRFTFTSHTPGDHQICLHSNSTRMALFAGGKLRVHLDIQVGEHANNYPEIAAKDKLTELQLRARQLLDQVEQIQKEQDYQRYREERFRLTSESTNQRVLWWSIAQTVILILTGIWQMRHLKSFFEAKKLV

SEQ ID NO: 13336 - protein, 178 aa, Homo Sapiens
MAGVGAGPLRAMGRQALLLLALCATGAQGLYFHIGETEKRCFIEEIPDETMVIGNYRTQMWDKQKEVFLPSTPGLGMHVEVKDPDGKVVLSRQYGSEGRFTFTSHTPGDHQICLHSNSTRMALFAGGKLYREERFRLTSESTNQRVLWWSIAQTVILILTGIWQMRHLKSFFEAKKLV

SEQ ID NO: 13337 - protein, 120 aa, Homo Sapiens
MGDKIWLPFPVLLLAALPPVLLPGAAGFTPSLDSDFTFTLPAGQKECFYQPMPLKASLEIEYQVLDGAGLDIDFHLASPEGKTLVFEQRKSDGVHTCIRSKNGPGTAVHAYNPSTFRGQV

SEQ ID NO: 13338 - protein, 193 aa, Homo Sapiens
MGDKIWLPFPVLLLAALPPVLLPGAAGFTPSLDSDFTFTLPAGQKECFYQPMPLKASLEIEYQVLDGAGLDIDFHLASPEGKTLVFEQRKSDGVHTVETEVGDYMFCFDNTFSTISEKVIFFELILDNMGEQAQEQEDWKKYITGTDILDMKLEDILDPIIKIASDVQIRLHLGIHQQHQVQTKQKWAHTNSA

SEQ ID NO: 13339 - protein, 229 aa, Homo Sapiens
MGDKIWLPFPVLLLAALPPVLLPGAAGFTPSLDSDFTFTLPAGQKECFYQPMPLKASLEIEYQVLDGAGLDIDFHLASPEGKTLVFEQRKSDGVHTVETEVGDYMFCFDNTFSTISEKVIFFELILDNMGEQAQEQEDWKKYITGTDILDMKLEDILESINSIKSRLSKSGHIQTLLRAFEARDRNIQESNFDRVNFWSMVNLVVMVVVSAIQVYMLKSLFEDKRKSRT

SEQ ID NO: 13340 - protein, 162 aa, Homo Sapiens
MGDKIWLPFPVLLLAALPPVLLPGAAGFTPSLDSDFTFTLPAGQKECFYQPMPLKASLEIEYQVLDGAGLDIDFHLASPEGKTLVFEQRKSDGVHTVETEVGDYMFCFDNTFSTISEKVIFFELILDNMGEQAQEQEDWKKYITGTDILDMKLEDILVSMVF

SEQ ID NO: 13341 - protein, 82 aa, Homo Sapiens
MPRPGSAQRWAAVAGRWGCRLLALLLLVPGPGGASEITFELPDNAKQCFYEDIAQGTKCTLEFQVITGGHYDVDCRLEDPDG

SEQ ID NO: 13342 - protein, 224 aa, Homo Sapiens
MPRPGSAQRWAAVAGRWGCRLLALLLLVPGPGGASEITFELPDNAKQCFYEDIAQGTKCTLEFQVITGGHYDVDCRLEDPDGKVLYKEMKKQYDSFTFTASKNGTYKFCFSNEFSTFTHKTVYFDFQVGEDPPLFPSENRVSALTQMESACVSIHEALKSVIDYQTHFRLREAQGRSRAEDLNTRVAYWSVGEALILLVVSIGQVFLLKSFFSDKRTTTTRVGS

SEQ ID NO: 13343 - protein, 188 aa, Homo Sapiens
MPRPGSAQRWAAVAGRWGCRLLALLLLVPGPGGASEITFELPDNAKQCFYEDIAQGTKCTLEFQVITGGHYDVDCRLEDPDGKVLYKEMKKQYDSFTFTASKNGTYKFCFSNEFSTFTHKTVYFDFQVGEDPPLFPSENRVSALTQMESACVSIHEALKSVIDYQTHFRLREAQGRSRAEDLNTRVAY

SEQ ID NO: 13344 - protein, 404 aa, Homo Sapiens
MPRPGSAQRWAAVAGRWGCRLLALLLLVPGPGGASEITFELPDNAKQCFYEDIAQGTKCTLEFQVITGGHYDVDCRLEDPDGKVLYKEMKKQYDSFTFTASKNGTYKFCFSNEFSTFTHKTVYFDFQVGEDPPLFPSENRVSALTQMESACVSIHEALKSVIDYQTHFRLREAQGRSRAEDLNTRVAYWHSVDTSPGYHESDSKKSEDLSLCNVAEHSNTTEGPTGKQEGAQSVEEMFEEEAEEEVFLKFVILHAEDDTDEALRVQNLLQDDFGIKPGIIFAEMPCGRQHLQNLDDAVNGSAWTILLLTENFLRDTWCNFQFYTSLMNSVNRQHKYNSVIPMRPLNNPLPRERTPFALQTINALEEESRGFPTQVERIFQESVYKTQQTIWKETRNMVQRQFIA

SEQ ID NO: 13345 - protein, 72 aa, Homo Sapiens
MKRSLQALYCQLLSFLLILALTEALAFAIQEPSPRESLQVLPSGTPPGTMVTAPHSSTRHTSVVMLTPNPDG

SEQ ID NO: 13346 - protein, 149 aa, Homo Sapiens
MKRSLQALYCQLLSFLLILALTEALAFAIQEPSPRESLQVLPSGTPPGTMVTAPHSSTRHTSVVMLTPNPDGPPSQAAAPMATPTPRAEGHPPTHTISTIAATVTAPHSESSLSTGPAPAAMATTSSKPEGRPRGQAAPTILLTKPPGA

SEQ ID NO: 13347 - protein, 153 aa, Homo Sapiens
MKRSLQALYCQLLSFLLILALTEALAFAIQEPSPRESLQVLPSGTPPGTMVTAPHSSTRHTSVVMLTPNPDGPPSQAAAPMATPTPRAEGHPPTHTISTIAATVTAPHSESSLSTGPAPAAMATTSSKPEGRPRGQAAPTILLTKPPGATSRP

SEQ ID NO: 13348 - protein, 575 aa, Homo Sapiens
MKRSLQALYCQLLSFLLILALTEALAFAIQEPSPRESLQVLPSGTPPGTMVTAPHSSTRHTSVVMLTPNPDGPPSQAAAPMATPTPRAEGHPPTHTISTIAATVTAPHSESSLSTGPAPAAMATTSSKPEGRPRGQAAPTILLTKPPGATSRPTTAPPRTTTRRPPRPPGSSRKGAGNSSRPVPPAPGGHSRSKEGQRGRNPSSTPLGQKRPLGKIFQIYKGNFTGSVEPEPSTLTPRTPLWGYSSSPQPQTVAATTVPSNTSWAPTTTSLGPAKDKPGLRRAAQGGGSTFTSQGGTPDATAASGAPVSPQAAPVPSQRPHHGDPQDGPSHSDSWLTVTPGTSRPLSTSSGVFTAATGPTPAAFDTSVSAPSQGIPQGASTTPQAPTHPSRVSESTISGAKEETVATLTMTDRVPSPLSTVVSTATGNFLNRLVPAGTWKPGTAGNISHVAEGDKPQHRATICLSKMDIAWVILAISVPISSCSVLLTVCCMKRKKKTANPENNLSYWNNTITMDYFNRHAVELPREIQSLETSEDQLSEPRSPANGDYRDTGMVLVNPFCQETLFVGNDQVSEI

SEQ ID NO: 13349 - protein, 575 aa, Homo Sapiens; identical to SEQ ID NO: 13348

SEQ ID NO: 13350 - protein, 488 aa, Homo Sapiens
MKRSLQALYCQLLSFLLILALTEALAFAIQEPSPRESLQVLPSGTPPGTMVTAPHSSTRHTSVVMLTPNPDGPPSQAAAPMATPTPRAEGHPPTHTISTIAATVTAPHSESSLSTGPAPAAMATTSSKPEGRPRGQAAPTILLTKPPGATSRPTTAPPRTTTRRPPRPPGSSRKGAGNSSRPVPPAPGGHSRSKEGQRGRNPSSTPLGQKRPLGKIFQIYKGNFTGSVEPEPSTLTPRTPLWGYSSSPQPQTVAATTVPSNTSWAPTTTSLGPAKDKPGLRRAAQGGGSTFTSQGGTPDATAASGAPVSPQAAPVPSQRPHHGDPQDGPSHSDSWLTVTPGTSRPLSTSSGVFTAATGPTPAAFDTSVSAPSQGIPQGASTTPQAPTHPSRVSESTISGAKEETVATLTMTDRVPSPLSTVVSTATGNFLNRLVPAGTWKPGTAGNISHVAEGDKPQHRATICLSKMDIAWVILAISVPISSCSDPIT

SEQ ID NO: 13351 - protein, 105 aa, Homo Sapiens
MKRSLQALYCQLLTVLLTVCCMKRKKKTANPENNLSYWNNTITMDYFNRHAVELPREIQSLETSEDQLSEPRSPANGDYRDTGMVLVNPFCQETLFVGNDQVSEI

SEQ ID NO: 13352 - protein, 89 aa, Homo Sapiens
MVTAPHSSTRHTSVVMLTPNPDGPPSQAAAPMATPTPRAEGHPPTHTISTIAATVTAPHSESSLSTGPAPAAMATTSSKPEGRPRGQAA

SEQ ID NO: 13353 - protein, 122 aa, Homo Sapiens
MVTAPHSSTRHTSVVMLTPNPDGPPSQAAAPMATPTPRAEGHPPTHTISTIAATVTAPHSESSLSTGPAPAAMATTSSKPEGRPRGQAAPTILLTKPPGATSRPTTAPPRTTTRRPPRPPGS

SEQ ID NO: 13354 - protein, 51 aa, Homo Sapiens
MATLSVIGSSSLIAYAVFHNIQKSPEIRPLFYLSFCDLLLGLCWLTETLLY

SEQ ID NO: 13355 - protein, 80 aa, Homo Sapiens
MATLSVIGSSSLIAYAVFHNIQKSPEIRPLFYLSFCDLLLGLCWLTETLLYGASVANKDIICYNLQAVGQFWRLEGPRLR

SEQ ID NO: 13356 - protein, 80 aa, Homo Sapiens; identical to SEQ ID NO: 13355

SEQ ID NO: 13357 - protein, 85 aa, Homo Sapiens
MATLSVIGSSSLIAYAVFHNIQKSPEIRPLFYLSFCDLLLGLCWLTETLLYGASVANKDIICYNLQAVGQGRRGFAMFARLVLNA

SEQ ID NO: 13358 - protein, 106 aa, Homo Sapiens
MATLSVIGSSSLIAYAVFHNIQKSPEIRPLFYLSFCDLLLGLCWLTETLLYGASVANKDIICYNLQAVGQIFYISSFLYTVNYIWYLYTELRMKHTQSGQSTSPLV

SEQ ID NO: 13359 - protein, 175 aa, Homo Sapiens
MATLSVIGSSSLIAYAVFHNIQKSPEIRPLFYLSFCDLLLGLCWLTETLLYGASVANKDIICYNLQAVGQIFYISSFLYTVNYIWYLYTELRMKHTQSGQSTSPLVIDYTCRVCQMAFVFSSLIPLLLMTPVFCLGNTSECFQNFSQSHKCILMHSPPSAMAELPPSANTSVCST

SEQ ID NO: 13360 - protein, 337 aa, Homo Sapiens
MATLSVIGSSSLIAYAVFHNIQKSPEIRPLFYLSFCDLLLGLCWLTETLLYGASVANKDIICYNLQAVGQIFYISSFLYTVNYIWYLYTELRMKHTQSGQSTSPLVIDYTCRVCQMAFVFSSLIPLLLMTPVFCLGNTSECFQNFSQSHKCILMHSPPSAMAELPPSANTSVCSTLYFYGIAIFLGSFVLSLLTIMVLLIRAQTLYKKFVKSTGFLGSEQWAVIHIVDQRVRFYPVAFFCCWGPAVILMIIKLTKPQDTKLHMALYVLQALTATSQGLLNCGVYGWTQHKFHQLKQEARRDADTQTPLLCSQKRFYSRGLNSLESTLTFPASTSTIF

SEQ ID NO: 13361 - protein, 302 aa, Homo Sapiens
MATLSVIGSSSLIAYAVFHNIQKSPEIRPLFYLSFCDLLLGLCWLTETLLYGASVANKDIICYNLQAVGQVIDYTCRVCQMAFVFSSLIPLLLMTPVFCLGNTSECFQNFSQSHKCILMHSPPSAMAELPPSANTSVCSTLYFYGIAIFLGSFVLSLLTIMVLLIRAQTLYKKFVKSTGFLGSEQWAVIHIVDQRVRFYPVAFFCCWGPAVILMIIKLTKPQDTKLHMALYVLQALTATSQGLLNCGVYGWTQHKFHQLKQEARRDADTQTPLLCSQKRFYSRGLNSLESTLTFPASTSTIF

SEQ ID NO: 13362 - protein, 74 aa, Homo Sapiens
MATLSVIGSSSLIAYAVFHNIQKSPEIRPLFYLSFCDLLLGLCWLTETLLYGASVANKDIICYNLQAVGQVSAT

SEQ ID NO: 13363 - protein, 151 aa, Homo Sapiens
MFPKLQSEPQVLLIRAQTLYKKFVKSTGFLGSEQWAVIHIVDQRVRFYPVAFFCCWGPAVILMIIKLTKPQDTKLHMALYVLQALTATSQGLLNCGVYGWTQHKFHQLKQEARRDADTQTPLLCSQKRFYSRGLNSLESTLTFPASTSTIF

SEQ ID NO: 13364 - protein, 104 aa, Homo Sapiens
MKHTQSGQSTSPLVIDYTCRVCQMAFVFSSLIPLLLMTPVFCLGNTSECFQNFSQSHKCILMHSPPSAMAELPPSANTSVCSTLYFYGIAIFLGSFVLSLLTIM

SEQ ID NO: 13365 - protein, 245 aa, Homo Sapiens
MKHTQSGQSTSPLVIDYTCRVCQMAFVFSSLIPLLLMTPVFCLGNTSECFQNFSQSHKCILMHSPPSAMAELPPSANTSVCSTLYFYGIAIFLGSFVLSLLTIMVLLIRAQTLYKKFVKSTGFLGSEQWAVIHIVDQRVRFYPVAFFCCWGPAVILMIIKLTKPQDTKLHMALYVLQALTATSQGLLNCGVYGWTQHKFHQLKQEARRDADTQTPLLCSQKRFYSRGLNSLESTLTFPASTSTIF

SEQ ID NO: 13366 - protein, 28 aa, Homo Sapiens
MVSAAAPSLLILLLLLLGSVPATDARSV

SEQ ID NO: 13367 - protein, 44 aa, Homo Sapiens
MVSAAAPSLLILLLLLLGSVPATDARSVPLKATFLEDVAGSGEA

SEQ ID NO: 13368 - protein, 140 aa, Homo Sapiens
MVSAAAPSLLILLLLLLGSVPATDARSVPLKATFLEDVAGSGEAEGSSASSPSLPPPWTPALSPTSMGPQPITLGGPSPPTNFLDGIVDFFRQYVMLIAVVGSLAFLLMFIVCAAVITRQKQKASAYYPSSFPKKKYVDQ

SEQ ID NO: 13369 - protein, 283 aa, Homo Sapiens
MVSAAAPSLLILLLLLLGSVPATDARSVPLKATFLEDVAGSGEAEGSSASSPSLPPPWTPALSPTSMGPQPITLGGPSPPTNFLDGIVDFFRQYVMLIAVVGSLAFLLMFIVCAAVITRQKQKASAYYPSSFPKKKYVDQSDRAGGPRAFSEVPDRAPDSRPEEALDSSRQLQADILAATQNLKSPTRAALGGGDGARMVEGRGAEEEEKGSQEGDQEVQGHGVPVETPEAQEEPCSGVLEGAVVAGEGQGELEGSLLLAQEAQGPVGPPESPCACSSVHPSV

SEQ ID NO: 13370 - protein, 70 aa, Homo Sapiens
MASDLIRTILAVALISKLGTAVDAELMPSGAILQNKRENLPRVCHALAFLGMARCQDLFLVRLQGWKLGT

SEQ ID NO: 13371 - protein, 130 aa, Homo Sapiens
MASDLIRTILAVALISKLGTAVDAELMPSGAILQNKRENLPRVCHALAFLGMARCQDLFLVRLQGWKLGTRFQDGPRSTPQEEGGSPQRKRGMPVQIHFLLKSFLSSPITFAFISLARTVSLATAICKIV

SEQ ID NO: 13372 - protein, 130 aa, Homo Sapiens; identical to SEQ ID NO: 13371

SEQ ID NO: 13373 - protein, 130 aa, Homo Sapiens; identical to SEQ ID NO: 13371

SEQ ID NO: 13374 - protein, 258 aa, Homo Sapiens
FFSLLATAILGAVSWQPTNGIFLSMFLIVLPLESMAHGLFHELGNCLGGTSVGYAIVIPTNFCSGHTHGTGEWALAGGDTLRLDTLIEWWREKNGSFCSRLIIVLDSENSTPWVKEVRKINDQYIAVQGAELIKTVDIEEADPPQLGDFTKDWVEYNCNSSNNICWTEKGRTVKAVYGVSKRWSDYTLHLPTGSDVAKHWMLHFPRITYPLVHLANWLCGLNLFWICKTCFRCLKRLKMSWFLPTVLDTGQGFKLVKS

SEQ ID NO: 13375 - protein, 697 aa, Homo Sapiens
MCKSLRYCFSHCLYLAMTRLEEVNREVNMHSSVRYLGYLARINLLVAICLGLYVRWEKTANSLILVIFILGLFVLGIASILYYYFSMEAASLSLSNLWFGFLLGLLCFLDNSSFKNDVKEESTKYLLLTSIVLRILCSLVERISGYVRHRPTLLTTVEFLELVGFAIASTTMLVEKSLSVILLVVALAMLIIDLRMKSFLAIPNLVIFAVLLFFSSLETPKNPIAFACFFICLITDPFLDIYFSGLSVTERWKPFLYRGRICRRLSVVFAGMIELTFFILSAFKLRDTHLWYFVIPGFSIFGIFWMICHIIFLLTLWGFHTKLNDCHKVYFTHRTDYNSLDRIMASKGMRHFCLISEQLVFFSLLATAILGAVSWQPTNGIFLSMFLIVLPLESMAHGLFHELGNCLGGTSVGYAIVIPTNFCSPDGQPTLLPPEHVQELNLRSTGMLNAIQRFFAYHMIETYGCDYSTSGLSFDTLHSKLKAFLELRTVDGPRHDTYILYYSGHTHGTGEWALAGGDTLRLDTLIEWWREKNGSFCSRLIIVLDSENSTPWVKEVRKINDQYIAVQGAELIKTVDIEEADPPQLGDFTKDWVEYNCNSSNNICWTEKGRTVKAVYGVSKRWSDYTLHLPTGSDVAKHWMLHFPRITYPLVHLANWLCGLNLFWICKTCFRCLKRLKMSWFLPTVLDTGQGFKLVKS

SEQ ID NO: 13376 - protein, 697 aa, Homo Sapiens; identical to SEQ ID NO: 13375

SEQ ID NO: 13377 - protein, 124 aa, Homo Sapiens
MFLIVLPLESMAHGLFHELGNCLGGTSVGYAIVIPTNFCSPDGQPTLLPPEHVQELNLRSTGMLNAIQRFFAYHMIETYGCDYSTSGLSFDTLHSKLKAFLELRTVDGPRHDTYILYYSGHTHG

SEQ ID NO: 13378 - protein, 313 aa, Homo Sapiens
MFLIVLPLESMAHGLFHELGNCLGGTSVGYAIVIPTNFCSPDGQPTLLPPEHVQELNLRSTGMLNAIQRFFAYHMIETYGCDYSTSGLSFDTLHSKLKAFLELRTVDGPRHDTYILYYSGHTHGTGEWALAGGDTLRLDTLIEWWREKNGSFCSRLIIVLDSENSTPWVKEVRKINDQYIAVQGAELIKTVDIEEADPPQLGDFTKDWVEYNCNSSNNICWTEKGRTVKAVYGVSKRWSDYTLHLPTGSDVAKHWMLHFPRITYPLVHLANWLCGLNLFWICKTCFRCLKRLKMSWFLPTVLDTGQGFKLVKS

SEQ ID NO: 13379 - protein, 112 aa, Homo Sapiens
MRHFCLISEQLVFFSLLATAILGAVSWQPTNGIFLSMFLIVLPLESMAHGLFHELGNCLGGTSVGYAIVIPTNFCSPDGQPTLLPPEHVQELNLRSTGMLNAIQRFFAYHMI

SEQ ID NO: 13380 - protein, 111 aa, Homo Sapiens
MEPRALVTALSLGLSLCSLGLLVTAIFTDHWYETDPRRHKESCERSRAGADPPDQKNRLMPLSHLLGPLEEVLLPGHRPGHRHPHPERYCAAMHGHQVPLFSAHPLAKHSF

SEQ ID NO: 13381 - protein, 297 aa, Homo Sapiens
MEPRALVTALSLGLSLCSLGLLVTAIFTDHWYETDPRRHKESCERSRAGADPPDQKNRLMPLSHLPLRDSPPLGRRLLPGGPGRADPESWRSLLGLGGLDAECGRPLFATYSGLWRKCYFLGIDRDIDTLILKGIAQRCTAIKYHFSQPIRLRNIPFNLTKTIQQDEWHLLHLRRITAGFLGMAVAVLLCGCIVATVSFFWEESLTQHVAGLLFLMTGIFCTISLCTYAASISYDLNRLPKLIYSLPADVEHGYSWSIFCAWCSLGFIVAAGGLCIAYPFISRTKIAQLKSGRDSTV

SEQ ID NO: 13382 - protein, 233 aa, Homo Sapiens
MALNNFLFAQCACYFLAFLFSFVVVVPLSENGHDFRGRCLLFTEGMWLSANLTVQERERFTVQEWGPPAACRFSLLASLLSLLLAAAHAWRTLFFLCKGHEGSFFSAFLNLLVSAFVVFLVFIASTIVSVGFTMWCDTITEKGTVPHSCEELQDIDLELGVDNSAFYDQFAIAQFGLWASWLAWLAITTLAFLKVYHNYRQEDLLDSLIHEKELLLARPSPRTSFQEEKSAVI

SEQ ID NO: 13383 - protein, 190 aa, Homo Sapiens
MALNNFLFAQCACYFLAFLFSFVVVVPLSENGHDFRGRCLLFTEGMWLSANLTVQERERFTVQEWGPPAACRFSLLASLLSLLLAAAHAWRTLFFLCKGHEGSFFSAFLNLLVSAFVVFLVFIASTIVSVGFTMWCDTITEKGTVPHSCEELQDIDLELGVDNSAFYDQFAIAQGSLIDSHGVETPPGQS

SEQ ID NO: 13384 - protein, 197 aa, Homo Sapiens
MALNNFLFAQCACYFLAFLFSFVVVVPLSENGHDFRGRCLLFTEGMWLSANLTVQERERFTVQEWGPPAACRFSLLASLLSLLLAAAHAWRTLFFLCKGHEGSFFSAFLNLLVSAFVVFLVFIASTIVSVGFTMWCDTITEKGTVPHSCEELQDIDLELGVDNSAFYDQFAIAQVGGSGQEGRLAMLGGGHLLLDIC

SEQ ID NO: 13385 - protein, 211 aa, Homo Sapiens
MALNNFLFAQCACYFLAFLFSFVVVVPLSENGHDFRGRCLLFTEGMWLSANLTVQERERFTVQEWGPPAACRFSLLASLLSLLLAAAHAWRTLFFLCKGHEGSFFSAFLNLLVSAFVVFLVFIASTIVSVGFTMWCDTITEKGTVPHSCEELQDIDLELGVDNSAFYDQFAIAQVQFRTPGWPLKALAGRGWPEDASPGQEPSKGAGHGWA

SEQ ID NO: 13386 - protein, 182 aa, Homo Sapiens
MCTPVRVSIVCVMGAVGAVWTAPLPLPWAPTPSIHLREEGAAFPFCRVCVLRPRRSKWRSWDVNLGPRRRGLLGCGPCPSGKPRVHLQRTRSGAGAEAGGLPTRGSMRGCPFLGSSAAKCSLLLRPPSRGEASPWLPEFMTHPVHHQQLACVSGWLGTSLLEATCLGPHGGSWWGHHPGSRE

SEQ ID NO: 13387 - protein, 78 aa, Homo Sapiens
  misc_feature (1)..(1): Xaa can be any naturally occurring amino acid
XPDPREGAAAGPAVPTHLLPRGEERCHLGTVQAGGAGPDLPAALGGTGLPGEAAGGLCLGPGHMQPCVCPLDATCSEP

SEQ ID NO: 13388 - protein, 172 aa, Homo Sapiens
MCTSGQIIGSLLVLSVLEIGLGVSSVAVGAVSFSLALREHKPQLGDSSPFLLCGICGILCAKKKSGLVMILFSACCICGLIGGILNFQFLRAVTKKTSSLYPLHLASMSLACIGIGGCTLSSWLTCRLASYEQRRMFSEREHSLHHSHEMAEKEITDNMSNGGPQLIFNGRV

SEQ ID NO: 13389 - protein, 179 aa, Homo Sapiens
MCTSGQIIGSLLVLSVLEIGLGVSSVAVGAVSFSLALREHKPQLGDSSPFLLCGICGILCAKKKSGLVMILFSACCICGLIGGILNFQFLRAVTKKTSSLYPLHLASMSLACIGIGGCTLSSWLTCRLASYEQRRMFSEREHSLHHSHEMAEKRLRAIEITDLPSCPVVPPTPELPTRK

SEQ ID NO: 13390 - protein, 104 aa, Homo Sapiens
MILFSACCICGLIGGILNFQFLRAVTKKTSSLYPLHLASMSLACIGIGGCTLSSWLTCRLASYEQRRMFSEREHSLHHSHEMAEKEITDNMSNGGPQLIFNGRV

SEQ ID NO: 13391 - protein, 89 aa, Homo Sapiens
MILFSACCICGLIGGILNFQFLRAVTKKTSSLYPLHLASMSLACIGIGGCTLSSWLTCRLASYEQRRMFSEREHSLHHSHEMAEKIEGY

SEQ ID NO: 13392 - protein, 111 aa, Homo Sapiens
MILFSACCICGLIGGILNFQFLRAVTKKTSSLYPLHLASMSLACIGIGGCTLSSWLTCRLASYEQRRMFSEREHSLHHSHEMAEKRLRAIEITDLPSCPVVPPTPELPTRK

SEQ ID NO: 13393 - protein, 34 aa, Homo Sapiens
MASRVLAALIVASVVGLAELYVMVRAMEGELGEL

SEQ ID NO: 13394 - protein, 125 aa, Homo Sapiens
MASSLLAGERLVRALGPGGELEPERLPRKLRAELEAALGKKHKGGDSSSGPQRLVSFRLIRDLHQHLRERDSKLYLHELLEGSEIYLPEVVKPPRNPELVARLEKIKIQLANEEYKRITRNVTCQ

SEQ ID NO: 13395 - protein, 208 aa, Homo Sapiens
MASSLLAGERLVRALGPGGELEPERLPRKLRAELEAALGKKHKGGDSSSGPQRLVSFRLIRDLHQHLRERDSKLYLHELLEGSEIYLPEVVKPPRNPELVARLEKIKIQLANEEYKRITRNVTCQDTRHGGTLSDLGKQVRSLKALVITIFNFIVTVVAAFVCTYLGSQYIFTEMASRVLAALIVASVVGLAELYVMVRAMEGELGEL

SEQ ID NO: 13396 - protein, 89 aa, Homo Sapiens
MASSLLAGERLVRALGPGGELEPERLPRKLRAELEAALGKKHKGGDSSSGPQRLVSFRLIRDLHQHLRERGEPQSPVREPRTSCPAGED

SEQ ID NO: 13397 - protein, 124 aa, Homo Sapiens [sequence omitted]

SEQ ID NO: 13398 - protein, 88 aa, Homo Sapiens
MEEGGNLGGLIKMVHLLVLSGAWGMQMWVTFVSGFLLFRSLPRHTFGLVQSKLFPFYFHISMGCAFINLCILASQHAWAQLTFWEASQ

SEQ ID NO: 13399 - protein, 107 aa, Homo Sapiens
MEEGGNLGGLIKMVHLLVLSGAWGMQMWVTFVSGFLLFRSLPRHTFGLVQSKLFPFYFHISMGCAFINLCILASQHAWAQLTFWEASQLYLLFLSLTLATVNARWLE

SEQ ID NO: 13400 - protein, 170 aa, Homo Sapiens
MEEGGNLGGLIKMVHLLVLSGAWGMQMWVTFVSGFLLFRSLPRHTFGLVQSKLFPFYFHISMGCAFINLCILASQHAWAQLTFWEASQLYLLFLSLTLATVNARWLEPRTTAAMWALQTVEKERGLGGEVPGSHQGPDPYRQLREKDPKYSALRQNFFRYHGLSSLCNLG

SEQ ID NO: 13401 - protein, 189 aa, Homo Sapiens
MEEGGNLGGLIKMVHLLVLSGAWGMQMWVTFVSGFLLFRSLPRHTFGLVQSKLFPFYFHISMGCAFINLCILASQHAWAQLTFWEASQLYLLFLSLTLATVNARWLEPRTTAAMWALQTVEKERGLGGEVPGSHQGPDPYRQLREKDPKYSALRQNFFRYHGLSSLCNLGCVLSNGLCLAGLALEIRSL

SEQ ID NO: 13402 - protein, 189 aa, Homo Sapiens; identical to SEQ ID NO: 13401

SEQ ID NO: 13403 - protein, 189 aa, Homo Sapiens; identical to SEQ ID NO: 13401

SEQ ID NO: 13404 - protein, 189 aa, Homo Sapiens; identical to SEQ ID NO: 13401

SEQ ID NO: 13405 - protein, 189 aa, Homo Sapiens; identical to SEQ ID NO: 13401

SEQ ID NO: 13406 - protein, 189 aa, Homo Sapiens; identical to SEQ ID NO: 13401

SEQ ID NO: 13407 - protein, 189 aa, Homo Sapiens; identical to SEQ ID NO: 13401

SEQ ID NO: 13408 - protein, 189 aa, Homo Sapiens; identical to SEQ ID NO: 13401

SEQ ID NO: 13409 - protein, 120 aa, Homo Sapiens
MGCAFINLCILASQHAWAQLTFWEASQLYLLFLSLTLATVNARWLEPRTTAAMWALQTVEKERGLGGEVPGSHQGPDPYRQLREKDPKYSALRQNFFRYHGLSSLCNLGCVLSNGLCLAG

SEQ ID NO: 13410 - protein, 128 aa, Homo Sapiens
MGCAFINLCILASQHAWAQLTFWEASQLYLLFLSLTLATVNARWLEPRTTAAMWALQTVEKERGLGGEVPGSHQGPDPYRQLREKDPKYSALRQNFFRYHGLSSLCNLGCVLSNGLCLAGLALEIRSL

SEQ ID NO: 13411 - protein, 106 aa, Homo Sapiens
MQRLPAATRATLILSLAFASLHSACSAASSSNSSSLTAHHPDPGTLEQCLNVDFCPQAARCCRTGVDEYGWIAAAVGWSLWFLTLILLCVDKLMKLTPDEPKDLQA

SEQ ID NO: 13412 - protein, 83 aa, Homo Sapiens
MQRLPAATRATLILSLAFASLHSACSADVDFCPQAARCCRTGVDEYGWIAAAVGWSLWFLTLILLCVDKLMKLTPDEPKDLQA

SEQ ID NO: 13413 - protein, 107 aa, Homo Sapiens
MQRLPAATRATLILSLAFASLHSACSAEASSSNSSSLTAHHPDPGTLEQCLNVDFCPQAARCCRTGVDEYGWIAAAVGWSLWFLTLILLCVDKLMKLTPDEPKDLQA

SEQ ID NO: 13414 - protein, 105 aa, Homo Sapiens
MQRLPAATRATLILSLAFASLHSACSAEASSSNSSSLTAHHPDPGTLEQCLRSGYLANLRGEADQLWKFCTVLCFWESRRSSSRIALMREAEEWPGWRSSVELVG

SEQ ID NO: 13415 - protein, 49 aa, Homo Sapiens
MALPPGPAALRHTLLLLPALLSSAQYQPCLSPSQRPPAVFQVGGSWSHK

SEQ ID NO: 13416 - protein, 40 aa, Homo Sapiens
MALPPGPAALRHTLLLLPALLSSGGPGTPRLAWYLDGQLQ

SEQ ID NO: 13417 - protein, 170 aa, Homo Sapiens
MALPPGPAALRHTLLLLPALLSSGGPGTPRLAWYLDGQLQEASTSRLLSVGGEAFSGGTSTFTVTAHRAQHELNCSLQDPRSGRSANASVILNVQFKPEIAQVGAKYQEAQGPGLLVVLFALVRANPPANVTWIDQDGPVTVNTSDFLVLDAQNYPWLTNHTVQLQLRSL

SEQ ID NO: 13418 - protein, 37 aa, Homo Sapiens
MALPPGPAALRHTLLLLPALLSSGPQKWPISQRLCHP

SEQ ID NO: 13419 - protein, 168 aa, Homo Sapiens
MALPPGPAALRHTLLLLPALLSSGWGELEPQIDGQTWAERALRENERHAFTCRVAGGPGTPRLAWYLDGQLQEASTSRLLSVGGEAFSGGTSTFTVTAHRAQHELNCSLQDPRSGRSANASVILNVQCPSRHPSLISSDSNNLKLNNVRLPRENMSLPSNLQLNDLTP

SEQ ID NO: 13420 - protein, 138 aa, Homo Sapiens
MALPPGPAALRHTLLLLPALLSSGWGELEPQIDGQTWAERALRENERHAFTCRVAGGPGTPRLAWYLDGQLQEASTSRLLSVGGEAFSGGTSTFTVTAHRAQHELNCSLQDPRSGRSANASVILNVQFKPEIAQVGAK

SEQ ID NO: 13421 - protein, 366 aa, Homo Sapiens
MALPPGPAALRHTLLLLPALLSSGWGELEPQIDGQTWAERALRENERHAFTCRVAGGPGTPRLAWYLDGQLQEASTSRLLSVGGEAFSGGTSTFTVTAHRAQHELNCSLQDPRSGRSANASVILNVQFKPEIAQVGAKYQEAQGPGLLVVLFALVRANPPANVTWIDQDGPVTVNTSDFLVLDAQNYPWLTNHTVQLQLRSLAHNLSVVATNDVGVTSASLPAPGLLATRVEVPLLGIVVAAGLALGTLVGFSTLVACLVCRKEKKTKGPSRHPSLISSDSNNLKLNNVRLPRENMSLPSNLQLNDLTPDSRAVKPADRQMAQNNSRPELLDPEPGGLLTSQGFIRLPVLGYIYRVSSVSSDEIWL

SEQ ID NO: 13422 - protein, 351 aa, Homo Sapiens
MALPPGPAALRHTLLLLPALLSSGWGELEPQIDGQTWAERALRENERHAFTCRVAGGPGTPRLAWYLDGQLQEASTSRLLSVGGEAFSGGTSTFTVTAHRAQHELNCSLQDPRSGRSANASVILNVQFKPEIAQVGAKYQEAQGPGLLVVLFALVRANPPANVTWIDQDGPVTVNTSDFLVLDAQNYPWLTNHTVQLQLRSLAHNLSVVATNDVGVTSASLPAPGLLATRVEVPLLGIVVAAGLALGTLVGFSTLVACLVCRKEKKTKGPSRHPSLISSDSNNLKLNNVRLPRENMSLPSNLQLNDLTPDSRAVKPADRQMAQNNSRPELLDPEPGGLLTSQGRRNQDKDA

SEQ ID NO: 13423 - protein, 381 aa, Homo Sapiens
MALPPGPAALRHTLLLLPALLSSGWGELEPQIDGQTWAERALRENERHAFTCRVAGGPGTPRLAWYLDGQLQEASTSRLLSVGGEAFSGGTSTFTVTAHRAQHELNCSLQDPRSGRSANASVILNVQFKPEIAQVGAKYQEAQGPGLLVVLFALVRANPPANVTWIDQDGPVTVNTSDFLVLDAQNYPWLTNHTVQLQLRSLAHNLSVVATNDVGVTSASLPAPGLLATRVEVPLLGIVVAAGLALGTLVGFSTLVACLVCRKEKKTKGPSRHPSLISSDSNNLKLNNVRLPRENMSLPSNLQLNDLTPDSRVKPADRQMAQNNSRPELLDPEPGGLLTSQACLLHHGTPALTNPWLPHQQEGALPGGWSPQAHNSTVWKL

SEQ ID NO: 13424 - protein, 322 aa, Homo Sapiens
MALPPGPAALRHTLLLLPALLSSGWGELEPQIDGQTWAERALRENERHAFTCRVAGGPGTPRLAWYLDGQLQEASTSRLLSVGGEAFSGGTSTFTVTAHRAQHELNCSLQDPRSGRSANASVILNVQFKPEIAQVGAKYQEAQGPGLLVVLFALVRANPPANVTWIDQDGPVTVNTSDFLVLDAQNYPWLTNHTVQLQLRSLAHNLSVVATNDVGVTSASLPAPGPSRHPSLISSDSNNLKLNNVRLPRENMSLPSNLQLNDLTPDSRAVKPADRQMAQNNSRPELLDPEPGGLLTSQGFIRLPVLGYIYRVSSVSSDEIWL

SEQ ID NO: 13425 - protein, 306 aa, Homo Sapiens
MALPPGPAALRHTLLLLPALLSSGWGELEPQIDGQTWAERALRENERHAFTCRVAGGPGTPRLAWYLDGQLQEASTSRLLSVGGEAFSGGTSTFTVTAHRAQHELNCSLQDPRSGRSANASVILNVQFKPEIAQVGAKYQEAQGPGLLVVLFALVRANPPANVTWIDQDGPVTVNTSDFLVLDAQNYPWLTNHTVQLQLRSLAHNLSVVATNDVGVTSASLPAPGPSRHPSLISSDSNNLKLNNVRLPRENMSLPSNLQLNDLTPDSRVKPADRQMAQNNSRPELLDPEPGGLLTSQGRRNQDKDA

SEQ ID NO: 13426 - protein, 322 aa, Homo Sapiens; identical to SEQ ID NO: 13424

SEQ ID NO: 13427 - protein, 322 aa, Homo Sapiens; identical to SEQ ID NO: 13424

SEQ ID NO: 13428 - protein, 167 aa, Homo Sapiens
MALPPGPAALRHTLLLLPALLSSGWGELEPQIDGQTWAERALRENERHAFTCRVAGGPGTPRLAWYLDGQLQEASTSRLLSVGGEAFSGGTSTFTVTAHRAQHELNCSLQDPRSGRSANASVILNVQWLLATRVEVPLLGIVVAAGLALGTLVGFSTLVACLVCRKE

SEQ ID NO: 13429 - protein, 218 aa, Homo Sapiens
MALPPGPAALRHTLLLLPALLSSVKPEIAQVGAKYQEAQGPGLLVVLFALVRANPPANVTWIDQDGPVTVNTSDFLVLDAQNYPWLTNHTVQLQLRSLAHNLSVVATNDVGVTSASLPAPGPSRHPSLISSDSNNLKLNNVRLPRENMSLPSNLQLNDLTPDSRAVKPADRQMAQNNSRPELLDPEPGGLLTSQGFIRLPVLGYIYRVSSVSSDEIWL

SEQ ID NO: 13430 - protein, 200 aa, Homo Sapiens
  misc_feature (1)..(1): Xaa can be any naturally occurring amino acid
XDQDGPVTVNTSDFLVLDAQNYPWLTNHTVQLQLRSLAHNLSVVATNDVGVTSASLPAPGLLATRVEVPLLGIVVAAGLALGTLVGFSTLVACLVCRKEKKTKGPSRHPSLISSDSNNLKLNNVRLPRENMSLPSNLQLNDLTPDSRVKPADRQMAQNNSRPELLDPEPGGLLTSQGFIRLPVLGYIYRVSSVSSDEIWL

SEQ ID NO: 13431 - protein, 195 aa, Homo Sapiens
  misc_feature (1)..(1): Xaa can be any naturally occurring amino acid
XLLRRRSGREPVKPEIAQVGAKYQEAQGPGLLVVLFALVRANPPANVTWIDQDGPVTVNTSDFLVLDAQNYPWLTNHTVQLQLRSLAHNLSVVATNDVGVTSASLPAPGPSRHPSLISSDSNNLKLNNVRLPRENMSLPSNLQLNDLTPDSRAVKPADRQMAQNNSRPELLDPEPGGLLTSQGFIRLPVLGYIYR

SEQ ID NO: 13432 - protein, 113 aa, Homo Sapiens
MEERAQHCLSRLLDNSALKQQELPIHRLYFTARRVLFVFFATGIFCLCMGIILILSARSTQEIEINYTRICANCAKLRENASNFDKECTCSIPFYLSGKMMVGEIQETRLTLH

SEQ ID NO: 13433 - protein, 291 aa, Homo Sapiens
MDSPWDELALAFSRTSMFPFFDIAHYLVSVMAVKRQPGAAALAWKNPISSWFTAMLHCFGGGILSCLLLAEPPLKFLANHTNILLASSIWYITFFCPHDLVSQGYSYLPVQLLASGMKEVTRTWKIVGGVTHANSYYKNGWIVMIAIGWARGAGGTIITNFERLVKGDWKPEGDEWLKMSYPAKVTLLGSVIFTFQHTQHLAISKHNLMFLYTIFIVATKITMMTTQTSTMTFAPFEDTLSWMLFGWQQPFSSCEKKSEAKSPSNGVGSLASKPVDVASDNVKKKHTKKNE

SEQ ID NO: 13434 - protein, 35 aa, Homo Sapiens
MLHCFGGGILSCLLLAEPPLKFLANHTNILLASSI

SEQ ID NO: 13435 - protein, 237 aa, Homo Sapiens
MLHCFGGGILSCLLLAEPPLKFLANHTNILLASSIWYITFFCPHDLVSQGYSYLPVQLLASGMKEVTRTWKIVGGVTHANSYYKNGWIVMIAIGWARGAGGTIITNFERLVKGDWKPEGDEWLKMSYPAKVTLLGSVIFTFQHTQHLAISKHNLMFLYTIFIVATKITMMTTQTSTMTFAPFEDTLSWMLFGWQQPFSSCEKKSEAKSPSNGVGSLASKPVDVASDNVKKKHTKKNE

SEQ ID NO: 13436 - protein, 162 aa, Homo Sapiens
  misc_feature (1)..(1): Xaa can be any naturally occurring amino acid
XSCLLLAEPPLKFLANHTNILLASSIWYITFFCPHDLVSQGYSYLPVQLLASGMKEVTRTWKIVGGVTHANSYYKNGWIVMIAIGWARGAGGTIITNFERLVKGDWKPEGDEWLKMSYPAKVTLLGSVIFTFQHTQHLAISKHNLMFLYTIFIVATKSLNWR

SEQ ID NO: 13437 - protein, 81 aa, Homo Sapiens
  misc_feature (1)..(1): Xaa can be any naturally occurring amino acid
XWIVMIAIGWARGAGGTIITNFERLVKGDWKPEGDEWLKMSYPAKVTLLGSVIFTFQHTQHLAISKHNLMFLYTIFIVATK

SEQ ID NO: 13438 - protein, 197 aa, Homo Sapiens
LRATPWFLTSLGRAALDLAIIFLSCVMKSKMRQALGFAKEARESPDTQALLTCAEKEEENQENLDWVPLTTLSHCKSLRTMTAISRYMELTIEPVQQAGCSATRLPGDGQTSAGDASLQDPPSYPPVQVIRARVSSGSSSEVSSINSDLEQKYWEALNSEQWDPEDVNLEGSKENVELLGSQVHQDSVRTAHLSDDD

SEQ ID NO: 13439 - protein, 150 aa, Homo Sapiens
MFILFPVCGSKFKSNSDREARERKRRRQLRASVFALALPLSLGPCWALWVAVPKASATIRGPQRRLLASLLQENTEILGYLLGSVAAFGSWASRIPPLSRIMESRCVAQAGVQWRDLGSLQPSPPNFKQFSCLSLPSSWDYSCQWSCRSC

SEQ ID NO: 13440 - protein, 113 aa, Homo Sapiens
MFILFPVCGSKFKSNSDREARERKRRRQLRASVFALALPLSLGPCWALWVAVPKASATIRGPQRRLLASLLQENTEILGYLLGSVAAFGSWASRIPPLSRIVRPGVGMGLWVT

SEQ ID NO: 13441 - protein, 121 aa, Homo Sapiens
MGEAPSPAPALWDWDYLDRCFARHRVCISFGLWICASSCWIAAHALLLYLRCAQKPRQDQSALCAACCLLTSLCDTVGALLARQLTIQSVDPNSSLIQIGKPERGRGGGSSGPVCLPWPCR

SEQ ID NO: 13442 - protein, 475 aa, Homo Sapiens
MGEAPSPAPALWDWDYLDRCFARHRVCISFGLWICASSCWIAAHALLLYLRCAQKPRQDQSALCAACCLLTSLCDTVGALLARQLTIQVFTGAYLAAIDLVNFMFILFPVCGSKFKSNSDREARERKRRRQLRASVFALALPLSLGPCWALWVAVPKASATIRGPQRRLLASLLQENTEILGYLLGSVAAFGSWASRIPPLSRIAPPPTLGITTQHEIWRGQMSKPSQSPSRSPSGHWRAAAQRQVLGTEMCRGKTFPSIHLWTRLLSALAGLLYASAIVAHDQHPEYLLRATPWFLTSLGRAALDLAIIFLSCVMKSKMRQALGFAKEARESPDTQALLTCAEKEEENQENLDWVPLTTLSHCKSLRTMTAISRYMELTIEPVQQAGCSATRLPGDGQTSAGDASLQDPPSYPPVQVIRARVSSGSSSEVSSINSDLEWDPEDVNLEGSKENVELLGSQVHQDSVRTAHLSDDD

SEQ ID NO: 13443 - protein, 428 aa, Homo Sapiens
MGEAPSPAPALWDWDYLDRCFARHRVCISFGLWICASSCWIAAHALLLYLRCAQKPRQDQSALCAACCLLTSLCDTVGALLARQLTIQVFTGAYLAAIDLVNFMFILFPVCGSKFKSNSDREARERKRRRQLRASVFALALPLSLGPCWALWVAVPKASATIRGPQRRLLASLLQENTEILGYLLGSVAAFGSWASRIPPLSRICRGKTFPSIHLWTRLLSALAGLLYASAIVAHDQHPEYLLRATPWFLTSLGRAALDLAIIFLSCVMKSKMRQALGFAKEARESPDTQALLTCAEKEEENQENLDWVPLTTLSHCKSLRTMTAISRYMELTIEPVQQAGCSATRLPGDGQTSAGDASLQDPPSYPPVQVIRARVSSGSSSEVSSINSDLEWDPEDVNLEGSKENVELLGSQVHQDSVRTAHLSDDD

SEQ ID NO: 13444 - protein, 396 aa, Homo Sapiens
MGEAPSPAPALWDWDYLDRCFARHRVCISFGLWICASSCWIAAHALLLYLRCAQKPRQDQSALCAACCLLTSLCDTVGALLARQLTIQVFTGAYLAAIDLVNFMFILFPVCGSKFKSNSDREARERKRRRQLRASVFALALPLSLGPCWALWVAVPKASATIRGPQRRLLASLLQENTEILGYLLGSVAAFGSWASRIPPLSRICRGKTFPSIHLWTRLLSALAGLLYASAIVAHDQHPEYLLRATPWFLTSLGRAALDLAIIFLSCVMKSKMRQALGFAKEARESPDTQALLTCAEKEEENQENLDWVPLTTLSHCKSLRTMTAISRYMELTIEPVQQAAVPPGCQVTGRRAPEMRPCRTPRRTLPFRSSGPGCLPAAPLRSPPSTPTWSGTLKM

SEQ ID NO: 13445 - protein, 438 aa, Homo Sapiens
MGEAPSPAPALWDWDYLDRCFARHRVCISFGLWICASSCWIAAHALLLYLRCAQKPRQDQSALCAACCLLTSLCDTVGALLARQLTIQVFTGAYLAAIDLVNFMFILFPVCGSKFKSNSDREARERKRRRQLRASVFALALPLSLGPCWALWVAVPKASATIRGPQRRLLASLLQENTEILGYLLGSVAAFGSWASRIPPLSRICRGKTFPSIHLWTRLLSALAGLLYASAIVAHDQHPEYLLRATPWFLTSLGRAALDLAIIFLSCVMKSKMRQALGFAKEARESPDTQALLTCAEKEEENQENLDWVPLTTLSHCKSLRTMTAISRYMELTIEPVQQAGCSATRLPGDGQTSAGDASLQDPPSYPPVQVIRARVSSGSSSEVSSINSDLEKYWEALNSEQWDPEDVNLEGSKENVELLGSQVHQDSVRTAHLSDDD

SEQ ID NO: 13446 - protein, 119 aa, Homo Sapiens
MKSKMRQALGFAKEARESPDTQALLTCAEKEEENQENLDWVPLTTLSHCKSLRTMTAISRYMELTIEPVQQAAVPPGCQVTGRRAPEMRPCRTPRRTLPFRSSGPGCLPAAPLSGTLKM

SEQ ID NO: 13447 - protein, 261 aa, Homo Sapiens
NFMFILFPVCGSKFKSNSDREARERKRRRQLRASVFALALPLSLGPCWALWVAVPKASATIRGPQRRLLASLLQENTEILGYLLGSVAAFGSWASRIPPLSRISKMRQALGFAKEARESPDTQALLTCAEKEEENQENLDWVPLTTLSHCKSLRTMTAISRYMELTIEPVQQAGCSATRLPGDGQTSAGDASLQDPPSYPPVQVIRARVSSGSSSEVSSINSDLEWDPEDVNLEGSKENVELLGSQVHQDSVRTAHLSDDD

SEQ ID NO: 13448 - protein, 124 aa, Homo Sapiens
GGRWPPADCGCCCRSCRSCRSCRCRRWVGRRSLSVRPPRGGSLLGPRPSRAHPCPHRWRWASRTAAATPRTSARPRPAGAACGTWACTPRSLHPPTMKLSRWPSPERKDQHSPRNPALSLGPRA

SEQ ID NO: 13449 - protein, 43 aa, Homo Sapiens
MARGPLAARGLRLLLPLLPLLPLLPLPQVALGFADGSCDPSDQ

SEQ ID NO: 13450 - protein, 209 aa, Homo Sapiens
MARGPLAARGLRLLLPLLPLLPLLPLPQVALGFADGSCDPSDQCPPQARWSSLWHVGLILLAVLLLLLCGVTAGCVRFCCLRKQAQAQPHLPPARQPCDVAVIPMDSDSPVHSTVTSYSSVQYPLGMRLPLPFGELDLDSMAPPAYSLYTPEPPPSYDEAVKMAKPREEGPALSQKPSPLLGASGLETTPVPQESGPNTQLPPCSPGAP

SEQ ID NO: 13451 - protein, 103 aa, Homo Sapiens
MARGPLAARGLRLLLPLLPLLPLLPLPQVGRAAFSLGSATAGRVPARTTPLPGSPLSPQVALGFADGSCDPSDQCPPQARWSSLWHVGLILLAVLLLLLCGVT

SEQ ID NO: 13452 - protein, 194 aa, Homo Sapiens
MERHCLLFILLTCLRWLCHDIPQGAGARWPRVSPVVEPCSPRLILLAVLLLLLCGVTAGCVRFCCLRKQAQAQPHLPPARQPCDVAVIPMDSDSPVHSTVTSYSSVQYPLGMRLPLPFGELDLDSMAPPAYSLYTPEPPPSYDEAVKMAKPREEGPALSQKPSPLLGASGLETTPVPQESGPNTQLPPCSPGAP

SEQ ID NO: 13453 - protein, 90 aa, Homo Sapiens
MGVRVHVVAASALLYFILLSGTRCEENCGNPEHCLTTDWVHLWYIWLLVVIGALLLLCGLTSLCFRCCCLSRQQNGEDGGPPPCEVTVIA

SEQ ID NO: 13454 - protein, 183 aa, Homo Sapiens
MGVRVHVVAASALLYFILLSGTRCEENCGNPEHCLTTDWVHLWYIWLLVVIGALLLLCGLTSLCFRCCCLSRQQNGEDGGPPPCEVTVIAFDHDSTLQSTITSLQSVFGPAARRILAVAHSHSSLGQLPSSLDTLPGYEEALHMSRFTVAMCGQKAPDLPPVPEEKQLPPTEKESTRIVDSWN

SEQ ID NO: 13455 - protein, 163 aa, Homo Sapiens
MSWRPQPCCISSCCLTTDWVHLWYIWLLVVIGALLLLCGLTSLCFRCCCLSRQQNGEDGGPPPCEVTVIAFDHDSTLQSTITSLQSVFGPAARRILAVAHSHSSLGQLPSSLDTLPGYEEALHMSRFTVAMCGQKAPDLPPVPEEKQLPPTEKESTRIVDSWN

SEQ ID NO: 13456 - protein, 323 aa, Homo Sapiens
MAAPKGSLWVRTQLGLPPLLLLTMALAGGSGTASAEAFDSVLGDTASCHRACQLTYPLHTYPKEEELYACQRGCRLFSICQFVDDGIDLNRTKLECESACTEAYSQSDEQYACHLGCQNQLPFAELRQEQLMSLMPKMHLLFPLTLVRSFWSDMMDSAQSFITSSWTFYLQADDGKIVIFQSKPEIQYAPHLEQEPTNLRESSLSKMSYLQMRNSQAHRNFLEDGESDGFLRCLSLNSGWILTTTLVLSVMVLLWICCATVATAVEQYVPSEKLSIYGDLEFMNEQKLNRYPASSLVVVRSKTEDHEEAGPLPTKVNLAHSEI

SEQ ID NO: 13457 - protein, 145 aa, Homo Sapiens
MAAPKGSLWVRTQLGLPPLLLLTMALAGGSGTASAEAFDSVLGDTASCHRACQLTYPLHTYPKEEELYACQRGCRLFSICQFVDDGIDLNRTKLECESACTEAYSQSDEQYACHLGCQNQLPFAELRQEQVRNNTAFQTSLLRWH

SEQ ID NO: 13458 - protein, 285 aa, Homo Sapiens
MAAPKGSLWVRTQLGLPPLLLLTMALAGGSGTASAEAFDSVLGDTASCHRACQLTYPLHTYPKVSASLYTVDHIEEELYACQRGCRLFSICQFVDDGIDLNRTKLECESACTEAYSQSDEQYACHLGCQNQLPFAELRQEQLMSLMPKMHLLFPLTLVRSFWSDMMDSAQSFITSSWTFYLQADDGKIVIFQSKPEIQYAPHLEQEPTNLRESSLSKMSYLQMRNSQAHRNFLEDGESDGFLRCLSLNSGWILTTTLVLSVMVLLWICCATVATAVEQYVPSEVN

SEQ ID NO: 13459 - protein, 192 aa, Homo Sapiens
MSLMPKMHLLFPLTLVRSFWSDMMDSAQSFITSSWTFYLQADDGKIVIFQSKPEIQYAPHLEQEPTNLRESSLSKMSYLQMRNSQAHRNFLEDGESDGFLRCLSLNSGWILTTTLVLSVMVLLWICCATVATAVEQYVPSEKLSIYGDLEFMNEQKLNRYPASSLVVVRSKTEDHEEAGPLPTKVNLAHSEI

SEQ ID NO: 13460 - protein, 192 aa, Homo Sapiens; identical to SEQ ID NO: 13459

SEQ ID NO: 13461 - protein, 192 aa, Homo Sapiens; identical to SEQ ID NO: 13459

SEQ ID NO: 13462 - protein, 144 aa, Homo Sapiens
MSLMPKMHLLFPLTLVRSFWSDMMDSAQSFITSSWTFYLQADDGKIVIFQSKPEIQYAPHLEQEPTNLRESSLSKMSYLQMRNSQAHRNFLEDGESDGFLRCLSLNSGWILTTTLVLSVMVLLWICCATVATAVEQYVPSEVNL

SEQ ID NO: 13463 - protein, 144 aa, Homo Sapiens; identical to SEQ ID NO: 13462

SEQ ID NO: 13464 - protein, 180 aa, Homo Sapiens
MATRGGAGVAMAVWSLLSARAVTAFLLLFLPRFLQAQTFSFPFQQPEKCDNNQYFDISALSCVPCGANQRQDARGTSCVCLPGFQMISNNGGPAIICKKCPENMKGVTEDGWNCISCPSDLTAEGKCHCPIGHILDSNSGKWLLTRRIFLVDAVSGRENDLGTQPRVIRVATQISLSVHL

SEQ ID NO: 13465 - protein, 147 aa, Homo Sapiens
MATRGGAGVAMAVWSLLSARAVTAFLLLFLPRFLQAQTFSFPFQQPEKCDNNQYFDISALSCVPCGANQRQDARGTSCVCLPGFQMISNNGGPAIICKKCPENMKGVTEDGWNCISCPSDLTAEGKCHCPIGHILGSHSCPGWSVVV

SEQ ID NO: 13466 - protein, 995 aa, Homo Sapiens
MATRGGAGVAMAVWSLLSARAVTAFLLLFLPRFLQAQTFSFPFQQPEKCDNNQYFDISALSCVPCGANQRQDARGTSCVCLPGFQMISNNGGPAIICKKCPENMKGVTEDGWNCISCPSDLTAEGKCHCPIGHILVERDINGTLLSQATCELCDGNENSFMVVNALGDRCVRCEPTFVNTSRSCACSEPNILTGGLCFSSTGNFPLRRISAARYGEVGMSLTSEWFAKYLQSSAAACWVYANLTSCQALGNMCVMNMNSYDFATFDACGLFQFIFENTAGLSTVHSISFWRQNLPWLFYGDQLGLAPQVLSSTSLPTNFSFKGENQNTKLKFVAASYDIRGNFLKWQTLEGGVLQLCPDTETRLNAAYSFGTTYQQNCEIPISKILIDFPTPIFYDVYLEYTDENQHQYILAVPVLNLNLQHNKIFVNQDSNSGKWLLTRRIFLVDAVSGRENDLGTQPRVIRVATQISLSVHLVPNTINGNIYPPLITIAYSDIDIKDANSQSVKVSFSVTYEMDHGEAHVQTDIALGVLGGLAVLASLLKTAGWKRRIGSPMIDLQTVVKFLVYYAGDLANVFFIITVGTGLYWLIFFKAQKSVSVLLPMPIQEERFVTYVGCAFALKALQFLHKLISQITIDVFFIDWERPKGKVLKAVEGEGGVRSATVPVSIWRTYFVANEWNEIQTVRKINSLFQVLTVLFFLEVVGFKNLALMDSSSSLSRNPPSYIAPYSCILRYAVSAALWLAIGIIQVVFFAVFYERFIEDKIRQFVDLCSMSNISVFLLSHKCFGYYIHGRSVHGHADTNMEEMNMNLKREAENLCSQRGLVPNTDGQTFEIAISNQMRQHYDRIHETLIRKNGPARLLSSSASTFEQSIKAYHMMNKFLGSFIDHVHKEMDYFIKDKLLLERILGMEFMEPMEKSIFYNDEGYSFSSVLYYGNEATLLIFDLLFFCVVDLACQNFILASFLTYLQQEIFRYIRNTVGQKNLASKTLVDQRFLI

SEQ ID NO: 13467 - protein, 119 aa, Homo Sapiens
MATRGGAGVAMAVWSLLSARAVTAFLLLFLPRFLQAQTFSFPFQQPEKCDNNQYFDISALSCVPCGANQRQDARGTSCVCLPGFQMISNNGGPAIICKKCPENMVLQKMAGTAFLALVT

SEQ ID NO: 13468 - protein, 985 aa, Homo Sapiens
MAVWSLLSARAVTAFLLLFLPRFLQAQTFSFPFQQPEKCDNNQYFDISALSCVPCGANQRQDARGTSCVCLPGFQMISNNGGPAIICKKCPENMKGVTEDGWNCISCPSDLTAEGKCHCPIGHILVERDINGTLLSQATCELCDGNENSFMVVNALGDRCVRCEPTFVNTSRSCACSEPNILTGGLCFSSTGNFPLRRISAARYGEVGMSLTSEWFAKYLQSSAAACWVYANLTSCQALGNMCVMNMNSYDFATFDACGLFQFIFENTAGLSTVHSISFWRQNLPWLFYGDQLGLAPQVLSSTSLPTNFSFKGENQNTKLKFVAASYDIRGNFLKWQTLEGGVLQLCPDTETRLNAAYSFGTTYQQNCEIPISKILIDFPTPIFYDVYLEYTDENQHQYILAVPVLNLNLQHNKIFVNQDSNSGKWLLTRRIFLVDAVSGRENDLGTQPRVIRVATQISLSVHLVPNTINGNIYPPLITIAYSDIDIKDANSQSVKVSFSVTYEMDHGEAHVQTDIALGVLGGLAVLASLLKTAGWKRRIGSPMIDLQTVVKFLVYYAGDLANVFFIITVGTGLYWLIFFKAQKSVSVLLPMPIQEERFVTYVGCAFALKALQFLHKLISQITIDVFFIDWERPKGKVLKAVEGEGGVRSATVPVSIWRTYFVANEWNEIQTVRKINSLFQVLTVLFFLEVVGFKNLALMDSSSSLSRNPPSYIAPYSCILRYAVSAALWLAIGIIQVVFFAVFYERFIEDKIRQFVDLCSMSNISVFLLSHKCFGYYIHGRSVHGHADTNMEEMNMNLKREAENLCSQRGLVPNTDGQTFEIAISNQMRQHYDRIHETLIRKNGPARLLSSSASTFEQSIKAYHMMNKFLGSFIDHVHKEMDYFIKDKLLLERILGMEFMEPMEKSIFYNDEGYSFSSVLYYGNEATLLIFDLLFFCVVDLACQNFILASFLTYLQQEIFRYIRNTVGQKNLASKTLVDQRFLI

SEQ ID NO: 13469 - protein, 397 aa, Homo Sapiens
MKGVTEDGWNCISCPSDLTAEGKCHCPIGHILVERDINGTLLSQATCELCDGNENSFMVVNALGDRCVRCEPTFVNTSRSCACSEPNILTGGLCFSSTGNFPLRRISAARYGEVGMSLTSEWFAKYLQSSAAACWVYANLTSCQALGNMCVMNMNSYDFATFDACGLFQFIFENTAGLSTVHSISFWRQNLPWLFYGDQLGLAPQVLSSTSLPTNFSFKGENQNTKLKFVAASYDIRGNFLKWQTLEGGVLQLCPDTETRLNAAYSFGTTYQQNCEIPISKILIDFPTPIFYDVYLEYTDENQHQYILAVPVLNLNLQHNKIFVNQDSNSGKWLLTRRIFLVDAVSGRENDLGTQPRVIRVATQISLSVHLVPNTINGNIYPPLITIAYSDIDIKDA

SEQ ID NO: 13470 - protein, 914 aa, Homo Sapiens
MSLSHWPYFRLVLNFRPQVICLPQPPKVLGYRLEPPHLTLACTLEGMYNIIEEILERDINGTLLSQATCELCDGNENSFMVVNALGDRCVRCEPTFVNTSRSCACSEPNILTGGLCFSSTGNFPLRRISAARYGEVGMSLTSEWFAKYLQSSAAACWVYANLTSCQALGNMCVMNMNSYDFATFDACGLFQFIFENTAGLSTVHSISFWRQNLPWLFYGDQLGLAPQVLSSTSLPTNFSFKGENQNTKLKFVAASYDIRGNFLKWQTLEGGVLQLCPDTETRLNAAYSFGTTYQQNCEIPISKILIDFPTPIFYDVYLEYTDENQHQYILAVPVLNLNLQHNKIFVNQDSNSGKWLLTRRIFLVDAVSGRENDLGTQPRVIRVATQISLSVHLVPNTINGNIYPPLITIAYSDIDIKDANSQSVKVSFSVTYEMDHGEAHVQTDIALGVLGGLAVLASLLKTAGWKRRIGSPMIDLQTVVKFLVYYAGDLANVFFIITVGTGLYWLIFFKAQKSVSVLLPMPIQEERFVTYVGCAFALKALQFLHKLISQITIDVFFIDWERPKGKVLKAVEGEGGVRSATVPVSIWRTYFVANEWNEIQTVRKINSLFQVLTVLFFLEVVGFKNLALMDSSSSLSRNPPSYIAPYSCILRYAVSAALWLAIGIIQVVFFAVFYERFIEDKIRQFVDLCSMSNISVFLLSHKCFGYYIHGRSVHGHADTNMEEMNMNLKREAENLCSQRGLVPNTDGQTFEIAISNQMRQHYDRIHETLIRKNGPARLLSSSASTFEQSIKAYHMMNKFLGSFIDHVHKEMDYFIKDKLLLERILGMEFMEPMEKSIFYNDEGYSFSSVLYYGNEATLLIFDLLFFCVVDLACQNFILASFLTYLQQEIFRYIRNTVGQKNLASKTLVDQRFLI

SEQ ID NO: 13471 - protein, 6 aa, Homo Sapiens
MVVNAL

SEQ ID NO: 13472 - protein, 38 aa, Homo Sapiens
MVVNALGDRCVRCEPTFVNTSRSCACSEPNILTGGLCF

SEQ ID NO: 13473 - protein, 239 aa, Homo Sapiens
  misc_feature (1)..(1): Xaa can be any naturally occurring amino acid
XFYDVYLEYTDENQHQYILAVPVLNLNLQHNKIFVNQDSNSGKWLLTRRIFLVDAVSGRENDLGTQPRVIRVATQISLSVHLVPNTINGNIYPPLITIAYSDIDIKDANSQSVKVSFSVTYEMDHGEAHVQTDTEFCTCCPGWSAMARSWLTATSASRVQAILLSQPPEYLGLQIALGVLGGLAVLASLLKTAGWKRRIGSPMIDLQTVVKFLVYYAGDLANVFFIITVGTGLYWLIFF

SEQ ID NO: 13474 - protein, 173 aa, Homo Sapiens
  misc_feature (1)..(1): Xaa can be any naturally occurring amino acid
XRGGAGVAMAVWSLLSARAVTAFLLLFLPRFLQAQTFSFPFQQPEKCDNNQYFDISALSCVPCGANQRQDARGTSCVCLPGFQMISNNGGPAIICKKCPENMKGVTEDGWNCISCPSDLTAEGKCHCPIGHILVERDINGTLLSQATCELCDGNENSFMVVNALGDRQGDYVS

SEQ ID NO: 13475 - protein, 87 aa, Homo Sapiens
  misc_feature (1)..(1): Xaa can be any naturally occurring amino acid
XTRGGAGVAMAVWSLLSARAVTAFLLLFLPRFLQAQTFSFPFQQPEKCDNNQYFDISALSCVPCGANQRQDARERCYRRWLELHFLP

SEQ ID NO: 13476 - protein, 107 aa, Homo Sapiens
MLFLALGSPWAVELPLCGRRTALCAAAALRGPRASVSRASSSSGPSGPVAGWSTGPSGAARLLRRPGRAQIPVYWEGYVRFLNTPSDKSEDGRLIYTGNMARAVFGK

SEQ ID NO: 13477 - protein, 260 aa, Homo Sapiens
MLFLALGSPWAVELPLCGRRTALCAAAALRGPRASVSRASSSSGPSGPVAGWSTGPSGAARLLRRPGRAQIPVYWEGYVRFLNTPSDKSEDGRLIYTGNMARAVFGVKCFSYSTSLIGLTFLPYIFTQNNAISESVPLPIQIIFYGIMGSFTVITPVLLHFITKGYVIRLYHEATTDTYKAITYNAMLAETSTVFHQNDVKIPDAKHVFTTFYAKTKSLLVNPVLFPNREDYIHLMGYDKEEFILYMEETSEEKRHKDDK

SEQ ID NO: 13478 - protein, 111 aa, Homo Sapiens
MLFLALGSPWAVELPLCGRRTALCAAAALRGPRASVSRASSSSGPSGPVAGWSTGPSGAARLLRRPGRAQIPVYWEGYVRFLNTPSDKSEDGRLIYTGNMARAVFGWSAVA

SEQ ID NO: 13479 - protein, 555 aa, Homo Sapiens
MAAAAWLQVLPVILLLLGAHPSPLSFFSAGPATVAAADRSKWHIPIPSGKNYFSFGKILFRNTTIFLKFDGEPCDLSLNITWYLKSADCYNEIYNFKAEEVELYLEKLKEKRGLSGKYQTSSKLFQNCSELFKTQTFSGDFMHRLPLLGEKQEAKENGTNLTFIGDKTAMHEPLQTWQDAPYIFIVHIGISSSKESSKENSLSNLFTMTVEVKGPYEYLTLEDYPLMIFFMVMCIVYVLFGVLWLAWSACYWRDLLRIQFWIGAVIFLGMLEKAVFYAEFQNIRYKGESVQGALILAELLSAVKRSLARTLVIIVSLGYGIVKPRLGVTLHKVVVAGALYLLFSGMEGVLRVTGAQTDLASLAFIPLAFLDTALCWWIFISLTQTMKLLKLRRNIVKLSLYRHFTNTLILAVAASIVFIIWTTMKFRIVTCQSDWRELWVDDAIWRLLFSMILFVIMVLWRPSANNQRFAFSPLSEEEEEDEQKEPMLKESFEGMKMRSTKQEPNGNSKVNKAQEDDLKWVEENVPSSVTDVALPALLDSDEERMITHFERSKME

SEQ ID NO: 13480 - protein, 181 aa, Homo Sapiens
MAAAAWLQVLPVILLLLGAHPSPLSFFSAGPATVAAADRSKWHIPIPSGKNYFSFGKILFRNTTIFLKFDGEPCDLSLNITWYLKSADCYNEIYNFKAEEVELYLEKLKEKRGLSGKYQTSSKLFQNCSELFKTQTFSGDFMHRLPLLGEKQEAKENGTNLTFIGDKTIQMPFLKKHFLDC

SEQ ID NO: 13481 - protein, 57 aa, Homo Sapiens
MAAAAWLQVLPVILLLLGAHPSPLSFFSAGPATVAAADRSKWHIPIPSLMENLVTCL

SEQ ID NO: 13482 - protein, 494 aa, Homo Sapiens
MAHSDTVVDGEPCDLSLNITWYLKSADCYNEIYNFKAEEVELYLEKLKEKRGLSGKYQTSSKLFQNCSELFKTQTFSGDFMHRLPLLGEKQEAKENGTNLTFIGDKTAMHEPLQTWQDAPYIFIVHIGISSSKESSKENSLSNLFTMTVEVKGPYEYLTLEDYPLMIFFMVMCIVYVLFGVLWLAWSACYWRDLLRIQFWIGAVIFLGMLEKAVFYAEFQNIRYKGESVQGALILAELLSAVKRSLARTLVIIVSLGYGIVKPRLGVTLHKVVVAGALYLLFSGMEGVLRVTGAQTDLASLAFIPLAFLDTALCWWIFISLTQTMKLLKLRRNIVKLSLYRHFTNTLILAVAASIVFIIWTTMKFRIVTCQSDWRELWVDDAIWRLLFSMILFVIMVLWRPSANNQRFAFSPLSEEEEEDEQKEPMLKESFEGMKMRSTKQEPNGNSKVNKAQEDDLKWVEENVPSSVTDVALPALLDSDEERMITHFERSKME

SEQ ID NO: 13483 - protein, 39 aa, Homo Sapiens
MHRLPLLGEKQEAKENGTNLTFIGDKTAMHEPLQTWQDA

SEQ ID NO: 13484 - protein, 110 aa, Homo Sapiens
MHRLPLLGEKQEAKENGTNLTFIGDKTAMHEPLQTWQDAPYIFIVHIGISSSKESSKENSLSNLFTMTVEVKGPYEYLTLEDYPLMIFFMVMCIVYVLFGVLWLAWSACY

SEQ ID NO: 13485 - protein, 170 aa, Homo Sapiens
MHRLPLLGEKQEAKENGTNLTFIGDKTAMHEPLQTWQDAPYIFIVHIGISSSKESSKENSLSNLFTMTVEVKGPYEYLTLEDYPLMIFFMVMCIVYVLFGVLWLAWSACYWRDLLRIQFWIGAVIFLGMLEKAVFYAEFQNIRYKGESVQGALILAELLSAVKRSLARTL

SEQ ID NO: 13486 - protein, 88 aa, Homo Sapiens [sequence omitted]

SEQ ID NO: 13487 - protein, 40 aa, Homo Sapiens
MHRLPLLGEKQEAKENGTNLTFIGDKTIQMPFLKKHFLDC

SEQ ID NO: 13488 - protein, 195 aa, Homo Sapiens
  misc_feature (1)..(1): Xaa can be any naturally occurring amino acid
XFYAEFQNIRYKGESVQGALILAELLSAVKRSLARTLVIIVSLGYGIVKPRLGVTLHKVVVAGALYLLFSGMEGVLRVTGYFSYPLTLIVNLALSAIDACVILWIFISLTQTMKLLKLRRNIVKLSLYRHFTNTLILAVAASIVFIIWTTMKFRIVTCQSDWRELWVDDAIWRLLFSMILFVIMVLWRPSANNQR

SEQ ID NO: 13489 - protein, 256 aa, Homo Sapiens
EMLRCIWGHFLRVLGGTSPTLSHSSSLLHSLGSVTVLCCVDKQGILSWPNPSPETVLFFSGKVEPPHSSHEDLTDGLSTRSFCHPEVEEEPHERDALLAGSLNNTLHLSNEQERGDWPGEAPKPPEPYSHHKAHGRSKHPSGSNVSFSRDTEGGEEEPSKTQPGMESDPYEAEDFVCDYHLEMLSLSQDQQNPSCIQFDDSNWQLHLTSLKPLGLNVLLNLCDASVTERLCRFSDHLCNIALQESHSAVLPVHVPW

SEQ ID NO: 13490 - protein, 57 aa, Homo Sapiens
MDLKEKHLGEPPSALGLSTRKALSVLKEQLEAVLEGHLRERKKCLTWKEVWRSSFLH

SEQ ID NO: 13491 - protein, 121 aa, Homo Sapiens
MDLKEKHLGEPPSALGLSTRKALSVLKEQLEAVLEGHLRERKKCLTWKEVWRSSFLHHSNRCSCFHWPGASLMLLAVLLLLGCCGGQPAGSRGVGLVNASALFLLLLLNLVLIGRQDRLKR

SEQ ID NO: 13492 - protein, 125 aa, Homo Sapiens
MDLKEKHLGEPPSALGLSTRKALSVLKEQLEAVLEGHLRERKKCLTWKEVWRSSFLHHSNRCSCFHWPGASLMLLAVLLLLGCCGGQPAGSRGVGLVNASALFLLLLLNLVLIGRQDRLKRREVE

SEQ ID NO: 13493 - protein, 1356 aa, Homo Sapiens
MDLKEKHLGEPPSALGLSTRKALSVLKEQLEAVLEGHLRERKKCLTWKEVWRSSFLHHSNRCSCFHWPGASLMLLAVLLLLGCCGGQPAGSRGVGLVNASALFLLLLLNLVLIGRQDRLKRREVERRLRGIIDQIQDALRDGREIQWPSAMYPDLHMPFAPSWSLHWAYRDGHLVNLPVSLLVEGDIIALRPGQESFASLRGIKDDEHIVLEPGDLFPPFSPPPSPRGEVERGPQSPQQHRLFRVLETPVIDNIRWCLDMALSRPVTALDNERFTVQSVMLHYAVPVVLAGFLITNALRFIFSAPGVTSWQYTLLQLQVNGVLPILPLLFPVLWVLATACGEARVLAQMSKASPSSLLAKFSEDTLSSYTEAVSSQEMLRCIWGHFLRVLGGTSPTLSHSSSLLHSLGSVTVLCCVDKQGILSWPNPSPETVLFFSGKVEPPHSSHEDLTDGLSTRSFCHPEPHERDALLAGSLNNTLHLSNEQERGDWPGEAPKPPEPYSHHKAHGRSKHPSGSNVSFSRDTEGGEEEPSKTQPGMESDPYEAEDFVCDYHLEMLSLSQDQQNPSCIQFDDSNWQLHLTSLKPLGLNVLLNLCDASVTERLCRFSDHLCNIALQESHSAVLPVHVPWGLCELARLIGFTPGAKELFKQENHLALYRLPSAETMKETSLGRLSCVTKRRPPLSHMISLFIKDTTTSTEQMLSHGTADVVLEACTDFWDGADIYPLSGSDRKKVLDFYQRACLSGYCSAFAYKPMNCALSSQLNGKCIELVQVPGQSSIFTMCELPSTIPIKQNARRSSWSSDEGIGEVLEKEDCMQALSGQIFMGMVSSQYQARLDIVRLIDGLVNACIRFVYFSLEDELKSKVFAEKMGLETGWNCHISLTPNGDMPGSEIPPSSPSHAGSLHDDLNQVSRDDAEGLLLMEEEGHSDLISFQPTDSDIPSFLEDSNRAKLPRGIHQVRPHLQNIDNVPLLVPLFTDCTPETMCEMIKIMQEYGEVTCCLGSSANLRNSCLFLQSDISIALDPLYPSRCSWETFGYATSISMAQASDGLSPLQLSGQLNSLPCSLTFRQEETISIIRLIEQARHATYGIRKCFLFLLQCQLTLVVIQFLSCLVQLPPLLSTTDILWLSCFCYPLLSISLLGKPPHSSIMSMATGKNLQSIPKKTQHYFLLCFLLKFSLTISSCLICFGFTLQSFCDSSRDRNLTNCSSVMLPSNDDRAPAWFEDFANGLLSAQKLTAALIVLHTVFISITHVHRTKPLWRKSPLTNLWWAVTVPVVLLGQVVQTAVDLQLWTHRDSHVHFGLEDVPLLTWLLGCLSLVLVVVTNEIVKLHEIRVRVRYQKRQKLQFETKLGMNSPF

SEQ ID NO: 13494 - protein, 1007 aa, Homo Sapiens [sequence omitted]

SEQ ID NO: 13495 - protein, 162 aa, Homo Sapiens
MLFKQAELWMPHQGKGNKGEPPSALGLSTRKALSVLKEQLEAVLEGHLRERKKCLTWKEVWRSSFLHHSNRCSCFHWPGASLMLLAVLLLLGCCGGQPAGSRGVGLVNASALFLLLLLNLVLIGRQDRLKRREVERRLRGIIDQIQASSLPPHSDAETTHQS

SEQ ID NO: 13496 - protein, 1366 aa, Homo Sapiens
MLFKQAELWMPHQGKGNKGEPPSALGLSTRKALSVLKEQLEAVLEGHLRERKKCLTWKEVWRSSFLHHSNRCSCFHWPGASLMLLAVLLLLGCCGGQPAGSRGVGLVNASALFLLLLLNLVLIGRQDRLKRREVERRLRGIIDQIQDALRDGREIQWPSAMYPDLHMPFAPSWSLHWAYRDGHLVNLPVSLLVEGDIIALRPGQESFASLRGIKDDEHIVLEPGDLFPPFSPPPSPRGEVERGPQSPQQHRLFRVLETPVIDNIRWCLDMALSRPVTALDNERFTVQSVMLHYAVPVVLAGFLITNALRFIFSAPGVTSWQYTLLQLQVNGVLPILPLLFPVLWVLATACGEARVLAQMSKASPSSLLAKFSEDTLSSYTEAVSSQEMLRCIWGHFLRVLGGTSPTLSHSSSLLHSLGSVTVLCCVDKQGILSWPNPSPETVLFFSGKVEPPHSSHEDLTDGLSTRSFCHPEPHERDALLAGSLNNTLHLSNEQERGDWPGEAPKPPEPYSHHKAHGRSKHPSGSNVSFSRDTEGGEEEPSKTQPGMESDPYEAEDFVCDYHLEMLSLSQDQQNPSCIQFDDSNWQLHLTSLKPLGLNVLLNLCDASVTERLCRFSDHLCNIALQESHSAVLPVHVPWGLCELARLIGFTPGAKELFKQENHLALYRLPSAETMKETSLGRLSCVTKRRPPLSHMISLFIKDTTTSTEQMLSHGTADVVLEACTDFWDGADIYPLSGSDRKKVLDFYQRACLSGYCSAFAYKPMNCALSSQLNGKCIELVQVPGQSSIFTMCELPSTIPIKQNARRSSWSSDEGIGEVLEKEDCMQALSGQIFMGMVSSQYQARLDIVRLIDGLVNACIRFVYFSLEDELKSKVFAEKMGLETGWNCHISLTPNGDMPGSEIPPSSPSHAGSLHDDLNQVSRDDAEGLLLMEEEGHSDLISFQPTDSDIPSFLEDSNRAKLPRGIHQVRPHLQNIDNVPLLVPLFTDCTPETMCEMIKIMQEYGEVTCCLGSSANLRNSCLFLQSDISIALDPLYPSRCSWETFGYATSISMAQASDGLSPLQLSGQLNSLPCSLTFRQEETISIIRLIEQARHATYGIRKCFLFLLQCQLTLVVIQFLSCLVQLPPLLSTTDILWLSCFCYPLLSISLLGKPPHSSIMSMATGKNLQSIPKKTQHYFLLCFLLKFSLTISSCLICFGFTLQSFCDSSRDRNLTNCSSVMLPSNDDRAPAWFEDFANGLLSAQKLTAALIVLHTVFISITHVHRTKPLWRKSPLTNLWWAVTVPVVLLGQVVQTAVDLQLWTHRDSHVHFGLEDVPLLTWLLGCLSLVLVVVTNEIVKLHEIRVRVRYQKRQKLQFETKLGMNSPF

SEQ ID NO: 13497 - protein, 35 aa, Homo Sapiens
MLLAVLLLLGCCGGQPAGSRGVGLVNASALFLLLL

SEQ ID NO: 13498 - protein, 89 aa, Homo Sapiens
MSKASPSSLLAKFSEDTLSSYTEAVSSQEMLRCIWGHFLRVLGGTSPTLSHSSSLLHSLGSVTVLCCVDKQGILSWPNPSPETVLFFSG

SEQ ID NO: 13499 - protein, 128 aa, Homo Sapiens
PHSSIMSMATGKNLQSIPKKTQHYFLLCFLLKFSLTISSCLICFGFTLQSFCDSSRDRNLTNCSSVMLPRAPAWFEDFANGLLSAQKLTAALIVLHTVFISITHVHRTKPLWRKSPLTNLWWAVTVPV

SEQ ID NO: 13500 - protein, 302 aa, Homo Sapiens
  misc_feature (1)..(1): Xaa can be any naturally occurring amino acid
XGKVEPPHSSHEDLTDGLSTRSFCHPEPHERDALLAGSLNNTLHLSNEQERGDWPGEAPKPPEPYSHHKAHGRSKHPSGSNTQPGMESDPYEAEDFVCDYHLEMLSLSQDQQNPSCIQFDDSNWQLHLTSLKPLGLNVLLNLCDASVTERLCRFSDHLCNIALQESHSAVLPVHVPWGLCELARLIGFTPGAKELFKQENHLALYRLPSAETMKETSLGRLSCVTKRRPPLSHMISLFIKDTTTSTEQMLSHGTADVVLEACTDFWDGADIYPLSGSDRKKVLDFYQRACLSGYCSAFAYKP

SEQ ID NO: 13501 - protein, 56 aa, Homo Sapiens
  misc_feature (1)..(1): Xaa can be any naturally occurring amino acid
XLLLNLVLIGRQDRLKRREVERRLRGIIDQIQDGAWTWPCPDQSLPWTMSGSQCSR

SEQ ID NO: 13502 - protein, 73 aa, Homo Sapiens
  misc_feature (1)..(1): Xaa can be any naturally occurring amino acid
XRDALLAGSLNNTLHLSNEQERGDWPGEAPKPPEPYSHHKAHGRSKHPSGSNVSFSRDTEGGEEEPSKLLPVS

SEQ ID NO: 13503 - protein, 176 aa, Homo Sapiens
  misc_feature (1)..(1): Xaa can be any naturally occurring amino acid
XWLSCFCYPLLSISLLGKPPHSSIMSMATGKNLQSIPKKSFCDSSRDRNLTNCSSVMLPSNDDRAPAWFEDFANGLLSAQKLTAALIVLHTVFISITHVHRTKPLWRKSPLTNLWWAVTVPVVLLGQVVQTAVDLQLWTHRDSHVHFGLEDVPLLTWLLGCLSLVLVVVTNEIVKL

SEQ ID NO: 13504 - protein, 295 aa, Homo Sapiens
YATSISMAQASDGLSPLQLSGQLNSLPCSLTFRQEETISIIRLIEQFLSCLVQLPPLLSTTDILWLSCFCYPLLSISLLGKPPHSSIMSMATGKNLQSIPKKTQHYFLLCFLLKFSLTISSCLICFGFTLQSFCDSSRDRNLTNCSSVMLPSNDDRAPAWFEDFANGLLSAQKLTAALIVLHTVFISITHVHRTKPLWRKSPLTNLWWAVTVPVVLLGQVVQTAVDLQLWTHRDSHVHFGLEDVPLLTWLLGCLSLVLVVVTNEIVKLHEIRVRVRYQKRQKLQFETKLGMNSPF

SEQ ID NO: 13505 - protein, 184 aa, Homo Sapiens
MWRLALGGVFLAAAQACVFCRLPAHDLSGRLARLCSQMEARQKECGASPDFSAFALDEVSMNKVTEKTHRVLRVMEIKEAVSSLPSYWSWLRKTKLPEYTREALCPPACPLPLLSPAGGSTTLYNCSTCKGTEVSCWPRKRCFPGSQDLWEAKILLLSIFGAFLLLGVLSLLVESHHLQAKSGL

SEQ ID NO: 13506 - protein, 203 aa, Homo Sapiens
MWRLALGGVFLAAAQACVFCRLPAHDLSGRLARLCSQMEARQKECGASPDFSAFALDEVSMNKVTEKTHRVLRVMEIKEAVSSLPSYWSWLRKTKLPEYTREALCPPACRGSTTLYNCSTCKGTEVSCWPRKRCFPGSLGSQDSAPLHLRSFPASGCSEPPGGVPPPPSKKWLVKTLKTSQPPALRGMHSQLPHPLEGNQSAP

SEQ ID NO: 13507 - protein, 176 aa, Homo Sapiens
MWRLALGGVFLAAAQACVFCRLPAHDLSGRLARLCSQMEARQKECGASPDFSAFALDEVSMNKVTEKTHRVLRVMEIKEAVSSLPSYWSWLRKTKLPEYTREALCPPACRGSTTLYNCSTCKGTEVSCWPRKRCFPGSQDLWEAKILLLSIFGAFLLLGVLSLLVESHHLQAKSGL

SEQ ID NO: 13508 - protein, 218 aa, Homo Sapiens
MAWKSSVIMQMGRFLLLVILFLPREMTSSVLTVNGKTENYILDTTPGSQASLICAVQNHTREEELLWYREEGRVDLKSGNKINSSSVCVSSISENDNGISFTCRLGRDQSVSVSVVLNVTFPPLLSGNDFQTVEEGSNVKLVCNVKANPQAQMMWYKNSSLLDLEKSRHQIQQTSESFQLSITKVEKPDNGTYSCIAKSSLKTESLDFHLIVKALHEG

SEQ ID NO: 13509 - protein, 262 aa, Homo Sapiens
MAWKSSVIMQMGRFLLLVILFLPREMTSSVLTVNGKTENYILDTTPGSQASLICAVQNHTREEELLWYREEGRVDLKSGNKINSSSVCVSSISENDNGISFTCRLGRDQSVSVSVVLNVTFPPLLSGNDFQTVEEGSNVKLVCNVKANPQAQMMWYKNSSLLDLEKSRHQIQQTSESFQLSITKVEKPDNGTYSCIAKSSLKTESLDFHLIVKDKTVGVPIEPIIAACVVIFLTLCFGLIARRKKIMKLCMKDKDPHSETAL

SEQ ID NO: 13510 - protein, 348 aa, Homo Sapiens
MRLGLLSVALLFVGSSHLYSDHYSPSGRHRLGPSPEPAASSQQAEAVRKRLRRRREGGAHAEDCGTAPLKDVLQGSRIIGGTEAQAGAWPWVVSLQIKYGRVLVHVCGGTLVRERWVLTAAHCTKDASDPLMWTAVIGTNNIHGRYPHTKKIKIKAIIIHPNFILESYVNDIALFHLKKAVRYNDYIQPICLPFDVFQILDGNTKCFISGWGRTKEEGNATNILQDAEVHYISREMCNSERSYGGIIPNTSFCAGDEDGAFDTCRGDSGGPLMCYLPEYKRFFVMGITSYGHGCGRRGFPGVYIGPSFYQKWLTEHFFHASTQGILTINILRGQILIALCFVILLATT

SEQ ID NO: 13511 - protein, 320 aa, Homo Sapiens
MRLGLLSVALLFVGSSHLYSDHYSPSGRHRLGPSPEPAASSQQAEAVRKRLRRRREGGAHAEDCGTAPLKDVLQGSRIIGGTEAQAGAWPWVVSLQIKYGRVLVHVCGGTLVRERWVLTAAHCTKDASDPLMWTAVIGTNNIHGRYPHTKKIKIKAIIIHPNFILESYVNDIALFHLKKAVRYNDYIQPICLPFDVFQILDGNTKCFISGWGRTKEEGNATNILQDAEVHYISREMCNSERSYGGIIPNTSFCAGDEDGAFDTCRVRPSNFPLKYFLKPEGNLSNKAFDNFLVVLIIRPKNNKSFFLLFNYFNNPNLLGS

SEQ ID NO: 13512 - protein, 10 aa, Homo Sapiens
MHSFRLARLS

SEQ ID NO: 13513 - protein, 17 aa, Homo Sapiens
MHSFRLARLSSWRVHAG

SEQ ID NO: 13514 - protein, 147 aa, Homo Sapiens
MHSFRLARLSSWRVHAGLVSHSAVRPHQGALVERIIPHPLYSAQNHDYDVALLRLQTALNFSDTVGAVCLPAKEQHFPKGSRCWVSGWGHTHPSHTYSSDMLQDTVVPLFSTQLCNSSCVYSGALTPRMLCAGYLDGRADACQDSLL

SEQ ID NO: 13515 - protein, 198 aa, Homo Sapiens
MHSFRLARLSSWRVHAGLVSHSAVRPHQGALVERIIPHPLYSAQNHDYDVALLRLQTALNFSDTVGAVCLPAKEQHFPKGSRCWVSGWGHTHPSHTYSSDMLQDTVVPLFSTQLCNSSCVYSGALTPRMLCAGYLDGRADACQGDSGGPLVCPDGDTWRLVGVVSWGRGCAEPNHPGVYAKVAEFLDWIHDTAQDSLL

SEQ ID NO: 13516 - protein, 413 aa, Homo Sapiens
MRRGCAVLGALGLLAGAGVGSWLLVLYLCPAASQPISGTLQDEEITLSCSEASAEEALLPALPKTVSFRINSEDFLLEAQVRDQPRWLLVCHEGWSPALGLQICWSLGHLRLTHHKGVNLTDIKLNSSQEFAQLSPRLGGFLEEAWQPRNNCTSGQVVSLRCSECGARPLASRIVGGQSVAPGRWPWQASVALGFRHTCGGSVLAPRWVVTAAHCMHSFRLARLSSWRVHAGLVSHSAVRPHQGALVERIIPHPLYSAQNHDYDVALLRLQTALNFSDTVGAVCLPAKEQHFPKGSRCWVSGWGHTHPSHTYSSDMLQDTVVPLFSTQLCNSSCVYSGALTPRMLCAGYLDGRADACQGDSGGPLVCPDGDTWRLVGVVSWGRGCAEPNHPGVYAKVAEFLDWIHDTAQDSLL

SEQ ID NO: 13517 - protein, 344 aa, Homo Sapiens
MRRGCAVLGALGLLAGAGVGSWLLVLYLCPAASQPISGTLQDEEITLSCSEASAEEALLPALPKTVSFRINSEDFLLEAQVRDQPRWLLVCHEGWSPALGLQICWSLGHLRLTHHKGVNLTDIKLNSSQEFAQLSPRLGGFLEEAWQPSFRLARLSSWRVHAGLVSHSAVRPHQGALVERIIPHPLYSAQNHDYDVALLRLQTALNFSDTVGAVCLPAKEQHFPKGSRCWVSGWGHTHPSHTYSSDMLQDTVVPLFSTQLCNSSCVYSGALTPRMLCAGYLDGRADACQGDSGGPLVCPDGDTWRLVGVVSWGRGCAEPNHPGVYAKVAEFLDWIHDTAQDSLL

SEQ ID NO: 13518 - protein, 457 aa, Homo Sapiens
MSLMLDDQPPMEAQYAEEGPGPGIFRAEPGDQQHPISQAVCWRSMRRGCAVLGALGLLAGAGVGSWLLVLYLCPAASQPISGTLQDEEITLSCSEASAEEALLPALPKTVSFRINSEDFLLEAQVRDQPRWLLVCHEGWSPALGLQICWSLGHLRLTHHKGVNLTDIKLNSSQEFAQLSPRLGGFLEEAWQPRNNCTSGQVVSLRCSECGARPLASRIVGGQSVAPGRWPWQASVALGFRHTCGGSVLAPRWVVTAAHCMHSFRLARLSSWRVHAGLVSHSAVRPHQGALVERIIPHPLYSAQNHDYDVALLRLQTALNFSDTVGAVCLPAKEQHFPKGSRCWVSGWGHTHPSHTYSSDMLQDTVVPLFSTQLCNSSCVYSGALTPRMLCAGYLDGRADACQGDSGGPLVCPDGDTWRLVGVVSWGRGCAEPNHPGVYAKVAEFLDWIHDTAQDSLL

SEQ ID NO: 13519 - protein, 457 aa, Homo Sapiens; identical to SEQ ID NO: 13518

SEQ ID NO: 13520 - protein, 388 aa, Homo Sapiens
MSLMLDDQPPMEAQYAEEGPGPGIFRAEPGDQQHPISQAVCWRSMRRGCAVLGALGLLAGAGVGSWLLVLYLCPAASQPISGTLQDEEITLSCSEASAEEALLPALPKTVSFRINSEDFLLEAQVRDQPRWLLVCHEGWSPALGLQICWSLGHLRLTHHKGVNLTDIKLNSSQEFAQLSPRLGGFLEEAWQPSFRLARLSSWRVHAGLVSHSAVRPHQGALVERIIPHPLYSAQNHDYDVALLRLQTALNFSDTVGAVCLPAKEQHFPKGSRCWVSGWGHTHPSHTYSSDMLQDTVVPLFSTQLCNSSCVYSGALTPRMLCAGYLDGRADACQGDSGGPLVCPDGDTWRLVGVVSWGRGCAEPNHPGVYAKVAEFLDWIHDTAQDSLL

SEQ ID NO: 13521 - protein, 44 aa, Homo Sapiens
MSLMLDDQPPMEAQYAEEGPGPGIFRAEPGDQQHPSRPDWAIGE

SEQ ID NO: 13522 - protein, 44 aa, Homo Sapiens; identical to SEQ ID NO: 13521

SEQ ID NO: 13523 - protein, 448 aa, Homo Sapiens
MTGWGQWRAIILHSPDPPWGQPHMIDVSQAVCWRSMRRGCAVLGALGLLAGAGVGSWLLVLYLCPAASQPISGTLQDEEITLSCSEASAEEALLPALPKTVSFRINSEDFLLEAQVRDQPRWLLVCHEGWSPALGLQICWSLGHLRLTHHKGVNLTDIKLNSSQEFAQLSPRLGGFLEEAWQPRNNCTSGQVVSLRCSECGARPLASRIVGGQSVAPGRWPWQASVALGFRHTCGGSVLAPRWVVTAAHCMHSFRLARLSSWRVHAGLVSHSAVRPHQGALVERIIPHPLYSAQNHDYDVALLRLQTALNFSDTVGAVCLPAKEQHFPKGSRCWVSGWGHTHPSHTYSSDMLQDTVVPLFSTQLCNSSCVYSGALTPRMLCAGYLDGRADACQGDSGGPLVCPDGDTWRLVGVVSWGRGCAEPNHPGVYAKVAEFLDWIHDTAQDSLL

SEQ ID NO: 13524 - protein, 152 aa, Homo Sapiens
MTLIEGVGDEVTVLFSVLACLLVLALAWVSTHTAEGGDPLPQPSGTPTPSQPSAAMAATDSMRGEAPGAETPSLRHRGQAAQPEPSTGFTATPPAPDSPQEPLVLRLKFLNDSEQVARAWPHDTIGSLKRTQFPGREQQVRLIYQGQLLGDD

SEQ ID NO: 13525 - protein, 171 aa, Homo Sapiens
MTLIEGVGDEVTVLFSVLACLLVLALAWVSTHTAEGGDPLPQPSGTPTPSQPSAAMAATDSMRGEAPGAETPSLRHRGQAAQPEPSTGFTATPPAPDSPQEPLVLRLKFLNDSEQVARAWPHDTIGSLKRTQFPGREQQVRLIYQGQLLGDDTQTLGSLHLPPNCVLHCHV

SEQ ID NO: 13526 - protein, 246 aa, Homo Sapiens
MTLIEGVGDEVTVLFSVLACLLVLALAWVSTHTAEGGDPLPQPSGTPTPSQPSAAMAATDSMRGEAPGAETPSLRHRGQAAQPEPSTGFTATPPAPDSPQEPLVLRLKFLNDSEQVARAWPHDTIGSLKRTQFPGREQQVRLIYQGQLLGDDTQTLGSLHLPPNCVLHCHVSTRVGPPNPPCPPGSEPGPSGLEIGSLLLPLLLLLLLLLWYCQIQYRPFFPLTATLGLAGFTLLLSLLAFAMYRP

SEQ ID NO: 13527 - protein, 246 aa, Homo Sapiens; identical to SEQ ID NO: 13526

SEQ ID NO: 13528 - protein, 246 aa, Homo Sapiens; identical to SEQ ID NO: 13526

SEQ ID NO: 13529 - protein, 246 aa, Homo Sapiens; identical to SEQ ID NO: 13526

SEQ ID NO: 13530 - protein, 246 aa, Homo Sapiens; identical to SEQ ID NO: 13526

SEQ ID NO: 13531 - protein, 296 aa, Homo Sapiens
MAVLAPLIALVYSVPRLSRWLAQPYYLLSALLSAAFLLVRKLPPLCHGLPTQREDGNPCDFDWREVEILMFLSAIVMMKNRRSITVEQHIGNIFMFSKVANTILFFRLDIRMGLLYITLCIVFLMTCKPPLYMGPEYIKYFNDKTIDEELERDKRVTWIVEFFANWSNDCQSFAPIYADLSLKYNCTGLNFGKVDVGRYTDVSTRYKVSTSPLTKQLPTLILFQGGKEAMRRPQIDKKGRAVSWTFSEENVIREFNLNELYQRAKKLSKAGDNIPEEQPVASTPTTVSDGENKKDK

SEQ ID NO: 13532 - protein, 258 aa, Homo Sapiens
MAVLAPLIALVYSVPRLSRWLAQPYYLLSALLSAAFLLVRKLPPLCHGLPTQREDGNPCDFDWREVEILMFLSAIVMMKNRRSMFLMTCKPPLYMGPEYIKYFNDKTIDEELERDKRVTWIVEFFANWSNDCQSFAPIYADLSLKYNCTGLNFGKVDVGRYTDVSTRYKVSTSPLTKQLPTLILFQGGKEAMRRPQIDKKGRAVSWTFSEENVIREFNLNELYQRAKKLSKAGDNIPEEQPVASTPTTVSDGENKKDK

SEQ ID NO: 13533 - protein, 115 aa, Homo Sapiens
MAVLAPLIALVYSVPRLSRWLAQPYYLLSALLSAAFLLVRKLPPLCHGLPTQREDGNPCDFDWREVEILMFLSAIVMMKNRRSMPHEEGQRMGYRSAQPSLTCDISVFQSLWSNI

SEQ ID NO: 13534 - protein, 115 aa, Homo Sapiens; identical to SEQ ID NO: 13533

SEQ ID NO: 13535 - protein, 103 aa, Homo Sapiens
MAVLAPLIALVYSVPRLSRWLAQPYYLLSALLSAAFLLVRKLPPLCHGLPTQREDGNPCDFDWREVEILMFLSAIVMMKNRRSRGTRTGQEGHLDCGVLCQLV

SEQ ID NO: 13536 - protein, 103 aa, Homo Sapiens; identical to SEQ ID NO: 13535

SEQ ID NO: 13537 - protein, 84 aa, Homo Sapiens
MAVLAPLIALVYSVPRLSRWLAQPYYLLSALLSAAFLLVRKLPPLCHGLPTQREDGNPCDFDWREVEILMFLSAIVMMKNRRSS

SEQ ID NO: 13538 - protein, 86 aa, Homo Sapiens
MAVLAPLIALVYSVPRLSRWLAQPYYLLSALLSAAFLLVRKLPPLCHGLPTQREDGNPCDFDWREVEILMFLSAIVMMKNRRSSTK

SEQ ID NO: 13539 - protein, 63 aa, Homo Sapiens
MAAWKSWTALRLCATVVVLDMVVCKGFVEDLDESFKENRNDDIWLVDALLQSLEFEVIQQLSY

SEQ ID NO: 13540 - protein, 89 aa, Homo Sapiens
MAAWKSWTALRLCATVVVLDMVVCKGFVEDLDESFKENRNDDIWLVDFYAPWCGHCKKLEPIWNEVGLEMKSIGSPVKVGKMDATSYSN

SEQ ID NO: 13541 - protein, 89 aa, Homo Sapiens; identical to SEQ ID NO: 13540

SEQ ID NO: 13542 - protein, 197 aa, Homo Sapiens
MAAWKSWTALRLCATVVVLDMVVCKGFVEDLDESFKENRNDDIWLVDFYAPWCGHCKKLEPIWNEVGLEMKSIGSPVKVGKMDATSYSSIASEFGVRGYPTIKLALIRPLPSQQMFEHMQKRHRVFFVYVGGESPLKEKYIDAASELIVYTYFFSASEEVVPEYVTLKEMPAVLVFKDETYFVYDGKFQIFNSCKTF

SEQ ID NO: 13543 - protein, 195 aa, Homo Sapiens
MAAWKSWTALRLCATVVVLDMVVCKGFVEDLDESFKENRNDDIWLVDFYAPWCGHCKKLEPIWNEVGLEMKSIGSPVKVGKMDATSYSSIASEFGVRGYPTIKLLKGDLAYNYRGPRTKDDIIEFAHRVSGALIRPLPSQQMFEHMQKRHRVFFVYVGGESPLKEKYIDAASELIVYTYFFSASEEVVPEVIFKI

SEQ ID NO: 13544 - protein, 454 aa, Homo Sapiens
MAAWKSWTALRLCATVVVLDMVVCKGFVEDLDESFKENRNDDIWLVDFYAPWCGHCKKLEPIWNEVGLEMKSIGSPVKVGKMDATSYSSIASEFGVRGYPTIKLLKGDLAYNYRGPRTKDDIIEFAHRVSGALIRPLPSQQMFEHMQKRHRVFFVYVGGESPLKEKYIDAASELIVYTYFFSASEEVVPEYVTLKEMPAVLVFKDETYFVYDEYEDGDLSSWINRERFQNYLAMDGFLLYELGDTGKLVALAVIDEKNTSVEHTRLKSIIQEVARDYRDLFHRDFQFGHMDGNDYINTLLMDELTVPTVVVLNTSNQQYFLLDRQIKNVEDMVQFINNILDGTVEAQGGDSILQRLKRIVFDAKSTIVSIFKSSPLMGCFLFGLPLGVISIMCYGIYTADTDGGYIEERYEVSKSENENQEQIEESKEQQEPSSGGSVVPTVQEPKDVLEKKKD

SEQ ID NO: 13545 - protein, 128 aa, Homo Sapiens
MAAWKSWTALRLCATVVVLDMVVCKGFVEDLDESFKENRNDDIWLVDFYAPWCGHCKKLEPIWNEVGLEMKSIGSPVKVGKMDATSYSSIASEFGVRGYPTIKLRFPGGLKIGVWPFFIGEIKRGLGI

SEQ ID NO: 13546 - protein, 69 aa, Homo Sapiens
MVVCKGFVEDLDESFKENRNDDIWLVDFYAPWCGHCKKLEPIWNEVGLEMKSIGSPVKVGKMDATSYSN

SEQ ID NO: 13547 - protein, 23 aa, Homo Sapiens
ASTEAEPEVDNLLVSDATPDGFR

SEQ ID NO: 13548 - protein, 92 aa, Homo Sapiens
MGAMTQLLAGVFLAFLALATEGGVLKKVIRHKRQSGVNATLPEENQPVVFNHVYNIKLPVGSQCSVDLESASGEKDLAPPSEPSESFQEHTV

SEQ ID NO: 13549 - protein, 2019 aa, Homo Sapiens
MGAMTQLLAGVFLAFLALATEGGVLKKVIRHKRQSGVNATLPEENQPVVFNHVYNIKLPVGSQCSVDLESASGEKDLAPPSEPSESFQEHTVDGENQIVFTHRINIPRRACGCAAAPDVKELLSRLEELENLVSSLREQCTAGAGCCLQPATGRLDTRPFCSGRGNFSTEGCGCVCEPGWKGPNCSEPECPGNCHLRGRCIDGQCICDDGFTGEDCSQLACPSDCNDQGKCVNGVCICFEGYAGADCSREICPVPCSEEHGTCVDGLCVCHDGFAGDDCNKPLCLNNCYNRGRCVENECVCDEGFTGEDCSELICPNDCFDRGRCINGTCYCEEGFTGEDCGKPTCPHACHTQGRCEEGQCVCDEGFAGVDCSEKRCPADCHNRGRCVDGRCECDDGFTGADCGELKCPNGCSGHGRCVNGQCVCDEGYTGEDCSQLRCPNDCHSRGRCVEGKCVCEQGFKGYDCSDMSCPNDCHQHGRCVNGMCVCDDGYTGEDCRDRQCPRDCSNRGLCVDGQCVCEDGFTGPDCAELSCPNDCHGQGRCVNGQCVCHEGFMGKDCKEQRCPSDCHGQGRCVDGQCICHEGFTGLDCGQHSCPSDCNNLGQCVSGRCICNEGYSGEDCSEVSPPKDLVVTEVTEETVNLAWDNEMRVTEYLVVYTPTHEGGLEMQFRVPGDQTSTIIQELEPGVEYFIRVFAILENKKSIPVSARVATYLPAPEGLKFKSIKETSVEVEWDPLDIAFETWEIIFRNMNKEDEGEITKSLRRPETSYRQTGLAPGQEYEISLHIVKNNTRGPGLKRVTTTRLDAPSQIEVKDVTDTTALITWFKPLAEIDGIELTYGIKDVPGDRTTIDLTEDENQYSIGNLKPDTEYEVSLISRRGDMSSNPAKETFTTGLDAPRNLRRVSQTDNSITLEWRNGKAAIDSYRIKYAPISGGDHAEVDVPKSQQATTKTTLTGLRPGTEYGIGVSAVKEDKESNPATINAATELDTPKDLQVSETAETSLTLLWKTPLAKFDRYRLNYSLPTGQWVGVQLPRNTTSYVLRGLEPGQEYNVLLTAEKGRHKSKPARVKASTEQAPELENLTVTEVGWDGLRLNWTAADQAYEHFIIQVQEANKVEAARNLTVPGSLRAVDIPGLKAATPYTVSIYGVIQGYRTPVLSAEASTGETPNLGEVVVAEVGWDALKLNWTAPEGAYEYFFIQVQEADTVEAAQNLTVPGGLRSTDLPGLKAATHYTITIRGVTQDFSTTPLSVEVLTEDLPQLGDLAVSEVGWDGLRLNWTAADNAYEHFVIQVQEVNKVEAAQNLTLPGSLRAVDIPGLEAATPYRVSIYGVIRGYRTPVLSAEASTAKEPEIGNLNVSDITPESFNLSWMATDGIFETFTIEIIDSNRLLETVEYNISGAERTAHISGLPPSTDFIVYLSGLAPSIRTKTISATATTEAEPEVDNLLVSDATPDGFRLSWTADEGVFDNFVLKIRDTKKQSEPLEITLLAPERTRDITGLREATEYEIELYGISKGRRSQTVSAIATTAMGSPKEVIFSDITENSATVSWRAPTAQVESFRITYVPITGGTPSMVTVDGTKTQTRLVKLIPGVEYLVSIIAMKGFEESEPVSGSFTTALDGPSGLVTANITDSEALARWQPAIATVDSYVISYTGEKVPEITRTVSGNTVEYALTDLEPATEYTLRIFAEKGPQKSSTITAKFTTDLDSPRDLTATEVQSETALLTWRPPRASVTGYLLVYESVDGTVKEVIVGPDTTSYSLADLSPSTHYTAKIQALNGPLRSNMIQTIFTTIGLLYPFPKDCSQAMLNGDTTSGLYTIYLNGDKAEALEVFCDMTSDGGGWIVFLRRKNGRENFYQNWKAYAAGFGDRREEFWLGLDNLNKITAQGQYELRVDLRDHGETAFAVYDKFSVGDAKTRYKLKVEGYSGTAGDSMAYHNGRSFSTFDKDTDSAITNCALSYKGAFWYRNCHRVNLMGRYGDNNHSQGVNWFHWKGHEHSIQFAEMKLRPSNFRNLEGRRKRA

SEQ ID NO: 13550 - protein, 2201 aa, Homo Sapiens
MGAMTQLLAGVFLAFLALATEGGVLKKVIRHKRQSGVNATLPEENQPVVFNHVYNIKLPVGSQCSVDLESASGEKDLAPPSEPSESFQEHTVDGENQIVFTHRINIPRRACGCAAAPDVKELLSRLEELENLVSSLREQCTAGAGCCLQPATGRLDTRPFCSGRGNFSTEGCGCVCEPGWKGPNCSEPECPGNCHLRGRCIDGQCICDDGFTGEDCSQLACPSDCNDQGKCVNGVCICFEGYAGADCSREICPVPCSEEHGTCVDGLCVCHDGFAGDDCNKPLCLNNCYNRGRCVENECVCDEGFTGEDCSELICPNDCFDRGRCINGTCYCEEGFTGEDCGKPTCPHACHTQGRCEEGQCVCDEGFAGVDCSEKRCPADCHNRGRCVDGRCECDDGFTGADCGELKCPNGCSGHGRCVNGQCVCDEGYTGEDCSQLRCPNDCHSRGRCVEGKCVCEQGFKGYDCSDMSCPNDCHQHGRCVNGMCVCDDGYTGEDCRDRQCPRDCSNRGLCVDGQCVCEDGFTGPDCAELSCPNDCHGQGRCVNGQCVCHEGFMGKDCKEQRCPSDCHGQGRCVDGQCICHEGFTGLDCGQHSCPSDCNNLGQCVSGRCICNEGYSGEDCSEVSPPKDLVVTEVTEETVNLAWDNEMRVTEYLVVYTPTHEGGLEMQFRVPGDQTSTIIQELEPGVEYFIRVFAILENKKSIPVSARVATYLPAPEGLKFKSIKETSVEVEWDPLDIAFETWEIIFRNMNKEDEGEITKSLRRPETSYRQTGLAPGQEYEISLHIVKNNTRGPGLKRVTTTRLDAPSQIEVKDVTDTTALITWFKPLAEIDGIELTYGIKDVPGDRTTIDLTEDENQYSIGNLKPDTEYEVSLISRRGDMSSNPAKETFTTGLDAPRNLRRVSQTDNSITLEWRNGKAAIDSYRIKYAPISGGDHAEVDVPKSQQATTKTTLTGLRPGTEYGIGVSAVKEDKESNPATINAATELDTPKDLQVSETAETSLTLLWKTPLAKFDRYRLNYSLPTGQWVGVQLPRNTTSYVLRGLEPGQEYNVLLTAEKGRHKSKPARVKASTEQAPELENLTVTEVGWDGLRLNWTAADQAYEHFIIQVQEANKVEAARNLTVPGSLRAVDIPGLKAATPYTVSIYGVIQGYRTPVLSAEASTGETPNLGEVVVAEVGWDALKLNWTAPEGAYEYFFIQVQEADTVEAAQNLTVPGGLRSTDLPGLKAATHYTITIRGVTQDFSTTPLSVEVLTEEVPDMGNLTVTEVSWDALRLNWTTPDGTYDQFTIQVQEADQVEEAHNLTVPGSLRSMEIPGLRAGTPYTVTLHGEVRGHSTRPLAVEVVTEDLPQLGDLAVSEVGWDGLRLNWTAADNAYEHFVIQVQEVNKVEAAQNLTLPGSLRAVDIPGLEAATPYRVSIYGVIRGYRTPVLSAEASTAKEPEIGNLNVSDITPESFNLSWMATDGIFETFTIEIIDSNRLLETVEYNISGAERTAHISGLPPSTDFIVYLSGLAPSIRTKTISATATTEALPLLENLTISDINPYGFTVSWMASENAFDSFLVTVVDSGKLLDPQEFTLSGTQRKLELRGLITGIGYEVMVSGFTQGHQTKPLRAEIVTEAEPEVDNLLVSDATPDGFRLSWTADEGVFDNFVLKIRDTKKQSEPLEITLLAPERTRDITGLREATEYEIELYGISKGRRSQTVSAIATTAMGSPKEVIFSDITENSATVSWRAPTAQVESFRITYVPITGGTPSMVTVDGTKTQTRLVKLIPGVEYLVSIIAMKGFEESEPVSGSFTTALDGPSGLVTANITDSEALARWQPAIATVDSYVISYTGEKVPEITRTVSGNTVEYALTDLEPATEYTLRIFAEKGPQKSSTITAKFTTDLDSPRDLTATEVQSETALLTWRPPRASVTGYLLVYESVDGTVKEVIVGPDTTSYSLADLSPSTHYTAKIQALNGPLRSNMIQTIFTTIGLLYPFPKDCSQAMLNGDTTSGLYTIYLNGDKAEALEVFCDMTSDGGGWIVFLRRKNGRENFYQNWKAYAAGFGDRREEFWLGLDNLNKITAQGQYELRVDLRDHGETAFAVYDKFSVGDAKTRYKLKVEGYSGTAGDSMAYHNGRSFSTFDKDTDSAITNCALSYKGAFWYRNCHRVNLMGRYGDNNHSQGVNWFHWKGHEHSIQFAEMKLRPSNFRNLEGRRKRA

SEQ ID NO: 13551 - protein, 1928 aa, Homo Sapiens
MGAMTQLLAGVFLAFLALATEGGVLKKVIRHKRQSGVNATLPEENQPVVFNHVYNIKLPVGSQCSVDLESASGEKDLAPPSEPSESFQEHTVDGENQIVFTHRINIPRRACGCAAAPDVKELLSRLEELENLVSSLREQCTAGAGCCLQPATGRLDTRPFCSGRGNFSTEGCGCVCEPGWKGPNCSEPECPGNCHLRGRCIDGQCICDDGFTGEDCSQLACPSDCNDQGKCVNGVCICFEGYAGADCSREICPVPCSEEHGTCVDGLCVCHDGFAGDDCNKPLCLNNCYNRGRCVENECVCDEGFTGEDCSELICPNDCFDRGRCINGTCYCEEGFTGEDCGKPTCPHACHTQGRCEEGQCVCDEGFAGVDCSEKRCPADCHNRGRCVDGRCECDDGFTGADCGELKCPNGCSGHGRCVNGQCVCDEGYTGEDCSQLRCPNDCHSRGRCVEGKCVCEQGFKGYDCSDMSCPNDCHQHGRCVNGMCVCDDGYTGEDCRDRQCPRDCSNRGLCVDGQCVCEDGFTGPDCAELSCPNDCHGQGRCVNGQCVCHEGFMGKDCKEQRCPSDCHGQGRCVDGQCICHEGFTGLDCGQHSCPSDCNNLGQCVSGRCICNEGYSGEDCSEVSPPKDLVVTEVTEETVNLAWDNEMRVTEYLVVYTPTHEGGLEMQFRVPGDQTSTIIQELEPGVEYFIRVFAILENKKSIPVSARVATYLPAPEGLKFKSIKETSVEVEWDPLDIAFETWEIIFRNMNKEDEGEITKSLRRPETSYRQTGLAPGQEYEISLHIVKNNTRGPGLKRVTTTRLDAPSQIEVKDVTDTTALITWFKPLAEIDGIELTYGIKDVPGDRTTIDLTEDENQYSIGNLKPDTEYEVSLISRRGDMSSNPAKETFTTGLDAPRNLRRVSQTDNSITLEWRNGKAAIDSYRIKYAPISGGDHAEVDVPKSQQATTKTTLTGLRPGTEYGIGVSAVKEDKESNPATINAATELDTPKDLQVSETAETSLTLLWKTPLAKFDRYRLNYSLPTGQWVGVQLPRNTTSYVLRGLEPGQEYNVLLTAEKGRHKSKPARVKASTEQAPELENLTVTEVGWDGLRLNWTAADQAYEHFIIQVQEANKVEAARNLTVPGSLRAVDIPGLKAATPYTVSIYGVIQGYRTPVLSAEASTGETPNLGEVVVAEVGWDALKLNWTAPEGAYEYFFIQVQEADTVEAAQNLTVPGGLRSTDLPGLKAATHYTITIRGVTQDFSTTPLSVEVLTEEVPDMGNLTVTEVSWDALRLNWTTPDGTYDQFTIQVQEADQVEEAHNLTVPGSLRSMEIPGLRAGTPYTVTLHGEVRGHSTRPLAVEVVTEDLPQLGDLAVSEVGWDGLRLNWTAADNAYEHFVIQVQEVNKVEAAQNLTLPGSLRAVDIPGLEAATPYRVSIYGVIRGYRTPVLSAEASTAMGSPKEVIFSDITENSATVSWRAPTAQVESFRITYVPITGGTPSMVTVDGTKTQTRLVKLIPGVEYLVSIIAMKGFEESEPVSGSFTTALDGPSGLVTANITDSEALARWQPAIATVDSYVISYTGEKVPEITRTVSGNTVEYALTDLEPATEYTLRIFAEKGPQKSSTITAKFTTDLDSPRDLTATEVQSETALLTWRPPRASVTGYLLVYESVDGTVKEVIVGPDTTSYSLADLSPSTHYTAKIQALNGPLRSNMIQTIFTTIGLLYPFPKDCSQAMLNGDTTSGLYTIYLNGDKAEALEVFCDMTSDGGGWIVFLRRKNGRENFYQNWKAYAAGFGDRREEFWLGLDNLNKITAQGQYELRVDLRDHGETAFAVYDKFSVGDAKTRYKLKVEGYSGTAGDSMAYHNGRSFSTFDKDTDSAITNCALSYKGAFWYRNCHRVNLMGRYGDNNHSQGVNWFHWKGHEHSIQFAEMKLRPSNFRNLEGRRKRA

SEQ ID NO: 13552 - protein, 1564 aa, Homo Sapiens
MGAMTQLLAGVFLAFLALATEGGVLKKVIRHKRQSGVNATLPEENQPVVFNHVYNIKLPVGSQCSVDLESASGEKDLAPPSEPSESFQEHTVDGENQIVFTHRINIPRRACGCAAAPDVKELLSRLEELENLVSSLREQCTAGAGCCLQPATGRLDTRPFCSGRGNFSTEGCGCVCEPGWKGPNCSEPECPGNCHLRGRCIDGQCICDDGFTGEDCSQLACPSDCNDQGKCVNGVCICFEGYAGADCSREICPVPCSEEHGTCVDGLCVCHDGFAGDDCNKPLCLNNCYNRGRCVENECVCDEGFTGEDCSELICPNDCFDRGRCINGTCYCEEGFTGEDCGKPTCPHACHTQGRCEEGQCVCDEGFAGVDCSEKRCPADCHNRGRCVDGRCECDDGFTGADCGELKCPNGCSGHGRCVNGQCVCDEGYTGEDCSQLRCPNDCHSRGRCVEGKCVCEQGFKGYDCSDMSCPNDCHQHGRCVNGMCVCDDGYTGEDCRDRQCPRDCSNRGLCVDGQCVCEDGFTGPDCAELSCPNDCHGQGRCVNGQCVCHEGFMGKDCKEQRCPSDCHGQGRCVDGQCICHEGFTGLDCGQHSCPSDCNNLGQCVSGRCICNEGYSGEDCSEVSPPKDLVVTEVTEETVNLAWDNEMRVTEYLVVYTPTHEGGLEMQFRVPGDQTSTIIQELEPGVEYFIRVFAILENKKSIPVSARVATYLPAPEGLKFKSIKETSVEVEWDPLDIAFETWEIIFRNMNKEDEGEITKSLRRPETSYRQTGLAPGQEYEISLHIVKNNTRGPGLKRVTTTRLDAPSQIEVKDVTDTTALITWFKPLAEIDGIELTYGIKDVPGDRTTIDLTEDENQYSIGNLKPDTEYEVSLISRRGDMSSNPAKETFTTGLDAPRNLRRVSQTDNSITLEWRNGKAAIDSYRIKYAPISGGDHAEVDVPKSQQATTKTTLTGLRPGTEYGIGVSAVKEDKESNPATINAATELDTPKDLQVSETAETSLTLLWKTPLAKFDRYRLNYSLPTGQWVGVQLPRNTTSYVLRGLEPGQEYNVLLTAEKGRHKSKPARVKASTAMGSPKEVIFSDITENSATVSWRAPTAQVESFRITYVPITGGTPSMVTVDGTKTQTRLVKLIPGVEYLVSIIAMKGFEESEPVSGSFTTALDGPSGLVTANITDSEALARWQPAIATVDSYVISYTGEKVPEITRTVSGNTVEYALTDLEPATEYTLRIFAEKGPQKSSTITAKFTTDLDSPRDLTATEVQSETALLTWRPPRASVTGYLLVYESVDGTVKEVIVGPDTTSYSLADLSPSTHYTAKIQALNGPLRSNMIQTIFTTIGLLYPFPKDCSQAMLNGDTTSGLYTIYLNGDKAEALEVFCDMTSDGGGWIVFLRRKNGRENFYQNWKAYAAGFGDRREEFWLGLDNLNKITAQGQYELRVDLRDHGETAFAVYDKFSVGDAKTRYKLKVEGYSGTAGDSMAYHNGRSFSTFDKDTDSAITNCALSYKGAFWYRNCHRVNLMGRYGDNNHSQGVNWFHWKGHEHSIQFAEMKLRPSNFRNLEGRRKRA

SEQ ID NO: 13553 - protein, 1838 aa, Homo Sapiens
MGAMTQLLAGVFLAFLALATEGGVLKKVIRHKRQSGVNATLPEENQPVVFNHVYNIKLPVGSQCSVDLESASGEKDLAPPSEPSESFQEHTVDGENQIVFTHRINIPRRACGCAAAPDVKELLSRLEELENLVSSLREQCTAGAGCCLQPATGRLDTRPFCSGRGNFSTEGCGCVCEPGWKGPNCSEPECPGNCHLRGRCIDGQCICDDGFTGEDCSQLACPSDCNDQGKCVNGVCICFEGYAGADCSREICPVPCSEEHGTCVDGLCVCHDGFAGDDCNKPLCLNNCYNRGRCVENECVCDEGFTGEDCSELICPNDCFDRGRCINGTCYCEEGFTGEDCGKPTCPHACHTQGRCEEGQCVCDEGFAGVDCSEKRCPADCHNRGRCVDGRCECDDGFTGADCGELKCPNGCSGHGRCVNGQCVCDEGYTGEDCSQLRCPNDCHSRGRCVEGKCVCEQGFKGYDCSDMSCPNDCHQHGRCVNGMCVCDDGYTGEDCRDRQCPRDCSNRGLCVDGQCVCEDGFTGPDCAELSCPNDCHGQGRCVNGQCVCHEGFMGKDCKEQRCPSDCHGQGRCVDGQCICHEGFTGLDCGQHSCPSDCNNLGQCVSGRCICNEGYSGEDCSEVSPPKDLVVTEVTEETVNLAWDNEMRVTEYLVVYTPTHEGGLEMQFRVPGDQTSTIIQELEPGVEYFIRVFAILENKKSIPVSARVATYLPAPEGLKFKSIKETSVEVEWDPLDIAFETWEIIFRNMNKEDEGEITKSLRRPETSYRQTGLAPGQEYEISLHIVKNNTRGPGLKRVTTTRLDAPSQIEVKDVTDTTALITWFKPLAEIDGIELTYGIKDVPGDRTTIDLTEDENQYSIGNLKPDTEYEVSLISRRGDMSSNPAKETFTTGLDAPRNLRRVSQTDNSITLEWRNGKAAIDSYRIKYAPISGGDHAEVDVPKSQQATTKTTLTGLRPGTEYGIGVSAVKEDKESNPATINAATELDTPKDLQVSETAETSLTLLWKTPLAKFDRYRLNYSLPTGQWVGVQLPRNTTSYVLRGLEPGQEYNVLLTAEKGRHKSKPARVKASTAKEPEIGNLNVSDITPESFNLSWMATDGIFETFTIEIIDSNRLLETVEYNISGAERTAHISGLPPSTDFIVYLSGLAPSIRTKTISATATTEPKPQLGTLIFSNITPKSFNMSWTTQAGLFAKIVINVSDAHSLHESQQFTVSGDAKQAHITGLVENTGYDVSVAGTTLAGDPTRPLTAFVITEAEPEVDNLLVSDATPDGFRLSWTADEGVFDNFVLKIRDTKKQSEPLEITLLAPERTRDITGLREATEYEIELYGISKGRRSQTVSAIATTAMGSPKEVIFSDITENSATVSWRAPTAQVESFRITYVPITGGTPSMVTVDGTKTQTRLVKLIPGVEYLVSIIAMKGFEESEPVSGSFTTALDGPSGLVTANITDSEALARWQPAIATVDSYVISYTGEKVPEITRTVSGNTVEYALTDLEPATEYTLRIFAEKGPQKSSTITAKFTTDLDSPRDLTATEVQSETALLTWRPPRASVTGYLLVYESVDGTVKEVIVGPDTTSYSLADLSPSTHYTAKIQALNGPLRSNMIQTIFTTIGLLYPFPKDCSQAMLNGDTTSGLYTIYLNGDKAEALEVFCDMTSDGGGWIVFLRRKNGRENFYQNWKAYAAGFGDRREEFWLGLDNLNKITAQGQYELRVDLRDHGETAFAVYDKFSVGDAKTRYKLKVEGYSGTAGDSMAYHNGRSFSTFDKDTDSAITNCALSYKGAFWYRNCHRVNLMGRYGDNNHSQGVNWFHWKGHEHSIQFAEMKLRPSNFRNLEGRRKRA

SEQ ID NO: 13554 - protein, 1838 aa, Homo Sapiens; identical to SEQ ID NO: 13553

SEQ ID NO: 13555 - protein, 615 aa, Homo Sapiens
  misc_feature (1)..(1): Xaa can be any naturally occurring amino acid
XPELENLTVTEVGWDGLRLNWTAADQAYEHFIIQVQEANKVEAARNLTVPGSLRAVDIPGLKAATPYTVSIYGVIQGYRTPVLSAEASTAKEPEIGNLNVSDITPESFNLSWMATDGIFETFTIEIIDSNRLLETVEYNISGAERTAHISGLPPSTDFIVYLSGLAPSIRTKTISATATTEAEPEVDNLLVSDATPDGFRLSWTADEGVFDNFVLKIRDTKKQSEPLEITLLAPERTRDITGLREATEYEIELYGISKGRRSQTVSAIATTAMGSPKEVIFSDITENSATVSWRAPTAQVESFRITYVPITGGTPSMVTVDGTKTQTRLVKLIPGVEYLVSIIAMKGFEESEPVSGSFTTALDGPSGLVTANITDSEALARWQPAIATVDSYVISYTGEKVPEITRTVSGNTVEYALTDLEPATEYTLRIFAEKGPQKSSTITAKFTTDLDSPRDLTATEVQSETALLTWRPPRASVTGYLLVYESVDGTVKEVIVGPDTTSYSLADLSPSTHYTAKIQALNGPLRSNMIQTIFTTIGLLYPFPKDCSQAMLNGDTTSGLYTIYLNGDKAEALEVFCDMTSDGGGWIVFLRRKNGRENFYQNWKAYAAGFGDRRE

SEQ ID NO: 13556 - protein, 277 aa, Homo Sapiens
MIILIYLFLLLWEDTQGWGFKDGIFHNSIWLERAAGVYHREARSGKYKLTYAEAKAVCEFEGGHLATYKQLEAARKIGFHVCAAGWMAKGRVGYPIVKPGPNCGFGKTGIIDYGIRLNRSERWDAYCYNPHAKECGGVFTDPKQIFKSPGFPNEYEDNQICYWHIRLKYGQRIHLSFLDFDLEDDPGCLADYVEIYDSYDDVHGFVGRYCGDELPDDIISTGNVMTLKFLSDASVTAGGFQIKYVAMDPVSKSSQGKNTSTTSTGNKNFLAGRFSHL

SEQ ID NO: 13557 - protein, 616 aa, Homo Sapiens
MAPRARRRRPLFALLLLCALLARLQVALQIAPPCTSEKHYEHLGRCCNKCEPGKYMSSKCTTTSDSVCLPCGPDEYLDSWNEEDKCLLHKVCDTGKALVAVVAGNSTTPRRCACTAGYHWSQDCECCRRNTECAPGLGAQHPLQLNKDTVCKPCLAGYFSDAFSSTDKCRPWTNCTFLGKRVEHHGTEKSDAVCSSSLPARKPPNEPHVYLPGLIILLLFASVALVAAIIFGVCYRKKGKALTANLWHWINEACGRLSGDKESSGDSCVSTHTANFGQQGACEGVLLLTLEEKTFPEDMCYPDQGGVCQGTCVGGGPYAQGEDARMLSLVSKTEIEEDSFRQMPTEDEYMDRPSQPTDQLLFLTEPGSKSTPPFSEPLEVGENDSLSQCFTGTQSTVGSESCNCTEPLCRTDWTPMSSENYLQKEVDSGHCPHWAASPSPNWADVCTGCRNPPGEDCEPLVGSPKRGPLPQCAYGMGLPPEEEASRTEARDQPEDGADGRLPSSARAGAGSGSSPGGQSPASGNVTGNSNSTFISSGQVMNFKGDIIVVYVSQTSQEGAAAAAEPMGRPVQEETLARRDSFAGNGPRFPDPCGGPEGLREPEKASRPVQEQGGAKA

SEQ ID NO: 13558 - protein, 263 aa, Homo Sapiens
MAPRARRRRPLFALLLLCALLARLQVALQIAPPCTSEKHYEHLGRCCNKCEPGKYMSSKCTTTSDSVCLPCGPDEYLDSWNEEDKCLLHKVCDTGKALVAVVAGNSTTPRRCACTAGYHWSQDCECCRRNTECAPGLGAQHPLQLNKDTVCKPCLAGYFSDAFSSTDKCRPWTNCTFLGKRVEHHGTEKSDAVCSSSLPARKPPNEPHVYLPGLIILLLFASVALVAAIIFGVCYRKKGKALTANLWHWINEACGRLSGDKEM

SEQ ID NO: 13559 - protein, 263 aa, Homo Sapiens
MAPRARRRRPLFALLLLCALLARLQVALQIAPPCTSEKHYEHLGRCCNKCEPGKYMSSKCTTTSDSVCLPCGPDEYLDSWNEEDKCLLHKVCDTGKALVAVVAGNSTTPRRCACTAGYHWSQDCECCRRNTECAPGLGAQHPLQLNKDTVCKPCLAGYFSDAFSSTDKCRPWTNCTFLGKRVEHHGTEKSDAVCSSSLPARKPPNEPHVYLPGLIILLLFASVALVAAIIFGVCYRKKGKALTANLWHWINEACGRLSGDKES

SEQ ID NO: 13560 - protein, 337 aa, Homo Sapiens
MAPRARRRRPLFALLLLCALLARLQVALQIAPPCTSEKHYEHLGRCCNKCEPGKYMSSKCTTTSDSVCLPCGPDEYLDSWNEEDKCLLHKVCDTGKALVAVVAGNSTTPRRCACTAGYHWSQDCECCRRNTECAPGLGAQHPLQLNKDTVCKPCLAGYFSDAFSSTDKCRPWTNCTFLGKRVEHHGTEKSDAVCSSSLPARKPPNEPHVYLPGLIILLLFASVALVAAIIFGVCYRKKGKALTGNVTGNSNSTFISSGQVMNFKGDIIVVYVSQTSQEGAAAAAEPMGRPVQEETLARRDSFAGNGPRFPDPCGGPEGLREPEKASRPVQEQGGAKA

SEQ ID NO: 13561 - protein, 299 aa, Homo Sapiens
MAPRARRRRPLFALLLLCALLARLQVALQIAPPCTSEKHYEHLGRCCNKCEPGKYMSSKCTTTSDSVCLPCGPDEYLDSWNEEDKCLLHKVCDTGKALVAVVAGNSTTPRRCACTAGYHWSQDCECCRRNTECAPGLGAQHPLQLNKDTVCKPCLAGYFSDAFSSTDKCRPWTNCTFLGKRVEHHGTEKSDAVCSSSLPARKPPNGNVTGNSNSTFISSGQVMNFKGDIIVVYVSQTSQEGAAAAAEPMGRPVQEETLARRDSFAGNGPRFPDPCGGPEGLREPEKASRPVQEQGGAKA

SEQ ID NO: 13562 - protein, 145 aa, Homo Sapiens
MNNLLCCALVFLDISIKWTTQETFPPKYLHYDEETSHQLLCDKCPPGTYLKQHCTAKWKTVCAPCPDHYYTDSWHTSDECLYCSPVCKELQYVKQECNRTHNRVCECKEGRYLEIEFCLKHRSCPPGFGVVQAGCRRRPKPQICI

SEQ ID NO: 13563 - protein, 401 aa, Homo Sapiens
MNNLLCCALVFLDISIKWTTQETFPPKYLHYDEETSHQLLCDKCPPGTYLKQHCTAKWKTVCAPCPDHYYTDSWHTSDECLYCSPVCKELQYVKQECNRTHNRVCECKEGRYLEIEFCLKHRSCPPGFGVVQAGTPERNTVCKRCPDGFFSNETSSKAPCRKHTNCSVFGLLLTQKGNATHDNICSGNSESTQKCGIDVTLCEEAFFRFAVPTKFTPNWLSVLVDNLPGTKVNAESVERIKRQHSSQEQTFQLLKLWKHQNKDQDIVKKIIQDIDLCENSVQRHIGHANLTFEQLRSLMESLPGKKVGAEDIEKTIKACKPSDQILKLLSLWRIKNGDQDTLKGLMHALKHSKTYHFPKTVTQSLKKTIRFLHSFTMYKLYQKLFLEMIGNQVQSVKISCL

SEQ ID NO: 13564 - protein, 94 aa, Homo Sapiens
MARGSLRRLLRLLVLGLWLALLRSVAGEQAPASDPRPPPQAPPPAPAAAPGARTWTSAWTARLAGRDRTATSAWAALQHLLPPSGCFGPSLGAL

SEQ ID NO: 13565 - protein, 47 aa, Homo Sapiens
MARGSLRRLLRLLVLGLWLALLRSVAGEQAPDPRIAESRPQPLTRGP

SEQ ID NO: 13566 - protein, 94 aa, Homo Sapiens
MARGSLRRLLRLLVLGLWLALLRSVAGEQAPGAAAPPAPFRLLWPILGGALSLTFVLGLLSGFLVWRRCRRREKFTTPIEETGGEGCPAVALIQ

SEQ ID NO: 13567 - protein, 129 aa, Homo Sapiens
MARGSLRRLLRLLVLGLWLALLRSVAGEQAPGTAPCSRGSSWSADLDKCMDCASCRARPHSDFCLGCAAAPPAPFRLLWPILGGALSLTFVLGLLSGFLVWRRCRRREKFTTPIEETGGEGCPAVALIQ

SEQ ID NO: 13568 - protein, 226 aa, Homo Sapiens
MARGSLRRLLRLLVLGLWLALLRSVAGEQAPGTRDSGVGEPRAGAREPDWVSGEQRRTGGTGGCGDLGSGGLQTARSRLWEVPSLSKLHSQSGPQFLPPSNWGWGGSSVPQVRSTSNGERKRCSTSCPLPAALAHPWGRSEPDLRAGAAFWLFGLETMPQEREVHHPHRGDRRRGLPSCGADPVTMCPLPAGARPLIIHSSILEPVSASQTRREPSSSNHKGGGGR

SEQ ID NO: 13569 - protein, 80 aa, Homo Sapiens
MDCASCRARPHSDFCLGCAAAPPAPFRLLWPILGGALSLTFVLGLLSGFLVWRRCRRREKFTTPIEETGGEGCPAVALIQ

SEQ ID NO: 13570 - protein, 183 aa, Homo Sapiens
MEPPGDWGPPPWRSTPKTDVLRLVLYLTFLGAPCYAPALPSCKEDEYPVGSECCPKCSPGYRVKEACGELTGTVCEPCPPGTYIAHLNGLSKCLQCQMCDPAMGLRASRNCSRTENAVCGCSPGHFCIVQDGDHCAACRAYATSSPGQRVQKGGTESQDTLCQNCPPGTFSPNGTLEECQHQT

SEQ ID NO: 13571 - protein, 231 aa, Homo Sapiens
MEPPGDWGPPPWRSTPKTDVLRLVLYLTFLGAPCYAPALPSCKEDEYPVGSECCPKCSPGYRVKEACGELTGTVCEPCPPGTYIAHLNGLSKCLQCQMCDPAMGLRASRNCSRTENAVCGCSPGHFCIVQDGDHCAACRAYATSSPGQRVQKGGTESQDTLCQNCPPGTFSPNGTLEECQHQTKCSWLVTKAGAGTSSSHWVWWFLSGSLVIVIVCSTVGLIICVKRRKPR

SEQ ID NO: 13572 - protein, 231 aa, Homo Sapiens; identical to SEQ ID NO: 13571

SEQ ID NO: 13573 - protein, 231 aa, Homo Sapiens; identical to SEQ ID NO: 13571

SEQ ID NO: 13574 - protein, 283 aa, Homo Sapiens
MEPPGDWGPPPWRSTPKTDVLRLVLYLTFLGAPCYAPALPSCKEDEYPVGSECCPKCSPGYRVKEACGELTGTVCEPCPPGTYIAHLNGLSKCLQCQMCDPAMGLRASRNCSRTENAVCGCSPGHFCIVQDGDHCAACRAYATSSPGQRVQKGGTESQDTLCQNCPPGTFSPNGTLEECQHQTKCSWLVTKAGAGTSSSHWVWWFLSGSLVIVIVCSTVGLIICVKRRKPRGDVVKVIVSVQRKRQEAEGEATVIEALQAPPDVTTVAVEETIPSFTGRSPNH

SEQ ID NO: 13575 - protein, 193 aa, Homo Sapiens
MEPPGDWGPPPWRSTPKTDVLRLVLYLTFLGAPCYAPALPSCKEDEYPVGSECCPKCSPGYRVKEACGELTGTVCEPCPPGTYIAHLNGLSKCLQCQMCDPAMGLRASRNCSRTENAVCGCSPGHFCIVQDGDHCAACRAYATSSPGQRVQKGGTESQDTLCQNCPPGTFSPNGTLEECQHQTNRAWKSQTDL

SEQ ID NO: 13576 - protein, 25 aa, Homo Sapiens
  misc_feature (1)..(1): Xaa can be any naturally occurring amino acid
XGTLEECQHQTNWPNHMCEKKKAKG

SEQ ID NO: 13577 - protein, 255 aa, Homo Sapiens
MAQHGAMGAFRALCGLALLCALSLGQRPTGGPGCGPGRLLLGTGTDARCCRVHTTRCCRDYPGEECCSEWDCMCVQPEFHCGDPCCTTCRHHPCPPGQGVQSQGKFSFGFQCIDCASGTFSGGHEGHCKPWTDCCWRCRRRPKTPEAASSPRKSGASDRQRRRGGWETCGCEPGRPPGPPTAASPSPGAPQAAGALRSALGRALLPWQQKWVQEGGSDQRPGPCSSAAAAGPCRRERETQSWPPSSLAGPDGVGS

SEQ ID NO: 13578 - protein, 234 aa, Homo Sapiens
MAQHGAMGAFRALCGLALLCALSLGQRPTGGPGCGPGRLLLGTGTDARCCRVHTTRCCRDYPGEECCSEWDCMCVQPEFHCGDPCCTTCRHHPCPPGQGVQSQGKFSFGFQCIDCASGTFSGGHEGHCKPWTDCTQFGFLTVFPGNKTHNAVCVPGSPPAEPLGWLTVVLLAVAACVLLLTSAQLGLHIWQLRKTQLLLEVPPSTEDARSCQFPEEERGERSAEEKGRLGDLWV

SEQ ID NO: 13579 - protein, 241 aa, Homo Sapiens
MAQHGAMGAFRALCGLALLCALSLGQRPTGGPGCGPGRLLLGTGTDARCCRVHTTRCCRDYPGEECCSEWDCMCVQPEFHCGDPCCTTCRHHPCPPGQGVQSQGKFSFGFQCIDCASGTFSGGHEGHCKPWTDCTQFGFLTVFPGNKTHNAVCVPGSPPAEPLGWLTVVLLAVAACVLLLTSAQLGLHIWQLRSQCMWPRETQLLLEVPPSTEDARSCQFPEEERGERSAEEKGRLGDLWV

SEQ ID NO: 13580 - protein, 169 aa, Homo Sapiens
MCVQPEFHCGDPCCTTCRHHPCPPGQGVQSQGKFSFGFQCIDCASGTFSGGHEGHCKPWTDCTQFGFLTVFPGNKTHNAVCVPGSPPAEPLGWLTVVLLAVAACVLLLTSAQLGLHIWQLRSQCMWPRETQLLLEVPPSTEDARSCQFPEEERGERSAEEKGRLGDLWV

SEQ ID NO: 13581 - protein, 122 aa, Homo Sapiens
MGLSTVPDLLLPLEPTCTMTVQARGRIRTAGSVRAAPSPLQKTTSDTASAAPNAERKWVRWRSLLAQWTGTPCVAAGRTSTGIIGVKTFSSASIAASASMGPCTSPARRNRTPCAPAMQVSF

SEQ ID NO: 13582 - protein, 412 aa, Homo Sapiens
MGLSTVPDLLLPLVLLELLVGIYPSGVIGLVPHLGDREKRDSVCPQGKYIHPQNNSICCTKCHKEMGQVEISSCTVDRDTVCGCRKNQYRHYWSENLFQCFNCSLCLNGTVHLSCQEKQNTVCTCHAGFFLRENECVSCSNCKKSLECTKLCLPQIENVKGTEDSGTTVLLPLVIFFGLCLLSLLFIGLMYRYQRWKSKLYSIVCGKSTPEKEGELEGTTTKPLAPNPSFSPTPGFTPTLGFSPVPSSTFTSSSTYTPGDCPNFAAPRREVAPPYQGADPILATALASDPIPNPLQKWEDSAHKPQSLDTDDPATLYAVVENVPPLRWKEFVRRLGLSDHEIDRLELQNGRCLREAQYSMLATWRRRTPRREATLELLGRVLRDMDLLGCLEDIEEALCGPAALPPAPSLLR

SEQ ID NO: 13583 - protein, 72 aa, Homo Sapiens
MGLSTVPDLLLPLVLLELLVGIYPSGVIGLVPHLGDREKRDSVCPQGKYIHPQNNSICCTKCHKEPVPALLE

SEQ ID NO: 13584 - protein, 118 aa, Homo Sapiens
MGLSTVPDLLLPLVLLELLVGIYPSGVIGLVPHLGDREKRDSVCPQGKYIHPQNNSICCTKCHKGPGQDTDCRECESGSFTASENHLRHCLSCSKCRKEMGQVEISSCTVDRDTVCGC

SEQ ID NO: 13585 - protein, 71 aa, Homo Sapiens
MGLSTVPDLLLPLVLLELLVGIYPSGVIGLVPHLGDREKRDSVCPQGKYIHPQNNSICCTKCHKGTYLYND

SEQ ID NO: 13586 - protein, 254 aa, Homo Sapiens
MGLSTVPDLLLPLVLLELLVGIYPSGVIGLVPHLGDREKRDSVCPQGKYIHPQNNSICCTKCHKGTYLYNDCPGPGQDTDCRECESGSFTASENHLRHCLSCSKCRKEMGQVEISSCTVDRDTVCGCRKNQYRHYWSENLFQCFNCSLCLNGTVHLSCERSSPEAKPSPHPRGWPLPHAVALPFLPPPVFCGSDNQLLSGRPHPVPRHFLCPVGWGCRRFSFSCAALLPTGQEKQNTVCTCHAGFFLRENECVS

SEQ ID NO: 13587 - protein, 218 aa, Homo Sapiens
MGLSTVPDLLLPLVLLELLVGIYPSGVIGLVPHLGDREKRDSVCPQGKYIHPQNNSICCTKCHKGTYLYNDCPGPGQDTDCRECESGSFTASENHLRHCLSCSKCRKEMGQVEISSCTVDRDTVCGCRKNQYRHYWSENLFQCFNCSLCLNGTVHLSCQEKQNTVCTCHAGFFLRENECVSCSKVLLCRPGWNAVARSRLTATSASQIQAILLLQPPK

SEQ ID NO: 13588 - protein, 298 aa, Homo Sapiens
MGLSTVPDLLLPLVLLELLVGIYPSGVIGLVPHLGDREKRDSVCPQGKYIHPQNNSICCTKCHKGTYLYNDCPGPGQDTDCRECESGSFTASENHLRHCLSCSKCRKEMGQVEISSCTVDRDTVCGCRKNQYRHYWSENLFQCFNCSLCLNGTVHLSCQEKQNTVCTCHAGFFLRENECVSCSNCKKSLECTKLCLPQIENVKGTEDSGTTVLLPLVIFFGLCLLSLLFIGLMYRYQRWKSKLYSIGEWGLWEGEGAGGGEGGHGWVRWTCVEGGEECPLSSYRWGLWAEGGPGWLGR

SEQ ID NO: 13589 - protein, 455 aa, Homo Sapiens
MGLSTVPDLLLPLVLLELLVGIYPSGVIGLVPHLGDREKRDSVCPQGKYIHPQNNSICCTKCHKGTYLYNDCPGPGQDTDCRECESGSFTASENHLRHCLSCSKCRKEMGQVEISSCTVDRDTVCGCRKNQYRHYWSENLFQCFNCSLCLNGTVHLSCQEKQNTVCTCHAGFFLRENECVSCSNCKKSLECTKLCLPQIENVKGTEDSGTTVLLPLVIFFGLCLLSLLFIGLMYRYQRWKSKLYSIVCGKSTPEKEGELEGTTTKPLAPNPSFSPTPGFTPTLGFSPVPSSTFTSSSTYTPGDCPNFAAPRREVAPPYQGADPILATALASDPIPNPLQKWEDSAHKPQSLDTDDPATLYAVVENVPPLRWKEFVRRLGLSDHEIDRLELQNGRCLREAQYSMLATWRRRTPRREATLELLGRVLRDMDLLGCLEDIEEALCGPAALPPAPSLLR

SEQ ID NO: 13590 - protein, 155 aa, Homo Sapiens
MAPVAVWAALAVGLELWAAAHALPAQVAFTPYAPEPGSTCRLREYYDQTAQMCCSKCSPGQHAKVFCTKTSDTVCDSCEDSTYTQLWNWVPECLSCGSRCSSDQVETQACTREQNRICTCRPGWYCALSKQEGCRLCAPLRKCRPGFGVARPDLS

SEQ ID NO: 13591 - protein, 461 aa, Homo Sapiens
MAPVAVWAALAVGLELWAAAHALPAQVAFTPYAPEPGSTCRLREYYDQTAQMCCSKCSPGQHAKVFCTKTSDTVCDSCEDSTYTQLWNWVPECLSCGSRCSSDQVETQACTREQNRICTCRPGWYCALSKQEGCRLCAPLRKCRPGFGVARPGTETSDVVCKPCAPGTFSNTTSSTDICRPHQICNVVAIPGNASMDAVCTSTSPTRSMAPGAVHLPQPVSTRSQHTQPTPEPSTAPSTSFLLPMGPSPPAEGSTGDFALPVGLIVGVTALGLLIIGVVNCVIMTQVKKKPLCLQREAKVPHLPADKARGTQGPEQQHLLITAPSSSSSSLESSASALDRRAPTRNQPQAPGVEASGAGEARASTGSSDSSPGGHGTQVNVTCIVNVCSSSDHSSQCSSQASSTMGDTDSSPSESPKDEQVPFSKEECAFRSQLETPETLLGSTEEKPLPLGVPDAGMKPS

SEQ ID NO: 13592 - protein, 126 aa, Homo Sapiens
MEQRPRGCAAVAAALLLVLLGARAQGGTRSPRCDCAGDFHKKIGLFCCRGCPAASQVALENCSAVADTRCGCKPGWFVECQVSQCVSSSPFYCQPCLDCGALHRHTRLLCHPSVTLGQRPHPSSTS

SEQ ID NO: 13593 - protein, 136 aa, Homo Sapiens
MEQRPRGCAAVAAALLLVLLGARAQGGTRSPRCDCAGDFHKKIGLFCCRGCPAASQVALENCSAVADTRCGCKPGWFVECQVSQCVSSSPFYCQPCLDCGALHRHTRLLCSRRDTDCGTCLPGFYEHGDGCVSCPT

SEQ ID NO: 13594 - protein, 372 aa, Homo Sapiens
MEQRPRGCAAVAAALLLVLLGARAQGGTRSPRCDCAGDFHKKIGLFCCRGCPAASQVALENCSAVADTRCGCKPGWFVECQVSQCVSSSPFYCQPCLDCGALHRHTRLLCSRRDTDCGTCLPGFYEHGDGCVSCPTSTLGSCPERCAAVCGWRQMFWVQVLLAGLVVPLLLGATLTYTYRHCWPHKPLVTADEAGMEALTPPPATHLSPLDSAHTLLAPPDSSEKICTVQLVGNSWTPGYPETQEALCPQVTWSWDQLPSRALGPAAAPTLSPESPAGSPAMMLQPGPQLYDVMDAVPARRWKEFVRTLGLREAEIEAVEVEIGRFRDQQYEMLKRWRQQQPAGLGAVYAALERMGLDGCVEDLRSRLQRGP

SEQ ID NO: 13595 - protein, 234 aa, Homo Sapiens
MEQRPRGCAAVAAALLLVLLGARAQGGTRSPRCDCAGDFHKKIGLFCCRGCPADEAGMEALTPPPATHLSPLDSAHTLLAPPDSSEKICTVQLVGNSWTPGYPETQEALCPQVTWSWDQLPSRALGPAAAPTLSPESPAGSPAMMLQPGPQLYDVMDAVPARRWKEFVRTLGLREAEIEAVEVEIGRFRDQQYEMLKRWRQQQPAGLGAVYAALERMGLDGCVEDLRSRLQRGP

SEQ ID NO: 13596 - protein, 181 aa, Homo Sapiens
MEQRPRGCAAVAAALLLVLLGARAQGGTRSPRCDCAGDFHKKIGLFCCRGCPAGHYLKAPCTEPCGNSTCLVCPQDTFLAWENHHNSECARCQACDEQASQVALENCSAVADTRCGCKPGWFVECQVSQCVSSSPFYCQPCLDCGALHRHTRLLCSRRDTDCGTCLPGFYEHGDGCVSCPT

SEQ ID NO: 13597 - protein, 277 aa, Homo Sapiens
MEQRPRGCAAVAAALLLVLLGARAQGGTRSPRCDCAGDFHKKIGLFCCRGCPAGHYLKAPCTEPCGNSTCLVCPQDTFLAWENHHNSECARCQACDEQASQVALENCSAVADTRCGCKPGWFVECQVSQCVSSSPFYCQPCLDCGALHRHTRLLCSRRDTDCGTCLPGFYEHGDGCVSCPTPPPSLAGAPWGAVQSAVPLSVAGGRVGGVLGMRVGELGWTEGRRVRRGATTQHPPAAFSVLGPGAPGWPCGPPPAWGHPDLHIPPLLASQAPGYCR

SEQ ID NO: 13598 - protein, 426 aa, Homo Sapiens
MEQRPRGCAAVAAALLLVLLGARAQGGTRSPRCDCAGDFHKKIGLFCCRGCPAGHYLKAPCTEPCGNSTCLVCPQDTFLAWENHHNSECARCQACDEQASQVALENCSAVADTRCGCKPGWFVECQVSQCVSSSPFYCQPCLDCGALHRHTRLLCSRRDTDCGTCLPGFYEHGDGCVSCPTPPPSLAGAPWGAVQSAVPLSVAGGRVGVFWVQVLLAGLVVPLLLGATLTYTYRHCWPHKPLVTADEAGMEALTPPPATHLSPLDSAHTLLAPPDSSEKICTVQLVGNSWTPGYPETQEALCPQVTWSWDQLPSRALGPAAAPTLSPESPAGSPAMMLQPGPQLYDVMDAVPARRWKEFVRTLGLREAEIEAVEVEIGRFRDQQYEMLKRWRQQQPAGLGAVYAALERMGLDGCVEDLRSRLQRGP

SEQ ID NO: 13599 - protein, 417 aa, Homo Sapiens
MEQRPRGCAAVAAALLLVLLGARAQGGTRSPRCDCAGDFHKKIGLFCCRGCPAGHYLKAPCTEPCGNSTCLVCPQDTFLAWENHHNSECARCQACDEQASQVALENCSAVADTRCGCKPGWFVECQVSQCVSSSPFYCQPCLDCGALHRHTRLLCSRRDTDCGTCLPGFYEHGDGCVSCPTSTLGSCPERCAAVCGWRQMFWVQVLLAGLVVPLLLGATLTYTYRHCWPHKPLVTADEAGMEALTPPPATHLSPLDSAHTLLAPPDSSEKICTVQLVGNSWTPGYPETQEALCPQVTWSWDQLPSRALGPAAAPTLSPESPAGSPAMMLQPGPQLYDVMDAVPARRWKEFVRTLGLREAEIEAVEVEIGRFRDQQYEMLKRWRQQQPAGLGAVYAALERMGLDGCVEDLRSRLQRGP

SEQ ID NO: 13600 - protein, 380 aa, Homo Sapiens
MEQRPRGCAAVAAALLLVLLGARAQGGTRSPRCDCAGDFHKKIGLFCCRGCPAGHYLKAPCTEPCGNSTCLVCPQDTFLAWENHHNSECARCQACDEQASQVALENCSAVADTRCGCKPGWFVECQVSQCVSSSPFYCQPCLDCGALHRHTRLLCSRRDTDCGTCLPGFYEHGDGCVSCPTSTLGSCPERCAAVCGWRQNEAGMEALTPPPATHLSPLDSAHTLLAPPDSSEKICTVQLVGNSWTPGYPETQEALCPQVTWSWDQLPSRALGPAAAPTLSPESPAGSPAMMLQPGPQLYDVMDAVPARRWKEFVRTLGLREAEIEAVEVEIGRFRDQQYEMLKRWRQQQPAGLGAVYAALERMGLDGCVEDLRSRLQRGP

SEQ ID NO: 13601 - protein, 253 aa, Homo Sapiens
MEQRPRGCAAVAAALLLVLLGARAQGGTRSPRCDCAGDFHKKIGLFCCRGCPAGHYLKAPCTEPCGNSTCLVCPQDTFLAWENHHNSECARCQACDEQASQVALENCSAVADTRCGCKPGWFVECQVSQCVSSSPFYCQPCLDCGALHRHTRLLCSRRDTDCGTCLPGFYEHGDGCVSCPTSTLGSCPERCAAVCGWRQSRWCAGNASGRTGMDRGEAGEEGGNHPTPTSCFQCSGSRCSWLALWSPSCLGPP

SEQ ID NO: 13602 - protein, 218 aa, Homo Sapiens
MEQRPRGCAAVAAALLLVLLGARAQGGTRSPRCDCAGDFHKKIGLFCCRGCPAGHYLKAPCTEPCGNSTCLVCPQDTFLAWENHHNSECARCQACDEQASQVALENCSAVADTRCGCKPGWFVECQVSQCVSSSPFYCQPCLDCGALHRHTRLLCSRRDTDCGTCLPGFYEHGDGCVSCPTVLGPGAPGWPCGPPPAWGHPDLHIPPLLASQAPGYCR

SEQ ID NO: 13603 - protein, 45 aa, Homo Sapiens
MFWVQVLLAGLVVPLLLGATLTYTYRHCWPHKPLVTDEAGMEALT

SEQ ID NO: 13604 - protein, 300 aa, Homo Sapiens
MRALEGPGLSLLCLVLALPALLPVPAVRGVAETPTYPWRDAETGERLVCAQCPPGTFVQRPCRRDSPTTCGPCPPRHYTQFWNYLERCRYCNVLCGEREEEARACHATHNRACRCRTGFFAHAGFCLEHASCPPGAGVIAPGTPSQNTQCQPCPPGTFSASSSSSEQCQPHRNCTALGLALNVPGSSSHDTLCTSCTGFPLSTRVPGAEECERAVIDFVAFQDISIKRLQRLLQALEAPEGWGPTPRAGRAALQLKLRRRLTELLGAQDGALLVRLLQALRVARMPGLERSVRERFLPVH

SEQ ID NO: 13605 - protein, 244 aa, Homo Sapiens
MDPNRISEDGTHCIYRILRLHENADFQDTTLESQDTKLIPDSCRRIKQAFQGAVQKELQHIVGSQHIRAEKAMVDGSWLDLAKRSKLEAQPFAHLTINATDIPSGSHKVSLSSWYHDRGWAKISNMTFSNGKLIVNQDGFYYLYANICFRHHETSGDLATEYLQLMVYVTKTSIKIPSSHTLMKGGSTKYWSGNSEFHFYSINVGGFFKLRSGEEISIEVSNPSLLDPDQDATYFGAFKVRDID

SEQ ID NO: 13606 - protein, 244 aa, Homo Sapiens; identical to SEQ ID NO: 13605

SEQ ID NO: 13607 - protein, 244 aa, Homo Sapiens; identical to SEQ ID NO: 13605

SEQ ID NO: 13608 - protein, 270 aa, Homo Sapiens
MFVALLGLGLGQVVCSVALFFYFRAQMDPNRISEDGTHCIYRILRLHENADFQDTTLESQDTKLIPDSCRRIKQAFQGAVQKELQHIVGSQHIRAEKAMVDGSWLDLAKRSKLEAQPFAHLTINATDIPSGSHKVSLSSWYHDRGWAKISNMTFSNGKLIVNQDGFYYLYANICFRHHETSGDLATEYLQLMVYVTKTSIKIPSSHTLMKGGSTKYWSGNSEFHFYSINVGGFFKLRSGEEISIEVSNPSLLDPDQDATYFGAFKVRDID

SEQ ID NO: 13609 - protein, 317 aa, Homo Sapiens
MRRASRDYTKYLRGSEEMGGGPGAPHEGPLHAPPPPAPHQPPAASRSMFVALLGLGLGQVVCSVALFFYFRAQMDPNRISEDGTHCIYRILRLHENADFQDTTLESQDTKLIPDSCRRIKQAFQGAVQKELQHIVGSQHIRAEKAMVDGSWLDLAKRSKLEAQPFAHLTINATDIPSGSHKVSLSSWYHDRGWAKISNMTFSNGKLIVNQDGFYYLYANICFRHHETSGDLATEYLQLMVYVTKTSIKIPSSHTLMKGGSTKYWSGNSEFHFYSINVGGFFKLRSGEEISIEVSNPSLLDPDQDATYFGAFKVRDID

SEQ ID NO: 13610 - protein, 134 aa, Homo Sapiens
MAARRSQRRRGRRGEPGTALLVPLALGLGLALACLGLLLAVVSLGSRASLSAQEPAQEELVAEEDQDPSELNPQTEESQDPAPFLNRLVRPRRSAPKGRKTRARRAIAAHYEVHPRPGQDGAQADGGYTTCLRP

SEQ ID NO: 13611 - protein, 249 aa, Homo Sapiens
MAARRSQRRRGRRGEPGTALLVPLALGLGLALACLGLLLAVVSLGSRASLSAQEPAQEELVAEEDQDPSELNPQTEESQDPAPFLNRLVRPRRSAPKGRKTRARRAIAAHYEVHPRPGQDGAQAGVDGTVSGWEEARINSSSPLRYNRQIGEFIVTRAGLYYLYCQVHFDEGKAVYLKLDLLVDGVLALRCLEEFSATAASSLGPQLRLCQVSGLLALRPGSSLRIRTLPWAHLKAAPFLTYFGLFQVH

SEQ ID NO: 13612 - protein, 330 aa, Homo Sapiens
MAARRSQRRRGRRGEPGTALLVPLALGLGLALACLGLLLAVVSLGSRASLSAQEPAQEELVAEEDQDPSELNPQTEESQDPAPFLNRLVRPRRSAPKGRKTRARRAIAAHYEVHPRPGQDGAQAGVDGTVSGWEEARINSSSPLRYNRQIGEFIVTRAGLYYLYCQSSDALEAWENGERSRKRRAVLTQKQKKQHSVLHLVPINATSKDDSDVTEVMWQPALRRGRGLQAQGYGVRIQDAGVYLLYSQVLFQDVTFTMGQVVSREGQGRQETLFRCIRSMPSHPDRAYNSCYSAGVFHLHQGDILSVIIPRARAKLNLSPHGTFLGFVKL

SEQ ID NO: 13613 - protein, 251 aa, Homo Sapiens
MAEDLGLSFGETASVEMLPEHGSCRPKARSSSARWALTCCLVLLPFLAGLTTYLLVSQLRAQGEACVQFQALKGQEFAPSHQQVYAPLRADGDKPRAHLTVVRQTPTQHFKNQFPALHWEHELGLAFTKNRMNYTNKFLLIPESGDYFIYSQVTFRGMTSECSEIRQAGRPNKPDSITVVITKVTDSYPEPTQLLMGTKSVCEVGSNWFQPIYLGAMFSLQEGDKLMVNVSDISLVDYTKEDKTFFGAFLL

SEQ ID NO: 13614 - protein, 174 aa, Homo Sapiens
MRHFLSKVYSFPMRKLILFLVFPVVRQTPTQHFKNQFPALHWEHELGLAFTKNRMNYTNKFLLIPESGDYFIYSQVTFRGMTSECSEIRQAGRPNKPDSITVVITKVTDSYPEPTQLLMGTKSVCEVGSNWFQPIYLGAMFSLQEGDKLMVNVSDISLVDYTKEDKTFFGAFLL

SEQ ID NO: 13615 - protein, 1299 aa, Homo Sapiens
MSLQEMFRFPMGLLLGSVLLVASAPATLEPPGCSNKEQQVTVSHTYKIDVPKSALVQVDADPQPLSDDGASLLALGEAREEQNIIFRHNIRLQTPQKDCELAGSVQDLLARVKKLEEEMVEMKEQCSAQRCCQGVTDLSRHCSGHGTFSLETCSCHCEEGREGPACERLACPGACSGHGRCVDGRCLCHEPYVGADCGYPACPENCSGHGECVRGVCQCHEDFMSEDCSEKRCPGDCSGHGFCDTGECYCEEGFTGLDCAQVVTPQGLQLLKNTEDSLLVSWEPSSQVDHYLLSYYPLGKELSGKQIQVPKEQHSYEILGLLPGTKYIVTLRNVKNEVSSSPQHLLATTDLAVLGTAWVTDETENSLDVEWENPSTEVDYYKLRYGPMTGQEVAEVTVPKSSDPKSRYDITGLHPGTEYKITVVPMRGELEGKPILLNGRTEIDSPTNVVTDRVTEDTATVSWDPVQAVIDKYVVRYTSADGDTKEMAVHKDESSTVLTGLKPGEAYKVYVWAERGNQGSKKADTNALTEIDSPANLVTDRVTENTATISWDPVQATIDKYVVRYTSADDQETREVLVGKEQSSTVLTGLRPGVEYTVHVWAQKGDRESKKADTNAPTDIDSPKNLVTDRVTENMATVSWDPVQAAIDKYVVRYTSAGGETREVPVGKEQSSTVLTGLRPGMEYMVHVWAQKGDQESKKADTKAQTDIDSPQNLVTDRVTENMATVSWDPVRATIDRYVVRYTSAKDGETREVPVGKEQSSTVLTGLRPGVEYTVHVWAQKGAQESKKADTKAQTDIDSPQNLVTDWVTENTATVSWDPVQATIDRYVVHYTSANGETREVPVGKEQSSTVLTGLRPGMEYTVHVWAQKGNQESKKADTKAQTEIDGPKNLVTDWVTENMATVSWDPVQATIDKYMVRYTSADGETREVPVGKEHSSTVLTGLRPGMEYMVHVWAQKGAQESKKADTKAQTELDPPRNLRPSAVTQSGGILTWTPPSAQIHGYILTYQFPDGTVKEMQLGREDQRFALQGLEQGATYPVSLVAFKGGRRSRNVSTTLSTVGARFPHPSDCSQVQQNSNAASGLYTIYLHGDASRPLQVYCDMETDGGGWIVFQRRNTGQLDFFKRWRSYVEGFGDPMKEFWLGLDKLHNLTTGTPARYEVRVDLQTANESAYAIYDFFQVASSKERYKLTVGKYRGTAGDALTYHNGWKFTTFDRDNDIALSNCALTHHGGWWYKNCHLANPNGRYGETKHSEGVNWEPWKGHEFSIPYVELKIRPHGYSREPVLGRKKRTLRGRLRTF

SEQ ID NO: 13616 - protein, 1122 aa, Homo Sapiens
MSLQEMFRFPMGLLLGSVLLVASAPATLEPPGCSNKEQQVTVSHTYKIDVPKSALVQVDADPQPLSDDGASLLALGEAREEQNIIFRHNIRLQTPQKDCELAGSVQDLLARVKKLEEEMVEMKEQCSAQRCCQGVTDLSRHCSGHGTFSLETCSCHCEEGREGPACERLACPGACSGHGRCVDGRCLCHEPYVGADCGYPACPENCSGHGECVRGVCQCHEDFMSEDCSEKRCPGDCSGHGFCDTGECYCEEGFTGLDCAQVVTPQGLQLLKNTEDSLLVSWEPSSQVDHYLLSYYPLGKELSGKQIQVPKEQHSYEILGLLPGTKYIVTLRNVKNEVSSSPQHLLATTDLAVLGTAWVTDETENSLDVEWENPSTEVDYYKLRYGPMTGQEVAEVTVPKSSDPKSRYDITGLHPGTEYKITVVPMRGELEGKPILLNGRTEIDSPTNVVTDRVTEDTATVSWDPVQAVIDKYVVRYTSADGDTKEMAVHKDESSTVLTGLKPGEAYKVYVWAERGNQGSKKADTNALTDIDSPQNLVTDRVTENMATVSWDPVRATIDRYVVRYTSAKDGETREVPVGKEQSSTVLTGLRPGVEYTVHVWAQKGAQESKKADTKAQTDIDSPQNLVTDWVTENTATVSWDPVQATIDRYVVHYTSANGETREVPVGKEQSSTVLTGLRPGMEYTVHVWAQKGNQESKKADTKAQTEIDGPKNLVTDWVTENMATVSWDPVQATIDKYMVRYTSADGETREVPVGKEHSSTVLTGLRPGMEYMVHVWAQKGAQESKKADTKAQTELDPPRNLRPSAVTQSGGILTWTPPSAQIHGYILTYQFPDGTVKEMQLGREDQRFALQGLEQGATYPVSLVAFKGGRRSRNVSTTLSTVGARFPHPSDCSQVQQNSNAASGLYTIYLHGDASRPLQVYCDMETDGGGWIVFQRRNTGQLDFFKRWRSYVEGFGDPMKEFWLGLDKLHNLTTGTPARYEVRVDLQTANESAYAIYDFFQVASSKERYKLTVGKYRGTAGDALTYHNGWKFTTFDRDNDIALSNCALTHHGGWWYKNCHLANPNGRYGETKHSEGVNWEPWKGHEFSIPYVELKIRPHGYSREPVLGRKKRTLRGRLRTF

SEQ ID NO: 13617 - protein, 1122 aa, Homo Sapiens
MSLQEMFRFPMGLLLGSVLLVASAPATLEPPGCSNKEQQVTVSHTYKIDVPKSALVQVDADPQPLSDDGASLLALGEAREEQNIIFRHNIRLQTPQKDCELAGSVQDLLARVKKLEEEMVEMKEQCSAQRCCQGVTDLSRHCSGHGTFSLETCSCHCEEGREGPACERLACPGACSGHGRCVDGRCLCHEPYVGADCGYPACPENCSGHGECVRGVCQCHEDFMSEDCSEKRCPGDCSGHGFCDTGECYCEEGFTGLDCAQVVTPQGLQLLKNTEDSLLVSWEPSSQVDHYLLSYYPLGKELSGKQIQVPKEQHSYEILGLLPGTKYIVTLRNVKNEVSSSPQHLLATTDLAVLGTAWVTDETENSLDVEWENPSTEVDYYKLRYGPMTGQEVAEVTVPKSSDPKSRYDITGLHPGTEYKITVVPMRGELEGKPILLNGRTEIDSPTNVVTDRVTEDTATVSWDPVQAVIDKYVVRYTSADGDTKEMAVHKDESSTVLTGLKPGEAYKVYVWAERGNQGSKKADTNALTEIDSPANLVTDRVTENTATISWDPVQATIDRYVVRYTSAKDGETREVPVGKEQSSTVLTGLRPGVEYTVHVWAQKGAQESKKADTKAQTDIDSPQNLVTDWVTENTATVSWDPVQATIDRYVVHYTSANGETREVPVGKEQSSTVLTGLRPGMEYTVHVWAQKGNQESKKADTKAQTEIDGPKNLVTDWVTENMATVSWDPVQATIDKYMVRYTSADGETREVPVGKEHSSTVLTGLRPGMEYMVHVWAQKGAQESKKADTKAQTELDPPRNLRPSAVTQSGGILTWTPPSAQIHGYILTYQFPDGTVKEMQLGREDQRFALQGLEQGATYPVSLVAFKGGRRSRNVSTTLSTVGARFPHPSDCSQVQQNSNAASGLYTIYLHGDASRPLQVYCDMETDGGGWIVFQRRNTGQLDFFKRWRSYVEGFGDPMKEFWLGLDKLHNLTTGTPARYEVRVDLQTANESAYAIYDFFQVASSKERYKLTVGKYRGTAGDALTYHNGWKFTTFDRDNDIALSNCALTHHGGWWYKNCHLANPNGRYGETKHSEGVNWEPWKGHEFSIPYVELKIRPHGYSREPVLGRKKRTLRGRLRTF

SEQ ID NO: 13618 - protein, 1358 aa, Homo Sapiens
MGADGETVVLKNMLIGINLILLGSMIKPSECQLEVTTERVQRQSVEEEGGIANYNTSSKEQPVVFNHVYNINVPLDNLCSSGLEASAEQEVSAEDETLAEYMGQTSDHESQVTFTHRINFPKKACPCASSAQVLQELLSRIEMLEREVSVLRDQCNANCCQESAATGQLDYIPHCSGHGNFSFESCGCICNEGWFGKNCSEPYCPLGCSSRGVCVDGQCICDSEYSGDDCSELRCPTDCSSRGLCVDGECVCEEPYTGEDCRELRCPGDCSGKGRCANGTCLCEEGYVGEDCGQRQCLNACSGRGQCEEGLCVCEEGYQGPDCSAVAPPEDLRVAGISDRSIELEWDGPMAVTEYVISYQPTALGGLQLQQRVPGDWSGVTITELEPGLTYNISVYAVISNILSLPITAKVATHLSTPQGLQFKTITETTVEVQWEPFSFSFDGWEISFIPKNNEGGVIAQVPSDVTSFNQTGLKPGEEYIVNVVALKEQARSPPTSASVSTVIDGPTQILVRDVSDTVAFVEWIPPRAKVDFILLKYGLVGGEGGRTTFRLQPPLSQYSVQALRPGSRYEVSVSAVRGTNESDSATTQFTTEIDAPKNLRVGSRTATSLDLEWDNSEAEVQEYKVVYSTLAGEQYHEVLVPRGIGPTTRATLTDLVPGTEYGVGISAVMNSQQSVPATMNARTELDSPRDLMVTASSETSISLIWTKASGPIDHYRITFTPSSGIASEVTVPKDRTSYTLTDLEPGAEYIISVTAERGRQQSLESTVDAFTGFRPISHLHFSHVTSSSVNITWSDPSPPADRLILNYSPRDEEEEMMEVSLDATKRHAVLMGLQPATEYIVNLVAVHGTVTSEPIVGSITTGIDPPKDITISNVTKDSVMVSWSPPVASFDYYRVSYRPTQVGRLDSSVVPNTVTEFTITRLNPATEYEISLNSVRGREESERICTLVHTAMDNPVDLIATNITPTEALLQWKAPVGEVENYVIVLTHFAVAGETILVDGVSEEFRLVDLLPSTHYTATMYATNGPLTSGTISTNFSTLLDPPANLTASEVTRQSALISWQPPRAEIENYVLTYKSTDGSRKELIVDAEDTWIRLEGLLENTDYTVLLQAAQDTTWSSITSTAFTTGGRVFPHPQDCAQHLMNGDTLSGVYPIFLNGELSQKLQVYCDMTTDGGGWIVFQRRQNGQTDFFRKWADYRVGFGNVEDEFWLGLDNIHRITSQGRYELRVDMRDGQEAAFASYDRFSVEDSRNLYKLRIGSYNGTAGDSLSYHQGRPFSTEDRDNDVAVTNCAMSYKGAWWYKNCHRTNLNGKYGESRHSQGINWYHWKGHEFSIPFVEMKMRPYNHRLMAGRKRQSLQF

SEQ ID NO: 13619 - protein, 1358 aa, Homo Sapiens; identical to SEQ ID NO: 13618

SEQ ID NO: 13620 - protein, 181 aa, Homo Sapiens
  misc_feature (1)..(1): Xaa can be any naturally occurring amino acid
XINFPKKACPCASSAQVLQELLSRIEMLEREVSVLRDQCNANCCQESAATVAPPEDLRVAGISDRSIELEWDGPMAVTEYVISYQPTALGGLQLQQRVPGDWSGVTITELEPGLTYNISVYAVISNILSLPITAKVATHLSTPQGLQFKTITETTVEVQWEPFSFSFDGWEISFIPKNNEG

SEQ ID NO: 13621 - protein, 1962 aa, Homo Sapiens
APGKDEEMAPASTEPPTPEPPIKPRLEELTVTDATPDSLSLSWTVPEGQFDHFLVQYKNGDGQPKATRVPGHEDRVTISGLEPDNKYKMNLYGFHGGQRVGPVSAIGVTAAEEETPSPTEPSMEAPEPPEEPLLGELTVTGSSPDSLSLSWTVPQGRFDSFTVQYKDRDGRPQVVRVGGEESEVTVGGLEPGRKYKMHLYGLHEGRRVGPVSTVGVTAPQEDVDETPSPTEPGTEAPGPPEEPLLGELTVTGSSPDSLSLSWTVPQGRFDSFTVQYKDRDGRPQAVRVGGQESKVTVRGLEPGRKYKMHLYGLHEGRRLGPVSAVGVTEDEAETTQAVPTMTPEPPIKPRLGELTMTDATPDSLSLSWTVPEGQFDHFLVQYRNGDGQPKAVRVPGHEDGVTISGLEPDHKYKMNLYGFHGGQRVGPISVIGVTAAEEETPSPTELSTEAPEPPEEPLLGELTVTGSSPDSLSLSWTIPQGHFDSFTVQYKDRDGRPQVMRVRGEESEVTVGGLEPGRKYKMHLYGLHEGRRVGPVSTVGVTEDEAETTQAVPTTTPEPPNKPRLGELTVTDATPDSLSLSWMVPEGQFDHFLVQYRNGDGQPKVVRVPGHEDGVTISGLEPDHKYKMNLYGFHGGQRVGPISVIGVTAAEEETPAPTEPSTEAPEPPEEPLLGELTVTGSSPDSLSLSWTIPQGRFDSFTVQYKDRDGRPQVVRVRGEESEVTVGGLEPGCKYKMHLYGLHEGQRVGPVSAVGVTAPKDEAETTQAVPTMTPEPPIKPRLGELTVTDATPDSLSLSWMVPEGQFDHFLVQYRNGDGQPKAVRVPGHEDGVTISGLEPDHKYKMNLYGFHGGQRVGPVSAIGVTEEETPSPTEPSTEAPEAPEEPLLGELTVTGSSPDSLSLSWTVPQGRFDSFTVQYKDRDGQPQVVRVRGEESEVTVGGLEPGRKYKMHLYGLHEGQRVGPVSTVGITAPLPTPLPVEPRLGELAVAAVTSDSVGLSWTVAQGPFDSFLVQYRDAQGQPQAVPVSGDLRAVAVSGLDPARKYKFLLFGLQNGKRHGPVPVEARTAPDTKPSPRLGELTVTDATPDSVGLSWTVPEGEFDSFVVQYKDKDGRLQVVPVAANQREVTVQGLEPSRKYRFLLYGLSGRKRLGPISADSTTAPLEKELPPHLGELTVAEETSSSLRLSWTVAQGPFDSFVVQYRDTDGQPRAVPVAADQRTVTVEDLEPGKKYKFLLYGLLGGKRLGPVSALGMTAPEEDTPAPELAPEAPEPPEEPRLGVLTVTDTTPDSMRLSWSVAQGPFDSFVVQYEDTNGQPQALLVDGDQSKILISGLEPSTPYRFLLYGLHEGKRLGPLSAEGTTGLAPAGQTSEESRPRLSQLSVTDVTTSSLRLNWEAPPGAFDSFLLRFGVPSPSTLEPHPRPLLQRELMVPGTRHSAVLRDLRSGTLYSLTLYGLRGPHKADSIQGTARTLSPVLESPRDLQFSEIRETSAKVNWMPPPSRADSFKVSYQLADGGEPQSVQVDGQARTQKLQGLIPGARYEVTVVSVRGFEESEPLTGFLTTVPDGPTQLRALNLTEGFAVLHWKPPQNPVDTYDVQVTAPGAPPLQAETPGSAVDYPLHDLVLHTNYTATVRGLRGPNLTSPASITFTTGLEAPRDLEAKEVTPRTALLTWTEPPVRPAGYLLSFHTPGGQNQEILLPGGITSHQLLGLFPSTSYNARLQAMWGQSLLPPVSTSFTTGGLRIPFPRDCGEEMQNGAGASRTSTIFLNGNRERPLNVFCDMETDGGGWLVFQRRMDGQTDFWRDWEDYAHGFGNISGEFWLGNEALHSLTQAGDYSMRVDLRAGDEAVFAQYDSFHVDSAAEYYRLHLEGYHGTAGDSMSYHSGSVFSARDRDPNSLLISCAVSYRGAWWYRNCHYANLNGLYGSTVDHQGVSWYHWKGFEFSVPFTEMKLRPRNFRSPAGGG

SEQ ID NO: 13622 - protein, 8 aa, Homo Sapiens
MMPAQYAL

SEQ ID NO: 13623 - protein, 4244 aa, Homo Sapiens
MMPAQYALTSSLVLLVLLSTARAGPFSSRSNVTLPAPRPPPQPGGHTVGAGVGSPSSQLYEHTVEGGEKQVVFTHRINLPPSTGCGCPPGTEPPVLASEVQALRVRLEILEELVKGLKEQCTGGCCPASAQAGTGQTDVRTLCSLHGVFDLSRCTCSCEPGWGGPTCSDPTDAEIPPSSPPSASGSCPDDCNDQGRCVRGRCVCFPGYTGPSCGWPSCPGDCQGRGRCVQGVCVCRAGFSGPDCSQRSCPRGCSQRGRCEGGRCVCDPGYTGDDCGMRSCPRGCSQRGRCENGRCVCNPGYTGEDCGVRSCPRGCSQRGRCKDGRCVCDPGYTGEDCGTRSCPWDCGEGGRCVDGRCVCWPGYTGEDCSTRTCPRDCRGRGRCEDGECICDTGYSGDDCGVRSCPGDCNQRGRCEDGRCVCWPGYTGTDCGSRACPRDCRGRGRCENGVCVCNAGYSGEDCGVRSCPGDCRGRGRCESGRCMCWPGYTGRDCGTRACPGDCRGRGRCVDGRCVCNPGFTGEDCGSRRCPGDCRGHGLCEDGVCVCDAGYSGEDCSTRSCPGGCRGRGQCLDGRCVCEDGYSGEDCGVRQCPNDCSQHGVCQDGVCICWEGYVSEDCSIRTCPSNCHGRGRCEEGRCLCDPGYTGPTCATRMCPADCRGRGRCVQGVCLCHVGYGGEDCGQEEPPASACPGGCGPRELCRAGQCVCVEGFRGPDCAIQTCPGDCRGRGECHDGSCVCKDGYAGEDCGEEVPTIEGMRMHLLEETTVRTEWTPAPGPVDAYEIQFIPTTEGASPPFTARVPSSASAYDQRGLAPGQEYQVTVRALRGTSWGLPASKTITTMIDGPQDLRVVAVTPTTLELGWLRPQAEVDRFVVSYVSAGNQRVRLEVPPEADGTLLTDLMPGVEYVVTVTAERGRAVSYPASVRANTGSSPLGLLGTTDEPPPSGPSTTQGAQAPLLQQRPQELGELRVLGRDETGRLRVVWTAQPDTFAYFQLRMRVPEGPGAHEEVLPGDVRQALVPPPPPGTPYELSLHGVPPGGKPSDPIIYQGIMDKDEEKPGKSSGPPRLGELTVTDRTSDSLLLRWTVPEGEFDSFVIQYKDRDGQPQVVPVEGPQRSAVITSLDPGRKYKFVLYGFVGKKRHGPLVAEAKILPQSDPSPGTPPHLGNLWVTDPTPDSLHLSWTVPEGQFDTFMVQYRDRDGRPQVVPVEGPERSFVVSSLDPDHKYRFTLFGIANKKRYGPLTADGTTAPERKEEPPRPEFLEQPLLGELTVTGVTPDSLRLSWTVAQGPFDSFMVQYKDAQGQPQAVPVAGDENEVTVPGLDPDRKYKMNLYGLRGRQRVGPESVVAKTAPQEDVDETPSPTELGTEAPESPEEPLLGELTVTGSSPDSLSLFWTVPQGSFDSFTVQYKDRDGRPRAVRVGGKESEVTVGGLEPGHKYKMHLYGLHEGQRVGPVSAVGVTAPQQEETPPATESPLEPRLGELTVTDVTPNSVGLSWTVPEGQFDSFIVQYKDKDGQPQVVPVAADQREVTVYNLEPERKYKMNMYGLHDGQRMGPLSVVIVTAPLPPAPATEASKPPLEPRLGELTVTDITPDSVGLSWTVPEGEFDSFVVQYKDRDGQPQVVPVAADQREVTIPDLEPSRKYKFLLFGIQDGKRRSPVSVEAKTVARGDASPGAPPRLGELWVTDPTPDSLRLSWTVPEGQFDSFVVQFKDKDGPQVVPVEGHERSVTVTPLDAGRKYRFLLYGLLGKKRHGPLTADGTTEARSAMDDTGTKRPPKPRLGEELQVTTVTQNSVGLSWTVPEGQFDSFVVQYKDRDGQPQVVPVEGSLREVSVPGLDPAHRYKLLLYGLHHGKRVGPISAVAITAGREETETETTAPTPPAPEPHLGELTVEEATSHTLHLSWMVTEGEFDSFEIQYTDRDGQLQMVRIGGDRNDITLSGLESDHRYLVTLYGFSDGKHVGPVHVEALTVPEEEKPSEPPTATPEPPIKPRLGELTVTDATPDSLSLSWTVPEGQFDHFLVQYRNGDGQPKAVRVPGHEEGVTISGLEPDHKYKMNLYGFHGGQRMGPVSVVGVTAAEEETPSPTEPSMEAPEPAEEPLLGELTVTGSSPDSLSLSWTVPQGRFDSFTVQYKDRDGRPQVVRVGGEESEVTVGGLEPGRKYKMHLYGLHEGRRVGPVSAVGVTAPEEESPDAPLAKLRLGQMTVRDITSDSLSLSWTVPEGQFDHFLVQFKNGDGQPKAVRVPGHEDGVTISGLEPDHKYKMNLYGFHGGQRVGPVSAVGLTAPGKDEEMAPASTEPPTPEPPIKPRLEELTVTDATPDSLSLSWTVPEGQFDHFLVQYKNGDGQPKATRVPGHEDRVTISGLEPDNKYKMNLYGFHGGQRVGPVSAIGVTAAEEETPSPTEPSMEAPEPPEEPLLGELTVTGSSPDSLSLSWTVPQGRFDSFTVQYKDRDGRPQVVRVGGEESEVTVGGLEPGRKYKMHLYGLHEGRRVGPVSTVGVTAPQEDVDETPSPTEPGTEAPGPPEEPLLGELTVTGSSPDSLSLSWTVPQGRFDSFTVQYKDRDGRPQAVRVGGQESKVTVRGLEPGRKYKMHLYGLHEGRRLGPVSAVGVTEDEAETTQAVPTMTPEPPIKPRLGELTMTDATPDSLSLSWTVPEGQFDHFLVQYRNGDGQPKAVRVPGHEDGVTISGLEPDHKYKMNLYGFHGGQRVGPISVIGVTAAEEETPSPTELSTEAPEPPEEPLLGELTVTGSSPDSLSLSWTIPQGHFDSFTVQYKDRDGRPQVMRVRGEESEVTVGGLEPGRKYKMHLYGLHEGRRVGPVSTVGVTAPEDEAETTQAVPTTTPEPPNKPRLGELTVTDATPDSLSLSWMVPEGQFDHFLVQYRNGDGQPKVVRVPGHEDGVTISGLEPDHKYKMNLYGFHGGQRVGPISVIGVTAAEEETPAPTEPSTEAPEPPEEPLLGELTVTGSSPDSLSLSWTIPQGRFDSFTVQYKDRDGRPQVVRVRGEESEVTVGGLEPGCKYKMHLYGLHEGQRVGPVSAVGVTAPKDEAETTQAVPTMTPEPPIKPRLGELTVTDATPDSLSLSWMVPEGQFDHFLVQYRNGDGQPKAVRVPGHEDGVTISGLEPDHKYKMNLYGFHGGQRVGPVSAIGVTEEETPSPTEPSTEAPEAPEEPLLGELTVTGSSPDSLSLSWTVPQGRFDSFTVQYKDRDGQPQVVRVRGEESEVTVGGLEPGRKYKMHLYGLHEGQRVGPVSTVGITAPLPTPLPVEPRLGELAVAAVTSDSVGLSWTVAQGPFDSFLVQYRDAQGQPQAVPVSGDLRAVAVSGLDPARKYKFLLFGLQNGKRHGPVPVEARTAPDTKPSPRLGELTVTDATPDSVGLSWTVPEGEFDSFVVQYKDKDGRLQVVPVAANQREVTVQGLEPSRKYRFLLYGLSGRKRLGPISADSTTAPLEKELPPHLGELTVAEETSSSLRLSWTVAQGPFDSFVVQYRDTDGQPRAVPVAADQRTVTVEDLEPGKKYKFLLYGLLGGKRLGPVSALGMTAPEEDTPAPELAPEAPEPPEEPRLGVLTVTDTTPDSMRLSWSVAQGPFDSFVVQYEDTNGQPQALLVDGDQSKILISGLEPSTPYRFLLYGLHEGKRLGPLSAEGTTGLAPAGQTSEESRPRLSQLSVTDVTTSSLRLNWEAPPGAFDSFLLRFGVPSPSTLEPHPRPLLQRELMVPGTRHSAVLRDLRSGTLYSLTLYGLRGPHKADSIQGTARTLSPVLESPRDLQFSEIRETSAKVNWMPPPSRADSFKVSYQLADGGEPQSVQVDGQARTQKLQGLIPGARYEVTVVSVRGFEESEPLTGFLTTVPDGPTQLRALNLTEGFAVLHWKPPQNPVDTYDVQVTAPGAPPLQAETPGSAVDYPLHDLVLHTNYTATVRGLRGPNLTSPASITFTTGLEAPRDLEAKEVTPRTALLTWTEPPVRPAGYLLSFHTPGGQNQEILLPGGITSHQLLGLFPSTSYNARLQAMWGQSLLPPVSTSFTTGGLRIPFPRDCGEEMQNGAGASRTSTIFLNGNRERPLNVFCDMETDGGGWLVFQRRMDGQTDFWRDWEDYAHGFGNISGEFWLGNEALHSLTQAGDYSMRVDLRAGDEAVFAQYDSFHVDSAAEYYRLHLEGYHGTAGDSMSYHSGSVFSARDRDPNSLLISCAVSYRGAWWYRNCHYANLNGLYGSTVDHQGVSWYHWKGFEFSVPFTEMKLRPRNFRSPAGGG

SEQ ID NO: 13624 - protein, 842 aa, Homo Sapiens
MMPAQYALTSSLVLLVLLSTARAGPFSSRSNVTLPAPRPPPQPGGHTVGAGVGSPSSQLYEHTVEGGEKQVVFTHRINLPPSTGCGCPPGTEPPVLASEVQALRVRLEILEELVKGLKEQCTGGCCPASAQAGTGQTDVRTLCSLHGVFDLSRCTCSCEPGWGGPTCSDPTDAEIPPSSPPSASGSCPDDCNDQGRCVRGRCVCFPGYTGPSCGWPSCPGDCQGRGRCVQGVCVCRAGFSGPDCSQRSCPRGCSQRGRCEGGRCVCDPGYTGDDCGMRSCPRGCSQRGRCENGRCVCNPGYTGEDCGVRSCPRGCSQRGRCKDGRCVCDPGYTGEDCGTRSCPWDCGEGGRCVDGRCVCWPGYTGEDCSTRTCPRDCRGRGRCEDGECICDTGYSGDDCGVRSCPGDCNQRGRCEDGRCVCWPGYTGTDCGSRACPRDCRGRGRCENGVCVCNAGYSGEDCGVRSCPGDCRGRGRCESGRCMCWPGYTGRDCGTRACPGDCRGRGRCVDGRCVCNPGFTGEDCGSRRCPGDCRGHGLCEDGVCVCDAGYSGEDCSTRSCPGGCRGRGQCLDGRCVCEDGYSGEDCGVRQCPNDCSQHGVCQDGVCICWEGYVSEDCSIRTCPSNCHGRGRCEEGRCLCDPGYTGPTCATRMCPADCRGRGRCVQGVCLCHVGYGGEDCGQEEPPASACPGGCGPRELCRAGQCVCVEGFRGPDCAIQTCPGDCRGRGECHDGSCVCKDGYAGEDCGEEVPTIEGMRMHLLEETTVRTEWTPAPGPVDAYEIQFIPTASPLLCSASPHSPAKAEAEISTSWRNQDSLNFFFCLNIFFCCCYKNTLITRQEFGN

SEQ ID NO: 13625 - protein, 4244 aa, Homo Sapiens; identical to SEQ ID NO: 13623

SEQ ID NO: 13626 - protein, 1545 aa, Homo Sapiens
MMPAQYALTSSLVLLVLLSTARAGPFSSRSNVTLPAPRPPPQPGGHTVGAGVGSPSSQLYEHTVEGGEKQVVFTHRINLPPSTGCGCPPGTEPPVLASEVQALRVRLEILEELVKGLKEQCTGGCCPASAQAGTGQTDVRTLCSLHGVFDLSRCTCSCEPGWGGPTCSDPTDAEIPPSSPPSASGSCPDDCNDQGRCVRGRCVCFPGYTGPSCGWPSCPGDCQGRGRCVQGVCVCRAGFSGPDCSQRSCPRGCSQRGRCEGGRCVCDPGYTGDDCGMRSCPRGCSQRGRCENGRCVCNPGYTGEDCGVRSCPRGCSQRGRCKDGRCVCDPGYTGEDCGTRSCPWDCGEGGRCVDGRCVCWPGYTGEDCSTRTCPRDCRGRGRCEDGECICDTGYSGDDCGVRSCPGDCNQRGRCEDGRCVCWPGYTGTDCGSRACPRDCRGRGRCENGVCVCNAGYSGEDCGVRSCPGDCRGRGRCESGRCMCWPGYTGRDCGTRACPGDCRGRGRCVDGRCVCNPGFTGEDCGSRRCPGDCRGHGLCEDGVCVCDAGYSGEDCSTRSCPGGCRGRGQCLDGRCVCEDGYSGEDCGVRQCPNDCSQHGVCQDGVCICWEGYVSEDCSIRTCPSNCHGRGRCEEGRCLCDPGYTGPTCATRMCPADCRGRGRCVQGVCLCHVGYGGEDCGQEEPPASACPGGCGPRELCRAGQCVCVEGFRGPDCAIQTCPGDCRGRGECHDGSCVCKDGYAGEDCGEARVPSSASAYDQRGLAPGQEYQVTVRALRGTSWGLPASKTITTMIDGPQDLRVVAVTPTTLELGWLRPQAEVDRFVVSYVSAGNQRVRLEVPPEADGTLLTDLMPGVEYVVTVTAERGRAVSYPASVRANTEEREEESPPRPSLSQPPRRPWGNLTAELSRFRGTVQDLERHLRAHGYPLRANQTYTSVARHIHEYLQRQVLGSSADGALLVSLDGLRGQFERVVLRWRPQPPAEGPGGELTVPGTTRTVSLPDLRPGTTYHVEVHGVRAGQTSKSYAFITTTGPSTTQGAQAPLLQQRPQELGELRVLGRDETGRLRVVWTAQPDTFAYFQLRMRVPEGPGAHEEVLPGDVRQALVPPPPPGTPYELSLHGVPPGGKPSDPIIYQGIMDKDEEKPGKSSGPPRLGELTVTDRTSDSLLLRWTVPEGEFDSFVIQYKDRDGQPQVVPVEGPQRSAVITSLDPGRKYKFVLYGFVGKKRHGPLVAEAKILPQSDPSPGTPPHLGNLWVTDPTPDSLHLSWTVPEGQFDTFMVQYRDRDGRPQVVPVEGPERSFVVSSLDPDHKYRFTLFGIANKKRYGPLTADGTTAPERKEEPPRPEFLEQPLLGELTVTGVTPDSLRLSWTVAQGPFDSFMVQYKDAQGQPQAVPVAGDENEVTVPGLDPDRKYKMNLYGLRGRQRVGPESVVAKTAPQEDVDETPSPTELGTEAPESPEEPLLGELTVTGSSPDSLSLFWTVPQGSFDSFTVQYKDRDGRPRAVRVGGKESEVTVGGLEPGHKYKMHLYGLHEGQRVGPVSAVGVT

SEQ ID NO: 13627 - protein, 673 aa, Homo Sapiens
MRLSWSVAQGPFDSFVVQYEDTNGQPQALLVDGDQSKILISGLEPSTPYRFLLYGLHEGKRLGPLSAEGTTGLAPAGQTSEESRPRLSQLSVTDVTTSSLRLNWEAPPGAFDSFLLRFGVPSPSTLEPHPRPLLQRELMVPGTRHSAVLRDLRSGTLYSLTLYGLRGPHKADSIQGTARTLSPVLESPRDLQFSEIRETSAKVNWMPPPSRADSFKVSYQLADGGEPQSVQVDGQARTQKLQGLIPGARYEVTVVSVRGFEESEPLTGFLTTVPDGPTQLRALNLTEGFAVLHWKPPQNPVDTYDVQVTAPGAPPLQAETPGSAVDYPLHDLVLHTNYTATVRGLRGPNLTSPASITFTTGLEAPRDLEAKEVTPRTALLTWTEPPVRPAGYLLSFHTPGGQNQEILLPGGITSHQLLGLFPSTSYNARLQAMWGQSLLPPVSTSFTTGGLRIPFPRDCGEEMQNGAGASRTSTIFLNGNRERPLNVFCDMETDGGGWLVFQRRMDGQTDFWRDWEDYAHGFGNISGEFWLGNEALHSLTQAGDYSMRVDLRAGDEAVFAQYDSFHVDSAAEYYRLHLEGYHGTAGDSMSYHSGSVFSARDRDPNSLLISCAVSYRGAWWYRNCHYANLNGLYGSTVDHQGVSWYHWKGFEFSVPFTEMKLRPRNFRSPAGGG

SEQ ID NO: 13628 - protein, 1720 aa, Homo Sapiens
MAAAPSALLLLPPFPVLSTYRLQSRSRPSAPETDDSRVGGIMRGEKNYYFRGAAGDHGSCPTTTSPLASALLMPSEAVSSSWSESGGGLSGGDEEDTRLLQLLRTARDPSEAFQALQAALPRRGGRLGFPRRKEALYRALGRVLVEGGSDEKRLCLQLLSDVLRGQGEAGQLEEAFSLALLPQLVVSLREENPALRKDALQILHICLKRSPGEVLRTLIQQGLESTDARLRASTALLLPILLTTEDLLLGLDLTEVIISLARKLGDQETEEESETAFSALQQIGERLGQDRFQSYISRLPSALRRHYNRRLESQFGSQVPYYLELEASGFPEDPLPCAVTLSNSNLKFGIIPQELHSRLLDQEDYKNRTQAVEELKQVLGKFNPSSTPHSSLVGFISLLYNLLDDSNFKVVHGTLEVLHLLVIRLGEQVQQFLGPVIAASVKVLADNKLVIKQEYMKIFLKLMKEVGPQQVLCLLLEHLKHKHSRVREEVVNICICSLLTYPSEDFDLPKLSFDLAPALVDSKRRVRQAALEAFAVLASSMGSGKTSILFKAVDTVELQDNGDGVMNAVQARLARKTLPRLTEQGFVEYAVLMPSSAGGRSNHLAHGADTDWLLAGNRTQSAHCHCGDHVRDSMHIYGSYSPTICTRRVLSAGKGKNKLPWENEQPGIMGENQTSTSKDIEQFSTYDFIPSAKLKLSQGMPVNDDLCFSRKRVSRNLFQNSRDFNPDCLPLCAAGTTGTHQTNLSGKCAQLGFSQICGKTGSVGSDLQFLGTTSSHQEKVYASLNFGSKTQQTFGSQTECTSSNGQNPSPGAYILPSYPVSSPRTSPKHTSPLIISPKKSQDNSVNFSNSWPLKSFEGLSKPSPQKKLVSQKSSDPTGRNHGENSQEKPPVQLTPALVRSPSSRRGLNGTKPVPPIPRGISLLPDKADLSTVGHKKKEPDDIWKCEKDSLPIDLSELNFKDKDLDQEEMHSSLRSLRNSAAKKRAKLSGSTSDLESPDSAMKLDLTMDSPSLSSSPNINSYSESGVYSQESLTSSLSTTPQGKRIMSDIFPTFGSKPCPTRLSSAKKKISHIAEQSPSAGSSSNPQQISSFDFTTTKALSEDSVVVVGKGVFGSLSSAPATCSQSVISSVENGDTFSIKQSIEPPSGIYGRSVQQNISSYLDVENEKDAKVSISKSTYNKMRQKRKEEKELFHNKDCEKKEKNSWERMRHTGTEKMASESETPTGAISQYKERMPSVTHSPEIMDLSELRPFSKPEIALTEALRLLADEDWEKKIEGLNFIRCLAAFHSEILNTKLHETNFAVVQEVKNLRSGVSRAAVVCLSDLFTYLKKSMDQELDTTVKVLLHKAGESNTFIREDVDKALRAMVNNVTPARAVVSLINGGQRYYGRKMLFFMMCHPNFEKMLEKYVPSKDLPYIKDSVRNLQQKGLGEIPLDTPSAKGRRSHTGSVGNTRSSSVSRDAFNSAERAVTEVREVTRKSVPRNSLESAEYLKLITGLLNAKDFRDRINGIKQLLSDTENNQDLVVGNIVKIFDAFKSRLHDSNSKVNLVALETMHKMIPLLRDHLSPIINMLIPAIVDNNLNSKNPGIYAAATNVVQALSQHVDNYLLLQPFCTKAQFLNGKAKQDMTEKLADIVTELYQRKPHATEQKVLVVLWHLLGNMTNSGSLPGAGGNIRTATAKLSKALFAQMGQNLLNQAASQPPHIKKSLEELLDMTILNEL

SEQ ID NO: 13629 - protein, 1773 aa, Homo Sapiens
MAAAPSALLLLPPFPVLSTYRLQSRSRPSAPETDDSRVGGIMRGEKNYYFRGAAGDHGSCPTTTSPLASALLMPSEAVSSSWSESGGGLSGGDEEDTRLLQLLRTARDPSEAFQALQAALPRRGGRLGFPRRKEALYRALGRVLVEGGSDEKRLCLQLLSDVLRGQGEAGQLEEAFSLALLPQLVVSLREENPALRKDALQILHICLKRSPGEVLRTLIQQGLESTDARLRASTALLLPILLTTEDLLLGLDLTEVIISLARKLGDQETEEESETAFSALQQIGERLGQDRFQSYISRLPSALRRHYNRRLESQFGSQVPYYLELEASGFPEDPLPCAVTLSNSNLKFGIIPQELHSRLLDQEDYKNRTQAVEELKQVLGKFNPSSTPHSSLVGFISLLYNLLDDSNFKVVHGTLEVLHLLVIRLGEQVQQFLGPVIAASVKVLADNKLVIKQEYMKIFLKLMKEVGPQQVLCLLLEHLKHKHSRVREEVVNICICSLLTYPSEDFDLPKLSFDLAPALVDSKRRVRQAALEAFAVLASSMGSGKTSILFKAVDTVELQDNGDGVMNAVQARLARKTLPRLTEQGFVEYAVLMPSSAGGRSNHLAHGADTDWLLAGNRTQSAHCHCGDHVRDSMHIYGSYSPTICTRRVLSAGKGKNKLPWENEQPGIMGENQTSTSKDIEQFSTYDFIPSAKLKLSQGMPVNDDLCFSRKRVSRNLFQNSRDFNPDCLPLCAAGTTGTHQTNLSGKCAQLGFSQICGKTGSVGSDLQFLGTTSSHQEKVYASLNFGSKTQQTFGSQTECTSSNGQNPSPGAYILPSYPVSSPRTSPKHTSPLIISPKKSQDNSVNFSNSWPLKSFEGLSKPSPQKKLVSQKSSDPTGRNHGENSQEKPPVQLTPALVRSPSSRRGLNGTKPVPPIPRGISLLPDKADLSTVGHKKKEPDDIWKCEKDSLPIDLSELNFKDKDLDQEEMHSSLRSLRNSAAKKRAKLSGSTSDLESPDSAMKLDLTMDSPSLSSSPNINSYSESGVYSQESLTSSLSTTPQGKRIMSDIFPTFGSKPCPTRLSSAKKKISHIAEQSPSAGSSSNPQQISSFDFTTTKALSEDSVVVVGKGVFGSLSSAPATCSQSVISSVENGDTFSIKQSIEPPSGIYGRSVQQNISSYLDVENEKDAKVSISKSTYNKMRQKRKEEKELFHNKDCEKKEKNSWERMRHTGTEKMASESETPTGAISQYKERMPSVTHSPEIMDLSELRPFSKPEIALTEALRLLADEDWEKKIEGLNFIRCLAAFHSEILNTKLHETNFAVVQEVKNLRSGVSRAAVVCLSDLFTYLKKSMDQELDTTVKVLLHKAGESNTFIREDVDKALRAMVNNVTPARAVVSLINGGQSHLHIAVRRCTAQHLSDVLEFMEPERILSAAKDMAERILPAAAKFAQDSSQETRYYGRKMLFFMMCHPNFEKMLEKYVPSKDLPYIKDSVRNLQQKGLGEIPLDTPSAKGRRSHTGSVGNTRSSSVSRDAFNSAERAVTEVREVTRKSVPRNSLESAEYLKLITGLLNAKDFRDRINGIKQLLSDTENNQDLVVGNIVKIFDAFKSRLHDSNSKVNLVALETMHKMIPLLRDHLSPIINMLIPAIVDNNLNSKNPGIYAAATNVVQALSQHVDNYLLLQPFCTKAQFLNGKAKQDMTEKLADIVTELYQRKPHATEQKVLVVLWHLLGNMTNSGSLPGAGGNIRTATAKLSKALFAQMGQNLLNQAASQPPHIKKSLEELLDMTILNEL

SEQ ID NO: 13630 - protein, 995 aa, Homo Sapiens
MAAAPSALLLLPPFPVLSTYRLQSRSRPSAPETDDSRVGGIMRGEKNYYFRGAAGDHGSCPTTTSPLASALLMPSEAVSSSWSESGGGLSGGDEEDTRLLQLLRTARDPSEAFQALQAALPRRGGRLGFPRRKEALYRALGRVLVEGGSDEKRLCLQLLSDVLRGQGEAGQLEEAFSLALLPQLVVSLREENPALRKDALQILHICLKRSPGEVLRTLIQQGLESTDARLRASTALLLPILLTTEDLLLGLDLTEVIISLARKLGDQETEEESETAFSALQQIGERLGQDRFQSYISRLPSALRRHYNRRLESQFGSQVPYYLELEASGFPEDPLPCAVTLSNSNLKFGIIPQELHSRLLDQEDYKNRTQAVEELKQVLGKFNPSSTPHSSLVGFISLLYNLLDDSNFKVVHGTLEVLHLLVIRLGEQVQQFLGPVIAASVKVLADNKLVIKQEYMKIFLKLMKEVGPQQVLCLLLEHLKHKHSRVREEVVNICICSLLTYPSEDFDLPKLSFDLAPALVDSKRRVRQAALEAFAVLASSMGSGKTSILFKAVDTVELQDNGDGVMNAVQARLARKTLPRLTEQGFVEYAVLMPSSAGGRSNHLAHGADTDWLLAGNRTQSAHCHCGDHVRDSMHIYGSYSPTICTRRVLSAGKGKNKLPWENEQPGIMGENQTSTSKDIEQFSTYDFIPSAKLKLSQGMPVNDDLCFSRKRVSRNLFQNSRDFNPDCLPLCAAGTTGTHQTNLSGKCAQLGFSQICGKTGSVGSDLQFLGTTSSHQEKVYASLNFGSKTQQTFGSQTECTSSNGQNPSPGAYILPSYPVSSPRTSPKHTSPLIISPKKSQDNSVNFSNSWPLKSFEGLSKPSPQKKLVSQKSSDPTGRNHGENSQEKPPVQLTPALVRSPSSRRGLNGTKPVPPIPRGISLLPDKADLSTVGHKKKEPDDIWKCEKDSLPIDLSELNFKDKDLDQEEVRHISNIWVKTLSNKTFFCKEKNFSYC

SEQ ID NO: 13631 - protein, 174 aa, Homo Sapiens
MFSTYDFIPSAKLKLSQGMPVNDDLCFSRKRVSRNLFQNSRDFNPDCLPLCAAGTTGTHQTNLSGKCAQLGFSQICGKTGSVGSDLQFLGTTSSHQEKVYASLNFGSKTQQTFGSQTECTSSNGQNPSPGAYILPSYPVSSPRTSPKHTSPLIISPKKSQDNSVNFSNSWPLKS

SEQ ID NO: 13632 - protein, 155 aa, Homo Sapiens
SRLHDSNSKVNLVALETMHKMIPLLRDHLSPIINMLIPAIVDNNLNSKNPGIYAAATNVVQALSQHVDIVTELYQRKPHATEQKVLVVLWHLLGNMTNSGSLPGAGGNIRTATAKLSKALFAQMGQNLLNQAASQPPHIKKSLEELLDMTILNEL

SEQ ID NO: 13633 - protein, 160 aa, Homo Sapiens
  misc_feature (1)..(1): Xaa can be any naturally occurring amino acid
XFSRKRVSRNLFQNSRDFNPDCLPLCAAGTTGTHQTNLSGKCAQLGFSQICGKTGSVGSDLQFLGTTSSHQEKGENSQEKPPVQLTPALVRSPSSRRGLNGTKPVPPIPRGISLLPDKADLSTVGHKKKEPDDIWKCEKDSLPIDLSELNFKDKDLDQEE

SEQ ID NO: 13634 - protein, 51 aa, Homo Sapiens
MIIIIVVGCLCFLTCTMKGLDDFYYCPHFTGFKRGADPGMPEPTVLSLLWG

SEQ ID NO: 13635 - protein, 55 aa, Homo Sapiens [sequence omitted]

SEQ ID NO: 13636 - protein, 125 aa, Homo Sapiens
MVKLSKEAKQRLQQLFKGSQFAIRWGFIPLVIYLGFKRGADPGMPEPTVLRVWWLTPVISALWKAKVGRSWEDCLKLGVQDQPGQRSETHLYQKKKTYFGDKGLFGLLDLEAISGQHGRCVLWLG

SEQ ID NO: 13637 - protein, 55 aa, Homo Sapiens
MVKLSKEAKQRLQQLFKGSQFAIRWGFIPLVIYLGFKRGADPGMPEPTVLSLLWG

SEQ ID NO: 13638 - protein, 49 aa, Homo Sapiens
ATFYGRMLDHEYTTKEVFRKNFFNDWRKAPLLDPLLWPDATPLPFTTAL

SEQ ID NO: 13639 - protein, 164 aa, Homo Sapiens
MKSHPRKKAKNSQKGPFRNVCCTCFPLSDPSETSCCSEDTHPSRPGPPGPQQHYLAGVTCRSPGSGRWEKEKHEDGVKWRQLEHKGPYFAPPYEPLPDGVRFFYEGRPVRLSVAAEEVATFYGRMLDHEYTTKEVFRKNFFNDWRKEMAVEEREVIKSLDKCDF

SEQ ID NO: 13640 - protein, 134 aa, Homo Sapiens
MKSHPRKKAKWEKEKHEDGVKWRQLEHKGPYFAPPYEPLPDGVRFFYEGRPVRLSVAAEEVATFYGRMLDHEYTTKEVFRKNFFNDWRKEMAVEEREVIKSLDKCDFTEIHRYFVDKAAARKVLSREEKQKLKE

SEQ ID NO: 13641 - protein, 33 aa, Homo Sapiens
MLDHEYTTKEVFRKNFFNDWRKEMAVEEREVIK

SEQ ID NO: 13642 - protein, 201 aa, Homo Sapiens
MLDHEYTTKEVFRKNFFNDWRKEMAVEEREVIKSLDKCDFTEIHRYFVDKAAARKVLSREEKQKLKEEAEKLQQEFGYCILDGHQEKIGNFKIEPPGLFRGRGDHPKMGMLKRRITPEDVVINCSRDSKIPEPPAGHQWKEVRSDNTVTWLAAWTESVQNSIKYIMLNPCSKLKGETAWQKFETARRLRGFVDEIRSQYRA

SEQ ID NO: 13643 - protein, 221 aa, Homo Sapiens
MLDHEYTTKEVFRKNFFNDWRKEMAVEEREVIKSLDKCDFTEIHRYFVDKAAARKVLSREEKQKLKEEAEKLQQEFGYCILDGHQEKIGNFKIEPPGLFRGRGDHPKMGMLKRRITPEDVVINCSRDSKIPEPPAGHQWKEVRSDNTVTWLAAWTESVQNSIKYIMLNPCSKLKGETAWQKFETARRLRGFVDEIRSQYRADWKSREMKTRQRAVALYFID

SEQ ID NO: 13644 - protein, 376 aa, Homo Sapiens
MLDHEYTTKEVFRKNFFNDWRKEMAVEEREVIKSLDKCDFTEIHRYFVDKAAARKVLSREEKQKLKEEAEKLQQEFGYCILDGHQEKIGNFKIEPPGLFRGRGDHPKMGMLKRRITPEDVVINCSRDSKIPEPPAGHQWKEVRSDNTVTWLAAWTESVQNSIKYIMLNPCSKLKGETAWQKFETARRLRGFVDEIRSQYRADWKSREMKTRQRAVALYFIDKLALRAGNEKEDGEAADTVGCCSLRVEHVQLHPEADGCQHVVEFDFLGKDCIRYYNRVPVEKPVYKNLQLFMENKDPRDDLFDRLTVSWDGPAKPRNYRDHFPPQTTSLNKHLQELMDGLTAKVFRTYNASITLQEQLRALTRAEDSIAAKILSY

SEQ ID NO: 13645 - protein, 503 aa, Homo Sapiens
MLDHEYTTKEVFRKNFFNDWRKEMAVEEREVIKSLDKCDFTEIHRYFVDKAAARKVLSREEKQKLKEEAEKLQQEFGYCILDGHQEKIGNFKIEPPGLFRGRGDHPKMGMLKRRITPEDVVINCSRDSKIPEPPAGHQWKEVRSDNTVTWLAAWTESVQNSIKYIMLNPCSKLKGETAWQKFETARRLRGFVDEIRSQYRADWKSREMKTRQRAVALYFIDKLALRAGNEKEDGEAADTVGCCSLRVEHVQLHPEADGCQHVVEFDFLGKDCIRYYNRVPVEKPVYKNLQLFMENKDPRDDLFDRLTTTSLNKHLQELMDGLTAKVFRTYNASITLQEQLRALTRAEDSIAAKILSYNRANRVVAILCNHQRATPSTFEKSMQNLQTKIQAKKEQVAEARAELRRARAEHKAQGDGKSRSVLEKKRRLLEKLQEQLAQLSVQATDKEENKQVALGTSKLNYLDPRISIAWCKRFRVPVEKIYSKTQRERFAWALAMAGEDFEF

SEQ ID NO: 13646 - protein, 503 aa, Homo Sapiens; identical to SEQ ID NO: 13645

SEQ ID NO: 13647 - protein, 503 aa, Homo Sapiens; identical to SEQ ID NO: 13645

SEQ ID NO: 13648 - protein, 164 aa, Homo Sapiens
MRVVRLLRLRAALTLLGEVPRRPASRGVPGSRRTQKGSGARNSQKGPFRNVCCTCFPLSDPSETSCCSEDTHPSRPGPPGPQQHYLAGVTCRSPGSGRWEKEKHEDGVKWRQLEHKGPYFAPPYEPLPDGVRFFYEGRPVRLSVAAEEVATFYGRMLDHEYTTK

SEQ ID NO: 13649 - protein, 601 aa, Homo Sapiens
MRVVRLLRLRAALTLLGEVPRRPASRGVPGSRRTQKGSGARWEKEKHEDGVKWRQLEHKGPYFAPPYEPLPDGVRFFYEGRPVRLSVAAEEVATFYGRMLDHEYTTKEVFRKNFFNDWRKEMAVEEREVIKSLDKCDFTEIHRYFVDKAAARKVLSREEKQKLKEEAEKLQQEFGYCILDGHQEKIGNFKIEPPGLFRGRGDHPKMGMLKRRITPEDVVINCSRDSKIPEPPAGHQWKEVRSDNTVTWLAAWTESVQNSIKYIMLNPCSKLKGETAWQKFETARRLRGFVDEIRSQYRADWKSREMKTRQRAVALYFIDKLALRAGNEKEDGEAADTVGCCSLRVEHVQLHPEADGCQHVVEFDFLGKDCIRYYNRVPVEKPVYKNLQLFMENKDPRDDLFDRLTTTSLNKHLQELMDGLTAKVFRTYNASITLQEQLRALTRAEDSIAAKILSYNRANRVVAILCNHQRATPSTFEKSMQNLQTKIQAKKEQVAEARAELRRARAEHKAQGDGKSRSVLEKKRRLLEKLQEQLAQLSVQATDKEENKQVALGTSKLNYLDPRISIAWCKRFRVPVEKIYSKTQRERFAWALAMAGEDFEF

SEQ ID NO: 13650 - protein, 167 aa, Homo Sapiens
MRVVRLLRLRAALTLLGEVPRRPASRGVPGSRRTQKGSGARWEKEKHEDGVKWRQLEHKGPYFAPPYEPLPDGVRFFYEGRPVRLSVAAEEVATFYGRMLDHEYTTKEVFRKNFFNDWRKEMAVEEREVIKSLDKCDFTEIHRYFVDKAAARKVLSREEKQMVTKKK

SEQ ID NO: 13651 - protein, 111 aa, Homo Sapiens
  misc_feature (1)..(1): Xaa can be any naturally occurring amino acid
XEQVAEARAELRRARAEHKAQGDGKSRSVLEKKRRLLEKLQEQLAQLSVQATDKEENKQVALGTSKLNYLDPRISIAWCKRFRVPVEKIYSKTQRERFAWALAMAGEDFEF

SEQ ID NO: 13652 - protein, 123 aa, Homo Sapiens
  misc_feature (1)..(1): Xaa can be any naturally occurring amino acid
XLRLRAALTLLGEVPRRPASRGVPGSRRTQKGSGARWEKEKHEDGVKWRQLEHKGPYFAPPYEPLPDGVRFFYEGRPVRLSVAAEEVATFYGRMLDHEYTTKEVFRKNFFNDWRKVLCQTHML

SEQ ID NO: 13653 - protein, 332 aa, Homo Sapiens
MKLGRAVLGLLLLAPSVVQAVEPISLGLALAGVLTGYIYPRLYCLFAECCGQKRSLSREALQKDLDDNLFGQHLAKKIILNAVFGFINNPKPKKPLTLSLHGWTGTGKNFVSKIIAENIYEGGLNSDYVHLFVATLHFPHASNITLYKDQLQLWIRGNVSACARSIFIFDEMDKMHAGLIDAIKPFLDYYDLVDGVSYQKAMFIFLSNAGAERITDVALDFWRSGKQREDIKLKDIEHALSVSVFNNKNSGFWHSSLIDRNLIDYFVPFLPLEYKHLKMCIRVEMQSRGYEIDEDIVSRVAEEMTFFPKEERVFSDKGCKTVFTKLDYYYDD

SEQ ID NO: 13654 - protein, 336 aa, Homo Sapiens
MLRAGWLRGAAALALLLAARVVAAFEPITVGLAIGAASAITGYLSYNDIYCRFAECCREERPLNASALKLDLEEKLFGQHLATEVIFKALTGFRNNKNPKKPLTLSLHGWAGTGKNFVSQIVAENLHPKGLKSNFVHLFVSTLHFPHEQKIKLYQDQLQKWIRGNVSACANSVFIFDEMDKLHPGIIDAIKPFLDYYEQVDGVSYRKAIFIFLSNAGGDLITKTALDFWRAGRKREDIQLKDLEPVLSVGVFNNKHSGLWHSGLIDKNLIDYFIPFLPLEYRHVKMCVRAEMRARGSAIDEDIVTRVAEEMTFFPRDEKIYSDKGCKTVQSRLDFH

SEQ ID NO: 13655 - protein, 141 aa, Homo Sapiens
  misc_feature (1)..(1): Xaa can be any naturally occurring amino acid
XRVVAAFEPITVGLAIGAASAITGYLSYNDIYCRFAECCREERPLNASALKLDLEEKLFGQHLATEVIFKALTGFRNNKNPKKPLTLSLHGWAGTGKNFVSQIVAENLHPKGLKSNFVHLFVSTLHFPHEQKIKLYQSSLT

SEQ ID NO: 13656 - protein, 72 aa, Homo Sapiens
MAAATRGCRPWGSLLGLLGLVSAAAAAWDLASLRCTLGAFCECDFRPDLPEGSEELGPREPHCLWPLPLPLR

SEQ ID NO: 13657 - protein, 72 aa, Homo Sapiens; identical to SEQ ID NO: 13656

SEQ ID NO: 13658 - protein, 72 aa, Homo Sapiens; identical to SEQ ID NO: 13656

SEQ ID NO: 13659 - protein, 72 aa, Homo Sapiens; identical to SEQ ID NO: 13656

SEQ ID NO: 13660 - protein, 253 aa, Homo Sapiens
MAAATRGCRPWGSLLGLLGLVSAAAAAWDLASLRCTLGAFCECDFRPDLPGLECDLAQHLAGQHLAKALVVKALKAFVRDPAPTKPLVLSLHGWTGTGKSYVSSLLAHYLFQGGLRSPRVHHFSPVLHFPHPSHIERYKKDLKSWVQGNLTACGRSLFLFDEMDKMPPGLMEVLRPFLGSSWVVYGTNYRKAIFIFIRWGPALQWAQWGGHFSEVQLYSLSLCSQQNPVPHGLSWAFPVPSATLRDDIVIPPG

SEQ ID NO: 13661 - protein, 242 aa, Homo Sapiens
MAAATRGCRPWGSLLGLLGLVSAAAAAWDLASLRCTLGAFCECDFRPDLPGLECDLAQHLAGQHLAKALVVKALKAFVRDPAPTKPLVLSLHGWTGTGKSYVSSLLAHYLFQGGLRSPRVHHFSPVLHFPHPSHIERYKKDLKSWVQGNLTACGRSLFLFDEMDKMPPGLMEVLRPFLGSSWVVYGTNYRKAIFIFIRWLLKLGHHGRAPPRRSGALPPAPAAPRPALRAQRAGPAGPGAKG

SEQ ID NO: 13662 - protein, 321 aa, Homo Sapiens
MAAATRGCRPWGSLLGLLGLVSAAAAAWDLASLRCTLGAFCECDFRPDLPGLECDLAQHLAGQHLAKALVVKALKAFVRDPAPTKPLVLSLHGWTGTGKSYVSSLLAHYLFQGGLRSPRVHHFSPVLHFPHPSHIERYKKDLKSWVQGNLTACGRSLFLFDEMDKMPPGLMEVLRPFLGSSWVVYGTNYRKAIFIFISNTGGKQINQVALEAWRSRRDREEILLQELEPVISRAVLDNPHHGFSNSGIMEERLLDAVVPFLPLQRHHVRHCVLNELAQLGLEPRDEVVQAVLDSTTFFPEDEQLFSSNGCKTVASRIAFFL

SEQ ID NO: 13663 - protein, 174 aa, Homo Sapiens
MGLCVPFAVTTSFLSLGLEWDLNVRLHGQHLVQQLVLRTVRGYLETPQPEKALALSFHGWSGTGKNFVARMLVENLYRDGLMSDCVRMFIATFHFPHPKYVDLYKEQLMSQIRETQQLCHQTLFIFDEAEKLHPGLLEVLGPHLERRAPEGHRAESPWTIFLFLSNLRGDIINE

SEQ ID NO: 13664 - protein, 97 aa, Homo Sapiens
MLRGPWRQLWLFFLLLLPGAPEPRGASRPWEGTDEPGSAWAWPGFQRLQEQLRAAGALSKRYWTLFSCQVWPDDCDEDEEAATGPLALGNVRCGHAW

SEQ ID NO: 13665 - protein, 153 aa, Homo Sapiens
MLRGPWRQLWLFFLLLLPGAPEPRGASRPWEGTDEPGSAWAWPGFQRLQEQLRAAGALSKRYWTLFSCQVWPDDCDEDEEAATGPLGWRLPLLGQRYLDLLTTWYCSFKDCCPRGDCRISNNFTGKNFVARMLVENLYRDGLMSDCVRMFIAT

SEQ ID NO: 13666 - protein, 397 aa, Homo Sapiens
MLRGPWRQLWLFFLLLLPGAPEPRGASRPWEGTDEPGSAWAWPGFQRLQEQLRAAGALSKRYWTLFSCQVWPDDCDEDEEAATGPLGWRLPLLGQRYLDLLTTWYCSFKDCCPRGDCRISNNFTGLEWDLNVRLHGQHLVQQLVLRTVRGYLETPQPEKALALSFHGWSGTGKNFVARMLVENLYRDGLMSDCVRMFIATFHFPHPKYVDLYKEQLMSQIRETQQLCHQTLFIFDEAEKLHPGLLEVLGPHLERRAPEGHRAESPWTIFLFLSNLRGDIINEVVLKLLKAGWSREEITMEHLEPHLQAEIVETIDNGFGHSRLVKENLIDYFIPFLPLEYRHVRLCARDAFLSQELLYKEETLDEIAQMMVYVPKEEQLFSSQGCKSISQRINYFLS

SEQ ID NO: 13667 - protein, 336 aa, Homo Sapiens
MLRGPWRQLWLFFLLLLPGAPEPRGASRPWEGTDEPGSAWAWPGFQRLQEQLRAAGALSKRYWTLFSCQVWPDDCDEDEEAATGPLGWRLPLLGQRYLDLLTTWYCSFKDCCPRGDCRISNNFTGLEWDLNVRLHGQHLVQQLVLRTVRGYLETPQPEKALALSFHGWSGTGKNFVARMLVENLYRDGLMSDCVRMFIATFHFPHPKYVDLYKEQLMSQIRETQQLCHQTLFIFDEAEKLHPGLLEVLGPHLERRAPEGHRAESPWTIFLFLSNLRGDIINEVVLKLLKAGWSREEITMEHLEPHLQAEIVETIGFSFLTTRWPHLDLPTSSVAPT

SEQ ID NO: 13668 - protein, 151 aa, Homo Sapiens
MDCREMDLYEDYQSPFDFDAGVNKSYLYLSPSGNSSPPGSPTLQKFGLLRTDPVPEEGEDVAATISATETLSEEEQEELRRELAKVEEEIQTLSQVLAAKEKHLAEIKRKLGINSLQELKQNIAKGWQDVTATSARSKLLAAETELLCLLY

SEQ ID NO: 13669 - protein, 233 aa, Homo Sapiens
MDCREMDLYEDYQSPFDFDAGVNKSYLYLSPSGNSSPPGSPTLQKFGLLRTDPVPEEGEDVAATISATETLSEEEQEELRRELAKVEEEIQTLSQVLAAKEKHLAEIKRKLGINSLQELKQNIAKGWQDVTATSAYKKTSETLSQAGQKASAAFSSVGSVITKKLEDVKLQAFSHSFRNSPTFKSFEEKVENLKSKVGGTKPAGGDFGEVLNSAANASATTTEPLPEKTQESL

SEQ ID NO: 13670 - protein, 247 aa, Homo Sapiens
MDCREMDLYEDYQSPFDFDAGVNKSYLYLSPSGNSSPPGSPTLQKFGLLRTDPVPEEGEDVAATISATETLSEEEQEELRRELAKVEEEIQTLSQVLAAKEKHLAEIKRKLGINSLQELKQNIAKGWQDVTATSAYKKTSETLSQAGQKASAAFSSVGSVITKKLEDVKLQAFSHSFSIRSIQHSISMPAMRNSPTFKSFEEKVENLKSKVGGTKPAGGDFGEVLNSAANASATTTEPLPEKTQESL

SEQ ID NO: 13671 - protein, 224 aa, Homo Sapiens
MDCREMDLYEDYQSPFDFDAGVNKSYLYLSPSGNSSPPGSPTLQKFGLLRTDPVPEEGEDVAATISATETLSEEEQEELRRELAKVEEEIQTLSQVLAAKEKHLAEIKRKLGINSLQELKQNIAKGWQDVTATSAYKKTSETLSQAGQKASAAFSSVGSVITKKLEDVKNSPTFKSFEEKVENLKSKVGGTKPAGGDFGEVLNSAANASATTTEPLPEKTQESL

SEQ ID NO: 13672 - protein, 238 aa, Homo Sapiens
MDCREMDLYEDYQSPFDFDAGVNKSYLYLSPSGNSSPPGSPTLQKFGLLRTDPVPEEGEDVAATISATETLSEEEQEELRRELAKVEEEIQTLSQVLAAKEKHLAEIKRKLGINSLQELKQNIAKGWQDVTATSAYKKTSETLSQAGQKASAAFSSVGSVITKKLEDVNIRSIQHSISMPAMRNSPTFKSFEEKVENLKSKVGGTKPAGGDFGEVLNSAANASATTTEPLPEKTQESL

SEQ ID NO: 13673 - protein, 38 aa, Homo Sapiens
MDRGEQAFYFIWNFWLELGKDLSFLHSYKMSAENRPSP

SEQ ID NO: 13674 - protein, 38 aa, Homo Sapiens; identical to SEQ ID NO: 13673

SEQ ID NO: 13675 - protein, 111 aa, Homo Sapiens
MDRGEQGLLRTDPVPEEGEDVAATISATETLSEEEQEELRRELAKVEEEIQTLSQVLAAKEKHLAEIKRKLGINSLQELKQNIAKGWQDVTATSARSKLLAAETELLCLLY

SEQ ID NO: 13676 - protein, 207 aa, Homo Sapiens
MDRGEQGLLRTDPVPEEGEDVAATISATETLSEEEQEELRRELAKVEEEIQTLSQVLAAKEKHLAEIKRKLGINSLQELKQNIAKGWQDVTATSAYKKTSETLSQAGQKASAAFSSVGSVITKKLEDVKLQAFSHSFSIRSIQHSISMPAMRNSPTFKSFEEKVENLKSKVGGTKPAGGDFGEVLNSAANASATTTEPLPEKTQESL

SEQ ID NO: 13677 - protein, 184 aa, Homo Sapiens
MDRGEQGLLRTDPVPEEGEDVAATISATETLSEEEQEELRRELAKVEEEIQTLSQVLAAKEKHLAEIKRKLGINSLQELKQNIAKGWQDVTATSAYKKTSETLSQAGQKASAAFSSVGSVITKKLEDVKNSPTFKSFEEKVENLKSKVGGTKPAGGDFGEVLNSAANASATTTEPLPEKTQESL

SEQ ID NO: 13678 - protein, 61 aa, Homo Sapiens
MDRGEQGRRRNPDSVSSVSSKREASSRDQAETWNQFSTGTKTEHCQRVARRDSNICLQEDI

SEQ ID NO: 13679 - protein, 60 aa, Homo Sapiens
MPAMRNSPTFKSFEEKVENLKSKVGGTKPAGGDFGEVLNSAANASATTTEPLPEKTQESL

SEQ ID NO: 13680 - protein, 148 aa, Homo Sapiens
  misc_feature (1)..(1): Xaa can be any naturally occurring amino acid
XGLGLGLWLGAGLSAARRLEQVPSLLGRRRKLHLPDPDLASWGPGRSGSGGGRWDCMCECLLRTDPVPEEGEDVAATISATETLSEEEQEELRRELAKVEEEIQTLSQVLAAKEKHLAEIKRKLGINSLQELKQNIAKGWQDVTATSA

SEQ ID NO: 13681 - protein, 172 aa, Homo Sapiens
MRALAVLSVTLVMACTEAFFPFISRGKELLWGKPEESRVSSVLEESKRLVDTAMYATMQRNLKKRGILSPAQLLSFSKLPEPTSGVIARAAEIMETSIQAMKRKVNLKTQQSQHPTDALSEDLLSIIANMSGCLPYMLPPKCPNTCLANKYRPITGACNNRDHPRWGASNTA

SEQ ID NO: 13682 - protein, 933 aa, Homo Sapiens
MRALAVLSVTLVMACTEAFFPFISRGKELLWGKPEESRVSSVLEESKRLVDTAMYATMQRNLKKRGILSPAQLLSFSKLPEPTSGVIARAAEIMETSIQAMKRKVNLKTQQSQHPTDALSEDLLSIIANMSGCLPYMLPPKCPNTCLANKYRPITGACNNRDHPRWGASNTALARWLPPVYEDGFSQPRGWNPGFLYNGFPLPPVREVTRHVIQVSNEVVTDDDRYSDLLMAWGQYIDHDIAFTPQSTSKAAFGGGADCQMTCENQNPCFPIQLPEEARPAAGTACLPFYRSSAACGTGDQGALFGNLSTANPRQQMNGLTSFLDASTVYGSSPALERQLRNWTSAEGLLRVHARLRDSGRAYLPFVPPRAPAACAPEPGIPGETRGPCFLAGDGRASEVPSLTALHTLWLREHNRLAAALKALNAHWSADAVYQEARKVVGALHQIITLRDYIPRILGPEAFQQYVGPYEGYDSTANPTVSNVFSTAAFRFGHATIHPLVRRLDASFQEHPDLPGLWLHQAFFSPWTLLRGGGLDPLIRGLLARPAKLQVQDQLMNEELTERLFVLSNSSTLDLASINLQRGRDHGLPGYNEWREFCGLPRLETPADLSTAIASRSVADKILDLYKHPDNIDVWLGGLAENFLPRARTGPLFACLIGKQMKALRDGDWFWWENSHVFTDAQRRELEKHSLSRVICDNTGLTRVPMDAFQVGKFPEDFESCDSITGMNLEAWRETFPQDDKCGFPESVENGDFVHCEESGRRVLVYSCRHGYELQGREQLTCTQEGWDFQPPLCKDVNECADGAHPPCHASARCRNTKGGFQCLCADPYELGDDGRTCVDSGRLPRVTWISMSLAALLIGGFAGLTSTVICRWTRTGTKSTLPISETGGGTPELRCGKHQAVGTSPQRAAAQDSEQESAGMEGRDTHRLPRAL

SEQ ID NO: 13683 - protein, 933 aa, Homo Sapiens; identical to SEQ ID NO: 13682

SEQ ID NO: 13684 - protein, 889 aa, Homo Sapiens
MRALAVLSVTLVMACTEAFFPFISRGKELLWGKPEESRVSSVLEESKRLVDTAMYATMQRNLKKRGILSPAQLLSFSKLPEPTSGVIARAAEIMETSIQAMKRKVNLKTQQSQHPTDALSEDLLSIIANMSGCLPYMLPPKCPNTCLANKYRPITGACNNRDHPRWGASNTALARWLPPVYEDGFSQPRGWNPGFLYNGFPLPPVREVTRHVIQVSNEVVTDDDRYSDLLMAWGQYIDHDIAFTPQSTSKAAFGGGADCQMTCENQNPCFPIQLPEEARPAAGTACLPFYRSSAACGTGDQGALFGNLSTANPRQQMNGLTSFLDASTVYGSSPALERQLRNWTSAEGLLRVHARLRDSGRAYLPFVPPRAPAACAPEPGIPGETRGPCFLAGDGRASEVPSLTALHTLWLREHNRLAAALKALNAHWSADAVYQEARKVVGALHQIITLRDYIPRILGPEAFQQYVGPYEGYDSTANPTVSNVFSTAAFRFGHATIHPLVRRLDASFQEHPDLPGLWLHQAFFSPWTLLRGGGLDPLIRGLLARPAKLQVQDQLMNEELTERLFVLSNSSTLDLASINLQRGRDHGLPGYNEWREFCGLPRLETPADLSTAIASRSVADKILDLYKHPDNIDVWLGGLAENFLPRARTGPLFACLIGKQMKALRDGDWFWWENSHVFTDAQRRELEKHSLSRVICDNTGLTRVPMDAFQVGKFPEDFESCDSITGMNLEAWRETFPQDDKCGFPESVENGDFVHCEESGRRVLVYSCRHGYELQGREQLTCTQEGWDFQPPLCKDSGRLPRVTWISMSLAALLIGGFAGLTSTVICRWTRTGTKSTLPISETGGGTPELRCGKHQAVGTSPQRAAAQDSEQESAGMEGRDTHRLPRAL

SEQ ID NO: 13685 - protein, 876 aa, Homo Sapiens
MRALAVLSVTLVMACTEAFFPFISRGKELLWGKPEESRVSSVLEESKRLVDTAMYATMQRNLKKRGILSPAQLLSFSKLPEPTSGVIARAAEIMETSIQAMKRKVNLKTQQSQHPTDALSEDLLSIIANMSGCLPYMLPPKCPNTCLANKYRPITGACNNRDHPRWGASNTALARWLPPVYEDGFSQPRGWNPGFLYNGFPLPPVREVTRHVIQVSNEVVTDDDRYSDLLMAWGQYIDHDIAFTPQSTSKAAFGGGADCQMTCENQNPCFPIQLPEEARPAAGTACLPFYRSSAACGTGDQGALFGNLSTANPRQQMNGLTSFLDASTVYGSSPALERQLRNWTSAEGLLRVHARLRDSGRAYLPFVPPRAPAACAPEPGIPGETRGPCFLAGDGRASEVPSLTALHTLWLREHNRLAAALKALNAHWSADAVYQEARKVVGALHQIITLRDYIPRILGPEAFQQYVGPYEGYDSTANPTVSNVFSTAAFRFGHATIHPLVRRLDASFQEHPDLPGLWLHQAFFSPWTLLRGGYNEWREFCGLPRLETPADLSTAIASRSVADKILDLYKHPDNIDVWLGGLAENFLPRARTGPLFACLIGKQMKALRDGDWFWWENSHVFTDAQRRELEKHSLSRVICDNTGLTRVPMDAFQVGKFPEDFESCDSITGMNLEAWRETFPQDDKCGFPESVENGDFVHCEESGRRVLVYSCRHGYELQGREQLTCTQEGWDFQPPLCKDVNECADGAHPPCHASARCRNTKGGFQCLCADPYELGDDGRTCVDSGRLPRVTWISMSLAALLIGGFAGLTSTVICRWTRTGTKSTLPISETGGGTPELRCGKHQAVGTSPQRAAAQDSEQESAGMEGRDTHRLPRAL

SEQ ID NO: 13686 - protein, 760 aa, Homo Sapiens
MRALAVLSVTLVMACTEAFFPFISRGKELLWGKPEESRVSSVLEESKRLVDTAMYATMQRNLKKRGILSPAQLLSFSKLPEPTSGVIARAAEIMETSIQAMKRKVNLKTQQSQHPTDALSEDLLSIIANMSGCLPYMLPPKCPNTCLANKYRPITGACNNRDHPRWGASNTALARWLPPVYEDGFSQPRGWNPGFLYNGFPLPPVREVTRHVIQVSNEVVTDDDRYSDLLMAWGQYIDHDIAFTPQSTSKAAFGGGADCQMTCENQNPCFPIQIITLRDYIPRILGPEAFQQYVGPYEGYDSTANPTVSNVFSTAAFRFGHATIHPLVRRLDASFQEHPDLPGLWLHQAFFSPWTLLRGGGLDPLIRGLLARPAKLQVQDQLMNEELTERLFVLSNSSTLDLASINLQRGRDHGLPGYNEWREFCGLPRLETPADLSTAIASRSVADKILDLYKHPDNIDVWLGGLAENFLPRARTGPLFACLIGKQMKALRDGDWFWWENSHVFTDAQRRELEKHSLSRVICDNTGLTRVPMDAFQVGKFPEDFESCDSITGMNLEAWRETFPQDDKCGFPESVENGDFVHCEESGRRVLVYSCRHGYELQGREQLTCTQEGWDFQPPLCKDVNECADGAHPPCHASARCRNTKGGFQCLCADPYELGDDGRTCVDSGRLPRVTWISMSLAALLIGGFAGLTSTVICRWTRTGTKSTLPISETGGGTPELRCGKHQAVGTSPQRAAAQDSEQESAGMEGRDTHRLPRAL

SEQ ID NO: 13687 - protein, 174 aa, Homo Sapiens
MRALAVLSVTLVMACTEAFFPFISRGKELLWGKPEESRVSSVLEESKRLVDTAMYATMQRNLKKRGILSPAQLLSFSKLPEPTSGVIARAAEIMETSIQAMKRKVNLKTQQSQHPTDALSEDLLSIIANMSGCLPYMLPPKCPNTCLANKYRPITGACNNRKMKYKPDHSETAN

SEQ ID NO: 13688 - protein, 174 aa, Homo Sapiens; identical to SEQ ID NO: 13687

SEQ ID NO: 13689 - protein, 864 aa, Homo Sapiens
QLLSFSKLPEPTSGVIARAAEIMETSIQAMKRKVNLKTQQSQHPTDALSEDLLSIIANMSGCLPYMLPPKCPNTCLANKYRPITGACNNRDHPRWGASNTALARWLPPVYEDGFSQPRGWNPGFLYNGFPLPPVREVTRHVIQVSNEVVTDDDRYSDLLMAWGQYIDHDIAFTPQSTSKAAFGGGADCQMTCENQNPCFPIQLPEEARPAAGTACLPFYRSSAACGTGDQGALFGNLSTANPRQQMNGLTSFLDASTVYGSSPALERQLRNWTSAEGLLRVHARLRDSGRAYLPFVPPRAPAACAPEPGIPGETRGPCFLAGDGRASEVPSLTALHTLWLREHNRLAAALKALNAHWSADAVYQEARKVVGALHQIITLRDYIPRILGPEAFQQYVGPYEGYDSTANPTVSNVFSTAAFRFGHATIHPLVRRLDASFQEHPDLPGLWLHQAFFSPWTLLRGGGLDPLIRGLLARPAKLQVQDQLMNEELTERLFVLSNSSTLDLASINLQRGRDHGLPGYNEWREFCGLPRLETPADLSTAIASRSVADKILDLYKHPDNIDVWLGGLAENFLPRARTGPLFACLIGKQMKALRDGDWFWWENSHVFTDAQRRELEKHSLSRVICDNTGLTRVPMDAFQVGKFPEDFESCDSITGMNLEAWRETFPQDDKCGFPESVENGDFVHCEESGRRVLVYSCRHGYELQGREQLTCTQEGWDFQPPLCKDSGRLPRVTWISMSLAALLIGGFAGLTSTVICRWTRTGTKSTLPISETGGGTPELRCGKHQAVGTSPQRAAAQDSEQVGHTMPHVSSCHRSGWTGSGCRSSSAGAPCIFLFTPCFLVRSAPSSGRFYLQANDSEPECEPA

SEQ ID NO: 13690 - protein, 404 aa, Homo Sapiens
  misc_feature (1)..(1): Xaa can be any naturally occurring amino acid
XYEGYDSTANPTVSNVFSTAAFRFGHATIHPLVRRLDASFQEHPDLPGLWLHQAFFSPWTLLRGGYNEWREFCGLPRLETPADLSTAIASRSVADKILDLYKHPDNIDVWLGGLAENFLPRARTGPLFACLIGKQMKALRDGDWFWWENSHVFTDAQRRELEKHSLSRVICDNTGLTRVPMDAFQVGKFPEDFESCDSITGMNLEAWRETFPQDDKCGFPESVENGDFVHCEESGRRVLVYSCRHGYELQGREQLTCTQEGWDFQPPLCKDVNECADGAHPPCHASARCRNTKGGFQCLCADPYELGDDGRTCVDSGRLPRVTWISMSLAALLIGGFAGLTSTVICRWRVLGWKAGILTGCREPSEGKVAGHCRTASCSQNHRTTLFQTQANPKSAGRLFSQHG

SEQ ID NO: 13691 - protein, 363 aa, Homo Sapiens
YEGYDSTANPTVSNVFSTAAFRFGHATIHPLVRRLDASFQEHPDLPGLWLHQAFFSPWTLLRGGYNEWREFCGLPRLETPADLSTAIASRSVADKILDLYKHPDNIDVWLGGLAENFLPRARTGPLFACLIGKQMKALRDGDWFWWENSHVFTDAQRRELEKHSLSRVICDNTGLTRVPMDAFQVGKFPEDFESCDSITGMNLEAWRETFPQDDKCGFPESVENGDFVHCEESGRRVLVYSCRHGYELQGREQLTCTQEGWDFQPPLCKDSGRLPRVTWISMSLAALLIGGFAGLTSTVICRWTRTGTKSTLPISETGGGTPELRCGKHQAVGTSPQRAAAQDSEQESAGMEGRDTHRLPRAL

SEQ ID NO: 13692 - protein, 30 aa, Homo Sapiens
MGLQACLLGLFALILSGKCSYSPEPDQRRT

SEQ ID NO: 13693 - protein, 39 aa, Homo Sapiens
MGLQACLLGLFALILSGKCSYSPEPDQRRTKIPDPRECG

SEQ ID NO: 13694 - protein, 39 aa, Homo Sapiens; identical to SEQ ID NO: 13693

SEQ ID NO: 13695 - protein, 81 aa, Homo Sapiens
MGLQACLLGLFALILSGKCSYSPEPDQRRTLPPGWVSLGRADPEEELSLTFALRQQNVERLSELVQAVSDPSSPQYGAFWD

SEQ ID NO: 13696 - protein, 563 aa, Homo Sapiens
MGLQACLLGLFALILSGKCSYSPEPDQRRTLPPGWVSLGRADPEEELSLTFALRQQNVERLSELVQAVSDPSSPQYGKYLTLENVADLVRPSPLTLHTVQKWLLAAGAQKCHSVITQDFLTCWLSIRQAELLLPGAEFHHYVGGPTETHVVRSPHPYQLPQALAPHVDFVGGLHRFPPTSSLRQRPEPQVTGTVGLHLGVTPSVIRKRYNLTSQDVGSGTSNNSQACAQFLEQYFHDSDLAQFMRLFGGNFAHQASVARVVGQQGRGRAGIEASLDVQYLMSAGANISTWVYSSPGRHEGQEPFLQWLMLLSNESALPHVHTVSYGDDEDSLSSAYIQRVNTELMKAAARGLTLLFASGDSGAGCWSVSGRHQFRPTFPASSPYVTTVGGTSFQEPFLITNEIVDYISGGGFSNVFPRPSYQEEAVTKFLSSSPHLPPSSYFNASGRAYPDVAALSDGYWVVSNRVPIPWVSGTSASTPVFGGILSLINEHRILSGRPPLGFLNPRLYQQHGAGLFDVTRGCHESCLDEEVEGQGFCSGPGWDPVTGWGTPNFPALLKTLLNP

SEQ ID NO: 13697 - protein, 500 aa, Homo Sapiens
MGLQACLLGLFALILSGKCSYSPEPDQRRTLPPGWVSLGRADPEEELSLTFALRQQNVERLSELVQAVSDPSSPQYGKYLTLENVADLVRPSPLTLHTVQKWLLAAGAQKCHSVITQDFLTCWLSIRQAELLLPGAEFHHYVGGPTETHVVRSPHPYQLPQALAPHVDFVGGLHRFPPTSSLRQRPEPQVTGTVGLHLGVTPSVIRKRYNLTSQDVGSGTSNNSQACAQFLEQYFHDSDLAQFMRLFGGNFAHQASVARVVGQQGRGRAGIEASLDVQYLMSAGANISTWVYSSPGDSGAGCWSVSGRHQFRPTFPASSPYVTTVGGTSFQEPFLITNEIVDYISGGGFSNVFPRPSYQEEAVTKFLSSSPHLPPSSYFNASGRAYPDVAALSDGYWVVSNRVPIPWVSGTSASTPVFGGILSLINEHRILSGRPPLGFLNPRLYQQHGAGLFDVTRGCHESCLDEEVEGQGFCSGPGWDPVTGWGTPNFPALLKTLLNP

SEQ ID NO: 13698 - protein, 162 aa, Homo Sapiens
MGLQACLLGLFALILSGKCSYSPEPDQRRTLPPGWVSLGRADPEEELSLTFALRQQNVERLSELVQAVSDPSSPQYGKYLTLENVADLVRPSPLTLHTVQKWLLAAGAQKCHSVITQDFLTCWLSIRQAELLLPGAEFHHYVGGPTETHVWGDCTVFPQHHP

SEQ ID NO: 13699 - protein, 470 aa, Homo Sapiens
MGLQACLLGLFALILSGKCSYSPEPDQRRTLPPGWVSLGRADPEEELSLTFALRQQNVERLSELVQAVSDPSSPQYVGGLHRFPPTSSLRQRPEPQVTGTVGLHLGVTPSVIRKRYNLTSQDVGSGTSNNSQACAQFLEQYFHDSDLAQFMRLFGGNFAHQASVARVVGQQGRGRAGIEASLDVQYLMSAGANISTWVYSSPGRHEGQEPFLQWLMLLSNESALPHVHTVSYGDDEDSLSSAYIQRVNTELMKAAARGLTLLFASGDSGAGCWSVSGRHQFRPTFPASSPYVTTVGGTSFQEPFLITNEIVDYISGGGFSNVFPRPSYQEEAVTKFLSSSPHLPPSSYFNASGRAYPDVAALSDGYWVVSNRVPIPWVSGTSASTPVFGGILSLINEHRILSGRPPLGFLNPRLYQQHGAGLFDVTRGCHESCLDEEVEGQGFCSGPGWDPVTGWGTPNFPALLKTLLNP

SEQ ID NO: 13700 - protein, 40 aa, Homo Sapiens
MGLQAWALCPHPLWQMQLQPGARPAEDAAPRLGVPGPCGP

SEQ ID NO: 13701 - protein, 99 aa, Homo Sapiens
MRLFGGNFAHQASVARVVGQQGRGRAGIEASLDVQYLMSAGANISTWVYSSPGDSGAGCWSVSGRHQFRPTFPASRSQAPNLLCGIQLPLFLFVSSQAF

SEQ ID NO: 13702 - protein, 162 aa, Homo Sapiens
MRLFGGNFAHQASVARVVGQQGRGRAGIEASLDVQYLMSAGANISTWVYSSPGRHEGQEPFLQWLMLLSNESALPHVHTVSYGDDEDSLSSAYIQRVNTELMKAAARGLTLLFASGDSGAGCWSVSGRHQFRPTFPASRSQAPNLLCGIQLPLFLFVSSQAF

SEQ ID NO: 13703 - protein, 320 aa, Homo Sapiens
MRLFGGNFAHQASVARVVGQQGRGRAGIEASLDVQYLMSAGANISTWVYSSPGRHEGQEPFLQWLMLLSNESALPHVHTVSYGDDEDSLSSAYIQRVNTELMKAAARGLTLLFASGDSGAGCWSVSGRHQFRPTFPASSPYVTTVGGTSFQEPFLITNEIVDYISGGGFSNVFPRPSYQEEAVTKFLSSSPHLPPSSYFNASGRAYPDVAALSDGYWVVSNRVPIPWVSGTSASTPVFGGILSLINEHRILSGRPPLGFLNPRLYQQHGAGLFDVTRGCHESCLDEEVEGQGFCSGPGWDPVTGWGTPNFPALLKTLLNP

SEQ ID NO: 13704 - protein, 320 aa, Homo Sapiens; identical to SEQ ID NO: 13703

SEQ ID NO: 13705 - protein, 320 aa, Homo Sapiens; identical to SEQ ID NO: 13703

SEQ ID NO: 13706 - protein, 320 aa, Homo Sapiens; identical to SEQ ID NO: 13703

SEQ ID NO: 13707 - protein, 171 aa, Homo Sapiens
  misc_feature (1)..(1): Xaa can be any naturally occurring amino acid
XAVSDPSSPQYGKYLTLENVADLVRPSPLTLHTVQKWLLAAGAQKCHSVITQDFLTCWLSIRQAELLLPGAEFHHYVGGPTETHVVRSPHPYQLPQALAPHVDFGDSGAGCWSVSGRHQFRPTFPASSPYVTTVGGTSFQEPFLITNEIVDYISGGGFSNVFPRPSYQEEA

SEQ ID NO: 13708 - protein, 400 aa, Homo Sapiens
  misc_feature (1)..(1): Xaa can be any naturally occurring amino acid
XGRADPEEELSLTFALRQQNVERLSELVQAVSDPSSPQYGKYLTLENVADLVRPSPLTLHTVQKWLLAAGAQKCHSVITQDFLTCWLSIRQAELLLPGAEFHHYVGGPTETHVVRSPHPYQLPQALAPHVDFGRHEGQEPFLQWLMLLSNESALPHVHTVSYGDDEDSLSSAYIQRVNTELMKAAARGLTLLFASGDSGAGCWSVSGRHQFRPTFPASSPYVTTVGGTSFQEPFLITNEIVDYISGGGFSNVFPRPSYQEEAVTKFLSSSPHLPPSSYFNASGRAYPDVAALSDGYWVVSNRVPIPWVSGTSASTPVFGGILSLINEHRILSGRPPLGFLNPRLYQQHGAGLFDVTRGCHESCLDEEVEGQGFCSGPGWDPVTGWGTPNFPALLKTLLNP

SEQ ID NO: 13709 - protein, 92 aa, Homo Sapiens
  misc_feature (1)..(1): Xaa can be any naturally occurring amino acid
XLQWLMLLSNESALPHVHTVSYGDDEDSLSSAYIQRVNTELMKAAARGLTLLFASGDSGAGCWSVSGRHQFRPTFPASSGRHILPGTFPHHK

SEQ ID NO: 13710 - protein, 282 aa, Homo Sapiens
MLLLAPQMLNLLLLALPVLASRAYAAPAPGQALQRVGIVGGQEAPRSKWPWQVSLRVHGPYWMHFCGGSLIHPQWVLTAAHCVGPDVKDLAALRVQLREQHLYYQDQLLPVSRIIVHPQFYTAQIGADIALLELEEPVNVSSHVHTVTLPPASETFPPGMPCWVTGWGDVDNDERLPPPFPLKQVKVPIMENHICDAKYHLGAYTGDDVRIVRDDMLCAGNTRRDSCQGDSGGPLVCKVNGTWLQAGVVSWGEGCAQPNRPGIYTRVTYYLDWIHHYVPKKP

SEQ ID NO: 13711 - protein, 275 aa, Homo Sapiens
MLNLLLLALPVLASRAYAAPAPGQALQRVGIVGGQEAPRSKWPWQVSLRVHGPYWMHFCGGSLIHPQWVLTAAHCVGPDVKDLAALRVQLREQHLYYQDQLLPVSRIIVHPQFYTAQIGADIALLELEEPVNVSSHVHTVTLPPASETFPPGMPCWVTGWGDVDNDERLPPPFPLKQVKVPIMENHICDAKYHLGAYTGDDVRIVRDDMLCAGNTRRDSCQGDSGGPLVCKVNGTWLQAGVVSWGEGCAQPNRPGIYTRVTYYLDWIHHYVPKKP

SEQ ID NO: 13712 - protein, 213 aa, Homo Sapiens
YWMHFCGGSLIHPQWVLTAAHCVGPVQLREQHLYYQDQLLPVSRIIVHPQFYTAQIGADIALLELEEPVNVSSHVHTVTLPPASETFPPGMPCWVTGWGDVDNDERLPPPFPLKQVKVPIMENHICDAKYHLGAYTGDDVRIVRDDMLCAGNTRRDSCQGDSGGPLVCKVNGTWLQAGVVSWGEGCAQPNRPGIYTRVTYYLDWIHHYVPKKP

SEQ ID NO: 13713 - protein, 282 aa, Homo Sapiens
MLLLAPQMLNLLLLALPVLASRAYAAPAPGQALQRVGIVGGQEAPRSKWPWQVSLRVRDRYWMHFCGGSLIHPQWVLTAAHCVGPDVKDLAALRVQLREQHLYYQDQLLPVSRIIVHPQFYTAQIGADIALLELEEPVNVSSHVHTVTLPPASETFPPGMPCWVTGWGDVDNDERLPPPFPLKQVKVPIMENHICDAKYHLGAYTGDDVRIVRDDMLCAGNTRRDSCQGDSGGPLVCKVNGTWLQAGVVSWGEGCAQPNRPGIYTRVTYYLDWIHHYVPKKP

SEQ ID NO: 13714 - protein, 275 aa, Homo Sapiens
MLNLLLLALPVLASRAYAAPAPGQALQRVGIVGGQEAPRSKWPWQVSLRVRDRYWMHFCGGSLIHPQWVLTAAHCVGPDVKDLAALRVQLREQHLYYQDQLLPVSRIIVHPQFYTAQIGADIALLELEEPVNVSSHVHTVTLPPASETFPPGMPCWVTGWGDVDNDERLPPPFPLKQVKVPIMENHICDAKYHLGAYTGDDVRIVRDDMLCAGNTRRDSCQGDSGGPLVCKVNGTWLQAGVVSWGEGCAQPNRPGIYTRVTYYLDWIHHYVPKKP

SEQ ID NO: 13715 - protein, 292 aa, Homo Sapiens
MLNLLLLALPVLASRAYAAPAPGQALQRVGIVGGQEAPRSKWPWQVSLRVRDRYWMHFCGGSLIHPQWVLTAAHCVGPDVKDLAALRVQLREQHLYYQDQLLPVSRIIVHPQFYTAQIGADIALLELEEPVNVSSHVHTVTLPPASETFPPGMPCWVTGWGDVDNDERLPPPFPLKQVKVPIMENHICDAKYHLGAYTGDDVRIVRDDMLCAGNTRRDSCQGDSGGPLVCKVNGTWLQAGVVSWGEGCAQPNRPGIYTRVTYYLDWIHHYVPKKPDGVSPCWPVWSRTPDLK

SEQ ID NO: 13716 - protein, 242 aa, Homo Sapiens
MLLLAPQMLSLLLLALPVLASPAYVAPAPGQALQQTGIVGGQEAPRSKWPWQVSLRVRGPYWMHFCGGSLIHPQWVLTAAHCVEPDIKDLAALRVQLREQHLYYQDQLLPVSRIIVHPQFYIIQTGADIALLELEEPVNISSHIHTVTLPPASETFPPGMPCWVTGWGDVDNNVHLPPPYPLKEVEVPVVENHLCNAEYHTGLHTGHSFQIVRDDMLCAGSENHDSCQGDSGGPLVCKVNGT

SEQ ID NO: 13717 - protein, 235 aa, Homo Sapiens
MLSLLLLALPVLASPAYVAPAPGQALQQTGIVGGQEAPRSKWPWQVSLRVRGPYWMHFCGGSLIHPQWVLTAAHCVEPDIKDLAALRVQLREQHLYYQDQLLPVSRIIVHPQFYIIQTGADIALLELEEPVNISSHIHTVTLPPASETFPPGMPCWVTGWGDVDNNVHLPPPYPLKEVEVPVVENHLCNAEYHTGLHTGHSFQIVRDDMLCAGSENHDSCQGDSGGPLVCKVNGT

SEQ ID NO: 13718 - protein, 42 aa, Homo Sapiens
MVGKLKQNLLLACLVISSVTVFYLGQHAMECHHRIEERSQPV

SEQ ID NO: 13719 - protein, 140 aa, Homo Sapiens
MVGKLKQNLLLACLVISSVTVFYLGQHAMECHHRIEERSQPVKLESTRTTVRTGLDLKANKTFAYHKDMPLIFIGGVPRSGTTLMRAMLDAHPDIRCGEETRVIPRILALKQMWSRSSKEKIRLDEAGVTDEVLDSAMQA

SEQ ID NO: 13720 - protein, 370 aa, Homo Sapiens
MVGKLKQNLLLACLVISSVTVFYLGQHAMECHHRIEERSQPVKLESTRTTVRTGLDLKANKTFAYHKDMPLIFIGGVPRSGTTLMRAMLDAHPDIRCGEETRVIPRILALKQMWSRSSKEKIRLDEAGVTDEVLDSAMQAFLLEIIVKHGEPAPYLCNKDPFALKSLTYLSRLFPNAKFLLMVRDGRASVHSMISRKVTIAGFDLNSYRDCLTKWNRAIETMYNQCMEVGYKKCMLVHYEQLVLHPERWMRTLLKFLQIPWNHSVLHHEEMIGKAGGVSLSKVERSTDQVIKPVNVGALSKWVGKIPPDVLQDMAVIAPMLAKLGYDPYANPPNYGKPDPKIIENTRRVYKGEFQLPDFLKEKPQTEQVE

SEQ ID NO: 13721 - protein, 168 aa, Homo Sapiens
DFLGIAWSDAVLHHEDLIGKPGGVSLSKIERSTDQVIKPVNLEALSKWTGHIPGDVVRDMAQIAPMLAQLGYDPYANPPNYGNPDPFVINNTQRVSVHLYLWKCTLGDMGLLQMWKLQPPEEMFSLSIPGHLICSCLMDTVNYMIACISILLGLQGSSKPTGSLSLIL

SEQ ID NO: 13722 - protein, 47 aa, Homo Sapiens
MRLSVRRVLLAAGCALVLVLAVQLGQQVLECRAVLAGLRSPRGAMRP

SEQ ID NO: 13723 - protein, 48 aa, Homo Sapiens
MRLSVRRVLLAAGCALVLVLAVQLGQQVLECRAVLAGLRSPRGAMRPE

SEQ ID NO: 13724 - protein, 64 aa, Homo Sapiens
MRLSVRRVLLAAGCALVLVLAVQLGQQVLECRAVLAGLRSPRGAMRPEQEELVMVGTNHVEYRY

SEQ ID NO: 13725 - protein, 120 aa, Homo Sapiens
MRLSVRRVLLAAGCALVLVLAVQLGQQVLECRAVLAGLRSPRGAMRPEQEELVMVGTNHVEYRYGKAMPLIFVGGVPRSGTTLMRAMLDAHPEVRCGEETRIIPRVLAMRQAWSKSGREK

SEQ ID NO: 13726 - protein, 142 aa, Homo Sapiens
MRLSVRRVLLAAGCALVLVLAVQLGQQVLECRAVLAGLRSPRGAMRPEQEELVMVGTNHVEYRYGKAMPLIFVGGVPRSGTTLMRAMLDAHPEVRCGEETRIIPRVLAMRQAWSKSGREKLRLDEAGVTDEVLDAAMQAFIL

SEQ ID NO: 13727 - protein, 377 aa, Homo Sapiens
MRLSVRRVLLAAGCALVLVLAVQLGQQVLECRAVLAGLRSPRGAMRPEQEELVMVGTNHVEYRYGKAMPLIFVGGVPRSGTTLMRAMLDAHPEVRCGEETRIIPRVLAMRQAWSKSGREKLRLDEAGVTDEVLDAAMQAFILEVIAKHGEPARVLCNKDPFTLKSSVYLSRLFPNSKFLLMVRDGRASVHSMITRKVTIAGFDLSSYRDCLTKWNKAIEVMYAQCMEVGKEKCLPVYYEQLVLHPRRSLKLILDFLGIAWSDAVLHHEDLIGKPGGVSLSKIERSTDQVIKPVNLEALSKWTGHIPGDVVRDMAQIAPMLAQLGYDPYANPPNYGNPDPFVINNTQRVLKGDYKTPANLKGYFQVNQNSTSSHLGSS

SEQ ID NO: 13728 - protein, 377 aa, Homo Sapiens; identical to SEQ ID NO: 13727

SEQ ID NO: 13729 - protein, 377 aa, Homo Sapiens; identical to SEQ ID NO: 13727

SEQ ID NO: 13730 - protein, 333 aa, Homo Sapiens
MSPWSWFLLQTLCLLPTGAASRRGAPGTANCELKPQQSELNSFLWTIKRDPPSYFFGTIHVPYTRVWDFIPDNSKEAFLQSSIVYFELDLTDPYTISALTSCQMLPQGENLQDVLPRDIYCRLKRHLEYVKLMMPLWMTPDQRGKGLYADYLFNAIAGNWERKRPVWVMLMVNSLTEVDIKSRGVPVLDLFLAQEAERLRKQTGAVEKVEEQCHPLNGLNFSQVIFALNQTLLQQESLRAGSLQIPYTTEDLIKHYNCGDLSSVILSHDSSQVPNFINATLPPQERITAQEIDSYLRRELIYKRNERIGKRVKALLEEFPDKGFFFAFGAASQ

SEQ ID NO: 13731 - protein, 505 aa, Homo Sapiens
MSPWSWFLLQTLCLLPTGAASRRGAPGTANCELKPQQSELNSFLWTIKRDPPSYFFGTIHVPYTRVWDFIPDNSKEAFLQSSIVYFELDLTDPYTISALTSCQMLPQGENLQDVLPRDIYCRLKRHLEYVKLMMPLWMTPDQRGKGLYADYLFNAIAGNWERKRPVWVMLMVNSLTEVDIKSRGVPVLDLFLAQEAERLRKQTGAVEKVEEQCHPLNGLNFSQVIFALNQTLLQQESLRAGSLQIPYTTEDLIKHYNCGDLSSVILSHDSSQVPNFINATLPPQERITAQEIDSYLRRELIYKRNERIGKRVKALLEEFPDKGFFFAFGAGHFMGNNTVLDVLRREGYEVEHAPAGRPIHKGKSKKTSTRPTLSTIFAPKVPTLEVPAPEAVSSGHSTLPPLVSRPGSADTPSEAEQRFRKKRRRSQRRPRLRQFSDLWVRLEESDIVPQLQVPVLDRHISTELRLPRRGHSHHSQMVASSACLSLWTPVFWVLVLAFQTETPLL

SEQ ID NO: 13732 - protein, 456 aa, Homo Sapiens
MSPWSWFLLQTLCLLPTGAASRRGAPGTANCELKPQQSELNSFLWTIKRDPPSYFFGTIHVPYTRVWDFIPDNSKEAFLQSSIVYFELDLTDPYTISALTSCQMLPQGENLQDVLPRDIYCRLKRHLEYVKLMMPLWMTPDQRGKGLYADYLFNAIAGNWERKRPVWVMLMVNSLTEVDIKSRGVPVLDLFLAQEAERLRKQTGAVEKVEEQCHPLNGLNFSQVPNFINATLPPQERITAQEIDSYLRRELIYKRNERIGKRVKALLEEFPDKGFFFAFGAGHFMGNNTVLDVLRREGYEVEHAPAGRPIHKGKSKKTSTRPTLSTIFAPKVPTLEVPAPEAVSSGHSTLPPLVSRPGSADTPSEAEQRFRKKRRRSQRRPRLRQFSDLWVRLEESDIVPQLQVPVLDRHISTELRLPRRGHSHHSQMVASSACLSLWTPVFWVLVLAFQTETPLL

SEQ ID NO: 13733 - protein, 517 aa, Homo Sapiens
MHAALAGPLLAALLATARARPQPPDGGQCRPPGSQRDLNSFLWTIRRDPPAYLFGTIHVPYTRVWDFIPDNSKAAFQASTRVYFELDLTDPYTISALASCQLLPHGENLQDVLPHELYWRLKRHLDYVKLMMPSWMTPAQRGKGLYADYLFNAIAGNWERKRPVWVMLMVNSLTERDVRFRGVPVLDLYLAQQAEKMKKTTGAVEQVEEQCHPLNNGLNFSQVLFALNQTLLQQESVRAGSLQASYTTEDLIKHYNCGDLSAVIFNHDTSQLPNFINTTLPPHEQVTAQEIDSYFRQELIYKRNERMGKRVMALLRENEDKICFFAFGAGHFLGNNTVIDILRQAGLEVDHTPAGQAIHSPAPQSPAPSPEGTSTSPAPVTPAAAVPEAPSVTPTAPPEDEDPALSPHLLLPDSLSQLEEFGRQRKWHKRQSTHQRPRQFNDLWVRIEDSTTASPPPLPLQPTHSSGTAKPPFQLSDQLQQQDPPGPASSSAPTLGLLPAIATTIAVCFLLHSLGPS

SEQ ID NO: 13734 - protein, 37 aa, Homo Sapiens
MPGRTWELCLLLLLGLGLGSQEALPPPCERTSPADLH

SEQ ID NO: 13735 - protein, 552 aa, Homo Sapiens
MPGRTWELCLLLLLGLGLGSQEALPPPCESEIYCHGELLNQVQMAKLYQDDKQFVDMPLSIAPEQVLQTFTELSRDHNHSIPREQLQAFVHEHFQAKGQELQPWTPADWKDSPQFLQKISDAKLRAWAGQLHQLWKKLGKKMKPEVLSHPERFSLIYSEHPFIVPGGRFVEFYYCYGHVPNGGRVYYLQRSQPPLLTLMMDCYLTHTNDTAFLQENIETLALELDFWTKNRTVSVSLEGKNYLLNRYYVPYGGPRPESYSKDVELADTLPEGDREALWAELKAGAESGWDFSSRWLIGGPNPNSLSGIRTSKLVPVDLNAFLCQAEELMSNFYSRLGNDSQATKYRILRSQRLAALNTVLWDEQTGAWFDYDLEKKKKNREFYPSNLTPLWAGCFSDPGVADKALKYLEDNRILTYQYGIPTSLQKTGQQWDFPNAWAPLQDLVIRGLAKAPLRRAQEVAFQLAQNWIRTNFDVYSQKSAMYEKYDVSNGGQPGGGGEYEVQEGFGWTNGVVLMLLDRYGDRLTSGAKLAFLEPHCLAATLLPSLLLSLLPW

SEQ ID NO: 13736 - protein, 583 aa, Homo Sapiens
MPGRTWELCLLLLLGLGLGSQEALPPPCESEIYCHGELLNQVQMAKLYQDDKQFVDMPLSIAPEQVLQTFTELSRDHNHSIPREQLQAFVHEHFQAKGQELQPWTPADWKDSPQFLQKISDAKLRAWAGQLHQLWKKLGKKMKPEVLSHPERFSLIYSEHPFIVPGGRFVEFYYWDSYWVMEGLLLSEMAETVKGMLQNFLDLVKTYGHVPNGGRVYYLQRSQPPLLTLMMDCYLTHTNDTAFLQENIETLALELDFWTKNRTVSVSLEGKNYLLNRYYVPYGGPRPESYSKDVELADTLPEGDREALWAELKAGAESGWDFSSRWLIGGPNPNSLSGIRTSKLVPVDLNAFLCQAEELMSNFYSRLGNDSQATKYRILRSQRLAALNTVLWDEQTGAWFDYDLEKKKKNREFYPSNLTPLWAGCFSDPGVADKALKYLEDNRILTYQYGIPTSLQKTGQQWDFPNAWAPLQDLVIRGLAKAPLRRAQEVAFQLAQNWIRTNFDVYSQKSAMYEKYDVSNGGQPGGGGEYEVQEGFGWTNGVVLMLLDRYGDRLTSGAKLAFLEPHCLAATLLPSLLLSLLPW

SEQ ID NO: 13737 - protein, 150 aa, Homo Sapiens
MRKTRLWGLLWMLFVSELRAATKLTEEKYELKEGQTLDVKCDYTLEKFASSQKAWQIIRDGEMPKTLACTERPSKNSHPVQVGRIILEDYHDHGLLRVRMVNLQVEDSGLYQCVIYQPPKEPHMLFDRIRLVVTKGFRCSTLSFSWLVDS

SEQ ID NO: 13738 - protein, 250 aa, Homo Sapiens
MRKTRLWGLLWMLFVSELRAATKLTEEKYELKEGQTLDVKCDYTLEKFASSQKAWQIIRDGEMPKTLACTERPSKNSHPVQVGRIILEDYHDHGLLRVRMVNLQVEDSGLYQCVIYQPPKEPHMLFDRIRLVVTKGFSGTPGSNENSTQNVYKIPPTTTKALCPLYTSPRTVTQAPPKSTADVSTPDSEINLTNVTDIIREKSMTFGIRRLDVESHPLPPLHTGHFRISQFFSQAGTQSLHSCYKGKPTP

SEQ ID NO: 13739 - protein, 234 aa, Homo Sapiens
MRKTRLWGLLWMLFVSELRAATKLTEEKYELKEGQTLDVKCDYTLEKFASSQKAWQIIRDGEMPKTLACTERPSKNSHPVQVGRIILEDYHDHGLLRVRMVNLQVEDSGLYQCVIYQPPKEPHMLFDRIRLVVTKGFSGTPGSNENSTQNVYKIPPTTTKALCPLYTSPRTVTQAPPKSTADVSTPDSEINLTNVTDIIRVPVFNIVILLAGGFLSKSLVFSVLFAVTLRSFVP

SEQ ID NO: 13740 - protein, 225 aa, Homo Sapiens
MRKTRLWGLLWMLFVSELRAATKLTEEKYELKEGQTLDVKCDYTLEKFASSQKAWQIIRDGEMPKTLACTERPSKNSHPVQVGRIILEDYHDHGLLRVRMVNLQVEDSGLYQCVIYQPPKEPHMLFDRIRLVVTKGFSGTPGSNENSTQNVYKIPPTTTKALCPLYTSPRTVTQAPPKSTADVSTPDSEINLTNVTDIIRYSFQVPGPLVWTLSPLFPSLCAERM

SEQ ID NO: 13741 - protein, 219 aa, Homo Sapiens
MEPLRLLILLFVTELSGAHNTTVFQGVAGQSLQVSCPYDSMKHWGRRKAWCRQLGEKGPCQRVVSTHNLWLLSFLRRWNGSTAITDDTLGGTLTITLRNLQPHDAGLYQCQSLHGSEADTLRKVLVEVLADPLDHRDAGDLWFPGESESFEDAHVEHSISRAERHVKEDDGRKSPGEVPPGTSPACILATWPPGLLVLLWQETTLPEHCFSWTLEAGTG

SEQ ID NO: 13742 - protein, 222 aa, Homo Sapiens
MEPLRLLILLFVTELSGAHNTTVFQGVAGQSLQVSCPYDSMKHWGRRKAWCRQLGEKGPCQRVVSTHNLWLLSFLRRWNGSTAITDDTLGGTLTITLRNLQPHDAGLYQCQSLHGSEADTLRKVLVEVLADPLDHRDAGDLWFPGESESFEDAHVEHSISRPSQGSHLPSCLSKEPLGRRNPLPTHFHPSPPGLHLSHQDSSSQRPLGCSLAWTEARDTSTQ

SEQ ID NO: 13743 - protein, 230 aa, Homo Sapiens
MEPLRLLILLFVTELSGAHNTTVFQGVAGQSLQVSCPYDSMKHWGRRKAWCRQLGEKGPCQRVVSTHNLWLLSFLRRWNGSTAITDDTLGGTLTITLRNLQPHDAGLYQCQSLHGSEADTLRKVLVEVLADPLDHRDAGDLWFPGESESFEDAHVEHSISRSLLEGEIPFPPTSILLLLACIFLIKILAASALWAAAWHGQKPGTHPPSELDCGHDPGYQLQTLPGLRDT

SEQ ID NO: 13744 - protein, 238 aa, Homo Sapiens
MPGPWLLLALALTLNLTGVPGGRAQPEAAQQEAVTAAEHPGLDDFLRQVERLLFLRENIQRLQGDQASQIFQSDWLSKRQHPGKREEEEEEGVEEEEEEEGGAVGPHKRQHPGRREDEASWSVDVTQHKRQHPGRRSPWLAYAVPKRQHPGRRLADPKAQRSWEEEEEEEEREEDLMPEKRQHPGKRALGGPCGPQGAYGQAGLLLGLLDDLSRSQGAEEKRQHPGRRAAWVREPLEE

SEQ ID NO: 13745 - protein, 242 aa, Homo Sapiens
MPGPWLLLALALTLNLTGVPGGRAQPEAAQQEAVTAAEHPGLDDFLRQVERLLFLRENIQRLQGDQGEHSASQIFQSDWLSKRQHPGKREEEEEEGVEEEEEEEGGAVGPHKRQHPGRREDEASWSVDVTQHKRQHPGRRSPWLAYAVPKRQHPGRRLADPKAQRSWEEEEEEEEREEDLMPEKRQHPGKRALGGPCGPQGAYGQAGLLLGLLDDLSRSQGAEEKRQHPGRRAAWVREPLEE

SEQ ID NO: 13746 - protein, 1050 aa, Homo Sapiens
MEVAVEKAVAAAAAASAAASGGPSAAPSGENEAESRQGPDSERGGEAARLNLLDTCAVCHQNIQSRAPKLLPCLHSFCQRCLPAPQRYLMLPAPMLGSAETPPPVPAPGSPVSGSSPFATQVGVIRCPVCSQECAERHIIDNFFVKDTTEVPSSTVEKSNQVCTSCEDNAEANGFCVECVEWLCKTCIRAHQRVKFTKDHTVRQKEEVSPEAVGVTSQRPVFCPFHKKEQLKLYCETCDKLTCRDCQLLEHKEHRYQFIEEAFQNQKVIIDTLITKLMEKTKYIKFTGNQIQNRIIEVNQNQKQVEQDIKVAIFTLMVEINKKGKALLHQLESLAKDHRMKLMQQQQEVAGLSKQLEHVMHFSKWAVSSGSSTALLYSKRLITYRLRHLLRARCDASPVTNNTIQFHCDPSFWAQNIINLGSLVIEDKESQPQMPKQNPVVEQNSQPPSGLSSNQLSKFPTQISLAQLRLQHMQQQVMAQRQQVQRRPAPVGLPNPRMQGPIQQPSISHQQPPPRLINFQNHSPKPNGPVLPPHPQQLRYPPNQNIPRQAIKPNPLQMAFLAQQAIKQWQISSGQGTPSTTNSTSSTPSSPTITSAAGYDGKAFGSPMIDLSSPVGGSYNLPSLPDIDCSSTIMLDNIVRKDTNIDHGQPRPPSNRTVQSPNSSVPSPGLAGPVTMTSVHPPIRSPSASSVGSRGSSGSSSKPAGADSTHKVPVVMLEPIRIKQENSGPPENYDFPVVIVKQESDEESRPQNANYPRSILTSLLLNSSQSSTSEETVLRSDAPDSTGDQPGLHQDNSSNGKSEWLDPSQKSPLHVGETRKEDDPNEDWCAVCQNGGELLCCEKCPKVFHLSCHVPTLTNFPSGEWICTFCRDLSKPEVEYDCDAPSHNSEKKKTEGLVKLTPIDKRKCERLLLFLYCHEMSLAFQDPVPLTVPDYYKIIKNPMDLSTIKKRLQEDYSMYSKPEDFVADFRLIFQNCAEFNEPDSEVANAGIKLENYFEELLKNLYPEKRFPKPEFRNESEDNKFSDDSDDDFVQPRKKRLKSIEERQLLK

SEQ ID NO: 13747 - protein, 1016 aa, Homo Sapiens
MEVAVEKAVAAAAAASAAASGGPSAAPSGENEAESRQGPDSERGGEAARLNLLDTCAVCHQNIQSRAPKLLPCLHSFCQRCLPAPQRYLMLPAPMLGSAETPPPVPAPGSPVSGSSPFATQVGVIRCPVCSQECAERHIIDNFFVKDTTEVPSSTVEKSNQVCTSCEDNAEANGFCVECVEWLCKTCIRAHQRVKFTKDHTVRQKEEVSPEAVGVTSQRPVFCPFHKKEQLKLYCETCDKLTCRDCQLLEHKEHRYQFIEEAFQNQKVIIDTLITKLMEKTKYIKFTGNQIQNRIIEVNQNQKQVEQDIKVAIFTLMVEINKKGKALLHQLESLAKDHRMKLMQQQQEVAGLSKQLEHVMHFSKWAVSSGSSTALLYSKRLITYRLRHLLRARCDASPVTNNTIQFHCDPSFWAQNIINLGSLVIEDKESQPQMPKQNPVVEQNSQPPSGLSSNQLSKFPTQISLAQLRLQHMQQQQPPPRLINFQNHSPKPNGPVLPPHPQQLRYPPNQNIPRQAIKPNPLQMAFLAQQAIKQWQISSGQGTPSTTNSTSSTPSSPTITSAAGYDGKAFGSPMIDLSSPVGGSYNLPSLPDIDCSSTIMLDNIVRKDTNIDHGQPRPPSNRTVQSPNSSVPSPGLAGPVTMTSVHPPIRSPSASSVGSRGSSGSSSKPAGADSTHKVPVVMLEPIRIKQENSGPPENYDFPVVIVKQESDEESRPQNANYPRSILTSLLLNSSQSSTSEETVLRSDAPDSTGDQPGLHQDNSSNGKSEWLDPSQKSPLHVGETRKEDDPNEDWCAVCQNGGELLCCEKCPKVFHLSCHVPTLTNFPSGEWICTFCRDLSKPEVEYDCDAPSHNSEKKKTEGLVKLTPIDKRKCERLLLFLYCHEMSLAFQDPVPLTVPDYYKIIKNPMDLSTIKKRLQEDYSMYSKPEDFVADFRLIFQNCAEFNEPDSEVANAGIKLENYFEELLKNLYPEKRFPKPEFRNESEDNKFSDDSDDDFVQPRKKRLKSIEERQLLK

SEQ ID NO: 13748 - protein, 460 aa, Homo Sapiens
IYFQLHRALKMIVDPVEPHGEMKFQWDLNAWTKSAEAFGKIVAERPGTNSTGPAPMAPPRAPGPLSKQGSGSSQPMEVQEGYGFGSEPHVSGVKRSRSGEGEVSGLMRKVPRVSLERLDLDLTADSQPPVFKVFPGSTTEDYNLIVIERGAAAAATGQPGTAPAGTPGAPPLAGMAIVKEEETEAAIGAPPTATEGPETKPVLMALAEGPGAEGPRLASPSGSTSSGLEVVAPEGTSAPGGGPGTLDDSATICRVCQKPGDLVMCNQCEFCFHLDCHLPALQDVPGEEWSCSLCHVLPDLKEEDGSLSLDGADSTGVVAKLSPANQRKCERVLLALFCHEPCRPLHQLATDSTFSLDQPGGTLDLTLIRARLQEKLSPPYSSPQEFAQDVGRMFKQFNKLTEDKADVQSIIGLQRFFETRMNEAFGDTKFSAVLVEPPPMSLPGAGLSSQELSGGPGDGP

SEQ ID NO: 13749 - protein, 753 aa, Homo Sapiens
MAASAAAASAAAASAASGSPGPGEGSAGGEKRSTAPSAAASASASAAASSPAGGGAEALELLEHCGVCRERLRPEREPRLLPCLHSACSACLGPAAPAAANSSGDGGAAGDGTGPAKSRDGERTVYCNVHKHEPLVLFCESCDTLTCRDCQLNAHKDHQYQFLEDAVRNQRKLLASLVKRLGDKHATLQKSTKEVRSSIRQVSDVQKRVQVDVKMAILQIMKELNKRGRVLVNDAQKVTEGQQERLERQHWTMTKIQKHQEHILRFASWALESDNNTALLLSKKLIYFQLHRALKMIVDPVEPHGEMKFQWDLNAWTKSAEAFGKIVAERPGTNSTGPAPMAPPRAPGPLSKQGSGSSQPMEVQEGYGFGSGDDPYSSAEPHVSGVKRSRSGEGEVSGLMRKVPRVSLERLDLDLTADSQPPVFKVFPGSTTEDYNLIVIERGAAAAATGQPGTAPAGTPGAPPLAGMAIVKEEETEAAIGAPPTATEGPETKPVLMALAEGPGAEGPRLASPSGSTSSGLEVVAPEGTSAPGGGPGTLDDSATICRVCQKPGDLVMCNQCEFCFHLDCHLPALQDVPGEEWSCSLCHVLPDLKEEDGSLSLDGADSTGVVAKLSPANQRKCERVLLALFCHEPCRPLHQLATDSTFSLDQPGGTLDLTLIRARLQEKLSPPYSSPQEFAQDVGRMFKQFNKLTEDKADVQSIIGLQRFFETRMNEAFGDTKFSAVLVEPPPMSLPGAGLSSQELSGGPGDGP

SEQ ID NO: 13750 - protein, 835 aa, Homo Sapiens
MAASAAAASAAAASAASGSPGPGEGSAGGEKRSTAPSAAASASASAAASSPAGGGAEALELLEHCGVCRERLRPEREPRLLPCLHSACSACLGPAAPAAANSSGDGGAAGDGTVVDCPVCKQQCFSKDIVENYFMRDSGSKAATDAQDANQCCTSCEDNAPATSYCVECSEPLCETCVEAHQRVKYTKDHTVRSTGPAKSRDGERTVYCNVHKHEPLVLFCESCDTLTCRDCQLNAHKDHQYQFLEDAVRNQRKLLASLVKRLGDKHATLQKSTKEVRSSIRQVSDVQKRVQVDVKMAILQIMKELNKRGRVLVNDAQKVTEGQQERLERQHWTMTKIQKHQEHILRFASWALESDNNTALLLSKKLIYFQLHRALKMIVDPVEPHGEMKFQWDLNAWTKSAEAFGKIVAERPGTNSTGPAPMAPPRAPGPLSKQGSGSSQPMEVQEGYGFGSGDDPYSSAEPHVSGVKRSRSGEGEVSGLMRKVPRVSLERLDLDLTADSQPPVFKVFPGSTTEDYNLIVIERGAAAAATGQPGTAPAGTPGAPPLAGMAIVKEEETEAAIGAPPTATEGPETKPVLMALAEGPGAEGPRLASPSGSTSSGLEVVAPEGTSAPGGGPGTLDDSATICRVCQKPGDLVMCNQCEFCFHLDCHLPALQDVPGEEWSCSLCHVLPDLKEEDGSLSLDGADSTGVVAKLSPANQRKCERVLLALFCHEPCRPLHQLATDSTFSLDQPGGTLDLTLIRARLQEKLSPPYSSPQEFAQDVGRMFKQFNKLTEDKADVQSIIGLQRFFETRMNEAFGDTKFSAVLVEPPPMSLPGAGLSSQELSGGPGDGP

SEQ ID NO: 13751 - protein, 61 aa, Homo Sapiens
MRDSGSKAATDAQDANQCCTSCEDNAPATSYCVECSEPLCETCVEAHQRVKYTKDHTVRST

SEQ ID NO: 13752 - protein, 178 aa, Homo Sapiens
MRDSGSKAATDAQDANQCCTSCEDNAPATSYCVECSEPLCETCVEAHQRVKYTKDHTVRSTGPAKSRDGERTVYCNVHKHEPLVLFCESCDTLTCRDCQLNAHKDHQYQFLEDAVRNQRKLLASLVKRLGDKHATLQKSTKEVRSSIRQVSDVQKRVQVDVKMAILQIMKELNKRGRV

SEQ ID NO: 13753 - protein, 162 aa, Homo Sapiens
MRLGAQRPASVWSGGGAERGITLYKVVDCPVCKQQCFSKDIVENYFMRDSGSKAATDAQDANQCCTSCEDNAPATSYCVECSEPLCETCVEAHQRVKYTKDHTVRSTGPAKSRDGERTVYCNVHKHEPLVLFCESCDTLTCRDCQLNAHKDHQYQFLEDAVR

SEQ ID NO: 13754 - protein, 2546 aa, Homo Sapiens
IKAPIEDLDLEGQKLLQRIQSSESFPKKNSGSGNADLQNLLPKVSTMLDRLHSTRQHLHQMWHVRKLKLDQCFQLRLFEQDAEKMFDWITHNKGLFLNSYTEIGTSHPHAMELQTQHNHFAMNCMNVYVNINRIMSVANRLVESGHYASQQIRQIASQLEQEWKAFAAALDERSTLLDMSSIFHQKAEKYMSNVDSWCKACGEVDLPSELQDLEDAIHHHQGIYEHITLAYSEVSQDGKSLLDKLQRPLTPGSSDSLTASANYSKAVHHVLDVIHEVLHHQRQLENIWQHRKVRLHQRLQLCVFQQDVQQVLDWIENHGEAFLSKHTGVGKSLHRARALQKRHEDFEEVAQNTYTNADKLLEAAEQLAQTGECDPEEIYQAAHQLEDRIQDFVRRVEQRKILLDMSVSFHTHVKELWTWLEELQKELLDDVYAESVEAVQDLIKRFGQQQQTTLQVTVNVIKEGEDLIQQLRDSAISSNKTPHNSSINHIETVLQQLDEAQSQMEELFQERKIKLELFLQLRIFERDAIDIISDLESWNDELSQQMNDFDTEDLTIAEQRLQHHADKALTMNNLTFDVIHQGQDLLQYVNEVQASGVELLCDRDVDMATRVQDLLEFLHEKQQELDLAAEQHRKHLEQCVQLRHLQAEVKQVLGWIRNGESMLNAGLITASSLQEAEQLQREHEQFQHAIEKTHQSALQVQQKAEAMLQANHYDMDMIRDCAEKVASHWQQLMLKMEDRLKLVNASVAFYKTSEQVCSVLESLEQEYKREEDWCGGADKLGPNSETDHVTPMISKHLEQKEAFLKACTLARRNADVFLKYLHRNSVNMPGMVTHIKAPEQQVKNILNELFQRENRVLHYWTMRKRRLDQCQQYVVFERSAKQALEWIHDNGEFYLSTHTSTGSSIQHTQELLKEHEEFQITAKQTKERVKLLIQLADGFCEKGHAHAAEIKKCVTAVDKRYRDFSLRMEKYRTSLEKALGISSDSNKSSKSLQLDIIPASIPGSEVKLRDAAHELNEEKRKSARRKEFIMAELIQTEKAYVRDLRECMDTYLWEMTSGVEEIPPGIVNKELIIFGNMQEIYEFHNNIFLKELEKYEQLPEDVGHCFVTWADKFQMYVTYCKNKPDSTQLILEHAGSYFDEIQQRHGLANSISSYLIKPVQRITKYQLLLKELLTCCEEGKGEIKDGLEVMLSVPKRANDAMHLSMLEGFDENIESQGELILQESFQVWDPKTLIRKGRERHLFLFEMSLVFSKEVKDSSGRSKYLYKSKLFTSELGVTEHVEGDPCKFALWVGRTPTSDNKIVLKASSIENKQDWIKHIREVIQERTIHLKGALKEPIHIPKTAPATRQKGRRDGEDLDSQGDGSSQPDTISIASRTSQNTLDSDKLSGGCELTVVIHDFTACNSNELTIRRGQTVEVLERPHDKPDWCLVRTTDRSPAAEGLVPCGSLCIAHSRSSMEMEGIFNHKDSLSVSSNDASPPASVASLQPHMIGAQSSPGPKRPGNTLRKWLTSPVRRLSSGKADGHVKKLAHKHKKSREVRKSADAGSQKDSDDSAATPQDETVEERGRNEGLSSGTLSKSSSSGMQSCGEEEGEEGADAVPLPPPMAIQQHSLLQPDSQDDKASSRLLVRPTSSETPSAAELVSAIEELVKSKMALEDRPSSLLVDQGDSSSPSFNPSDNSLLSSSSPIDEMEERKSSSLKRRHYVLQELVETERDYVRDLGYVVEGYMALMKEDGVPDDMKGKDKIVFGNIHQIYDWHRDFFLGELEKCLEDPEKLGSLFVKHERRLHMYIAYCQNKPKSEHIVSEYIDTFFEDLKQRLGHRLQLTDLLIKPVQRIMKYQLLLKDFLKYSKKASLDTSELERAVEVMCIVPRRCNDMMNVGRLQGFDGKIVAQGKLLLQDTFLVTDQDAGLLPRCRERRIFLFEQIVIFSEPLDKKKGFSMPGFLFKNSIKVSCLCLEENVENDPCKFALTSRTGDVVETFILHSSSPSVRQTWIHEINQILENQRNFLNALTSPIEYQRNHSGGGGGGGSGGSGGGGGSGGGGAPSGGSGHSGGPSSCGGAPSTSRSRPSRIPQPVRHHPPVLVSSAASSQAEADKMSGTSTPGPSLPPPGAAPEAGPSAPSRRPPGADAEGSEREAEPIPKMKVLESPRKGAANASGSSPDAPAKDARASLGTLPLGKPRAGAASPLNSPLSSAVPSLGKEPFPPSSPLQKGGSFWSSIPASPASRPGSFTFPGDSDSLQRQTPRHAAPGKDTDRMSTCSSASEQSVQSTQSNGSESSSSSNISTMLVTHDYTAVKEDEINVYQGEVVQILASNQQNMFLVFRAATDQCPAAEGWIPGFVLGHTSAVIVENPDGTLKKSTSWHTALRLRKKSEKKDKDGKREGKLENGYRKSREGLSNKVSVKLLNPNYIYDVPPEFVIPLSEVTCETGETVVLRCRVCGRPKASITWKGPEHNTLNNDGHYSISYSDLGEATLKIVGVTTEDDGIYTCIAVNDMGSASSSASLRVLGPGMDGIMVTWKDNFDSFYSEVAELGRANWNNWSPY

SEQ ID NO: 13755 - protein, 1508 aa, Homo Sapiens
MAEGFRKNDEMKAMDVLPILKEKVAYLSGGRDKRGGPILTFPARSNHDRIRQEDLRRLISYLACIPSEEVCKRGFTVIVDMRGSKWDSIKPLLKILQESFPCCIHVALIIKPDNFWQKQRTNFGSSKFEFETNMVSLEGLTKVVDPSQLTPEFDGCLEYNHEEWIEIRVAFEDYISNATHMLSRLEELQDILAKKELPQDLEGARNMIEEHSQLKKKVIKAPIEDLDLEGQKLLQRIQSSESFPKKNSGSGNADLQNLLPKVSTMLDRLHSTRQHLHQMWHVRKLKLDQCFQLRLFEQDAEKMFDWITHNKGLFLNSYTEIGTSHPHAMELQTQHNHFAMNCMNVYVNINRIMSVANRLVESGHYASQQIRQIASQLEQEWKAFAAALDERSTLLDMSSIFHQKAEKYMSNVDSWCKACGEVDLPSELQDLEDAIHHHQGIYEHITLAYSEVSQDGKSLLDKLQRPLTPGSSDSLTASANYSKAVHHVLDVIHEVLHHQRQLENIWQHRKVRLHQRLQLCVFQQDVQQVLDWIENHGEAFLSKHTGVGKSLHRARALQKRHEDFEEVAQNTYTNADKLLEAAEQLAQTGECDPEEIYQAAHQLEDRIQDFVRRVEQRKILLDMSVSFHTHVKELWTWLEELQKELLDDVYAESVEAVQDLIKRFGQQQQTTLQVTVNVIKEGEDLIQQLRDSAISSNKTPHNSSINHIETVLQQLDEAQSQMEELFQERKIKLELFLQLRIFERDAIDIISDLESWNDELSQQMNDFDTEDLTIAEQRLQHHADKALTMNNLTFDVIHQGQDLLQYVNEVQASGVELLCDRDVDMATRVQDLLEFLHEKQQELDLAAEQHRKHLEQCVQLRHLQAEVKQVLGWIRNGESMLNAGLITASSLQEAEQLQREHEQFQHAIEKTHQSALQVQQKAEAMLQANHYDMDMIRDCAEKVASHWQQLMLKMEDRLKLVNASVAFYKTSEQVCSVLESLEQEYKREEDWCGGADKLGPNSETDHVTPMISKHLEQKEAFLKACTLARRNADVFLKYLHRNSVNMPGMVTHIKAPEQQVKNILNELFQRENRVLHYWTMRKRRLDQCQQYVVFERSAKQALEWIHDNGEFYLSTHTSTGSSIQHTQELLKEHEEFQITAKQTKERVKLLIQLADGFCEKGHAHAAEIKKCVTAVDKRYRDFSLRMEKYRTSLEKALGISSDSNKSSKSLQLDIIPASIPGSEVKLRDAAHELNEEKRKSARRKEFIMAELIQTEKAYVRDLRECMDTYLWEMTSGVEEIPPGIVNKELIIFGNMQEIYEFHNNIFLKELEKYEQLPEDVGHCFVTWADKFQMYVTYCKNKPDSTQLILEHAGSYFDEIQQRHGLANSISSYLIKPVQRITKYQLLLKELLTCCEEGKGEIKDGLEVMLSVPKRANDAMHLSMLEGFDENIESQGELILQESFQVWDPKTLIRKGRERHLFLFEMSLVFSKEVKDSSGRSKYLYKSKLFVSIGVQNCKSKGNTIAVFL

SEQ ID NO: 13756 - protein, 255 aa, Homo Sapiens
MALEDRPSSLLVDQGDSSSPSFNPSDNSLLSSSSPIDEMEERKSSSLKRRHYVLQELVETERDYVRDLGYVVEGYMALMKEDGVPDDMKGKDKIVFGNIHQIYDWHRDFFLGELEKCLEDPEKLGSLFVKHERRLHMYIAYCQNKPKSEHIVSEYIDTFFEDLKQRLGHRLQLTDLLIKPVQRIMKYQLLLKDFLKYSKKASLDTSELERAVEVMCIVPRRCNDMMNVGRLQGFDGRVVALCHRFKETFREICWF

SEQ ID NO: 13757 - protein, 2309 aa, Homo Sapiens
MKAMDVLPILKEKVAYLSGGRDKRGGPILTFPARSNHDRIRQEDLRRLISYLACIPSEEVCKRGFTVIVDMRGSKWDSIKPLLKILQESFPCCIHVALIIKPDNFWQKQRTNFGSSKFEFETNMVSLEGLTKVVDPSQLTPEFDGCLEYNHEEWIEIRVAFEDYISNATHMLSRLEELQDILAKKELPQDLEGARNMIEEHSQLKKKVIKAPIEDLDLEGQKLLQRIQSSESFPKKNSGSGNADLQNLLPKVSTMLDRLHSTRQHLHQMWHVRKLKLDQCFQLRLFEQDAEKMFDWITHNKGLFLNSYTEIGTSHPHAMELQTQHNHFAMNCMNVYVNINRIMSVANRLVESGHYASQQIRQIASQLEQEWKAFAAALDERSTLLDMSSIFHQKAEKYMSNVDSWCKACGEVDLPSELQDLEDAIHHHQGIYEHITLAYSEVSQDGKSLLDKLQRPLTPGSSDSLTASANYSKAVHHVLDVIHEVLHHQRQLENIWQHRKVRLHQRLQLCVFQQDVQQVLDWIENHGEAFLSKHTGVGKSLHRARALQKRHEDFEEVAQNTYTNADKLLEAAEQLAQTGECDPEEIYQAAHQLEDRIQDFVRRVEQRKILLDMSVSFHTHVKELWTWLEELQKELLDDVYAESVEAVQDLIKRFGQQQQTTLQVTVNVIKEGEDLIQQLRDSAISSNKTPHNSSINHIETVLQQLDEAQSQMEELFQERKIKLELFLQLRIFERDAIDIISDLESWNDELSQQMNDFDTEDLTIAEQRLQHHADKALTMNNLTFDVIHQGQDLLQYVNEVQASGVELLCDRDVDMATRVQDLLEFLHEKQQELDLAAEQHRKHLEQCVQLRHLQAEVKQVLGWIRNGESMLNAGLITASSLQEAEQLQREHEQFQHAIEKTHQSALQVQQKAEAMLQANHYDMDMIRDCAEKVASHWQQLMLKMEDRLKLVNASVAFYKTSEQVCSVLESLEQEYKREEDWCGGADKLGPNSETDHVTPMISKHLEQKEAFLKACTLARRNADVFLKYLHRNSVNMPGMVTHIKAPEQQVKNILNELFQRENRVLHYWTMRKRRLDQCQQYVVFERSAKQALEWIHDNGEFYLSTHTSTGSSIQHTQELLKEHEEFQITAKQTKERVKLLIQLADGFCEKGHAHAAEIKKCVTAVDKRYRDFSLRMEKYRTSLEKALGISSDSNKSSKSLQLDIIPASIPGSEVKLRDAAHELNEEKRKSARRKEFIMAELIQTEKAYVRDLRECMDTYLWEMTSGVEEIPPGIVNKELIIFGNMQEIYEFHNNIFLKELEKYEQLPEDVGHCFVTWADKFQMYVTYCKNKPDSTQLILEHAGSYFDEIQQRHGLANSISSYLIKPVQRITKYQLLLKELLTCCEEGKGEIKDGLEVMLSVPKRANDAMHLSMLEGFDENIESQGELILQESFQVWDPKTLIRKGRERHLFLFEMSLVFSKEVKDSSGRSKYLYKSKLFTSELGVTEHVEGDPCKFALWVGRTPTSDNKIVLKASSIENKQDWIKHIREVIQERTIHLKGALKEPIHIPKTAPATRQKGRRDGEDLDSQGDGSSQPDTISIASRTSQNTLDSDKLSGGCELTVVIHDFTACNSNELTIRRGQTVEVLERPHDKPDWCLVRTTDRSPAAEGLVPCGSLCIAHSRSSMEMEGIFNHKDSLSVSSNDASPPASVASLQPHMIGAQSSPGPKRPGNTLRKWLTSPVRRLSSGKADGHVKKLAHKHKKSREVRKSADAGSQKDSDDSAATPQDETVEERGRNEGLSSGTLSKSSSSGMQSCGEEEGEEGADAVPLPPPMAIQQHSLLQPDSQDDKASSRLLVRPTSSETPSAAELVSAIEELVKSKMALEDRPSSLLVDQGDSSSPSFNPSDNSLLSSSSPIDEMEERKSSSLKRRHYVLQELVETERDYVRDLGYVVEGYMALMKEDGVPDDMKGKDKIVFGNIHQIYDWHRDFFLGELEKCLEDPEKLGSLFVKHERRLHMYIAYCQNKPKSEHIVSEYIDTFFEDLKQRLGHRLQLTDLLIKPVQRIMKYQLLLKDFLKYSKKASLDTSELERAVEVMCIVPRRCNDMMNVGRLQGFDGKIVAQGKLLLQDTFLVTDQDAGLLPRCRERRIFLFEQIVIFSEPLDKKKGFSMPGFLFKNSIKVSCLCLEENVENDPCKFALTSRTGDVVETFILHSSSPSVRQTWIHEINQILENQRNFLNALTSPIEYQRNHSGGGGGGGSGGSGGGGGSGGGGAPSGGSGHSGGPSSCGGAPSTSRSRPSRIPQPVRHHPPVLVSSAASSQAEADKMSE

SEQ ID NO: 13758 - protein, 596 aa, Homo Sapiens
MLPSQAQGLLWWVFPLFPASSLSYPPVSYRADGLARNTFLKACSESSSSSNISTMLVTHDYTAVKEDEINVYQGEVVQILASNQQNMFLVFRAATDQCPAAEGWIPGFVLGHTSAVIVENPDGTLKKSTSWHTALRLRKKSEKKDKDGKREGKLENGYRKSREGLSNKVSVKLLNPNYIYDVPPEFVIPLSEVTCETGETVVLRCRVCGRPKASITWKGPEHNTLNNDGHYSISYSDLGEATLKIVGVTTEDDGIYTCIAVNDMGSASSSASLRVLGPGMDGIMVTWKDNFDSFYSEVAELGRGRFSVVKKCDQKGTKRAVATKFVNKKLMKRDQVTHELGILQSLQHPLLVGLLDTFETPTSYILVLEMADQGRLLDCVVRWGSLTEGKIRAHLGEVLEAVRYLHNCRIAHLDLKPENILVDESLAKPTIKLADFGDAVQLNTTYYIHQLLGNPEFAAPEIILGNPVSLTSDTWSVGVLTYVLLSGVSPFLDDSVEETCLNICRLDFSFPDDYFKGVSQKAKEFVCFLLQEDPAKRPSAALALQEQWLQAGNGRSTGVLDTSRLTSFIERRKHQNDVRPIRSIKNFLQSRLLPRV

SEQ ID NO: 13759 - protein, 458 aa, Homo Sapiens
MPNGLKPVDTLDSLSSVSSAYCSGGQPGTCKYWILDLDSLSVSSNDASPPASVASLQPHMIGAQSSPGPKRPGNTLRKWLTSPVRRLSSGKADGHVKKLAHKHKKSREVRKSADAGSQKDSDDSAATPQDETVEERGRNEGLSSGTLSKSSSSGMQSCGEEEGEEGADAVPLPPPMAIQQHSLLQPDSQDDKASSRLLVRPTSSETPSAAELVSAIEELVKSKMALEDRPSSLLVDQGDSSSPSFNPSDNSLLSSSSPIDEMEERKSSSLKRRHYVLQELVETERDYVRDLGYVVEGYMALMKEDGVPDDMKGKDKIVFGNIHQIYDWHRDFFLGELEKCLEDPEKLGSLFVKHERRLHMYIAYCQNKPKSEHIVSEYIDTFFEDLKQRLGHRLQLTDLLIKPVQRIMKYQLLLKDFLKYSKKASLDTSELERAVEVMCIVPRRCNDMMNVGRLQGFD

SEQ ID NO: 13760 - protein, 3097 aa, Homo Sapiens
MSGSSGGAAAPAASSGPAAAASAAGSGCGGGAGEGAEEAAKDLADIAAFFRSGFRKNDEMKAMDVLPILKEKVAYLSGGRDKRGGPILTFPARSNHDRIRQEDLRRLISYLACIPSEEVCKRGFTVIVDMRGSKWDSIKPLLKILQESFPCCIHVALIIKPDNFWQKQRTNFGSSKFEFETNMVSLEGLTKVVDPSQLTPEFDGCLEYNHEEWIEIRVAFEDYISNATHMLSRLEELQDILAKKELPQDLEGARNMIEEHSQLKKKVIKAPIEDLDLEGQKLLQRIQSSESFPKKNSGSGNADLQNLLPKVSTMLDRLHSTRQHLHQMWHVRKLKLDQCFQLRLFEQDAEKMFDWITHNKGLFLNSYTEIGTSHPHAMELQTQHNHFAMNCMNVYVNINRIMSVANRLVESGHYASQQIRQIASQLEQEWKAFAAALDERSTLLDMSSIFHQKAEKYMSNVDSWCKACGEVDLPSELQDLEDAIHHHQGIYEHITLAYSEVSQDGKSLLDKLQRPLTPGSSDSLTASANYSKAVHHVLDVIHEVLHHQRQLENIWQHRKVRLHQRLQLCVFQQDVQQVLDWIENHGEAFLSKHTGVGKSLHRARALQKRHEDFEEVAQNTYTNADKLLEAAEQLAQTGECDPEEIYQAAHQLEDRIQDFVRRVEQRKILLDMSVSFHTHVKELWTWLEELQKELLDDVYAESVEAVQDLIKRFGQQQQTTLQVTVNVIKEGEDLIQQLRDSAISSNKTPHNSSINHIETVLQQLDEAQSQMEELFQERKIKLELFLQLRIFERDAIDIISDLESWNDELSQQMNDFDTEDLTIAEQRLQHHADKALTMNNLTFDVIHQGQDLLQYVNEVQASGVELLCDRDVDMATRVQDLLEFLHEKQQELDLAAEQHRKHLEQCVQLRHLQAEVKQVLGWIRNGESMLNAGLITASSLQEAEQLQREHEQFQHAIEKTHQSALQVQQKAEAMLQANHYDMDMIRDCAEKVASHWQQLMLKMEDRLKLVNASVAFYKTSEQVCSVLESLEQEYKREEDWCGGADKLGPNSETDHVTPMISKHLEQKEAFLKACTLARRNADVFLKYLHRNSVNMPGMVTHIKAPEQQVKNILNELFQRENRVLHYWTMRKRRLDQCQQYVVFERSAKQALEWIHDNGEFYLSTHTSTGSSIQHTQELLKEHEEFQITAKQTKERVKLLIQLADGFCEKGHAHAAEIKKCVTAVDKRYRDFSLRMEKYRTSLEKALGISSDSNKSSKSLQLDIIPASIPGSEVKLRDAAHELNEEKRKSARRKEFIMAELIQTEKAYVRDLRECMDTYLWEMTSGVEEIPPGIVNKELIIFGNMQEIYEFHNNIFLKELEKYEQLPEDVGHCFVTWADKFQMYVTYCKNKPDSTQLILEHAGSYFDEIQQRHGLANSISSYLIKPVQRITKYQLLLKELLTCCEEGKGEIKDGLEVMLSVPKRANDAMHLSMLEGFDENIESQGELILQESFQVWDPKTLIRKGRERHLFLFEMSLVFSKEVKDSSGRSKYLYKSKLFTSELGVTEHVEGDPCKFALWVGRTPTSDNKIVLKASSIENKQDWIKHIREVIQERTIHLKGALKEPIHIPKTAPATRQKGRRDGEDLDSQGDGSSQPDTISIASRTSQNTLDSDKLSGGCELTVVIHDFTACNSNELTIRRGQTVEVLERPHDKPDWCLVRTTDRSPAAEGLVPCGSLCIAHSRSSMEMEGIFNHKDSLSVSSNDASPPASVASLQPHMIGAQSSPGPKRPGNTLRKWLTSPVRRLSSGKADGHVKKLAHKHKKSREVRKSADAGSQKDSDDSAATPQDETVEERGRNEGLSSGTLSKSSSSGMQSCGEEEGEEGADAVPLPPPMAIQQHSLLQPDSQDDKASSRLLVRPTSSETPSAAELVSAIEELVKSKMALEDRPSSLLVDQGDSSSPSFNPSDNSLLSSSSPIDEMEERKSSSLKRRHYVLQELVETERDYVRDLGYVVEGYMALMKEDGVPDDMKGKDKIVFGNIHQIYDWHRDFFLGELEKCLEDPEKLGSLFVKHERRLHMYIAYCQNKPKSEHIVSEYIDTFFEDLKQRLGHRLQLTDLLIKPVQRIMKYQLLLKDFLKYSKKASLDTSELERAVEVMCIVPRRCNDMMNVGRLQGFDGKIVAQGKLLLQDTFLVTDQDAGLLPRCRERRIFLFEQIVIFSEPLDKKKGFSMPGFLFKNSIKVSCLCLEENVENDPCKFALTSRTGDVVETFILHSSSPSVRQTWIHEINQILENQRNFLNALTSPIEYQRNHSGGGGGGGSGGSGGGGGSGGGGAPSGGSGHSGGPSSCGGAPSTSRSRPSRIPQPVRHHPPVLVSSAASSQAEADKMSGTSTPGPSLPPPGAAPEAGPSAPSRRPPGADAEGSEREAEPIPKMKVLESPRKGAANASGSSPDAPAKDARASLGTLPLGKPRAGAASPLNSPLSSAVPSLGKEPFPPSSPLQKGGSFWSSIPASPASRPGSFTFPGDSDSLQRQTPRHAAPGKDTDRMSTCSSASEQSVQSTQSNGSESSSSSNISTMLVTHDYTAVKEDEINVYQGEVVQILASNQQNMFLVFRAATDQCPAAEGWIPGFVLGHTSAVIVENPDGTLKKSTSWHTALRLRKKSEKKDKDGKREGKLENGYRKSREGLSNKVSVKLLNPNYIYDVPPEFVIPLSEVTCETGETVVLRCRVCGRPKASITWKGPEHNTLNNDGHYSISYSDLGEATLKIVGVTTEDDGIYTCIAVNDMGSASSSASLRVLGPGMDGIMVTWKDNFDSFYSEVAELGRGRFSVVKKCDQKGTKRAVATKFVNKKLMKRDQVTHELGILQSLQHPLLVGLLDTFETPTSYILVLEMADQGRLLDCVVRWGSLTEGKIRAHLGEVLEAVRYLHNCRIAHLDLKPENILVDESLAKPTIKLADFGDAVQLNTTYYIHQLLGNPEFAAPEIILGNPVSLTSDTWSVGVLTYVLLSGVSPFLDDSVEETCLNICRLDFSFPDDYFKGVSQKAKEFVCFLLQEDPAKRPSAALALQEQWLQAGNGRSTGVLDTSRLTSFIERRKHQNDVRPIRSIKNFLQSRLLPRV

SEQ ID NO: 13761 - protein, 227 aa, Homo Sapiens
MPGCRISACGPGAQEGTAEQRSPPPPWDPMPSSQPPPPTPTLTPTPTPGQSPPLPDAAGASAGAAEDQELQRWRQGASGIAGLAGPGGGSGAAAGAGGRALELAEARRRLLEVEGRRRLVSELESRVLQLHRVFLAAELRLAHRAESLSRLSGGVAQAELYLAAHGSRLKKGPRRGRRGRPPALLASALGLGGCVPWGAGRLRRGHGPEPDSPFRRSPPRGPASPQR

SEQ ID NO: 13762 - protein, 50 aa, Homo Sapiens
  misc_feature (1)..(1): Xaa can be any naturally occurring amino acid
XGRPPALLASALGLGGCVPWGAGRLRRGHGPEPDSPFRRSPPRGPASPQR

SEQ ID NO: 13763 - protein, 156 aa, Homo Sapiens
MRLRMELGAPEEMGQVPPLDSRPSSPALYFTHDASLVHKSPDPFGAVAAQKFSLAHSMLAISGHLDSDDDSGSGSLVGIDNKIEQAMDLVKSHLMFAVREEVEVLKEQIRELAERNAALEQENGLLRALASPEQLAQLPSSGVPRLGPPAPNGPSV

SEQ ID NO: 13764 - protein, 395 aa, Homo Sapiens
MSGGKKKSSFQITSVTTDYEGPGSPGASDPPTPQPPTGPPPRLPNGEPSPDPGGKGTPRNGSPPPGAPSSRFRVVKLPHGLGEPYRRGRWTCVDVYERDLEPHSFGGLLEGIRGASGGAGGRSLDSRLELASLGLGAPTPPSGLSQGPTSWLRPPPTSPGPQARSFTGGLGQLVVPSKAKAEKPPLSASSPQQRPPEPETGESAGTSRAATPLPSLRVEAEAGGSGARTPPLSRRKAVDMRLRMELGAPEEMGQVPPLDSRPSSPALYFTHDASLVHKSPDPFGAVAAQKFSLAHSMLAISGHLDSDDDSGSGSLVGIDNKIEQAMDLVKSHLMFAVREEVEVLKEQIRELAERNAALEQENGLLRALASPEQLAQLPSSGVPRLGPPAPNGPSV

SEQ ID NO: 13765 - protein, 168 aa, Homo Sapiens
  misc_feature (1)..(1): Xaa can be any naturally occurring amino acid
XHCLLSACLAPARPCSARGALSPPGIPFTASLSIGGVSKDPFPLGMAQPGVSVKSLVSSYETRVVGMAPGLPRKRGCASSPCSPRGASPIRGTSGPPPHRGLGGPGQRPSTRRGMDKTLLSLILYCHSGSGSLVGIDNKIEQAMPSRHWAGDEAPTPLTLCLSRGPQD

SEQ ID NO: 13766 - protein, 211 aa, Homo Sapiens
  misc_feature (1)..(1): Xaa can be any naturally occurring amino acid
XLLSACLAPARPCSARGALSPPGIPFTASLSIGGVSKDPFPLGMAQPGVSVKSLVSSYETRVVGMAPGLPRKRGCASSPCSPRGASPIRGTSGPPPHRGLGGPGQRPSTRRGMDKTLLSLILYCHSGSGSLVGIDNKIEQAMDLVKSHLMFAVREEVEVLKEQIRELAERNAALEQENGLLRALASPEQLAQLPSSGVPRLGPPAPNGPSV

SEQ ID NO: 13767 - protein, 138 aa, Homo Sapiens
MTALFLMSMLFGLTCGQAMSFCIPTEYTMHIERRECAYCLTINTTICAGYCMTRDINGKLFLPKYALSQDVCTYRDFIYRTVEIPGCPLHVAPYFSYPVALSCKCGKCNTDYSDCIHEAIKTNYCTKPQKSYLVGFSV

SEQ ID NO: 13768 - protein, 138 aa, Homo Sapiens; identical to SEQ ID NO: 13767

SEQ ID NO: 13769 - protein, 231 aa, Homo Sapiens
MRPADLLQLVLLLDLPRDLGGMGCSSPPCECHQEEDFRVTCKDIQRIPSLPPSTQTLKLIETHLRTIPSHAFSNLPNISRIYVSIDVTLQQLESHSFYNLSKVTHIEIRNTRNLTYIDPDALKELPLLKFLGIFNTGLKMFPDLTKVYSTDIFFILEITDNPYMTSIPVNAFQGLCNETLTLKLYNNGFTSVQGYAFNGTKLDAVYLNKNKYLTVIDKDAFGGVYSGPSLL

SEQ ID NO: 13770 - protein, 764 aa, Homo Sapiens
MRPADLLQLVLLLDLPRDLGGMGCSSPPCECHQEEDFRVTCKDIQRIPSLPPSTQTLKLIETHLRTIPSHAFSNLPNISRIYVSIDVTLQQLESHSFYNLSKVTHIEIRNTRNLTYIDPDALKELPLLKFLGIFNTGLKMFPDLTKVYSTDIFFILEITDNPYMTSIPVNAFQGLCNETLTLKLYNNGFTSVQGYAFNGTKLDAVYLNKNKYLTVIDKDAFGGVYSGPSLLDVSQTSVTALPSKGLEHLKELIARNTWTLKKLPLSLSFLHLTRADLSYPSHCCAFKNQKKIRGILESLMCNESSMQSLRQRKSVNALNSPLHQEYEENLGDSIVGYKEKSKFQDTHNNAHYYVFFEEQEDEIIGFGQELKNPQEETLQAFDSHYDYTICGDSEDMVCTPKSDEFNPCEDIMGYKFLRIVVWFVSLLALLGNVFVLLILLTSHYKLNVPRFLMCNLAFADFCMGMYLLLIASVDLYTHSEYYNHAIDWQTGPGCNTAGFFTVFASELSVYTLTVITLERWYAITFAMRLDRKIRLRHACAIMVGGWVCCFLLALLPLVGISSYAKVSICLPMDTETPLALAYIVFVLTLNIVAFVIVCCCYVKIYITVRNPQYNPGDKDTKIAKRMAVLIFTDFICMAPISFYALSAILNKPLITVSNSKILLVLFYPLNSCANPFLYAIFTKAFQRDVFILLSKFGICKRQAQAYRGQRVPPKNSTDIQVQKVTHEMRQGLHNMEDVYELIENSHLTPKKQGQISEEYMQTVL

SEQ ID NO: 13771 - protein, 764 aa, Homo Sapiens; identical to SEQ ID NO: 13770

SEQ ID NO: 13772 - protein, 253 aa, Homo Sapiens
MRPADLLQLVLLLDLPRDLGGMGCSSPPCECHQEEDFRVTCKDIQRIPSLPPSTQTLKLIETHLRTIPSHAFSNLPNISRIYVSIDVTLQQLESHSFYNLSKVTHIEIRNTRNLTYIDPDALKELPLLKFLGIFNTGLKMFPDLTKVYSTDIFFILEITDNPYMTSIPVNAFQGLCNETLTLKLYNNGFTSVQGYAFNGTKLDAVYLNKNKYLTVIDKDAFGGVYSGPSLLLPLGRKSLSFETQKAPRSSMPS

SEQ ID NO: 13773 - protein, 274 aa, Homo Sapiens
MRPADLLQLVLLLDLPRDLGGMGCSSPPCECHQEEDFRVTCKDIQRIPSLPPSTQTLKLIETHLRTIPSHAFSNLPNISRIYVSIDVTLQQLESHSFYNLSKVTHIEIRNTRNLTYIDPDALKELPLLKFLGIFNTGLKMFPDLTKVYSTDIFFILEITDNPYMTSIPVNAFQGLCNETLTLKLYNNGFTSVQGYAFNGTKLDAVYLNKNKYLTVIDKDAFGGVYSGPSLLVENVAVSGKGFCKSLFSWLYRLPLGRKSLSFETQKAPRSSMPS

SEQ ID NO: 13774 - protein, 112 aa, Homo Sapiens
MRPADLLQLVLLLDLPRDLGGMGCSSPPCECHQEEDFRVTCKDIQRIPSLPPSTQTLKLIETHLRTIPSHAFSNLPNISRIYVSIDVTLQQLESHSFYNLSKVTHITDTDAL

SEQ ID NO: 13775 - protein, 89 aa, Homo Sapiens
MRPADLLQLVLLLDLPRDLGGMGCSSPPCECHQEEDFRVTCKDIQRIPSLPPSTQTLYWRRERKKVWELEIKFNIEGDILNPSQEERKS

SEQ ID NO: 13776 - protein, 399 aa, Homo Sapiens
  misc_feature (1)..(1): Xaa can be any naturally occurring amino acid
XGQELKNPQEETLQAFDSHYDYTICGDSEDMVCTPKSDEFNPCEDIMGYKFLRIVVWFVSLLALLGNVFVLLILLTSHYKLNVPRFLMCNLAFADFCMGMYLLLIASVDLYTHSEYYNHAIDWQTGPGCNTAGFFTVFASELSVYTLTVITLERWYAITFAMRLDRKIRLRHACAIMVGGWVCCFLLALLPLVGISSYAKVSICLPMDTETPLALAYIVFVLTLNIVAFVIVCCCYVKIYITVRNPQYNPGDKDTKIAKRMAVLIFTDFICMAPISFYALSAILNKPLITVSNSKILLVLFYPLNSCANPFLYAIFTKAFQRDVFILLSKFGICKRQAQAYRGQRVPPKNSTDIQVQKVTHEMRQGLHNMEDVYELIENSHLTPKKQGQISEEYMQTVL

SEQ ID NO: 13777 - protein, 105 aa, Homo Sapiens
MPWPLLLLLAVSGAQTTRPCFPGCQCEVETFGLFDSFSLTRVDCSGLGPHIMPVPIPLDTAHLDLSSNRLEMVNESVLAGPGYTTLAGLDLSHNLLTSISPTAFS

SEQ ID NO: 13778 - protein, 150 aa, Homo Sapiens
MPWPLLLLLAVSGAQTTRPCFPGCQCEVETFGLFDSFSLTRVDCSGLGPHIMPVPIPLDTAHLDLSSNRLEMVNESVLAGPGYTTLAGLDLSHNLLTSISPTAFSRLRYLESLDLSHNGLTALPAESFTSSPLSDVNLSHNQLREVSVSA

SEQ ID NO: 13779 - protein, 353 aa, Homo Sapiens
MPWPLLLLLAVSGAQTTRPCFPGCQCEVETFGLFDSFSLTRVDCSGLGPHIMPVPIPLDTAHLDLSSNRLEMVNESVLAGPGYTTLAGLDLSHNLLTSISPTAFSRLRYLESLDLSHNGLTALPAESFTSSPLSDVNLSHNQLREVSVSAFTTHSQGRALHVDLSHNLIHRLVPHPTRAGLPAPTIQSLNLAWNRLHAVPNLRDLPLRYLSLDGNPLAVIGPGAFAGLGGLTHLSLASLQRLPELAPSGFRELPGLQVLDLSGNPKLNWAGAEVFSGLSSLQELDLSGTNLVPLPEALLLHLPALQSVSVGQDVRCRRLVREGTYPRRPGSSPKVALHCVDTRDSAARGPTIL

SEQ ID NO: 13780 - protein, 353 aa, Homo Sapiens; identical to SEQ ID NO: 13779

SEQ ID NO: 13781 - protein, 353 aa, Homo Sapiens; identical to SEQ ID NO: 13779

SEQ ID NO: 13782 - protein, 63 aa, Homo Sapiens
MFAMKTKAALAIWCPGYSETQINATQAMKKRRKRKVTTNKCLEQVSQLQGLWRRFNRPLLKQQ

SEQ ID NO: 13783 - protein, 159 aa, Homo Sapiens
MFPFALLYVLSVSFRKIFILQLVGLVLTYDFTNCDFEKIKAAYLSTISKDLITYMSGTKSTEFNNTVSCSNRPHCLTEIQSLTFNPTAGCASLAKEMFAMKTKAALAIWCPGYSETQINATQAMKKRRKRKVTTNKCLEQVSQLQGLWRRFNRPLLKQQ

SEQ ID NO: 13784 - protein, 159 aa, Homo Sapiens
MKCLGQSKKEEVSFRKIFILQLVGLVLTYDFTNCDFEKIKAAYLSTISKDLITYMSGTKSTEFNNTVSCSNRPHCLTEIQSLTFNPTAGCASLAKEMFAMKTKAALAIWCPGYSETQINATQAMKKRRKRKVTTNKCLEQVSQLQGLWRRFNRPLLKQQ

SEQ ID NO: 13785 - protein, 189 aa, Homo Sapiens
MGQCGITSSKTVLVFLNLIFWFVIILLLVFVTEVVVVVLGYVYRAKVENEVDRSIQKVYKTYNGTNPDAASRAIDYVQRQLHCCGIHNYSDWENTDWFKETKNQSVPLSCCRETASNCNGSLAHPSDLYAEGCEALVVKKLQEIMMHVIWAALAFAAIQLLGMLCACIVLCRRSRDPAYELLITGGTYA

SEQ ID NO: 13786 - protein, 253 aa, Homo Sapiens
MGQCGITSSKTVLVFLNLIFWGAAGILCYVGAYVFITYDDYDHFFEDVYTLIPAVVIIAVGALLFIIGLIGCCATIRESRCGLATFVIILLLVFVTEVVVVVLGYVYRAKVENEVDRSIQKVYKTYNGTNPDAASRAIDYVQRQLHCCGIHNYSDWENTDWFKETKNQSVPLSCCRETASNCNGSLAHPSDLYAEGCEALVVKKLQEIMMHVIWAALAFAAIQLLGMLCACIVLCRRSRDPAYELLITGGTYA

SEQ ID NO: 13787 - protein, 228 aa, Homo Sapiens
MGQCGITSSKTVLVFLNLIFWGAAGILCYVGAYVFITYDDYDHFFEDVYTLIPAVVIIAVGALLFIIGLIGCCATIRESRCGLATVENEVDRSIQKVYKTYNGTNPDAASRAIDYVQRQLHCCGIHNYSDWENTDWFKETKNQSVPLSCCRETASNCNGSLAHPSDLYAEGCEALVVKKLQEIMMHVIWAALAFAAIQLLGMLCACIVLCRRSRDPAYELLITGGTYA

SEQ ID NO: 13788 - protein, 164 aa, Homo Sapiens
MGQCGITSSKTVLVFLNLIFWVENEVDRSIQKVYKTYNGTNPDAASRAIDYVQRQLHCCGIHNYSDWENTDWFKETKNQSVPLSCCRETASNCNGSLAHPSDLYAEGCEALVVKKLQEIMMHVIWAALAFAAIQLLGMLCACIVLCRRSRDPAYELLITGGTYA

SEQ ID NO: 13789 - protein, 45 aa, Homo Sapiens
MMHVIWAALAFAAIQLLGMLCACIVLCRRSRDPAYELLITGGTYA

SEQ ID NO: 13790 - protein, 45 aa, Homo Sapiens; identical to SEQ ID NO: 13789

SEQ ID NO: 13791 - protein, 72 aa, Homo Sapiens
MIILGLVFIFQFVISCSCLAINRSKQTDVINASWWVMSNKTRDELERSFDCCGLFNLTTLYQQDYDFCTAIC

SEQ ID NO: 13792 - protein, 86 aa, Homo Sapiens
MIILGLVFIFQFVISCSCLAINRSKQTDVINASWWVMSNKTRDELERSFDCCGLFNLTTLYQQDYDFCTAICKSQSPTCQMCGEKF

SEQ ID NO: 13793 - protein, 126 aa, Homo Sapiens
MVCGGFACSKNALCALNVVYMLVSLLLIGVAAWGKGLGLVSSIHIIGGVIAVGVFLLLIAVAGLICKSQSPTCQMCGEKFLKHSDEALKILGGVGLFFSFTEILGVWLAMRFRNQKDPRANPSAFL

SEQ ID NO: 13794 - protein, 128 aa, Homo Sapiens
MVCGGFACSKNALCALNVVYMLVSLLLIGVAAWGKGLGLVSSIHIIGGVIAVGVFLLLIAVAGLVGAVNHHQVLLFFYMIILGLVFIFQFVISCSCLAINRSKQIILRCTASGLLGYLLPLGCLVNFP

SEQ ID NO: 13795 - protein, 113 aa, Homo Sapiens
MVCGGFACSKNALCALNVVYMLVSLLLIGVAAWGKGLGLVSSIHIIGGVIAVGVFLLLIAVAGLVGAVNHHQVLLFFYMIILGLVFIFQFVISCSCLAINRSKQMSSMLLGGS

SEQ ID NO: 13796 - protein, 210 aa, Homo Sapiens
MVCGGFACSKNALCALNVVYMLVSLLLIGVAAWGKGLGLVSSIHIIGGVIAVGVFLLLIAVAGLVGAVNHHQVLLFFYMIILGLVFIFQFVISCSCLAINRSKQTDVINASWWVMSNKTRDELERSFDCCGLFNLTTLYQQDYDFCTAICKSQSPTCQMCGEKFLKHSDEALKILGGVGLFFSFTEILGVWLAMRFRNQKDPRANPSAFL

SEQ ID NO: 13797 - protein, 127 aa, Homo Sapiens
MVCGGFACSKNALCALNVVYMTDVINASWWVMSNKTRDELERSFDCCGLFNLTTLYQQDYDFCTAICKSQSPTCQMCGEKFLKHSDEALKILGGVGLFFSFTEILGVWLAMRFRNQKDPRANPSAFL

SEQ ID NO: 13798 - protein, 38 aa, Homo Sapiens
MSALLSLCFVLPLAAPGHGTQGWEPCTACSSLKAWAEC

SEQ ID NO: 13799 - protein, 669 aa, Homo Sapiens
MSALLSLCFVLPLAAPGHGTQGWEPCTDLRPLDILAEVVPSDGATSGIRIVQVHGARGLQLSVAAPRTMSFPASRIFSQCDLFPEEFSIVVTLRVPNLPPKRNEYLLTVVAEESDLLLLGLRLSPAQLHFLFLREDTAGAWQTRVSFRSPALVDGRWHTLVLAVSAGVFSLTTDCGLPVDIMADVPFPATLSVKGARFFVGSRRRAKGLFMGLVRQLVLLPGSDATPRLCPSRNAPLAVLSIPRVLQALTGKPEDNEVLKYPYETNIRVTLGPQPPCTEVEDAQFWFDASRKGLYLCVGNEWVSVLAAKERLDYVEEHQNLSTNSETLGIEVFRIPQVGLFVATANRKATSAVYKWTEEKFVSYQNIPTHQAQAWRHFTIGKKIFLAVANFEPDEKGQEFSVIYKWSHRKLKFTPYQSIATHSARDWEAFEVDGEHFLAVANHREGDNHNIDSVIYKWNPATRLFEANQTIATSGAYDWEFFSVGPYSFLVVANTFNGTSTKVHSHLYIRLLGSFQLFQSFPTFGAADWEVFQIGERIFLAVANSHSYDVEMQVQNDSYVINSVIYELNVTAQAFVKFQDILTCSALDWEFFSVGEDYFLVVANSFDGRTFSVNSIIYRWQGYEGFVAVHSLPTVGCRDWEAFSTTAGAYLIYSSAKEPLSRVLRLRTR

SEQ ID NO: 13800 - protein, 669 aa, Homo Sapiens; identical to SEQ ID NO: 13799

SEQ ID NO: 13801 - protein, 601 aa, Homo Sapiens
MSFPASRIFSQCDLFPEEFSIVVTLRVPNLPPKRNEYLLTVVAEESDLLLLGLRLSPAQLHFLFLREDTAGAWQTRVSFRSPALVDGRWHTLVLAVSAGVFSLTTDCGLPVDIMADVPFPATLSVKGARFFVGSRRRAKGLFMGLVRQLVLLPGSDATPRLCPSRNAPLAVLSIPRVLQALTGKPEDNEVLKYPYETNIRVTLGPQPPCTEVEDAQFWFDASRKGLYLCVGNEWVSVLAAKERLDYVEEHQNLSTNSETLGIEVFRIPQVGLFVATANRKATSAVYKWTEEKFVSYQNIPTHQAQAWRHFTIGKKIFLAVANFEPDEKGQEFSVIYKWSHRKLKFTPYQSIATHSARDWEAFEVDGEHFLAVANHREGDNHNIDSVIYKWNPATRLFEANQTIATSGAYDWEFFSVGPYSFLVVANTFNGTSTKVHSHLYIRLLGSFQLFQSFPTFGAADWEVFQIGERIFLAVANSHSYDVEMQVQNDSYVINSVIYELNVTAQAFVKFQDILTCSALDWEFFSVGEDYFLVVANSFDGRTFSVNSIIYRWQGYEGFVAVHSLPTVGCRDWEAFSTTAGAYLIYSSAKEPLSRVLRLRTR

SEQ ID NO: 13802 - protein, 123 aa, Homo Sapiens
DIAVKWRRIADPDQPVLWLDQMPARSLSRGFNNHINLIRGQVINMRYLEYFEKILHFIKDRILVYHGANNPKGLLEVREALEKVHKVEDLLPIMKVTLASEWQSMFLEEKKTNSTFLKRTQNY

SEQ ID NO: 13803 - protein, 166 aa, Homo Sapiens
MAPAGCCCCCCFWGGAVAAAGAARRVLLLLLLGVLSAGLRPGALATEHYSPLSLLKQELQHRQQQEAPAGGGGCSPQSGDWGDQYSAECGAIAYVLIGSGLYDEAIRHFSTMLQILSPLGRINEAVNDLTKAIQLQPSARLYRHRGTLYFISEDYATAHEDFQQSL

SEQ ID NO: 13804 - protein, 860 aa, Homo Sapiens
MAPAGCCCCCCFWGGAVAAAGAARRVLLLLLLGVLSAGLRPGALATEHYSPLSLLKQELQHRQQQEAPAGGGGCSPQSGDWGDQYSAECGESSFLNFHDSDCEPKGSSPCDSLLSLNTEKILSQAKSIAEQKRFPFATDNDSTNEELAIAYVLIGSGLYDEAIRHFSTMLQEEPDLVSAIYGRGIAYGKKGLHDIKNAELALFELSRVITLEPDRPEVFEQRAEILSPLGRINEAVNDLTKAIQLQPSARLYRHRGTLYFISEDYATAHEDFQQSLELNKNQPIAMLYKGLTFFHRGLLKEAIESFKEALKQKVDFIDAYKSLGQAYRELGNFEAATESFQKALLLNQNHVQTLQLRGMMLYHHGSLQEALKNFKRCLQLEPYNEVCQYMKGLSHVAMGQFYEGIKAQTKVMLNDPLPGQKASPEYLKVKYLREYSRYLHAHLDTPLTEYNIDVDLPGSFKDHWAKNLPFLIEDYEEQPGLQPHIKDVLHQNFESYKPEVQELICVADRLGSLMQYETPGFLPNKRIHRAMGLAALEVMQAVQRTWTNSKVRMNGKTRLMQWRDMFDIAVKWRRIADPDQPVLWLDQMPARSLSRGFNNHINLIRGQVINMRYLEYFEKILHFIKDRILVYHGANNPKGLLEVREALEKVHKVEDLLPIMKQFNTKTKDGFTVNTKVPSLKDQGKEYDGFTITITGDKVGNILFSVETQTTEERTQLYHAEIDALYKDLTAKGKVLILSSEFGEADAVCNLILSLVYYFYNLMPLSRGSSVIAYSVIVGALMASGKEVAGKIPKGKLVDFEAMTAPGSEAFSKVAKSWMNLKSISPSYKTLPSVSETFPTLRSMIEVLNTDSSPRCLKKL

SEQ ID NO: 13805 - protein, 806 aa, Homo Sapiens
MAPAGCCCCCCFWGGAVAAAGAARRVLLLLLLGVLSAGLRPGALATEHYSPLSLLKQELQHRQQQEAPAGGGGCSPQSGDWGDQYSAECGESSFLNFHDSDCEPKGSSPCDSLLSLNTEKILSQAKSIAEQKRFPFATDNDSTNEELAIAYVLIGSGLYDEAIRHFSTMLQILSPLGRINEAVNDLTKAIQLQPSARLYRHRGTLYFISEDYATAHEDFQQSLELNKNQPIAMLYKGLTFFHRGLLKEAIESFKEALKQKVDFIDAYKSLGQAYRELGNFEAATESFQKALLLNQNHVQTLQLRGMMLYHHGSLQEALKNFKRCLQLEPYNEVCQYMKGLSHVAMGQFYEGIKAQTKVMLNDPLPGQKASPEYLKVKYLREYSRYLHAHLDTPLTEYNIDVDLPGSFKDHWAKNLPFLIEDYEEQPGLQPHIKDVLHQNFESYKPEVQELICVADRLGSLMQYETPGFLPNKRIHRAMGLAALEVMQAVQRTWTNSKVRMNGKTRLMQWRDMFDIAVKWRRIADPDQPVLWLDQMPARSLSRGFNNHINLIRGQVINMRYLEYFEKILHFIKDRILVYHGANNPKGLLEVREALEKVHKVEDLLPIMKFNTKTKDGFTVNTKVPSLKDQGKEYDGFTITITGDKVGNILFSVETQTTEERTQLYHAEIDALYKDLTAKGKVLILSSEFGEADAVCNLILSLVYYFYNLMPLSRGSSVIAYSVIVGALMASGKEVAGKIPKGKLVDFEAMTAPGSEAFSKVAKSWMNLKSISPSYKTLPSVSETFPTLRSMIEVLNTDSSPRCLKKL

SEQ ID NO: 13806 - protein, 255 aa, Homo Sapiens
MAPAGCCCCCCFWGGAVAAAGAARRVLLLLLLGVLSAGLRPGALATEHYSPLSLLKQELQHRQQQEAPAGGGGCSPQSGDWGDQYSAECGESSFLNFHDSDCEPKGSSPCDSLLSLNTEKILSQAKSIAEQKRFPFATDNDSTNEELAIAYVLIGSGLYDEAIRHFSTMLQILSPLGRINEAVNDLTKAIQLQPSARLYRHRGTLYFISENEVESCAVIRQEPRNQRLLKAEEKSDFEELWRPSMLKLLNPSKKL

SEQ ID NO: 13807 - protein, 150 aa, Homo Sapiens
MAPAGCCCCCCFWGGAVAAAGAARRVLLLLLLGVLSAGLRPGALATEHYSPLSLLKQELQHRQQQEAPAGGGGCSPQSGDWGDQYSAECGESSFLNFHDSDCEPKGSSPCDSLLSLNTEKILSQAKSIAEQKRFPFATDNDSTNEELDIY

SEQ ID NO: 13808 - protein, 186 aa, Homo Sapiens
  misc_feature (1)..(1): Xaa can be any naturally occurring amino acid
XWGGAVAAAGAARRVLLLLLLGVLSAGLRPGALATEHYSPLSLLKQELQHRQQQEAPAGGGGCSPQSGDWGDQYSAECGESSFLNFHDSDCEPKGSSPCDSLLSLNTEKILSQAKSIAEQKRFPFATDNDSTNEELAIAYVLIGSGLYDEAIRHFSTMLQEAIESFKEALKQKVDFIDAYKSLGQA

SEQ ID NO: 13809 - protein, 149 aa, Homo Sapiens
GRGGSMFRLLSWSLGRGFLRAAGRRCRGCSARLLPGLAGGPGPEVQVPPSRVAPHGRGPGLLPLLAALAWFSRPAAAEEEEQQGADGAAAEDGADEAEAEIIQLLKRAKLSIMKDEPEEAELILHDALRLAYQTDNKKAITYTYDLINW

SEQ ID NO: 13810 - protein, 380 aa, Homo Sapiens
MFRLLSWSLGRGFLRAAGRRCRGCSARLLPGLAGGPGPEVQVPPSRVAPHGRGPGLLPLLAALAWFSRPAAAEEEEQQGADGAAAEDGADEAEAEIIQLLKRAKLSIMKDEPEEAELILHDALRLAYQTDNKKAITYTYDLMANLAFIRGQLENAEQLFKATMSYLLGGGMKQEDNAIIEISLKLASIYAAQNRQEFAVAGYEFCISTLEEKIEREKELAEDIMSVEEKANTHLLLGMCLDACARYLLFSKQPSQAQRMYEKALQISEEIQGERHPQTIVLMSDLATTLDAQGRFDEAYIYMQRASDLARQINHPELHMVLSNLAAVLMHRERYTQAKEIYQEALKQAKLKKDEISVQHIREELAELSKKSRPLTNSVKL

SEQ ID NO: 13811 - protein, 99 aa, Homo Sapiens
SKQPSQAQRMYEKALQISEEIQGERHPQTIVLMSDLATTLDAQGRFDEAYIYMQRASDLARQINHPELHMVLSNLAAVLMHRAATTVLGPSKEAKATLG

SEQ ID NO: 13812 - protein, 63 aa, Homo Sapiens
  misc_feature (1)..(1): Xaa can be any naturally occurring amino acid
XGERHPQTIVLMSDLATTLDAQGRFDEAYIYMQRASDLARQINHPELHMVLSNLAAVLMHRGR

SEQ ID NO: 13813 - protein, 166 aa, Homo Sapiens
  misc_feature (1)..(1): Xaa can be any naturally occurring amino acid
XQERVWPAVRRGRGGSMFRLLSWSLGRGFLRAAGRRCRGCSARLLPGLAGGPGPEVQVPPSRVAPHGRGPGLLPLLAALAWFSRPAAAEEEEQQGADGAAAEDGADEAEAEIIQLLKRAKVRRLRALRPAERGSLCERGLGVAAHYSLRLAEEWMEAPRVKLPRMS

SEQ ID NO: 13814 - protein, 172 aa, Homo Sapiens
  misc_feature (1)..(1): Xaa can be any naturally occurring amino acid
XRRVVGGQERVWPAVRRGRGGSMFRLLSWSLGRGFLRAAGRRCRGCSARLLPGLAGGPGPEVQVPPSRVAPHGRGPGLLPLLAALAWFSRPAAAEEEEQQGADGAAAEDGADEAEAEIIQLLKRAKVRRLRALRPAERGSLCERGLGVAAHYSLRLAEEWMEAPRVKLPRMS

SEQ ID NO: 13815 - protein, 239 aa, Homo Sapiens
MQRGALSPVLMLSAAPEPPPRPPPALSPPGSGPGSGSRHGSARPGPTPEPSGSLGAALDSSLRAAVAFKAEGQRCYREKKFREAIGKYHRALLQLKAAQGARPSGLPAPAPGPTSSPGPARLSEEQRRLVESTEVECYDSLTACLLQSELVNYERVREYCLKVLEKQQGNFKATYRAGIAFYHLGDYARALRYLQEARSREPTDTNVLRYIQLTQLKMNRCSLQREDSGAGSQTRDVIG

SEQ ID NO: 13816 - protein, 800 aa, Homo Sapiens
MAAAASVTGRVTWAASPMRSLGLGRRLSLPGPRLDAVTAAVNPSLSDHGNGLGRGTRGSGCSGGSLVADWGGGAAAAAAVALALAPALSTMRRGSSESELAARWEAEAVAAAKAAAKAEAEATAETVAEQVRVDAGAAGEPECKAGEEQPKVLAPAPAQPSAAEEGNTQVLQRPPPTLPPSKPKPVQGLCPHGKPRDKGRSCKRSSGHGSGENGSQRPVTVDSSKARTSLDALKISIRQLKWKEFPFGRRLPCDIYWHGVSFHDNDIFSGQVNKFPGMTEMVRKITLSRAVRTMQNLFPEEYNFYPRSWILPDEFQLFVAQVQMVKDDDPSWKPTFIVKPDGGCQGDGIYLIKDPSDIRLAGTLQSRPAVVQEYICKPLLIDKLKFDIRLYVLLKSLDPLEIYIAKDGLSRFCTEPYQEPTPKNLHRIFMHLTNYSLNIHSGNFIHSDSASTGSKRTFSSILCRLSSKGVDIKKVWSDIISVVIKTVIALTPELKVFYQSDIPTGRPGPTCFQILGFDILLMKNLKPILLEVNANPSMRIEHEHELSPGVFENVPSLVDEEVKVAVIRDTLRLMDPLKKKRENQSQQLEKPFAGKEDALDGELTSAPDCNANPEAHLPSICLKQVFPKYAKQFNYLRLVDRMANLFIRFLGIKGTMKLGPTGFRTFIRSCKLSSSSLSMAAVDILYIDITRRWNSMTLDQRDSGMCLQAFVEAFFFLAQRKFKMLPLHEQVASLIDLCEYHLSLLDEKRLVCGRGVPSGGRPPHRGPPQEPSPSAQPAGDNPPPRTSCANKLSHPRHTLS

SEQ ID NO: 13817 - protein, 538 aa, Homo Sapiens
MAAAASVTGRVTWAASPMRSLGLGRRLSLPGPRLDAVTAAVNPSLSDHGNGLGRGTRGSGCSGGSLVADWGGGAAAAAAVALALAPALSTMRRGSSESELAARWEAEAVAAAKAAAKAEAEATAETVAEQVRVDAGAAGEPECKAGEEQPKVLAPAPAQPSAAEEGNTQVLQRPPPTLPPSKPKPVQGLCPHGKPRDKGRSCKRSSGHGSGENGSQRPVTVDSSKARTSLDALKISIRQLKWKEFPFGRRLPCDIYWHGVSFHDNDIFSGQVNKFPGMTEMVRKITLSRAVRTMQNLFPEEYNFYPRSWILPDEFQLFVAQVQMVKDDDPSWKPTFIVKPDGGCQGDGIYLIKDPSDIRLAGTLQSRPAVVQEYICKPLLIDKLKFDIRLYVLLKSLDPLEIYIAKDGLSRFCTEPYQEPTPKNLHRIFMHLTNYSLNIHSGNFIHSDSASTGSKRTFSSILCRLSSKGVDIKKVWSDIISVVIKTVIALTPELKVFYQSDIPTGRPGPTCFQVTIASSQPAFPALTGLKRALWLRVG

SEQ ID NO: 13818 - protein, 239 aa, Homo Sapiens
  misc_feature (1)..(1): Xaa can be any naturally occurring amino acid
XSDHGNGLGRGTRGSGCSGGSLVADWGGGAAAAAAVALALAPALSTMRRGSSESELAARWEAEAVAAAKAAAKAEAEATAETVAEQVRVDAGAAGEPECKAGEEQPKVLAPAPAQPSAAEEGNTQVLQRPPPTLPPSKPKPVQGLCPHGKPRDKGRSCKRSSGHGSGENGSQRPVTVDSSKARTSLDALKISIRQLKWKEFPFGRRLPCDIYWHGVSFHDNDIFSGQVNKFPGSNGERR

SEQ ID NO: 13819 - protein, 122 aa, Homo Sapiens
  misc_feature (1)..(1): Xaa can be any naturally occurring amino acid
XSSGHGSGENGSQRPVTVDSSKARTSLDALKISIRQLKWKEFPFGRRLPCDIYWHGVSFHDNDIFSGQVNKFPGMTEMVRKITLSRAVRTMQNLFPEESTSANLSLSTSSSLIFVCMSYSSP

SEQ ID NO: 13820 - protein, 66 aa, Homo Sapiens
  misc_feature (1)..(1): Xaa can be any naturally occurring amino acid
XVTVDSSKARTSLDALKISIRQLKWKEFPFGRRLPCDIYWHGVSFHDNDIFSGQVNKFPGSNGERR

SEQ ID NO: 13821 - protein, 185 aa, Homo Sapiens
MASHRLLLLCLAGLVFVSEAGPTGTGESKCPLMVKVLDAVRGSPAINVAVHVFRKAADDTWEPFASGKTSESGELHGLTTEEEFVEGIYKVEIDTKSYWKALGISPFHEHAEVSIQTFESFETDGCHGNRIQTCSSWSELQTSGFHQNVDVVFTANDSGPRRYTIAALLSPYSYSTTAVVTNPKE

SEQ ID NO: 13822 - protein, 147 aa, Homo Sapiens
MASHRLLLLCLAGLVFVSEAGPTGTGESKCPLMVKVLDAVRGSPAINVAVHVFRKAADDTWEPFASGKTSESGELHGLTTEEEFVEGIYKVEIDTKSYWKALGISPFHEHAEVVFTANDSGPRRYTIAALLSPYSYSTTAVVTNPKE

SEQ ID NO: 13823 - protein, 139 aa, Homo Sapiens
MASHRLLLLCLAGLVFVSEAGPTGTGESKCPLMVKVLDAVRGSPAINVAVHVFRKAADDTWEPFASGKTSESGELHGLTTEEEFVEGIYKVEIDTKSYWKALGISPFHEHAEVVFTANDSGPRRYYSYSTTAVVTNPKE

SEQ ID NO: 13824 - protein, 75 aa, Homo Sapiens
MKLHYVAVLTLAILMFLTWLPESLSCNKALCASDVSKCLIQELCQCRPGEGNCSCCKECMLCLGALWDECCDCVD

SEQ ID NO: 13825 - protein, 223 aa, Homo Sapiens
MKLHYVAVLTLAILMFLTWLPESLSCNKALCASDVSKCLIQELCQCRPGEGNCSCCKECMLCLGALWDECCDCVGMCNPRNYSDTPPTSKSTVEELHEPIPSLFRALTEGDTQLNWNIVSFPVAEELSHHENLVSFLETVNQPHHQNVSVPSNNVHAPYSSDKEHMCTVVYFDDCMSIHQCKISCESMGASKYRWFHNACCECIGPECIDYGSKTVKCMNCMF

SEQ ID NO: 13826 - protein, 184 aa, Homo Sapiens
MKLHYVAVLTLAILMFLTWLPESLSCNKALCASDVSKCLIQELCQCRPGEGNCSCCKECMLCLGALWDECCDCVGMCNPRNYSDTPPTSKSTVEELHEPIPSLFRALTEGDTQLNWNIVSFPVAEELSHHENLVSFLETVNQPHHQNVSVPSNNVHAPYSSDKGNCQQLTFSIPPPHVVCPCNL

SEQ ID NO: 13827 - protein, 56 aa, Homo Sapiens
METRPRLGATCLLGFSFLLLVISSDGHNGLGKGFGDHIHWRTLEDGKKEAAARIHV

SEQ ID NO: 13828 - protein, 55 aa, Homo Sapiens
METRPRLGATCLLGFSFLLLVISSDGHNGLGKGFGDHIHWRTLEDGKKEAAARPY

SEQ ID NO: 13829 - protein, 172 aa, Homo Sapiens
METRPRLGATCLLGFSFLLLVISSDGHNGLGKGFGDHIHWRTLEDGKKEAAASGLPLMVIIHKSWCGACKALKPKFAESTEISELSHNFVMVNLEDEEEPKDEDFSPDGGYIPRILFLDPSGKVHPEIINENGNPSYKYFYVSAEQVVQGMKEAQERLTGDAFRKKHLEDEL

SEQ ID NO: 13830 - protein, 179 aa, Homo Sapiens
MKNRRETRETPGNPQLAVAEESGRLWSEEQPAHPLQVGAVYLGEEELLHDPMGQDRAAEEANAVLGLDTQGDHMVMLSVIPGEAEDKVSSEPSGVTCGAGGAEDSRCNVRESLFSLDGAGAHFPDREEEYYTEPEVAESDAAPTEDSNNTESLKSPKVNCEERNITGLENFTLKILNMS

SEQ ID NO: 13831 - protein, 44 aa, Homo Sapiens
MVPAAGRRPPRVMRLLGWCCRGKWSLMVRGAACSPSPGGGCVPG

SEQ ID NO: 13832 - protein, 155 aa, Homo Sapiens
MVPAAGRRPPRVMRLLGWWQVLLWVLGLPVRGVEEESGRLWSEEQPAHPLQVGAVYLGEEELLHDPMGQDRAAEEANAVLGLDTQGDHMVMLSVIPGEAEDKVSSEPSGVTCGAGGAEDSRCNVRESLFSLDGAGAHFPDREEEYYTEPEVAESD

SEQ ID NO: 13833 - protein, 44 aa, Homo Sapiens
MVPAAGRRPPRVMRLLGWWQVLLWVLGLPVRGVEGPYGFSEPKR

SEQ ID NO: 13834 - protein, 360 aa, Homo Sapiens
MVPAAGRRPPRVMRLLGWWQVLLWVLGLPVRGVEVAEESGRLWSEEQPAHPLQVGAVYLGEEELLHDPMGQDRAAEEANAVLGLDTQGDHMVMLSVIPGEAEDKVSSEPSGVTCGAGGAEDSRCNVRESLFSLDGAGAHFPDREEEYYTEPEVAESDAAPTEDSNNTESLKSPKVNCEERNITGLENFTLKILNMSQDLMDFLNPNGSDCTLVLFYTPWCRFSASLAPHFNSLPRAFPALHFLALDASQHSSLSTRFGTVAVPNILLFQGAKPMARFNHTDRTLETLKIFIFNQTGIEAKKNVVVTQADQIGPLPSTLIKSVDWLLVFSLFFLISFIMYATIRTESIRWLIPGQEQEHVE

SEQ ID NO: 13835 - protein, 344 aa, Homo Sapiens
  misc_feature (1)..(1): Xaa can be any naturally occurring amino acid
XFPGVSWMEAGQQRVVEKVAEESGRLWSEEQPAHPLQVGAVYLGEEELLHDPMGQDRAAEEANAVLGLDTQGDHMVMLSVIPGEAEDKVSSEPSGVTCGAGGAEDSRCNVRESLFSLDGAGAHFPDREEEYYTEPEVAESDAAPTEDSNNTESLKSPKVNCEERNITGLENFTLKILNMSQDLMDFLNPNGSDCTLVLFYTPWCRFSASLAPHFNSLPRAFPALHFLALDASQHSSLSTRFGTVAVPNILLFQGAKPMARFNHTDRTLETLKIFIFNQTGIEAKKNVVVTQADQIGPLPSTLIKSVDWLLVFSLFFLISFIMYATIRTESIRWLIPGQEQEHVE

SEQ ID NO: 13836 - protein, 115 aa, Homo Sapiens
  misc_feature (1)..(1): Xaa can be any naturally occurring amino acid
XLALDASQHSRFGTVAVPNILLFQGAKPMARFNHTDRTLETLKIFIFNQTGIEAKKNVVVTQADQIGPLPSTLIKSVDWLLVFSLFFLISFIMYATIRTESIRWLIPGQEQEHVE

SEQ ID NO: 13837 - protein, 324 aa, Homo Sapiens
MEDAKVYVAKVDCTAHSDVCSAQGVRGYPTLKLFKPGQEAVKYQGPRDFQTLENWMLQTLNEEPVTPEPEVEPPSAPELKQGLYELSASNFELHVAQGDHFIKFFAPWCGHCKALAPTWEQLALGLEHSETVKIGKVDCTQHYELCSGNQVRGYPTLLWFRDGKKVDQYKGKRDLESLREYVESQLQRTETGATETVTPSEAPVLAAEPEADKGTVLALTENNFDDTIAEGITFIKFYAPWCGHCKTLAPTWEELSKKEFPGLAGVKIAEVDCTAERNICSKYSVRGYPTLLLFRGGKKVSEHSGGRDLDSLHRFVLSQAKDEL

SEQ ID NO: 13838 - protein, 432 aa, Homo Sapiens
MPARPGRLLPLLARPAALTALLLLLLGHGGGGRWGARAQEAAAAAADGPPAADGEDGQDPHSKHLYTADMFTHGIQSAAHFVMFFAPWCGHCQRLQPTWNDLGDKYNSMEDAKVYVAKVDCTAHSDVCSAQGVRGYPTLKLFKPGQEAVKYQGPRDFQTLENWMLQTLNEEPVTPEPEVEPPSAPELKQGLYELSASNFELHVAQGDHFIKFFAPWCGHCKALAPTWEQLALGLEHSETVKIGKVDCTQHYELCSGNQVRGYPTLLWFRDGKKVDQYKGKRDLESLREYVESQLQRTETGATETVTPSEAPVLAAEPEADKGTVLALTENNFDDTIAEGITFIKFYAPWCGHCKTLAPTWEELSKKEFPGLAGVKIAEVDCTAERNICSKYSVRGYPTLLLFRGGKKVSEHSGGRDLDSLHRFVLSQAKDEL

SEQ ID NO: 13839 - protein, 500 aa, Homo Sapiens
MAAMAVALRGLGGRFRWRTQAVAGGVRGAARGAAAAQLGRKVAVVDYVEPSPQGTRWGLGGTCVNVGCIPKKLMHQAALLGGLIQDAPNYGWEVAQPVPHDWRKMAEAVQNHVKSLNWGHRVQLQDRKVKYFNIKASFVDEHTVCGVAKGGKEILLSADHIIIATGGRPRYPTHIEGALEYGITSDDIFWLKESPGKTLVVGASYVALECAGFLTGIGLDTTIMMRSIPLRGFDQQMSSMVIEHMASHGTRFLRGCAPSRVRRLPDGQLQVTWEDSTTGKEDTGTFDTVLWAIGRVPDTRSLNLEKAGVDTSPDTQKILVDSREATSVPHIYAIGDVVEGRPELTPIAIMAGRLLVQRLFGGSSDLMDYDNVPTTVFTPLEYGCVGLSEEEAVARHGQEHVEVYHAHYKPLEFTVAGRDASQCYVKMVCLREPPQLVLGLHFLGPNAGEVTQGFALGIKCGASYAQVMRTVGIHPTCSEEVVKLRISKRSGLDPTVTGCG

SEQ ID NO: 13840 - protein, 338 aa, Homo Sapiens
MAAMAVALRGLGGRFRWRTQAVAGGVRGAARGAAAGQRDYDLLVVGGGSGGLACAKEAAQLGRKVAVVDYVEPSPQGTRWGLGGTCVNVGCIPKKLMHQAALLGGLIQDAPNYGWEVAQPVPHDWRKMAEAVQNHVKSLNWGHRVQLQDRKVKYFNIKASFVDEHTVCGVAKGGKEILLSADHIIIATGGRPRYPTHIEGALEYGITSDDIFWLKESPGKTLVVGASYVALECAGFLTGIGLDTTIMMRSIPLRGFDQQMSSMVIEHMASHGTRFLRGCAPSRVRRLPDGQLQVTWEDSTTGKEDTGTFDTVLWAIAPCISACLPTTVGHAGKNQRRD

SEQ ID NO: 13841 - protein, 523 aa, Homo Sapiens
MAAMAVALRGLGGRFRWRTQAVAGGVRGAARGAAAGQRDYDLLVVGGGSGGLACAKEAAQLGRKVAVVDYVEPSPQGTRWGLGGTCVNVGCIPKKLMHQAALLGGLIQDAPNYGWEVAQPVPHDWRKMAEAVQNHVKSLNWGHRVQLQDRKVKYFNIKASFVDEHTVCGVAKGGKEILLSADHIIIATGGRPRYPTHIEGALEYGITSDDIFWLKESPGKTLVVGASYVALECAGFLTGIGLDTTIMMRSIPLRGFDQQMSSMVIEHMASHGTRFLRGCAPSRVRRLPDGQLQVTWEDSTTGKEDTGTFDTVLWAIGRVPDTRSLNLEKAGVDTSPDTQKILVDSREATSVPHIYAIGDVVEGRPELTPIAIMAGRLLVQRLFGGSSDLMDYDNVPTTVFTPLEYGCVGLSEEEAVARHGQEHVEVYHAHYKPLEFTVAGRDASQCYVKMVCLREPPQLVLGLHFLGPNAGEVTQGFALGIKCGASYAQVMRTVGIHPTCSEEVVKLRISKRSGLDPTVTGCG

SEQ ID NO: 13842 - protein, 463 aa, Homo Sapiens
MAAMAVALRGLGGRFRWRTQAVAGGVRGAARGAAAGQRDYDLLVVGGGSGGLACAKEGTRWGLGGTCVNVGCIPKKLMHQAALLGGLIQDAPNYGWEVAQPVPHDWRKMAEAVQNHVKSLNWGHRVQLQDRKVKYFNIKASFVDEHTVCGVAKGGKEILLSADHIIIATGGRPRYPTHIEGALEYGITSDDIFWLKESPGKTLVVGASYVALECAGFLTGIGLDTTIMMRSIPLRGFDQQMSSMVIEHMASHGTRFLRGCAPSRVRRLPDGQLQVTWEDSTTGKEDTGTFDTVLWAIGRVPDTRSLNLEKAGVDTSPDTQKILVDSREATSVPHIYAIGDVVEGRPELTPIAIMAGRLLVQRLFGGSSDLMDYDNVPTTVFTPLEYGCVGLSEEEAVARHGQEHVEVYHAHYKPLEFTVAGRDASQCYVKMVCLREPPQLVLGLHFLGPNAGEVTQGFALGIK

SEQ ID NO: 13843 - protein, 522 aa, Homo Sapiens
MAAMAVALRGLGGRFRWRTQAVAGGVRGAARGAAGQRDYDLLVVGGGSGGLACAKEAAQLGRKVAVVDYVEPSPQGTRWGLGGTCVNVGCIPKKLMHQAALLGGLIQDAPNYGWEVAQPVPHDWRKMAEAVQNHVKSLNWGHRVQLQDRKVKYFNIKASFVDEHTVCGVAKGGKEILLSADHIIIATGGRPRYPTHIEGALEYGITSDDIFWLKESPGKTLVVGASYVALECAGFLTGIGLDTTIMMRSIPLRGFDQQMSSMVIEHMASHGTRFLRGCAPSRVRRLPDGQLQVTWEDSTTGKEDTGTFDTVLWAIGRVPDTRSLNLEKAGVDTSPDTQKILVDSREATSVPHIYAIGDVVEGRPELTPIAIMAGRLLVQRLFGGSSDLMDYDNVPTTVFTPLEYGCVGLSEEEAVARHGQEHVEVYHAHYKPLEFTVAGRDASQCYVKMVCLREPPQLVLGLHFLGPNAGEVTQGFALGIKCGASYAQVMRTVGIHPTCSEEVVKLRISKRSGLDPTVTGCG

SEQ ID NO: 13844 - protein, 306 aa, Homo Sapiens
MEAGQRDYDLLVVGGGSGGLACAKEAAQLGRKVAVVDYVEPSPQGTRWGLGGTCVNVGCIPKKLMHQAALLGGLIQDAPNYGWEVAQPVPHDWRKMAEAVQNHVKSLNWGHRVQLQDRKVKYFNIKASFVDEHTVCGVAKGGKEILLSADHIIIATGGRPRYPTHIEGALEYGITSDDIFWLKESPGKTLVVGASYVALECAGFLTGIGLDTTIMMRSIPLRGFDQQMSSMVIEHMASHGTRFLRGCAPSRVRRLPDGQLQVTWEDSTTGKEDTGTFDTVLWAIAPCISACLPTTVGHAGKNQRRD

SEQ ID NO: 13845 - protein, 493 aa, Homo Sapiens
MEDQAGQRDYDLLVVGGGSGGLACAKEAAQLGRKVAVVDYVEPSPQGTRWGLGGTCVNVGCIPKKLMHQAALLGGLIQDAPNYGWEVAQPVPHDWRKMAEAVQNHVKSLNWGHRVQLQDRKVKYFNIKASFVDEHTVCGVAKGGKEILLSADHIIIATGGRPRYPTHIEGALEYGITSDDIFWLKESPGKTLVVGASYVALECAGFLTGIGLDTTIMMRSIPLRGFDQQMSSMVIEHMASHGTRFLRGCAPSRVRRLPDGQLQVTWEDSTTGKEDTGTFDTVLWAIGRVPDTRSLNLEKAGVDTSPDTQKILVDSREATSVPHIYAIGDVVEGRPELTPIAIMAGRLLVQRLFGGSSDLMDYDNVPTTVFTPLEYGCVGLSEEEAVARHGQEHVEVYHAHYKPLEFTVAGRDASQCYVKMVCLREPPQLVLGLHFLGPNAGEVTQGFALGIKCGASYAQVMRTVGIHPTCSEEVVKLRISKRSGLDPTVTGCG

SEQ ID NO: 13846 - protein, 427 aa, Homo Sapiens
MHQAALLGGLIQDAPNYGWEVAQPVPHDWRKMAEAVQNHVKSLNWGHRVQLQDRKVKYFNIKASFVDEHTVCGVAKGGKEILLSADHIIIATGGRPRYPTHIEGALEYGITSDDIFWLKESPGKTLVVGASYVALECAGFLTGIGLDTTIMMRSIPLRGFDQQMSSMVIEHMASHGTRFLRGCAPSRVRRLPDGQLQVTWEDSTTGKEDTGTFDTVLWAIGRVPDTRSLNLEKAGVDTSPDTQKILVDSREATSVPHIYAIGDVVEGRPELTPIAIMAGRLLVQRLFGGSSDLMDYDNVPTTVFTPLEYGCVGLSEEEAVARHGQEHVEVYHAHYKPLEFTVAGRDASQCYVKMVCLREPPQLVLGLHFLGPNAGEVTQGFALGIKCGASYAQVMRTVGIHPTCSEEVVKLRISKRSGLDPTVTGCG

SEQ ID NO: 13847 - protein, 164 aa, Homo Sapiens
MKTGRPELTPIAIMAGRLLVQRLFGGSSDLMDYDNVPTTVFTPLEYGCVGLSEEEAVARHGQEHVEVYHAHYKPLEFTVAGRDASQCYVKMVCLREPPQLVLGLHFLGPNAGEVTQGFALGIKCGASYAQVMRTVGIHPTCSEEVVKLRISKRSGLDPTVTGCG

SEQ ID NO: 13848 - protein, 179 aa, Homo Sapiens
MKTVAGALLSLVMGQPSEGRPELTPIAIMAGRLLVQRLFGGSSDLMDYDNVPTTVFTPLEYGCVGLSEEEAVARHGQEHVEVYHAHYKPLEFTVAGRDASQCYVKMVCLREPPQLVLGLHFLGPNAGEVTQGFALGIKCGASYAQVMRTVGIHPTCSEEVVKLRISKRSGLDPTVTGCG

SEQ ID NO: 13849 - protein, 211 aa, Homo Sapiens
MPLRRTSSRGNAGRPELTPIAIMAGRLLVQRLFGGSSDLMDYDNVPTTVFTPLEYGCVGLSEEEAVARHGQEHVEVYHAHYKPLEFTVAGRDASQCYVKMVCLREPPQLVLGLHFLGPNAGEVTQGFALGIKCGASYAQVMRTVGIHPTCSEEVVKLRISKRSGLDPTVTGCGMAAGQVWGASTLSWSACEMVSVERKCWTGGPCAPQGWL

SEQ ID NO: 13850 - protein, 361 aa, Homo Sapiens
QQMSSMVIEHMASHGTRFLRGCAPSRVRRLPDGQLQVTWEDSTTGKEDTGTFDTVLWAIGRVPDTRSLNLEKAGVDTSPDTQKILVDSREATSVPHIYAIGDVVEGRPELTPIAIMAGRLLVQRLFGGSSDLMDYDNVPTTVFTPLEYGCVGLSEEEAVARHGQEHVEVYHAHYKPLEFTVAGRDASQCYVKMVCLREPPQLVLGLHFLGPNAGEVTQGFALGIKCGASYAQVMRTVGIHPTCSEEVVKLRISKRSGLDPTVTGCGMAAGQVWGASTLSWSACEMVSVERKCWTGGPCAPQGWLRGLSTSPLHLSASAAGHPPPGSWCQMMTTWVETYPVGTHVRAPWHFCNANKEGTFSE

SEQ ID NO: 13851 - protein, 171 aa, Homo Sapiens
  misc_feature (1)..(1): Xaa can be any naturally occurring amino acid
XGVAKGGKEILLSADHIIIATGGRPRYPTHIEGALEYGITSDDIFWLKESPGKTLVVGASYVALECAGFLTGIGLDTTIMMRSIPLRGFDQQMSSMVIEHMASHGTRFLRGCAPSRVRRLPDGQLQVTWEDSTTGKEDTGTFDTVLWAIGLPHPAGCQAGWPLPSAPREQP

SEQ ID NO: 13852 - protein, 247 aa, Homo Sapiens
MAQVPPPASGERHAGTEDGPIRRNPAGNVARPMVQRLPEPQDVAQCLEVGLFDTPPFYSNSTNSFRNTVEGYSDPTGKYDPAVRSLHNLAHLFLNGTGGQTHLSPNDPIFVLLHTFTDAVFDEWLRRYNADISTFPLENAPIGHNRQYNMVPFWPPVTNTEMFVTAPDNLGYTYEIQWPSREFSVPEIIAIAVVGALLLVALIFGTASYLIRARRSMDEANQPLLTDQYQCYAEEYEKLQNPNQSVV

SEQ ID NO: 13853 - protein, 102 aa, Homo Sapiens
MSAPKLLSLGCIFFPLLLFQQARAQFPRQCATVEALRSGMCCPDLSPVSGPGTDRCGSSSGRGRCEAVTADSRPHSPQYPHDGRDDREVWPLRFFNRTCHCN

SEQ ID NO: 13854 - protein, 537 aa, Homo Sapiens
MSAPKLLSLGCIFFPLLLFQQARAQFPRQCATVEALRSGMCCPDLSPVSGPGTDRCGSSSGRGRCEAVTADSRPHSPQYPHDGRDDREVWPLRFFNRTCHCNGNFSGHNCGTCRPGWRGAACDQRVLIVRRNLLDLSKEEKNHFVRALDMAKRTTHPLFVIATRRSEEILGPDGNTPQFENISIYNYFVWTHYYSVKKTFLGVGQESFGEVDFSHEGPAFLTWHRYHLLRLEKDMQEMLQEPSFSLPYWNFATGKNVCDICTDDLMGSRSNFDSTLISPNSVFSQWRVVCDSLEDYDTLGTLCNSTEDGPIRRNPAGNVARPMVQRLPEPQDVAQCLEVGLFDTPPFYSNSTNSFRNTVEGYSDPTGKYDPAVRSLHNLAHLFLNGTGGQTHLSPNDPIFVLLHTFTDAVFDEWLRRYNADISTFPLENAPIGHNRQYNMVPFWPPVTNTEMFVTAPDNLGYTYEIQWPSREFSVPEIIAIAVVGALLLVALIFGTASYLIRARRSMDEANQPLLTDQYQCYAEEYEKLQNPNQSVV

SEQ ID NO: 13855 - protein, 43 aa, Homo Sapiens
GGMINWNRLFPPLRQRQNVNYQGGRQSEPAAPPLEVSEEQTNE

SEQ ID NO: 13856 - protein, 309 aa, Homo Sapiens
MCFFFSLQEEFLDKHTLMRVLSSGGKLGSRGEGAQLCCWMLLFSWRVSGGQQTRRLCRRAFCWSPVPSPSCSPSSCLTARSSLCMTFTQSRTTSSLAPVFALFVPFYCSIPRVQVAQILGPLSITNKTLIYILGLQLFTSGSYIWIVAISGLMSGLCYDSKMFQVHQVLCIPSWMAKFFSWTLEPIFSSSEPTSEARIGMGATLDIQRQQRMELLDRQLMFSQFAQGRRQRQQQGGMINWNRLFPPLRQRQNVNYQGGRQSEPAAPPLEVSEEQVARLMEMGFSRGDALEALRASNNDLNVATNFLLQH

SEQ ID NO: 13857 - protein, 344 aa, Homo Sapiens
MFTSTGSSGLYKAPLSKSLLLVPSALSLLLALLLPHCQKLFVYDLHAVKNDFQIWRLICGRIICLDLKDTFCSSLLIYNFRIFERRYGSRKFASFLLGSWVLSALFDFLLIEAMQYFFGITAASNLPSGFLAPVFALFVPFYCSIPRVQVAQILGPLSITNKTLIYILGLQLFTSGSYIWIVAISGLMSGLCYDSKMFQVHQVLCIPSWMAKFFSWTLEPIFSSSEPTSEARIGMGATLDIQRQQRMELLDRQLMFSQFAQGRRQRQQQGGMINWNRLFPPLRQRQNVNYQGGRQSEPAAPPLEVSEEQVARLMEMGFSRGDALEALRASNNDLNVATNFLLQH

SEQ ID NO: 13858 - protein, 204 aa, Homo Sapiens
MFTSTGSSGLYKAPLSKSLLLVPSALSLLLALLLPHCQKLFVYDLHAVKNDFQMSGLCYDSKMFQVHQVLCIPSWMAKFFSWTLEPIFSSSEPTSEARIGMGATLDIQRQQRMELLDRQLMFSQFAQGRRQRQQQGGMINWNRLFPPLRQRQNVNYQGGRQSEPAAPPLEVSEEQVARLMEMGFSRGDALEALRASNNDLNVAT

SEQ ID NO: 13859 - protein, 135 aa, Homo Sapiens
MGTKPRRPPRPHLVSPDKAPLSKSLLLVPSALSLLLALLLPHCQKLFVYDLHAVKNDFQIWRLICGRIICLDLKDTFCSSLLIYNFRIFERRYGSRKFASFLLGSWVLSALFDFLLIEAMQYFFGITAASNLPSG

SEQ ID NO: 13860 - protein, 212 aa, Homo Sapiens
MKLLTLQPPGMLWLMERGGLGKPRGPRHRGLLRVRLGRFISRLLLWEPLGGGQAWGSGEGTQSLPRMGQPRISPWEAVGAPPGRGAHPISPLFPSQMCTPANTPATPPNFPDALTMFSRLKASESFHSGGSGSPMAATATSPPPHFPHAATSSSAASSWPTAASPPGGPQHHQPQPPLWTPTPPSPASDWPPLAPQQATSEPRAHPAMEAER

SEQ ID NO: 13861 - protein, 52 aa, Homo Sapiens
MMCTPANTPATPPNFPDALTMFSRLKASESFHSGGSGSPMAATATSPPPHFP

SEQ ID NO: 13862 - protein, 117 aa, Homo Sapiens
MMCTPANTPATPPNFPDALTMFSRLKASESFHSGGSGSPMAATATSPPPHFPHAATSSSAASSWPTAASPPGGPQHHQPQPPLWTPTPPSPASDWPPLAPQQATSEPRAHPAMEAER

SEQ ID NO: 13863 - protein, 67 aa, Homo Sapiens
MSVNMDELKHQRCCSLQRKGLWETPGLFPPPPSACLLGLPACLPCTWGYPHPLPFPLLTKEKNEFQT

SEQ ID NO: 13864 - protein, 156 aa, Homo Sapiens
MSVNMDELKHQVMINQFVLTAGCAADQAKQLLQAAHWQFEMCTPANTPATPPNFPDALTMFSRLKASESFHSGGSGSPMAATATSPPPHFPHAATSSSAASSWPTAASPPGGPQHHQPQPPLWTPTPPSPASDWPPLAPQQATSEPRAHPAMEAER

SEQ ID NO: 13865 - protein, 94 aa, Homo Sapiens
MSVNMDELKHQVMINQFVLTAGCAADQAKQLLQAAHWQFESSQGHPQPQRSLGTRAAAGPAGAWRVSRGLSSCRQPSAPFSRRPTSPTATITTR

SEQ ID NO: 13866 - protein, 152 aa, Homo Sapiens
MSVNMDELKHQVMINQFVLTAGCAADQAKQLLQAAHWQFETALSAFFQETNIPYSHHHHQMASESFHSGGSGSPMAATATSPPPHFPHAATSSSAASSWPTAASPPGGPQHHQPQPPLWTPTPPSPASDWPPLAPQQATSEPRAHPAMEAER

SEQ ID NO: 13867 - protein, 177 aa, Homo Sapiens
MSVNMDELKHQVMINQFVLTAGCAADQAKQLLQAAHWQFETALSAFFQETNIPYSHHHHQMMCTPANTPATPPNFPDALTMFSRLKASESFHSGGSGSPMAATATSPPPHFPHAATSSSAASSWPTAASPPGGPQHHQPQPPLWTPTPPSPASDWPPLAPQQATSEPRAHPAMEAER

SEQ ID NO: 13868 - protein, 122 aa, Homo Sapiens
MSVNMDELKHQVMINQFVLTAGCAADQAKQLLQAAHWQFEVRGAGAGRGPGPRAECVPRGRRAGADGVDACRLCAPSGPQTRPAFPTAVPGVRIPRARGGRRQPSAPFSRRPTSPTATITTR

SEQ ID NO: 13869 - protein, 117 aa, Homo Sapiens
HNRIPYQSPVSSSESAPGTIMNGHGGGRSQQTLDTPKTTGPPSALPSVSSLPSTTSCTALLPSTSQHTGDLTSSPLSQLSSMPVWRAPLPTSPQPPSPRQRPPSQVPHPQAPACPVA

SEQ ID NO: 13870 - protein, 412 aa, Homo Sapiens
MMTSVSSDHCRGAREKPQISAAQSTQPQKQVVQATAEQMRLAQVIFDKNDSDFEAKVKQLMEVTGKNQDECIVALHDCNGDVNKAINILLEGNSDTTSWETVGCKKKNFAKENSENKENREKKSEKESSRGRGNNNRKGRGGNRGREFRGEENGIDCNQVDKPSDRGKRARGRELASNTHNIAQDLSNKSSYGLKGAWKNSVEEWTTEDWTEDLSETKVFTASSAPAENHILPGQSIDLVALLQKPVPHSQASEANSFETSQQQGFGQALVFTNSQHNNQMAPGTGSSTAVNSCSPQSLSSVLGSGFGELAPPKMANITSSQILDQLKAPSLGQFTTTPSTQQNSTSHPTTTTSWDLKPPTSQSSVLSHLDFKSQPEPSPVLSQLSQRQQHQSQAVTVPPPGLESFPSQAKL

SEQ ID NO: 13871 - protein, 1119 aa, Homo Sapiens
MMTSVSSDHCRGAREKPQISAAQSTQPQKQVVQATAEQMRLAQVIFDKNDSDFEAKVKQLMEVTGKNQDECIVALHDCNGDVNKAINILLEGNSDTTSWETVGCKKKNFAKENSENKENREKKSEKESSRGRGNNNRKGRGGNRGREFRGEENGIDCNQVDKPSDRGKRARGRGFGRGRGRGAGRFSTQGMGTFNPADYSDSTSTDVCGTKLVVWEAAQNGADEGTELASNTHNIAQDLSNKSSYGLKGAWKNSVEEWTTEDWTEDLSETKVFTASSAPAENHILPGQSIDLVALLQKPVPHSQASEANSFETSQQQGFGQALVFTNSQHNNQMAPGTGSSTAVNSCSPQSLSSVLGSGFGELAPPKMANITSSQILDQLKAPSLGQFTTTPSTQQNSTSHPTTTTSWDLKPPTSQSSVLSHLDFKSQPEPSPVLSQLSQRQQHQSQAVTVPPPGLESFPSQAKLRESTPGDSPSTVNKLLQLPSTTIENISVSVHQPQPKHIKLAKRRIPPASKIPASAVEMPGSADVTGLNVQFGALEFGSEPSLSEFGSAPSSENSNQIPISLYSKSLSEPLNTSLSMTSAVQNSTYTTSVITSCSLTSSSLNSASPVAMSSSYDQSSVHNRIPYQSPVSSSESAPGTIMNGHGGGRSQQTLDTPKTTGPPSALPSVSSLPSTTSCTALLPSTSQHTGDLTSSPLSQLSSSLSSHQSSLSAHAALSSSTSHTHASVESASSHQSSATFSTAATSVSSSASSGASLSSSMNTANSLCLGGTPASASSSSSRAAPLVTSGKAPPNLPQGVPPLLHNQYLVGPGGLLPAYPIYGYDELQMLQSRLPVDYYGIPFAAPTALASRDGSLANNPYPGDVTKFGRGDSASPAPATTPAQPQQSQSQTHHTAQQPFVNPALPPGYSYTGLPYYTGMPSAFQYGPTMFVPPASAKQHGVNLSTPTPPFQQASGYGQHGYSTGYDDLTQGTAAGDYSKGGYAGSSQAPNKSAGSGPGKGVSVSSSTTGLPDMTGSVYNKTQTFDKQGFHAGTPPPFSLPSVLGSTGPLASGAAPGYAPPPFLHILPAHQQPHSQLLHHHLPQDAQSGSGQRSQPSSLQPKSQASKPAYGNSPYWTN

SEQ ID NO: 13872 - protein, 1119 aa, Homo Sapiens; identical to SEQ ID NO: 13871

SEQ ID NO: 13873 - protein, 358 aa, Homo Sapiens
MNTANSLCLGGTPASASSSSSRAAPLVTSGKAPPNLPQGVPPLLHNQYLVGPGGLLPAYPIYGYDELQMLQSRLPVDYYGIPFAAPTALASRDGSLANNPYPGDVTKFGRGDSASPAPATTPAQPQQSQSQTHHTAQQPFVNPALPPGYSYTGLPYYTGMPSAFQYGPTMFVPPASAKQHGVNLSTPTPPFQQASGYGQHGYSTGYDDLTQGTAAGDYSKGGYAGSSQAPNKSAGSGPGKGVSVSSSTTGLPDMTGSVYNKTQTFDKQGFHAGTPPPFSLPSVLGSTGPLASGAAPGYAPPPFLHILPAHQQPHSQLLHHHLPQDAQSGSGQRSQPSSLQPKSQASKPAYGNSPYWTN

SEQ ID NO: 13874 - protein, 176 aa, Homo Sapiens
MRLAQVIFDKNDSDFEAKVKQLMEVTGKNQDECIVALHDCNGDVNKAINILLEGNSDTTSWETVGCKKKNFAKENSENKENREKKSEKESSRGRGNNNRKGRGGNRGREFRGEENGIDCNQVDKPSDRGKRARGRELASNTHNIAQDLSNKSSYGLKGAWKNSVEEWTTEDWTEDH

SEQ ID NO: 13875 - protein, 278 aa, Homo Sapiens
  misc_feature (1)..(1): Xaa can be any naturally occurring amino acid
XEKESSRGRGNNNRKGRGGNRGREFRGEENGIDCNQVDKPSDRGKRARGRGFGRGRGRGAGRFSTQGMGTFNPADYSDSTSTDVCGTKLVVWEAAQNGADEGTGAWKNSVEEWTTEDWTEDLSETKVFTASSAPAENHILPGQSIDLVALLQKPVPHSQASEANSFETSQQQGFGQALVFTNSQHNNQMAPGTGSSTAVNSCSPQSLSSVLGSGFGELAPPKMANITSSQILDQLKAPSLGQFTTTPSTQQNSTSHPTTTTSWDLKPPTSQSSVLSHL

SEQ ID NO: 13876 - protein, 270 aa, Homo Sapiens
MASRGVVGIFFLSAVPLVCLELRRGIPDIGIKDFLLLCGRILLLLALLTLTISVTTSWLNSFKSPQVYLKEEEEKNEKRQKLVRKKQQEAQGEKASRYIENVLKPHQEMKLRKLEERFYQMTGEAWKLSSGHKLGGDEGTSQTSFETSNREAAKSQNLPKPLTEFPSPAEQPTCKEIPDLPEEPSQTAEEVVTVALRCPSGNVLRRRFLKSYSSQVLFDWMTRIGYHISLYSLSTSFPRRPLAVEGGQSLEDIGITVDTVLILEEKEQTN

SEQ ID NO: 13877 - protein, 229 aa, Homo Sapiens
MASRGVVGIFFLSAVPLVCLELRRGIPDIGIKDFLLLCGRILLLLALLTLTISVTTSWLNSFKSPQVYLKEEEEKNEKRQKLVRKKQQEAQGEKGDEGTSQTSFETSNREAAKSQNLPKPLTEFPSPAEQPTCKEIPDLPEEPSQTAEEVVTVALRCPSGNVLRRRFLKSYSSQVLFDWMTRIGYHISLYSLSTSFPRRPLAVEGGQSLEDIGITVDTVLILEEKEQTN

SEQ ID NO: 13878 - protein, 42 aa, Homo Sapiens
MASRGVVGIFFLSAVPLVCLELRRGIPDIGKCDFFPSTVTAG

SEQ ID NO: 13879 - protein, 233 aa, Homo Sapiens
MASRGVVGIFFLSAVPLVCLELRRGIPDIVYLKEEEEKNEKRQKLVRKKQQEAQGEKASRYIENVLKPHQEMKLRKLEERFYQMTGEAWKLSSGHKLGGDEGTSQTSFETSNREAAKSQNLPKPLTEFPSPAEQPTCKEIPDLPEEPSQTAEEVVTVALRCPSGNVLRRRFLKSYSSQVLFDWMTRIGYHISLYSLSTSFPRRPLAVEGGQSLEDIGITVDTVLILEEKEQTN

SEQ ID NO: 13880 - protein, 248 aa, Homo Sapiens
MCQREKRWQLGVLTQTVGPWPRPVAYLSKQLDGVFKGWPPCLRALAATALLVQEADKLTLGQNRNIKAPHAVVTLMNTKGHHWLMSARLTKYQSLLCENPRITIEVCNTLNPATLFPVSESPVEHDCVEVLDSVYSSRPDLRDQPWASVDWELYVDGSSFINPQGERFAGYAVVTLDTVVEARSLPQGTSAQKAELIALIRALELSEGIKDFLLLCGRILLLLALLTLTISVTTSWLNSFKSPQVYLK

SEQ ID NO: 13881 - protein, 310 aa, Homo Sapiens
MLYSGTWRTVGIRCPRKKAQICQQQECCIERPPLRLRGFGAALTTTPRLHRPCPPTSGADFTSRNLFPPGIKDFLLLCGRILLLLALLTLTISVTTSWLNSFKSPQVYLKEEEEKNEKRQKLVRKKQQEAQGEKASRYIENVLKPHQEMKLRKLEERFYQMTGEAWKLSSGHKLGGDEGTSQTSFETSNREAAKSQNLPKPLTEFPSPAEQPTCKEIPDLPEEPSQTAEEVVTVALRCPSGNVLRRRFLKSYSSQVLFDWMTRIGYHISLYSLSTSFPRRPLAVEGGQSLEDIGITVDTVLILEEKEQTN

SEQ ID NO: 13882 - protein, 94 aa, Homo Sapiens
  misc_feature (1)..(1): Xaa can be any naturally occurring amino acid
XIKDFLLLCGRILLLLALLTLTISVTTSWLNSFKSPQVYLKEEEEKNEKRQKLVRKKQQEAQGEKASRYIENVLKPHQEMKLRKLEERFYQMTG

SEQ ID NO: 13883 - protein, 138 aa, Homo Sapiens
MTWRQAVLLSCFSAVVLLSMLREGTSVSVGTMQMAGEEASEDAKQKIFMQESDASNFLKRRGKRSPKSRDEVNVENRQKLRVDELRREYYEEQRNEFENFVEEQNDEQEERSREAVEQWRQWHYDGLHPSYLYNRHHT

SEQ ID NO: 13884 - protein, 116 aa, Homo Sapiens
MTWRQAVLLSCFSAVVLLSNAKQKIFMQESDASNFLKRRGKRSPKSRDEVNVENRQKLRVDELRREYYEEQRNEFENFVEEQNDEQEERSREAVEQWRQWHYDGLHPSYLYNRHHT

SEQ ID NO: 13885 - protein, 124 aa, Homo Sapiens
MRQAGRAALLAALLLLVQLCPGSSQRSPEAAGVQDPSLRWSPGARNQGGGARALLLLLAERFPRRAGPGRLGLGTAGERPRRDNPSLSIDLTFHLLRTLLELARTQSQRERAEQNRIIFDSVGK

SEQ ID NO: 13886 - protein, 112 aa, Homo Sapiens
MTRCALLLLMVLMLGRVLVVPVTPIPTFQLRPQNSPQTTPRPAASESPSAAPTWPWAAQSHCSPTRHPGSRIVLSLDVPIGLLQILLEQARARAAREQATTNARILARVGHC

SEQ ID NO: 13887 - protein, 161 aa, Homo Sapiens
MLMPVHFLLLLLLLLGGPRTGLPHKFYKAKPIFSCLNTALSEAEKGQWEDASLLSKRSFHYLRSRDASSGEEEEGKEKKTFPISGARGGARGTRYRYVSQAQPRGKPRQDTAKSPHRTKFTLSLDVPTNIMNLLFNIAKAKNLRAQAAANAHLMAQIGRKK

SEQ ID NO: 13888 - protein, 1516 aa, Homo Sapiens
MAPAKATNVVRLLLGSTALWLSQLGSGTVAASKSVTAHLAAKWPETPLLLEASEFMAEESNEKFWQFLETVQELAIYKQTESDYSYYNLILKKAGQFLDNLHINLLKFAFSIRAYSPAIQMFQQIAADEPPPDGCNAFVVIHKKHTCKINEIKKLLKKAASRTRPYLFKGDHKFPTNKENLPVVILYAEMGTRTFSAFHKVLSEKAQNEEILYVLRHYIQKPSSRKMYLSGYGVELAIKSTEYKALDDTQVKTVTNTTVEDETETNEVQGFLFGKLKEIYSDLRDNLTAFQKYLIESNKQMMPLKVWELQDLSFQAASQIMSAPVYDSIKLMKDISQNFPIKARSLTRIAVNQHMREEIKENQKDLQVRFKIQPGDARLFINGLRVDMDVYDAFSILDMLKLEGKMMNGLRNLGINGEDMSKFLKLNSHIWEYTYVLDIRHSSIMWINDLENDDLYITWPTSCQKLLKPVFPGSVPSIRRNFHNLVLFIDPAQEYTLDFIKLADVFYSHEVPLRIGFVFILNTDDEVDGANDAGVALWRAFNYIAEEFDISEAFISIVHMYQKVKKDQNILTVDNVKSVLQNTFPHANIWDILGIHSKYDEERKAGASFYKMTGLGPLPQALYNGEPFKHEEMNIKELKMAVLQRMMDASVYLQREVFLGTLNDRTNAIDFLMDRNNVVPRINTLILRTNQQYLNLISTSVTADVEDFSTFFFLDSQDKSAVIAKNMYYLTQDDESIISAVTLWIIADFDKPSGRKLLFNALKHMKTSVHSRLGIIYNPTSKINEENTAISRGILAAFLTQKNMFLRSFLGQLAKEEIATAIYSGDKIKTFLIEGMDKNAFEKKYNTVGVNIFRTHQLFCQDVLKLRPGEMGIVSNGRFLGPLDEDFYAEDFYLLEKITFSNLGEKIKGIVENMGINANNMSDFIMKVDALMSSVPKRASRYDVTFLRENHSVIKTNPQENDMFFNVIAIVDPLTREAQKMAQLLVVLGKIINMKIKLFMNCRGRLSEAPLESFYRFVLEPELMSGANDVSSLGPVAKFLDIPESPLLILNMITPEGWLVETVHSNCDLDNIHLKDTEKTVTAEYELEYLLLEGQCFDKVTEQPPRGLQFTLGTKNKPAVVDTIVMAHHGYFQLKANPGAWILRLHQGKSEDIYQIVGHEGTDSQADLEDIIVVLNSFKSKILKVKVKKETDKIKEDILTDEDEKTKGLWDSIKSFTVSLHKENKKEKDVLNIFSVASGHLYERFLRIMMLSVLRNTKTPVKFWLLKNYLSPTFKEVIPHMAKEYGFRYELVQYRWPRWLRQQTERQRIIWGYKILFLDVLFPLAVDKIIFVDADQIVRHDLKELRDFDLDGAPYGYTPFCDSRREMDGYRFWKTGYWASHLLRRKYHISALYVVDLKKFRRIGAGDRLRSQYQALSQDPNSLSNLDQDLPNNMIYQVAIKSLPQDWLWCETWCDDESKQRAKTIDLCNNPKTKESKLKAAARIVPEWVEYDAEIRQLLDHLENKKQDTILTHDEL

SEQ ID NO: 13889 - protein, 278 aa, Homo Sapiens
MAPAKATNVVRLLLGSTALWLSQLGSGTVAASKSVTAHLAAKWPETPLLLEASEFMAEESNEKFWQFLETVQELAIYKQTESDYSYYNLILKKAGQFLDNLHINLLKFAFSIRAYSPAIQMFQQIAADEPPPDGCNAFVVIHKKHTCKINEIKKLLKKAASRTRPYLFKGDHKFPTNKENLPVVILYAEMGTRTFSAFHKVLSEKAQNEEILYVLRHYIQKPSSRKMYLSGYGVELAIKSTEYKALDDTQVKTVTNTTVEDETETNEVQGFLFGKLKS

SEQ ID NO: 13890 - protein, 280 aa, Homo Sapiens
MAPAKATNVVRLLLGSTALWLSQLGSGTVAASKSVTAHLAAKWPETPLLLEASEFMAEESNEKFWQFLETVQELAIYKQTESDYSYYNLILKKAGQFLDNLHINLLKFAFSIRAYSPAIQMFQQIAADEPPPDGCNAFVVIHKKHTCKINEIKKLLKKAASRTRPYLFKGDHKFPTNKENLPVVILYAEMGTRTFSAFHKVLSEKAQNEEILYVLRHYIQKPSSRKMYLSGYGVELAIKSTEYKALDDTQVKTVTNTTVEDETETNEVQGFLFGKLKLVY

SEQ ID NO: 13891 - protein, 372 aa, Homo Sapiens
MAPAKATNVVRLLLGSTALWLSQLGSGTVAASKSVTAHLAAKWPETPLLLEASEFMAEESNEKFWQFLETVQELAIYKQTESDYSYYNLILKKAGQFLDNLHINLLKFAFSIRAYSPAIQMFQQIAADEPPPDGCNAFVVIHKKHTCKINEIKKLLKKAASRTRPYLFKGDHKFPTNKENLPVVILYAEMGTRTFSAFHKVLSEKAQNEEILYVLRHYIQKPSSRKMYLSGYGVELAIKSTEYKALDDTQVKTVTNTTVEDETETNEVQGFLFGKLKEIYSDLRDNLTAFQKYLIESNKQMMPLKVWELQDLSFQAASQIMSAPVYDSIKLMKDISQNFPIKARLRMNILICLFQSTLNVKNLRSRHLYNKT

SEQ ID NO: 13892 - protein, 280 aa, Homo Sapiens [sequence omitted]

SEQ ID NO: 13893 - protein, 278 aa, Homo Sapiens; identical to SEQ ID NO: 13889

SEQ ID NO: 13894 - protein, 530 aa, Homo Sapiens
MARAGWTSPVPLCVCLLLTCGFAEAGKLLVVPMDGSHWFTMQSVVEKLILRGHEVVVVMPEVSWQLERSLNCTVKTYSTSYTLEDQNREFMVFAHAQWKAQAQSIFSLLMSSSSGFLDLFFSHCRSLFNDRKLVEYLKESSFDAVFLDPFDTCGLIVAKYFSLPSVVFTRGIFCHHLEEGAQCPAPLSYVPNDLLGFSDAMTFKERVWNHIVHLEDHLFCQYLFRNALEIASEILQTPVTAYDLYSHTSIWLLRTDFVLDYPKPVMPNMIFIGGINCHQGKPLPMEFEAYINASGEHGIVVFSLGSMVSEIPEKKAMAIADALGKIPQTVLWRYTGTRPSNLANNTILVKWLPQNDLLGHPMTRAFITHAGSHGVYESICNGVPMVMMPLFGDQMDNAKRMETKGAGVTLNVLEMTSEDLENALKAVINDKSYKENIMRLSSLHKDRPVEPLDLAVFWVEFVMRHKGAPHLRPAAHDLTWYQYHSLDVIGFLLAVVLTVAFITFKCCAYGYRKCLGKKGRVKKAHKSKTH

SEQ ID NO: 13895 - protein, 441 aa, Homo Sapiens
MARAGWTSPVPLCVCLLLTCGFAEAGKLLVVPMDGSHWFTMQSVVEKLILRGHEVVVVMPEVSWQLERSLNCTVKTYSTSYTLEDQNREFMVFAHAQWKAQAQSIFSLLMSSSSGFLDLFFSHCRSLFNDRKLVEYLKESSFDAVFLDPFDTCGLIVAKYFSLPSVVFTRGIFCHHLEEGAQCPAPLSYVPNDLLGFSDAMTFKERVWNHIVHLEDHLFCQYLFRNALEIASEILQTPVTAYDLYSHTSIWLLRTDFVLDYPKPVMPNMIFIGGINCHQGKPLPMEFEAYINASGEHGIVVFSLGSMVSEIPEKKAMAIADALGKIPQTVLWRYTGTRPSNLANNTILVKWLPQNDLLGHPMTRAFITHAGSHGVYESICNGVPMVMMPLFGDQMDNAKRMETKGAGVTLNVLEMTSEDLENALKAVINDKRKKQQSGRQM

SEQ ID NO: 13896 - protein, 158 aa, Homo Sapiens
MLNNLLLFSLQISLIGTTLGGNVLIWPMEGSHWLNVKIIIDELIKKEHNVTVLVASGALFITPTSNPSLTFEIYKVPFGKERIEGVIKDFVLTWLENRPSPSTIWRFYQEMAKVIKDFHMVSQEICDGVLKNQQLMAKLKKSKFEVLVSDPVFPCGDI

SEQ ID NO: 13897 - protein, 693 aa, Homo Sapiens
MLNNLLLFSLQISLIGTTLGGNVLIWPMEGSHWLNVKIIIDELIKKEHNVTVLVASGALFITPTSNPSLTFEIYKVPFGKERIEGVIKDFVLTWLENRPSPSTIWRFYQEMAKVIKDFHMVSQEICDGVLKNQQLMAKLKKSKFEVLVSDPVFPCGDIVALKLGIPFMYSLRFSPASTVEKHCGKVPYPPSYVPAVLSELTDQMSFTDRIRNFISYHLQDYMFETLWKSWDSYYSKALDGSHWLNIKIILEELIQRNHNVTVLASSATLFINSNPDSPVNFEVIPVSYKKSNIDSLIEHMIMLWIDHRPTPLTIWAFYKELGKLLDTFFQINIQLCDGVLKNPKLMARLQKGGFDVLVADPVTICGDLVALKLGIPFMYTLRFSPASTVERHCGKIPAPVSYVPAALSELTDQMTFGERIKNTISYSLQDYIFQSYWGEWNSYYSKILGRPTTLCETMGKAEIWLIRTYWDFEFPRPYLPNFEFVGGLHCKPAKPLPKVLWRYKGKKPATLGNNTQLFDWIPQNDLLGHPKTKAFITHGGTNGIYEAIYHGVPMVGVPMFADQPDNIAHMKAKGAAVEVNLNTMTSVDLLSALRTVINEPSYKENAMRLSRIHHDQPVKPLDRAVFWIEFVMRHKGAKHLRVAAHDLTWFQYHSLDVIGFLLVCVTTAIFLVIQCCLFSCQKFGKIGKKKKRE

SEQ ID NO: 13898 - protein, 527 aa, Homo Sapiens
MLNNLLLFSLQISLIGTTLGGNVLIWPMEGSHWLNVKIIIDELIKKEHNVTVLVASGALFITPTSNPSLTFEIYKVPFGKERIEGVIKDFVLTWLENRPSPSTIWRFYQEMAKVIKDFHMVSQEICDGVLKNQQLMAKLKKSKFEVLVSDPVFPCGDIVALKLGIPFMYSLRFSPASTVEKHCGKVPYPPSYVPAVLSELTDQMSFTDRIRNFISYHLQDYMFETLWKSWDSYYSKALGGLLLCCPGWSAVADLGSLQPLLPGFKRFSRLSLHCSWDYRLPAGRPTTLCETMGKAEIWLIRTYWDFEFPRPYLPNFEFVGGLHCKPAKPLPKVLWRYKGKKPATLGNNTQLFDWIPQNDLLGHPKTKAFITHGGTNGIYEAIYHGVPMVGVPMFADQPDNIAHMKAKGAAVEVNLNTMTSVDLLSALRTVINEPSYKENAMRLSRIHHDQPVKPLDRAVFWIEFVMRHKGAKHLRVAAHDLTWFQYHSLDVIGFLLVCVTTAIFLVIQCCLFSCQKFGKIGKKKKRE

SEQ ID NO: 13899 - protein, 483 aa, Homo Sapiens
MLNNLLLFSLQISLIGTTLGGNVLIWPMEGSHWLNVKIIIDELIKKEHNVTVLVASGALFITPTSNPSLTFEIYKVPFGKERIEGVIKDFVLTWLENRPSPSTIWRFYQEMAKVIKDFHMVSQEICDGVLKNQQLMAKLKKSKFEVLVSDPVFPCGDIVALKLGIPFMYSLRFSPASTVEKHCGKVPYPPSYVPAVLSELTDQMSFTDRIRNFISYHLQDYMFETLWKSWDSYYSKALGRPTTLCETMGKAEIWLIRTYWDFEFPRPYLPNFEFVGGLHCKPAKPLPKVLWRYKGKKPATLGNNTQLFDWIPQNDLLGHPKTKAFITHGGTNGIYEAIYHGVPMVGVPMFADQPDNIAHMKAKGAAVEVNLNTMTSVDLLSALRTVINEPSYKENAMRLSRIHHDQPVKPLDRAVFWIEFVMRHKGAKHLRVAAHDLTWFQYHSLDVIGFLLVCVTTAIFLVIQCCLFSCQKFGKIGKKKKRE

SEQ ID NO: 13900 - protein, 527 aa, Homo Sapiens
MLNNLLLFSLQISLIGTTLGGNVLIWPMEGSHWLNVKIIIDELIKKEHNVTVLVASGALFITPTSNPSLTFEIYKVPFGKERIEGVIKDFVLTWLENRPSPSTIWRFYQEMAKVIKDFHMVSQEICDGVLKNQQLMAKLKKSKFEVLVSDPVFPCGDIVALKLGIPFMYSLRFSPASTVEKHCGKVPYPPSYVPAVLSELTDQMSFTDRIRNFISYHLQDYMFETLWKSWDSYYSKALGRPTTLCETMGKAEIWLIRTYWDFEFPRPYLPNFEFVGGLHCKPAKPLPKEMEEFIQSSGKNGVVVFSLGSMVKNLTEEKANLIASALAQIPQKVLWRYKGKKPATLGNNTQLFDWIPQNDLLGHPKTKAFITHGGTNGIYEAIYHGVPMVGVPMFADQPDNIAHMKAKGAAVEVNLNTMTSVDLLSALRTVINEPSYKENAMRLSRIHHDQPVKPLDRAVFWIEFVMRHKGAKHLRVAAHDLTWFQYHSLDVIGFLLVCVTTAIFLVIQCCLFSCQKFGKIGKKKKRE

SEQ ID NO: 13901 - protein, 529 aa, Homo Sapiens
MTLKWTSVLLLIHLSCYFSSGSCGKVLVWAAEYSHWMNMKTILKELVQRGHEVTVLASSASILFDPNDASTLKFEVYPTSLTKTEFENIIMQQVKRWSDIRKDSFWLYFSQEQEILWELYDIFRNFCKDVVSNKKVMKKLQESRFDIVFADAVFPCGELLAALLNIRFVYSLRFTPGYTIERHSGGLIFPPSYIPIVMSKLSDQMTFMERVKNMIYVLYFDFWFQMSDMKKWDQFYSEVLGRPTTLFETMGKADIWLMRNSWSFQFPHPFLPNVDFVGGFHCKPAKPLPKEMEEFVQSSGENGVVVFSLGSVISNMTAERANVIATALAKIPQKVLWRFDGNKPDALGLNTRLYKWIPQNDLLGHPKTRAFITHGGANGIYEAIYHGIPMVGIPLFFDQPDNIAHMKAKGAAVRLDFNTMSSTDLLNALKTVINDPLYKENIMKLSRIQHDQPVKPLDRAVFWIEFVMPHKGAKHLRVAAHDLTWFQYHSLDVIGFLLACVATVIFIITKFCLFCFWKFARKGKKGKRD

SEQ ID NO: 13902 - protein, 529 aa, Homo Sapiens
MALKWTSVLLLIHLGCYFSSGSCGKVLVWTGEYSHWMNMKTILKELVQRGHEVTVLASSASILFDPNDAFTLKLEVYPTSLTKTEFENIIMQQVKRWSDIQKDSFWLYFSQEQEILWEFHDIFRNFCKDVVSNKKVMKKLQESRFDIIFADAFFPCGELLAALLNIPFVYSLCFTPGYTIERHSGGLIFPPSYIPVVMSKLSDQMTFMERVKNMIYVLYFDFWFQMCDMKKWDQFYSEVLGRPTTLFETMGKADIWLMRNSWSFQFPHPFLPNIDFVGGLHCKPAKPLPKEMEEFVQSSGENGVVVFSLGSVISNMTAERANVIATALAKIPQKVLWRFDGNKPDALGLNTRLYKWIPQNDLLGLPKTRAFITHGGANGIYEAIYHGIPMVGIPLFWDQPDNIAHMKAKGAAVRLDFHTMSSTDLLNALKTVINDPSYKENVMKLSIIQHDQPVKPLHRAVFWIEFVMCHKGAKHLRVAARDLTWFQYHSLDVIGFLLACVATVIFVVTKFCLFCFWKFARKGKKGKRD

SEQ ID NO: 13903 - protein, 335 aa, Homo Sapiens
MALKWTSVLLLIHLGCYFSSGSCGKVLVWTGEYSHWMNMKTILKELVQRGHEVTVLASSASILFDPNDAFTLKLEVYPTSLTKTEFENIIMQQVKRWSDIQKDSFWLYFSQEQEILWEFHDIFRNFCKDVVSNKKVMKKLQESRFDIIFADAFFPCGELLAALLNIPFVYSLCFTPGYTIERHSGGLIFPPSYIPVVMSKLSDQMTFMERVKNMIYVLYFDFWFQMCDMKKWDQFYSEVLGRPTTLFETMGKADIWLMRNSWSFQFPHPFLPNIDFVGGLHCKPAKPLPKEMEEFVQSSGENGVVVFSLGSVISNMTAERANVIATALAKIPQKI

SEQ ID NO: 13904 - protein, 54 aa, Homo Sapiens
MSMKWTSALLLIQLSCYFSSGSCGKVLVWPTEFSHWMNIKTILDELVQRGHEVT

SEQ ID NO: 13905 - protein, 528 aa, Homo Sapiens
MSMKWTSALLLIQLSCYFSSGSCGKVLVWPTEFSHWMNIKTILDELVQRGHEVTVLASSASISFDPNSPSTLKFEVYPVSLTKTEFEDIIKQLVKRWAELPKDTFWSYFSQVQEIMWTFNDILRKFCKDIVSNKKLMKKLQESRFDVVLADAVFPFGELLAELLKIPFVYSLRFSPGYAIEKHSGGLLFPPSYVPVVMSELSDQMTFIERVKNMIYVLYFEFWFQIFDMKKWDQFYSEVLGRPTTLSETMAKADIWLIRNYWDFQFPHPLLPNVEFVGGLHCKPAKPLPKEMEEFVQSSGENGVVVFSLGSMVSNTSEERANVIASALAKIPQKVLWRFDGNKPDTLGLNTRLYKWIPQNDLLGHPKTRAFITHGGANGIYEAIYHGIPMVGVPLFADQPDNIAHMKAKGAAVSLDFHTMSSTDLLNALKTVINDPLYKENAMKLSRIHHDQPVKPLDRAVFWIEFVMRHKGAKHLRVAAHDLTWFQYHSLDVTGFLLACVATVIFIITKCLFCVWKFVRTGKKGKRD

SEQ ID NO: 13906 - protein, 369 aa, Homo Sapiens
MSMKWTSALLLIQLSCYFSSGSCGKVLVWPTEFSHWMNIKTILDELVQRGHEVTVLASSASISFDPNSPSTLKFEVYPVSLTKTEFEDIIKQLVKRWAELPKDTFWSYFSQVQEIMWTFNDILRKFCKDIVSNKKLMKKLQESRFDVVLADAVFPFGELLAELLKIPFVYSLRFSPGYAIEKHSGGLLFPPSYVPVVMSELSDQMTFIERVKNMIYVLYFEFWFQIFDMKKWDQFYSEVLGRPTTLSETMAKADIWLIRNYWDFQFPHPLLPNVEFVGGLHCKPAKPLPKEMEEFVQSSGENGVVVFSLGSMVSNTSEERANVIASALAKIPQKVLWRFDGNKPDTLGLNTRLYKWIPQNDLLDIKRML

SEQ ID NO: 13907 - protein, 369 aa, Homo Sapiens [sequence omitted]

SEQ ID NO: 13908 - protein, 156 aa, Homo Sapiens
MGKADVWLIRNSWNFQFPYPLLPNVDFVGGLHCKPAKPLPKEMEDFVQSSGENGVVVFSLGSMVSNMTEERANVIASALAQIPQKVLWRFDGNKPDTLGLNTRLYKWIPQNDLLGHPKTRAFITHGGANGIYEAIYHGIPMVGIPLFADQPDNIAH

SEQ ID NO: 13909 - protein, 529 aa, Homo Sapiens
MSVKWTSVILLIQLSFCFSSGNCGKVLVWAAEYSHWMNIKTILDELIQRGHEVTVLASSASILFDPNNSSALKIEIYPTSLTKTELENFIMQQIKRWSDLPKDTFWLYFSQVQEIMSIFGDITRKFCKDVVSNKKFMKKVQESRFDVIFADAIFPCSELLAELFNIPFVYSLSFSPGYTFEKHSGGFIFPPSYVPVVMSELTDQMTFMERVKNMIYVLYFDFWFEIFDMKKWDQFYSEVLGRPTTLSETMGKADVWLIRNSWNFQFPYPLLPNVDFVGGLHCKPAKPLPKEMEDFVQSSGENGVVVFSLGSMVSNMTEERANVIASALAQIPQKVLWRFDGNKPDTLGLNTRLYKWIPQNDLLGHPKTRAFITHGGANGIYEAIYHGIPMVGIPLFADQPDNIAHMKARGAAVRVDFNTMSSTDLLNALKRVINDPSYKENVMKLSRIQHDQPVKPLDRAVFWIEFVMRHKGAKHLRVAAHDLTWFQYHSLDVIGFLLVCVATVIFIVTKCCLFCFWKFARKAKKGKND

SEQ ID NO: 13910 - protein, 369 aa, Homo Sapiens
MSVKWTSVILLIQLSFCFSSGNCGKVLVWAAEYSHWMNIKTILDELIQRGHEVTVLASSASILFDPNNSSALKIEIYPTSLTKTELENFIMQQIKRWSDLPKDTFWLYFSQVQEIMSIFGDITRKFCKDVVSNKKFMKKVQESRFDVIFADAIFPCSELLAELFNIPFVYSLSFSPGYTFEKHSGGFIFPPSYVPVVMSELTDQMTFMERVKNMIYVLYFDFWFEIFDMKKWDQFYSEVLGRPTTLSETMGKADVWLIRNSWNFQFPYPLLPNVDFVGGLHCKPAKPLPKEMEDFVQSSGENGVVVFSLGSMVSNMTEERANVIASALAQIPQKVLWRFDGNKPDTLGLNTRLYKWIPQNDLLDIKRML

SEQ ID NO: 13911 - protein, 335 aa, Homo Sapiens
MSVKWTSVILLIQLSFCFSSGNCGKVLVWAAEYSHWMNIKTILDELIQRGHEVTVLASSASILFDPNNSSALKIEIYPTSLTKTELENFIMQQIKRWSDLPKDTFWLYFSQVQEIMSIFGDITRKFCKDVVSNKKFMKKVQESRFDVIFADAIFPCSELLAELFNIPFVYSLSFSPGYTFEKHSGGFIFPPSYVPVVMSELTDQMTFMERVKNMIYVLYFDFWFEIFDMKKWDQFYSEVLGRPTTLSETMGKADVWLIRNSWNFQFPYPLLPNVDFVGGLHCKPAKPLPKEMEDFVQSSGENGVVVFSLGSMVSNMTEERANVIASALAQIPQKI

SEQ ID NO: 13912 - protein, 252 aa, Homo Sapiens
MLHQSGKFLIPDIKEEEKSYQVIRWFSPEDHQKRIKKHFDSYIETALDGRKESEALVKLMEIFGTQCSYLLSRKDIMDSLKNENYDLVFVEAFDFCSFLIAEKLVKPFVAILPTTFGSLDFGLPSPLSYVPVFPSLLTDHMDFWGRVKNFLMFFSFSRSQWDMQSTFDNTIKEHFPEGSRPVLSHLLLKAELWFVNSDFAFDFARPLLPNTVYIGGLMEKPIKPVPQNGQPALFTTPSLFSSGVYPEPLRWL

SEQ ID NO: 13913 - protein, 252 aa, Homo Sapiens; identical to SEQ ID NO: 13912

SEQ ID NO: 13914 - protein, 402 aa, Homo Sapiens
MVGQRVLLLVAFLLSGVLLSEAAKILTISTLDIKEEEKSYQVIRWFSPEDHQKRIKKHFDSYIETALDGRKESEALVKLMEIFGTQCSYLLSRKDIMDSLKNENYDLVFVEAFDFCSFLIAEKLVKPFVAILPTTFGSLDFGLPSPLSYVPVFPSLLTDHMDFWGRVKNFLMFFSFSRSQWDMQSTFDNTIKEHFPEGSRPVLSHLLLKAELWFVNSDFAFDFARPLLPNTVYIGGLMEKPIKPVPQDLDNFIANFGDAGFVLVAFGSMLNTHQSQEVLKKMHNAFAHLPQGVIWTCQSSHWPRDVHLATNVKIVDWLPQSDLLAHPSIRLFVTHGGQNSVMEAIRHGVPMVGLPVNGDQHGNMVRVVAKNYGVSIRLNQVTADTLTLTMKQVIEDKRYVAL

SEQ ID NO: 13915 - protein, 57 aa, Homo Sapiens
MVGQRVLLLVAFLLSGVLLSEAAKILTISTLGECLAGEFPDRRVPDPRTARAPANGD

SEQ ID NO: 13916 - protein, 523 aa, Homo Sapiens
MVGQRVLLLVAFLLSGVLLSEAAKILTISTLGGSHYLLLDRVSQILQEHGHNVTMLHQSGKFLIPDIKEEEKSYQVIRWFSPEDHQKRIKKHFDSYIETALDGRKESEALVKLMEIFGTQCSYLLSRKDIMDSLKNENYDLVFVEAFDFCSFLIAEKLVKPFVAILPTTFGSLDFGLPSPLSYVPVFPSLLTDHMDFWGRVKNFLMFFSFSRSQWDMQSTFDNTIKEHFPEGSRPVLSHLLLKAELWFVNSDFAFDFARPLLPNTVYIGGLMEKPIKPVPQDLDNFIANFGDAGFVLVAFGSMLNTHQSQEVLKKMHNAFAHLPQGVIWTCQSSHWPRDVHLATNVKIVDWLPQSDLLAHPSIRLFVTHGGQNSVMEAIRHGVPMVGLPVNGDQHGNMVRVVAKNYGVSIRLNQVTADTLTLTMKQVIEDKRYKSAVVAASVILHSQPLSPAQRLVGWIDHILQTGGATHLKPYAFQQPWHEQYLIDVFVFLLGLTLGTMWLCGKLLGVVARWLRGARKVKKT

SEQ ID NO: 13917 - protein, 436 aa, Homo Sapiens
MVGQRVLLLVAFLLSGVLLSEAAKILTISTLGGSHYLLLDRVSQILQEHGHNVTMLHQSGKFLIPDIKEEEKSYQVIRWFSPEDHQKRIKKHFDSYIETALDGRKESEALVKLMEIFGTQCSYLLSRKDIMDSLKNENYDLVFVEAFDFCSFLIAEKLVKPFVAILPTTFGSLDFGLPSPLSYVPVFPSLLTDHMDFWGRVKNFLMFFSFSRSQWDMQSTFDNTIKEHFPEGSRPVLSHLLLKAELWFVNSDFAFDFARPLLPNTVYIGGLMEKPIKPVPQDLDNFIANFGDAGFVLVAFGSMLNTHQSQEVLKKMHNAFAHLPQGVIWTCQSSHWPRDVHLATNVKIVDWLPQSDLLAHPSIRLFVTHGGQNSVMEAIRHGVPMVGLPVNGDQHGNMVRVVAKNYGVSIRLNQVTADTLTLTMKQVIEDKRYVAL

SEQ ID NO: 13918 - protein, 489 aa, Homo Sapiens
MAGQRVLLLVGFLLPGVLLSEAAKILTISTVDFKKEEKSYQVISWLAPEDHQREFKKSFDFFLEETLGGRGKFENLLNVLEYLALQCSHFLNRKDIMDSLKNENFDMVIVETFDYCPFLIAEKLGKPFVAILSTSFGSLEFGLPIPLSYVPVFRSLLTDHMDFWGRVKNFLMFFSFCRRQQHMQSTFDNTIKEHFTEGSRPVLSHLLLKAELWFINSDFAFDFARPLLPNTVYVGGLMEKPIKPVPQDLENFIAKFGDSGFVLVTLGSMVNTCQNPEIFKEMNNAFAHLPQGVIWKCQCSHWPKDVHLAANVKIVDWLPQSDLLAHPSIRLFVTHGGQNSIMEAIQHGVPMVGIPLFGDQPENMVRVEAKKFGVSIQLKKLKAETLALKMKQIMEDKRYKSAAVAASVILRSHPLSPTQRLVGWIDHVLQTGGATHLKPYVFQQPWHEQYLLDVFVFLLGLTLGTLWLCGKLLGMAVWWLRGARKVKET

SEQ ID NO: 13919 - protein, 138 aa, Homo Sapiens
MAGQRVLLLVGFLLPGVLLSEAAKILTISTVGGSHYLLMDRVSQILQDHGHNVTMLNHKRGPFMPDFKKEEKSYQVISWLAPEDHQREFKKSFDFFLEETLGGRGKFENLLNVLEYLALQCSHFLNRKDIMDSLKNEN

SEQ ID NO: 13920 - protein, 523 aa, Homo Sapiens
MAGQRVLLLVGFLLPGVLLSEAAKILTISTVGGSHYLLMDRVSQILQDHGHNVTMLNHKRGPFMPDFKKEEKSYQVISWLAPEDHQREFKKSFDFFLEETLGGRGKFENLLNVLEYLALQCSHFLNRKDIMDSLKNENFDMVIVETFDYCPFLIAEKLGKPFVAILSTSFGSLEFGLPIPLSYVPVFRSLLTDHMDFWGRVKNFLMFFSFCRRQQHMQSTFDNTIKEHFTEGSRPVLSHLLLKAELWFINSDFAFDFARPLLPNTVYVGGLMEKPIKPVPQDLENFIAKFGDSGFVLVTLGSMVNTCQNPEIFKEMNNAFAHLPQGVIWKCQCSHWPKDVHLAANVKIVDWLPQSDLLAHPSIRLFVTHGGQNSIMEAIQHGVPMVGIPLFGDQPENMVRVEAKKFGVSIQLKKLKAETLALKMKQIMEDKRYKSAAVAASVILRSHPLSPTQRLVGWIDHVLQTGGATHLKPYVFQQPWHEQYLLDVFVFLLGLTLGTLWLCGKLLGMAVWWLRGARKVKET

SEQ ID NO: 13921 - protein, 120 aa, Homo Sapiens
MAGQRVLLLVGFLLPGVLLSEAAKILTISTVGGSHYLLMDRVSQILQDHGHNVTMLNHKRGPFMPDFKKEEKSYQVISWLAPEDHQREFKKSFDFFLEETLGGRTWRTSLPSLGTLVLSL

SEQ ID NO: 13922 - protein, 141 aa, Homo Sapiens
MKSYTPYFILLWSAVGIAKAAKIIIVPPIMFESHMYIFKTLASALHERGHHTVFLLSEGRDIAPSNHYSLQRYPGIFNSTTSDAFLQSKMRNIFSGRLTAIELFDILDHYTKNCDLMVGNHALIQGLKKEKFDLLLVDPND

SEQ ID NO: 13923 - protein, 541 aa, Homo Sapiens
MKSYTPYFILLWSAVGIAKAAKIIIVPPIMFESHMYIFKTLASALHERGHHTVFLLSEGRDIAPSNHYSLQRYPGIFNSTTSDAFLQSKMRNIFSGRLTAIELFDILDHYTKNCDLMVGNHALIQGLKKEKFDLLLVDPNDMCGFVIAHLLGVKYAVFSTGLWYPAEVGAPAPLAYVPEFNSLLTDRMNLLQRMKNTGVYLISRLGVSFLVLPKYERIMQKYNLLPEKSMYDLVHGSSLWMLCTDVALEFPRPTLPNVVYVGGILTKPASPLPEDLQRWVNGANEHGFVLVSFGAGVKYLSEDIANKLAGALGRLPQKVIWRFSGPKPKNLGNNTKLIEWLPQNDLLGHSKIKAFLSHGGLNSIFETIYHGVPVVGIPLFGDHYDTMTRVQAKGMGILLEWKTVTEKELYEALVKVINNPSYRQRAQKLSEIHKDQPGHPVNRTIYWIDYIIRHNGAHHLRAAVHQISFCQYFLLDIAFVLLLGAALLYFLLSWVTKFIYRKIKSLWSRNKHSTVNGHYHNGILNGKYKRNGHIKHEKKVK

SEQ ID NO: 13924 - protein, 541 aa, Homo Sapiens; identical to SEQ ID NO: 13923

SEQ ID NO: 13925 - protein, 244 aa, Homo Sapiens
MAAAASPAILPRLAILPYLLFDWSGTGRADAHSLWYNFTIIHLPRHGQQWCEVQSQVDQKNFLSYDCGSDKVLSMGHLEEQLYATDAWGKQLEMLREVGQRLRLELADTELEDFTPSGPLTLQVRMSCECEADGYIRGSWQFSFDGRKFLLFDSNNRKWTVVHAGARRMKEKWEKDSGLTTFFKMVSMRDCKSWLRDFLMHRKKRLEPTAPPTMAPGLAQPKAIATTLSPWSFLIILCFILPGI

SEQ ID NO: 13926 - protein, 244 aa, Homo Sapiens; identical to SEQ ID NO: 13925

SEQ ID NO: 13927 - protein, 29 aa, Homo Sapiens
MGQPSLTWMLMVVVASWFITTAATDTSEA

SEQ ID NO: 13928 - protein, 673 aa, Homo Sapiens
MGQPSLTWMLMVVVASWFITTAATDTSEARTKYNCPARWSWRTPQRGGDTEQGPDEDFTSQGRWCSECHSNATCTEDEAVTTCTCQEGFTGDGLTCVDLDECAIPGAHNCSANSSCVNTPGSFSCVCPEGFRLSPGLGCTDVDECAEPGLSHCHALATCVNVVGSYLCVCPAGYRGDGWHCECSPGSCGPGLDCVPEGDALVCADPCQAHRTLDEYWRSTEYGEGYACDTDLRGWYRFVGQGGARMAETCVPVLRCNTAAPMWLNGTHPSSDEGIVSRKACAHWSGHCCLWDASVQVKACAGGYYVYNLTAPPECHLAYCTDPSSVEGTCEECSIDEDCKSNNGRWHCQCKQDFNITDISLLEHRLECGANDMKVSLGKCQLKSLGFDKVFMYLSDSRCSGFNDRDNRDWVSVVTPARDGPCGTVLTRNETHATYSNTLYLADEIIIRDLNIKINFACSYPLDMKVSLKTALQPMVSALNIRVGGTGMFTVRMALFQTPSYTQPYQGSSVTLSTEAFLYVGTMLDGGDLSRFALLMTNCYATPSSNATDPLKYFIIQDRCPHTRDSTIQVVENGESSQGRFSVQMFRFAGNYDLVYLHCEVYLCDTMNEKCKPTCSGTRFRSGSVIDQSRVLNLGPITRKGVQATVSRAFSSLGLLKVWLPLLLSATLTLTFQ

SEQ ID NO: 13929 - protein, 161 aa, Homo Sapiens
MGQPSLTWMLMVVVASWFITTAATDTSEARTKYNCPARWSWRTPQRGGDTEQGPDEDFTSQGSRKHKMCKEREGQQVHRKSYQRWCSECHSNATCTEDEAVTTCTCQEGFTGDGLTCVDLDECAIPGAHNCSANSSCVNTPGSFSCVCPEGFRLSPGLGCT

SEQ ID NO: 13930 - protein, 161 aa, Homo Sapiens
MGQPSLTWMLMVVVASWFITTAATDTSEARTKYNCPARWSWRTPQRGGDTEQGWCSECHSNATCTEDEAVTTCTCQEGFTGDGLTCVDLDECAIPGAHNCSANSSCVNTPGSFSCVCPEGFRLSPGLGCTDVDECAEPGLSHCHALATCVNVVGSYLCVCP

SEQ ID NO: 13931 - protein, 86 aa, Homo Sapiens
MGQPSLTWMLMVVVASWFITTAATDTSEARWCSECHSNATCTEDEAVTTCTCQEGFTGDGLTCVDLDECAIPGAHNCSANSSCVNT

SEQ ID NO: 13932 - protein, 88 aa, Homo Sapiens
MGQPSLTWMLMVVVASWFITTAATDTSEARWCSECHSNATCTEDEAVTTCTCQEGFTGDGLTCVDLDECAIPGAHNCSANSSCVNTPG

SEQ ID NO: 13933 - protein, 103 aa, Homo Sapiens
MGQPSLTWMLMVVVASWFITTAATDTSEARWCSECHSNATCTEDEAVTTCTCQEGFTGDGLTCVDLDECAIPGAHNCSANSSCVNTPGSFSCVCPEGFRLSPG

SEQ ID NO: 13934 - protein, 125 aa, Homo Sapiens
MGQPSLTWMLMVVVASWFITTAATDTSEARWCSECHSNATCTEDEAVTTCTCQEGFTGDGLTCVDLDECAIPGAHNCSANSSCVNTPGSFSCVCPEGFRLSPGLGCTDVDECAEPGLSHCHALAT

SEQ ID NO: 13935 - protein, 640 aa, Homo Sapiens
MGQPSLTWMLMVVVASWFITTAATDTSEARWCSECHSNATCTEDEAVTTCTCQEGFTGDGLTCVDLDECAIPGAHNCSANSSCVNTPGSFSCVCPEGFRLSPGLGCTDVDECAEPGLSHCHALATCVNVVGSYLCVCPAGYRGDGWHCECSPGSCGPGLDCVPEGDALVCADPCQAHRTLDEYWRSTEYGEGYACDTDLRGWYRFVGQGGARMAETCVPVLRCNTAAPMWLNGTHPSSDEGIVSRKACAHWSGHCCLWDASVQVKACAGGYYVYNLTAPPECHLAYCTDPSSVEGTCEECSIDEDCKSNNGRWHCQCKQDFNITDISLLEHRLECGANDMKVSLGKCQLKSLGFDKVFMYLSDSRCSGFNDRDNRDWVSVVTPARDGPCGTVLTRNETHATYSNTLYLADEIIIRDLNIKINFACSYPLDMKVSLKTALQPMVSALNIRVGGTGMFTVRMALFQTPSYTQPYQGSSVTLSTEAFLYVGTMLDGGDLSRFALLMTNCYATPSSNATDPLKYFIIQDRCPHTRDSTIQVVENGESSQGRFSVQMFRFAGNYDLVYLHCEVYLCDTMNEKCKPTCSGTRFRSGSVIDQSRVLNLGPITRKGVQATVSRAFSSLGLLKVWLPLLLSATLTLTFQ

SEQ ID NO: 13936 - protein, 640 aa, Homo Sapiens; identical to SEQ ID NO: 13935

SEQ ID NO: 13937 - protein, 689 aa, Homo Sapiens
MRHIMTRLTLPFWLQDTRHQRQREKFKGPTRLSFGQVLSRPEVAGRAERMGQPSLTWMLMVVVASWFITTAATDTSEARWCSECHSNATCTEDEAVTTCTCQEGFTGDGLTCVDLDECAIPGAHNCSANSSCVNTPGSFSCVCPEGFRLSPGLGCTDVDECAEPGLSHCHALATCVNVVGSYLCVCPAGYRGDGWHCECSPGSCGPGLDCVPEGDALVCADPCQAHRTLDEYWRSTEYGEGYACDTDLRGWYRFVGQGGARMAETCVPVLRCNTAAPMWLNGTHPSSDEGIVSRKACAHWSGHCCLWDASVQVKACAGGYYVYNLTAPPECHLAYCTDPSSVEGTCEECSIDEDCKSNNGRWHCQCKQDFNITDISLLEHRLECGANDMKVSLGKCQLKSLGFDKVFMYLSDSRCSGFNDRDNRDWVSVVTPARDGPCGTVLTRNETHATYSNTLYLADEIIIRDLNIKINFACSYPLDMKVSLKTALQPMVSALNIRVGGTGMFTVRMALFQTPSYTQPYQGSSVTLSTEAFLYVGTMLDGGDLSRFALLMTNCYATPSSNATDPLKYFIIQDRCPHTRDSTIQVVENGESSQGRFSVQMFRFAGNYDLVYLHCEVYLCDTMNEKCKPTCSGTRFRSGSVIDQSRVLNLGPITRKGVQATVSRAFSSLGLLKVWLPLLLSATLTLTFQ

SEQ ID NO: 13938 - protein, 138 aa, Homo Sapiens
MRHIMTRLTLPFWLQVLSRPEVAGRAERMGQPSLTWMLMVVVASWFITTAATDTSEARWCSECHSNATCTEDEAVTTCTCQEGFTGDGLTCVDLDECAIPGAHNCSANSSCVNTPGSFSCVCPEGFRLSPGLGCTDVD

SEQ ID NO: 13939 - protein, 890 aa, Homo Sapiens
DDDFFHELPETFPSDPPEPLPHFLIEPEEAYIVKNKPVNLYCKASPATQIYFKCNSEWVHQKDHIVDERVDETSGLIVREVSIEISRQQVEELFGPEDYWCQCVAWSSAGTTKSRKAYVRIAYLRKTFEQEPLGKEVSLEQEVLLQCRPPEGIPVAEVEWLKNEDIIDPVEDRNFYITIDHNLIIKQARLSDTANYTCVAKNIVAKRKSTTATVIVYVNGGWSTWTEWSVCNSRCGRGYQKRTRTCTNPAPLNGGAFCEGQSVQKIACTTLCPVDGRWTPWSKWSTCGTECTHWRRRECTAPAPKNGGKDCDGLVLQSKNCTDGLCMQTAPDSDDVALYVGIVIAVIVCLAISVVVALFVYRKNHRDFESDIIDSSALNGGFQPVNIKAARQDLLAVPPDLTSAAAMYRGPVYALHDVSDKIPMTNSPILDPLPNLKIKVYNTSGAVTPQDDLSEFTSKLSPQMTQSLLENEALSLKNQSLARQTDPSCTAFGSFNSLGGHLIVPNSGVSLLIPAGAIPQGRVYEMYVTVHRKETMRPPMDDSQTLLTPVVSCGPPGALLTRPVVLTMHHCADPNTEDWKILLKNQAAQGQWEDVVVVGEENFTTPCYIQLDAEACHILTENLSTYALVGHSTTKAAAKRLKLAIFGPLCCSSLEYSIRVYCLDDTQDALKEILHLERQMGGQLLEEPKALHFKGSTHNLRLSIHDIAHSLWKSKLLAKYQEIPFYHVWSGSQRNLHCTFTLERFSLNTVELVCKLCVRQVEGEGQIFQLNCTVSEEPTGIDLPLLDPANTITTVTGPSAFSIPLPIRQKLCSSLDAPQTRGHDWRMLAHKLNLDRYLNYFATKSSPTGVILDLWEAQNFPDGNLSMLAAVLEEMGRHETVVSLAAEGQY

SEQ ID NO: 13940 - protein, 931 aa, Homo Sapiens
MRKGLRATAARCGLGLGYLLQMLVLPALALLSASGTGSAAQDDDFFHELPETFPSDPPEPLPHFLIEPEEAYIVKNKPVNLYCKASPATQIYFKCNSEWVHQKDHIVDERVDETSGLIVREVSIEISRQQVEELFGPEDYWCQCVAWSSAGTTKSRKAYVRIAYLRKTFEQEPLGKEVSLEQEVLLQCRPPEGIPVAEVEWLKNEDIIDPVEDRNFYITIDHNLIIKQARLSDTANYTCVAKNIVAKRKSTTATVIVYVNGGWSTWTEWSVCNSRCGRGYQKRTRTCTNPAPLNGGAFCEGQSVQKIACTTLCPVDGRWTPWSKWSTCGTECTHWRRRECTAPAPKNGGKDCDGLVLQSKNCTDGLCMQTAPDSDDVALYVGIVIAVIVCLAISVVVALFVYRKNHRDFESDIIDSSALNGGFQPVNIKAARQDLLAVPPDLTSAAAMYRGPVYALHDVSDKIPMTNSPILDPLPNLKIKVYNTSGAVTPQDDLSEFTSKLSPQMTQSLLENEALSLKNQSLARQTDPSCTAFGSFNSLGGHLIVPNSGVSLLIPAGAIPQGRVYEMYVTVHRKETMRPPMDDSQTLLTPVVSCGPPGALLTRPVVLTMHHCADPNTEDWKILLKNQAAQGQWEDVVVVGEENFTTPCYIQLDAEACHILTENLSTYALVGHSTTKAAAKRLKLAIFGPLCCSSLEYSIRVYCLDDTQDALKEILHLERQMGGQLLEEPKALHFKGSTHNLRLSIHDIAHSLWKSKLLAKYQEIPFYHVWSGSQRNLHCTFTLERFSLNTVELVCKLCVRQVEGEGQIFQLNCTVSEEPTGIDLPLLDPANTITTVTGPSAFSIPLPIRQKLCSSLDAPQTRGHDWRMLAHKLNLDRYLNYFATKSSPTGVILDLWEAQNFPDGNLSMLAAVLEEMGRHETVVSLAAEGQY

SEQ ID NO: 13941 - protein, 260 aa, Homo Sapiens
MRKGLRATAARCGLGLGYLLQMLVLPALALLSASGTGSAAQDDDFFHELPETFPSDPPEPLPHFLIEPEEAYIVKNKPVNLYCKASPATQIYFKCNSEWVHQKDHIVDERVDETSGLIVREVSIEISRQQVEELFGPEDYWCQCVAWSSAGTTKSRKAYVRIAYLRKTFEQEPLGKEVSLEQEVLLQCRPPEGIPVAEVEWLKNEDIIDPVEDRNFYITIDHNLIIKQARLSDTANYTCVAKNIVAKRKSTTATVIVYGP

SEQ ID NO: 13942 - protein, 597 aa, Homo Sapiens
MRKGLRATAARCGLGLGYLLQMLVLPALALLSASGTGSAAQDDDFFHELPETFPSDPPEPLPHFLIEPEEAYIVKNKPVNLYCKASPATQIYFKCNSEWVHQKDHIVDERVDETSGLIVREVSIEISRQQVEELFGPEDYWCQCVAWSSAGTTKSRKAYVRIAYLRKTFEQEPLGKEVSLEQEVLLQCRPPEGIPVAEVEWLKNEDIIDPVEDRNFYITIDHNLIIKQARLSDTANYTCVAKNIVAKRKSTTATVIVYVNGGWSTWTEWSVCNSRCGRGYQKRTRTCTNPAPLNGGAFCEGQSVQKIACTTLCPVDGRWTPWSKWSTCGTECTHWRRRECTAPAPKNGGKDCDGLVLQSKNCTDGLCMQSFIYPISTEQRTQNEYGFSSAPDSDDVALYVGIVIAVIVCLAISVVVALFVYRKNHRDFESDIIDSSALNGGFQPVNIKAARQDLLAVPPDLTSAAAMYRGPVYALHDVSDKIPMTNSPILDPLPNLKIKVYNTSGAVTPQDDLSEFTSKLSPQMTQSLLENEALSLKNQSLARQTDPSCTAFGSFNSLGGHLIVPNSGVSLLIPAGAIPQGRVYEMYVTVHRKETMR

SEQ ID NO: 13943 - protein, 745 aa, Homo Sapiens
MRKGLRATAARCGLGLGYLLQMLVLPALALLSASGTGSAAQDDDFFHELPETFPSDPPEPLPHFLIEPEEAYIVKNKPVNLYCKASPATQIYFKCNSEWVHQKDHIVDERVDETSGLIVREVSIEISRQQVEELFGPEDYWCQCVAWSSAGTTKSRKAYVRIAYLRKTFEQEPLGKEVSLEQEVLLQCRPPEGIPVAEVEWLKNEDIIDPVEDRNFYITIDHNLIIKQARLSDTANYTCVAKNIVAKRKSTTATVIVYVNGGWSTWTEWSVCNSRCGRGYQKRTRTCTNPAPLNGGAFCEGQSVQKIACTTLCPVDGRWTPWSKWSTCGTECTHWRRRECTAPAPKNGGKDCDGLVLQSKNCTDGLCMQSFIYPISTEQRTQNEYGFSSAPDSDDVALYVGIVIAVIVCLAISVVVALFVYRKNHRDFESDIIDSSALNGGFQPVNIKAARQDLLAVPPDLTSAAAMYRGPVYALHDVSDKIPMTNSPILDPLPNLKIKVYNTSGAVTPQDDLSEFTSKLSPQMTQSLLENEALSLKNQSLARQTDPSCTAFGSFNSLGGHLIVPNSGVSLLIPAGAIPQGRVYEMYVTVHRKETMRPPMDDSQTLLTPVVSCGPPGALLTRPVVLTMHHCADPNTEDWKILLKNQAAQGQWEDVVVVGEENFTTPCYIQLDAEACHILTENLSTYALVGHSTTKAAAKRLKLAIFGPLCCSSLEYSIRVYCLDDTQDALKEILHLERQMGGQLL

SEQ ID NO: 13944 - protein, 265 aa, Homo Sapiens
MGLPWGQPHLGLQMLLLALNCLRPSLSLELVPYTPQITAWDLEGKVTATTFSLEQPRCVFDGLASASDTVWLVVAFSNASRGFQNPETLADIPASPQLLTDGHYMTLPLSPDQLPCGDPMAGSGGAPVLRVGHDHGCHQQPFCNAPLPGPGPYREDPRIHRHLARAAKWQHDRHYLHPLFSGRPPTLGLLGSLYHALLQPVVAGGGPGAAADRLLHGQALHDPPHPTQRGRHTAGGLQAWPGPPPQPQPLAWPLCMGLGEMGRWE

SEQ ID NO: 13945 - protein, 276 aa, Homo Sapiens
MGLPWGQPHLGLQMLLLALNCLRPSLSLELVPYTPQITAWDLEGKVTATTFSLEQPRCVFDGLASASDTVWLVVAFSNASRGFQNPETLADIPASPQLLTDGHYMTLPLSPDQLPCGDPMAGSGGAPVLRVGHDHGCHQQPFCNAPLPGPGPYRVKFLLMDTRGSPRAETKWSDPITLHQGKTPGSIDTWPGRRSGSMIVITSILSSLAGLLLLAFLAASTMRFSSLWWPEEAPEQLRIGSFMGKRYMTHHIPPREAATLPVGCKPGLDPLPSLSP

SEQ ID NO: 13946 - protein, 320 aa, Homo Sapiens
MGLPWGQPHLGLQMLLLALNCLRPSLSLGEWGSWMDASSQTQGAGGPAGVIGPWAPAPLRLGEAAPGTPTPVSVAHLLSPVATELVPYTPQITAWDLEGKVTATTFSLEQPRCVFDGLASASDTVWLVVAFSNASRGFQNPETLADIPASPQLLTDGHYMTLPLSPDQLPCGDPMAGSGGAPVLRVGHDHGCHQQPFCNAPLPGPGPYREDPRIHRHLARAAKWQHDRHYLHPLFSGRPPTLGLLGSLYHALLQPVVAGGGPGAAADRLLHGQALHDPPHPTQRGRHTAGGLQAWPGPPPQPQPLAWPLCMGLGEMGRWE

SEQ ID NO: 13947 - protein, 920 aa, Homo Sapiens
MATVAANPAAAAAAVAAAAAVTEDREPQHEELPGLDSQWRQIENGESGRERPLRAGESWFLVEKHWYKQWEAYVQGGDQDSSTFPGCINNATLFQDEINWRLKEGLVEGEDYVLLPAAAWHYLVSWYGLEHGQPPIERKVIELPNIQKVEVYPVELLLVRHNDLGKSHTVQFSHTDSIGLVLRTARERFLVEPQEDTRLWAKNSEGSLDRLYDTHITVLDAALETGQLIIMETRKKDGTWPSAQLHVMNNNMSEEDEDFKGQPGICGLTNLGNTCFMNSALQCLSNVPQLTEYFLNNCYLEELNFRNPLGMKGEIAEAYADLVKQAWSGHHRSIVPHVFKNKVGHFASQFLGYQQHDSQELLSFLLDGLHEDLNRVKKKEYVELCDAAGRPDQEVAQEAWQNHKRRNDSVIVDTFHGLFKSTLVCPDCGNVSVTFDPFCYLSVPLPISHKRVLEVFFIPMDPRRKPEQHRLVVPKKGKISDLCVALSKHTGISPERMMVADVFSHRFYKLYQLEEPLSSILDRDDIFVYEVSGRIEAIEGSREDIVVPVYLRERTPARDYNNSYYGLMLFGHPLLVSVPRDRFTWEGLYNVLMYRLSRYVTKPNSDDEDDGDEKEDDEEDKDDVPGPSTGGSLRDPEPEQAGPSSGVTNRCPFLLDNCLGTSQWPPRRRRKQLFTLQTVNSNGTSDRTTSPEEVHAQPYIAIDWEPEMKKRYYDEVEAEGYVKHDCVGYVMKKAPVRLQECIELFTTVETLEKENPWYCPSCKQHQLATKKLDLWMLPEILIIHLKRFSYTKFSREKLDTLVEFPIRDLDFSEFVIQPQNESNPELYKYDLIAVSNHYGGMRDGHYTTFACNKDSGQWHYFDDNSVSPVNENQIESKAAYVLFYQRQDVARRLLSPAGSSGAPASPACSSPPSSEFMDVN

SEQ ID NO: 13948 - protein, 963 aa, Homo Sapiens
MAVAPRLFGGLCFRFRDQNPEVAVEGRLPISHSCVGCRRERTAMATVAANPAAAAAAVAAAAAVTEDREPQHEELPGLDSQWRQIENGESGRERPLRAGESWFLVEKHWYKQWEAYVQGGDQDSSTFPGCINNATLFQDEINWRLKEGLVEGEDYVLLPAAAWHYLVSWYGLEHGQPPIERKVIELPNIQKVEVYPVELLLVRHNDLGKSHTVQFSHTDSIGLVLRTARERFLVEPQEDTRLWAKNSEGSLDRLYDTHITVLDAALETGQLIIMETRKKDGTWPSAQLHVMNNNMSEEDEDFKGQPGICGLTNLGNTCFMNSALQCLSNVPQLTEYFLNNCYLEELNFRNPLGMKGEIAEAYADLVKQAWSGHHRSIVPHVFKNKVGHFASQFLGYQQHDSQELLSFLLDGLHEDLNRVKKKEYVELCDAAGRPDQEVAQEAWQNHKRRNDSVIVDTFHGLFKSTLVCPDCGNVSVTFDPFCYLSVPLPISHKRVLEVFFIPMDPRRKPEQHRLVVPKKGKISDLCVALSKHTGISPERMMVADVFSHRFYKLYQLEEPLSSILDRDDIFVYEVSGRIEAIEGSREDIVVPVYLRERTPARDYNNSYYGLMLFGHPLLVSVPRDRFTWEGLYNVLMYRLSRYVTKPNSDDEDDGDEKEDDEEDKDDVPGPSTGGSLRDPEPEQAGPSSGVTNRCPFLLDNCLGTSQWPPRRRRKQLFTLQTVNSNGTSDRTTSPEEVHAQPYIAIDWEPEMKKRYYDEVEAEGYVKHDCVGYVMKKAPVRLQECIELFTTVETLEKENPWYCPSCKQHQLATKKLDLWMLPEILIIHLKRFSYTKFSREKLDTLVEFPIRDLDFSEFVIQPQNESNPELYKYDLIAVSNHYGGMRDGHYTTFACNKDSGQWHYFDDNSVSPVNENQIESKAAYVLFYQRQDVARRLLSPAGSSGAPASPACSSPPSSEFMDVN

SEQ ID NO: 13949 - protein, 49 aa, Homo Sapiens
METRKKDGTWPSAQLHVMNNNMSEEDEDFKGQPGICGLTNLGNTCFMNS

SEQ ID NO: 13950 - protein, 140 aa, Homo Sapiens
METRKKDGTWPSAQLHVMNNNMSEEDEDFKGQPGICGLTNLGNTCFMNSALQCLSNVPQLTEYFLNNCYLEELNFRNPLGMKGEIAEAYADLVKQAWSGHHRSIVPHVFKNKVGHFASQFLGYQQHDSQELLSFLLDGLH

SEQ ID NO: 13951 - protein, 494 aa, Homo Sapiens
MPLYSVTVKWGKEKFEGVELNTDEPPMVFKAQLFALTGVQPARQKVMVKGGTLKDDDWGNIKIKNGMTLLMMGSADALPEEPSAKTVFVEDMTEEQLASAMELPCGLTNLGNTCYMNATVQCIRSVPELKDALKRYAGALRASGEMASAQYITAALRDLFDSMDKTSSSIPPIILLQFLHMAFPQFAEKGEQGQYLQQDANECWIQMMRVLQQKLEAIEDDSVKETDSSSASAATPSKKKSLIDQFFGVEFETTMKCTESEEEEVTKGKENQLQLSCFINQEVKYLFTGLKLRLQEEITKQSPTLQRNALYIKSSKISRLPAYLTIQMVRFFYKEKESVNAKVLKDVKFPLMLDMYELCTPELQEKMVSFRSKFKDLEDKKVNQQPNTSDKKSSPQKEVKYEPFSFADDIGSNNCGYYDLQAVLTHQGRSSSSGHYVSWVKRKQDEWIKFDDDKVSIVTPEDILRLSGGGDWHIAYVLLYGPRRVEIMEEESEQ

SEQ ID NO: 13952 - protein, 459 aa, Homo Sapiens
MPLYSVTVKWGKEKFEGVELNTDEPPMVFKAQLFALTGVQPARQKVMVKGGTLKDDDWGNIKIKNMELPCGLTNLGNTCYMNATVQCIRSVPELKDALKRYAGALRASGEMASAQYITAALRDLFDSMDKTSSSIPPIILLQFLHMAFPQFAEKGEQGQYLQQDANECWIQMMRVLQQKLEAIEDDSVKETDSSSASAATPSKKKSLIDQFFGVEFETTMKCTESEEEEVTKGKENQLQLSCFINQEVKYLFTGLKLRLQEEITKQSPTLQRNALYIKSSKISRLPAYLTIQMVRFFYKEKESVNAKVLKDVKFPLMLDMYELCTPELQEKMVSFRSKFKDLEDKKVNQQPNTSDKKSSPQKEVKYEPFSFADDIGSNNCGYYDLQAVLTHQGRSSSSGHYVSWVKRKQDEWIKFDDDKVSIVTPEDILRLSGGGDWHIAYVLLYGPRRVEIMEEESEQ

SEQ ID NO: 13953 - protein, 483 aa, Homo Sapiens
MPLYSVTVKWGKEKFEGVELNTDEPPMVFKAQLFALTGVQPARQKVMVKGGTLKGMTLLMMGSADALPEEPSAKTVFVEDMTEEQLASAMELPCGLTNLGNTCYMNATVQCIRSVPELKDALKRYAGALRASGEMASAQYITAALRDLFDSMDKTSSSIPPIILLQFLHMAFPQFAEKGEQGQYLQQDANECWIQMMRVLQQKLEAIEDDSVKETDSSSASAATPSKKKSLIDQFFGVEFETTMKCTESEEEEVTKGKENQLQLSCFINQEVKYLFTGLKLRLQEEITKQSPTLQRNALYIKSSKISRLPAYLTIQMVRFFYKEKESVNAKVLKDVKFPLMLDMYELCTPELQEKMVSFRSKFKDLEDKKVNQQPNTSDKKSSPQKEVKYEPFSFADDIGSNNCGYYDLQAVLTHQGRSSSSGHYVSWVKRKQDEWIKFDDDKVSIVTPEDILRLSGGGDWHIAYVLLYGPRRVEIMEEESEQ

SEQ ID NO: 13954 - protein, 448 aa, Homo Sapiens
MPLYSVTVKWGKEKFEGVELNTDEPPMVFKAQLFALTGVQPARQKVMVKGGTLKMELPCGLTNLGNTCYMNATVQCIRSVPELKDALKRYAGALRASGEMASAQYITAALRDLFDSMDKTSSSIPPIILLQFLHMAFPQFAEKGEQGQYLQQDANECWIQMMRVLQQKLEAIEDDSVKETDSSSASAATPSKKKSLIDQFFGVEFETTMKCTESEEEEVTKGKENQLQLSCFINQEVKYLFTGLKLRLQEEITKQSPTLQRNALYIKSSKISRLPAYLTIQMVRFFYKEKESVNAKVLKDVKFPLMLDMYELCTPELQEKMVSFRSKFKDLEDKKVNQQPNTSDKKSSPQKEVKYEPFSFADDIGSNNCGYYDLQAVLTHQGRSSSSGHYVSWVKRKQDEWIKFDDDKVSIVTPEDILRLSGGGDWHIAYVLLYGPRRVEIMEEESEQ

SEQ ID NO: 13955 - protein, 20 aa, Homo Sapiens
MVFKAQLFALTGVQPARQKV

SEQ ID NO: 13956 - protein, 28 aa, Homo Sapiens
MVFKAQLFALTGVQPARQKVMVKGGTLK

SEQ ID NO: 13957 - protein, 33 aa, Homo Sapiens
  misc_feature (1)..(1): Xaa can be any naturally occurring amino acid
XALTGVQPARQKVMVKGGTLKDFHEITFFKNRE

SEQ ID NO: 13958 - protein, 106 aa, Homo Sapiens
HWTAYLRNKVDTYVEFPLRGLDMKCYLLEPENSGPESCLYDLAAVVVHHGSGVGSGHYTAYATHEGRWFHFNDSTVTLTDEETVVKAKAYILFYVEHQAKAGSDKL

SEQ ID NO: 13959 - protein, 56 aa, Homo Sapiens
MECPHLSSSVCIAPDSAKFPNGSPSSWCCSAFKCLSGVTVLCPQRVLYVAQAGLEL

SEQ ID NO: 13960 - protein, 56 aa, Homo Sapiens; identical to SEQ ID NO: 13959

SEQ ID NO: 13961 - protein, 132 aa, Homo Sapiens
MECPHLSSSVCIAPDSAKFPNGSPSSWCCSEMEFHHFTKAGLELLDSSNLPASASQSVGTTVCRSNKSPWVCLTCSSVHCGRYVNGHAKKHYEDAQVPLTNHKKSEKQDKVQHTVCMDCSSYSTYCYRCDDF

SEQ ID NO: 13962 - protein, 79 aa, Homo Sapiens
MECPHLSSSVCIAPDSAKFPNGSPSSWCCSGAINSRTPMNSCATFWTTYTWNFRAVSTVFPAQQFCRRILLCLQVTSVA

SEQ ID NO: 13963 - protein, 55 aa, Homo Sapiens
MECPHLSSSVCIAPDSAKFPNGSPSSWCCSVCRSNKSPWVCLTCSSVHCGRIWGT

SEQ ID NO: 13964 - protein, 520 aa, Homo Sapiens
MECPHLSSSVCIAPDSAKFPNGSPSSWCCSVCRSNKSPWVCLTCSSVHCGRYVNGHAKKHYEDAQVPLTNHKKSEKQDKVQHTVCMDCSSYSTYCYRCDDFVVNDTKLGLVQKVREHLQNLENSAFTADRHKKRKLLENSTLNSKLLKVNGSTTAICATGLRNLGNTCFMNAILQSLSNIEQFCCYFKELPAVELRNGKTAGRRTYHTRSQGDNNVSLVEEFRKTLCALWQGSQTAFSPESLFYVVWKIMPNFRGYQQQDAHEFMRYLLDHLHLELQGGFNGVSRSAILQENSTLSASNKCCINGASTVVTAIFGGILQNEVNCLICGTESRKFDPFLDLSLDIPSQFRSKRSKNQENGPVCSLRDCLRSFTDLEELDETELYMCHKCKKKQKSTKKFWIQKLPKVLCLHLKRFHWTAYLRNKVDTYVEFPLRGLDMKCYLLEPENSGPESCLYDLAAVVVHHGSGVGSGHYTAYATHEGRWFHFNDSTVTLTDEETVVKAKAYILFYVEHQAKAGSDKL

SEQ ID NO: 13965 - protein, 133 aa, Homo Sapiens
MECPHLSSSVCIAPDSAKFPNGSPSSWCCSVCRSNKSPWVCLTCSSVHCGSYRCDDFVVNDTKLGLVQKVREHLQNLENSAFTADRHKKRKLLENSTLNSKLLKVNGSTTAICATGLRNLGNTCFMNAILQSL

SEQ ID NO: 13966 - protein, 476 aa, Homo Sapiens
MECPHLSSSVCIAPDSAKFPNGSPSSWCCSVCRSNKSPWVCLTCSSVHCGSYRCDDFVVNDTKLGLVQKVREHLQNLENSAFTADRHKKRKLLENSTLNSKLLKVNGSTTAICATGLRNLGNTCFMNAILQSLSNIEQFCCYFKELPAVELRNGKTAGRRTYHTRSQGDNNVSLVEEFRKTLCALWQGSQTAFSPESLFYVVWKIMPNFRGYQQQDAHEFMRYLLDHLHLELQGGFNGVSRSAILQENSTLSASNKCCINGASTVVTAIFGGILQNEVNCLICGTESRKFDPFLDLSLDIPSQFRSKRSKNQENGPVCSLRDCLRSFTDLEELDETELYMCHKCKKKQKSTKKFWIQKLPKVLCLHLKRFHWTAYLRNKVDTYVEFPLRGLDMKCYLLEPENSGPESCLYDLAAVVVHHGSGVGSGHYTAYATHEGRWFHFNDSTVTLTDEETVVKAKAYILFYVEHQAKAGSDKL

SEQ ID NO: 13967 - protein, 431 aa, Homo Sapiens
MENTEGYRCDDFVVNDTKLGLVQKVREHLQNLENSAFTADRHKKRKLLENSTLNSKLLKVNGSTTAICATGLRNLGNTCFMNAILQSLSNIEQFCCYFKELPAVELRNGKTAGRRTYHTRSQGDNNVSLVEEFRKTLCALWQGSQTAFSPESLFYVVWKIMPNFRGYQQQDAHEFMRYLLDHLHLELQGGFNGVSRSAILQENSTLSASNKCCINGASTVVTAIFGGILQNEVNCLICGTESRKFDPFLDLSLDIPSQFRSKRSKNQENGPVCSLRDCLRSFTDLEELDETELYMCHKCKKKQKSTKKFWIQKLPKVLCLHLKRFHWTAYLRNKVDTYVEFPLRGLDMKCYLLEPENSGPESCLYDLAAVVVHHGSGVGSGHYTAYATHEGRWFHFNDSTVTLTDEETVVKAKAYILFYVEHQAKAGSDKL

SEQ ID NO: 13968 - protein, 503 aa, Homo Sapiens
MMQLVYCVFFFLLVCRSNKSPWVCLTCSSVHCGRYVNGHAKKHYEDAQVPLTNHKKSEKQDKVQHTVCMDCSSYSTYCYRCDDFVVNDTKLGLVQKVREHLQNLENSAFTADRHKKRKLLENSTLNSKLLKVNGSTTAICATGLRNLGNTCFMNAILQSLSNIEQFCCYFKELPAVELRNGKTAGRRTYHTRSQGDNNVSLVEEFRKTLCALWQGSQTAFSPESLFYVVWKIMPNFRGYQQQDAHEFMRYLLDHLHLELQGGFNGVSRSAILQENSTLSASNKCCINGASTVVTAIFGGILQNEVNCLICGTESRKFDPFLDLSLDIPSQFRSKRSKNQENGPVCSLRDCLRSFTDLEELDETELYMCHKCKKKQKSTKKFWIQKLPKVLCLHLKRFHWTAYLRNKVDTYVEFPLRGLDMKCYLLEPENSGPESCLYDLAAVVVHHGSGVGSGHYTAYATHEGRWFHFNDSTVTLTDEETVVKAKAYILFYVEHQAKAGSDKL

SEQ ID NO: 13969 - protein, 39 aa, Homo Sapiens
MQSPPHLAVCRSNKSPWVCLTCSSVHCGRYVNGHAKKHY

SEQ ID NO: 13970 - protein, 126 aa, Homo Sapiens
MQSPPHLAVCRSNKSPWVCLTCSSVHCGRYVNGHAKKHYEDAQVPLTNHKKSEKQDKVQHTVCMDCSSYSTYCYRCDDFVVNDTKLGLVQKVREHLQNLENSAFTADRHKKRKLLENSTLNSKLLK

SEQ ID NO: 13971 - protein, 498 aa, Homo Sapiens
MQSPPHLAVCRSNKSPWVCLTCSSVHCGRYVNGHAKKHYEDAQVPLTNHKKSEKQDKVQHTVCMDCSSYSTYCYRCDDFVVNDTKLGLVQKVREHLQNLENSAFTADRHKKRKLLENSTLNSKLLKVNGSTTAICATGLRNLGNTCFMNAILQSLSNIEQFCCYFKELPAVELRNGKTAGRRTYHTRSQGDNNVSLVEEFRKTLCALWQGSQTAFSPESLFYVVWKIMPNFRGYQQQDAHEFMRYLLDHLHLELQGGFNGVSRSAILQENSTLSASNKCCINGASTVVTAIFGGILQNEVNCLICGTESRKFDPFLDLSLDIPSQFRSKRSKNQENGPVCSLRDCLRSFTDLEELDETELYMCHKCKKKQKSTKKFWIQKLPKVLCLHLKRFHWTAYLRNKVDTYVEFPLRGLDMKCYLLEPENSGPESCLYDLAAVVVHHGSGVGSGHYTAYATHEGRWFHFNDSTVTLTDEETVVKAKAYILFYVEHQAKAGSDKL

SEQ ID NO: 13972 - protein, 443 aa, Homo Sapiens
  misc_feature (1)..(1): Xaa can be any naturally occurring amino acid
XKVQHTVCMDCSSYSTYCYRCDDFVVNDTKLGLVQKVREHLQNLENSAFTADRHKKRKLLENSTLNSKLLKVNGSTTAICATGLRNLGNTCFMNAILQSLSNIEQFCCYFKELPAVELRNGKTAGRRTYHTRSQGDNNVSLVEEFRKTLCALWQGSQTAFSPESLFYVVWKIMPNFRGYQQQDAHEFMRYLLDHLHLELQGGFNGVSRSAILQENSTLSASNKCCINGASTVVTAIFGGILQNEVNCLICGTESRKFDPFLDLSLDIPSQFRSKRSKNQENGPVCSLRDCLRSFTDLEELDETELYMCHKCKKKQKSTKKFWIQKLPKVLCLHLKRFHWTAYLRNKVDTYVEFPLRGLDMKCYLLEPENSGPESCLYDLAAVVVHHGSGVGSGHYTAYATHEGRWFHFNDSTVTLTDEETVVKAKAYILFYVEHQAKAGSDKL

SEQ ID NO: 13973 - protein, 6 aa, Homo Sapiens
  misc_feature (1)..(1): Xaa can be any naturally occurring amino acid
XSYSTY

SEQ ID NO: 13974 - protein, 211 aa, Homo Sapiens
KNADHLLHLKTKGPENIICSCISPCGSWIAYSTVSRFFLYRLNYEHDNISLKRVSKMPAFLRSALQILFSEDSTKLFVASNQGALHIVQLSGGSFKHLHAFQPQSGTVEAMCLLAVSPDGNWLAASGTSAGVHVYNVKQLKLHCTVPAYNFPVTAMAIAPNTNNLVIAHSDQQPLLFMDLLDERTLVAVERPLDDIIAQLPPPIKKKKFGT

SEQ ID NO: 13975 - protein, 182 aa, Homo Sapiens
MASVDLSYCSFLHLLLLCSPILACPPLNGIRCVAYNNQSNRLAVSRTDGTVEIYNLSANYFQEKFFPGHESRATEALCWAEGQRLFSAGLNGEIMEYDLQALNIKYAMDAFGGPIWSMAASPSGSQLLVGCEDGSVKLFQITPDKIQFERNFDRQKSRILSLSWHPSGTHIAAGSIDYISVF

SEQ ID NO: 13976 - protein, 79 aa, Homo Sapiens
MEYDLQALNIKYAMDAFGGPIWSMAASPSGSQLLVGCEDGSVKLFQITPDKIQFERNFDRQKSRILSLSWHPSGTHIAA

SEQ ID NO: 13977 - protein, 143 aa, Homo Sapiens
MEYDLQALNIKYAMDAFGGPIWSMAASPSGSQLLVGCEDGSVKLFQITPDKIQFERNFDRQKSRILSLSWHPSGTHIAAGSIDYISVFDVKSGSAVHKMIVDRQYMGVSKRKCIVWGVAFLSDGTIISVDSAGKVQFWDSATG

SEQ ID NO: 13978 - protein, 148 aa, Homo Sapiens
MGEFKVHRVRFFNYVPSGIRCVAYNNQSNRLAVSRTDGTVEIYNLSANYFQEKFFPGHESRATEALCWAEGQRLFSAGLNGEIMEYDLQALNIKYAMDAFGGPIWSMAASPSGSQLLVGCEDGSVKLFQITPDKIQFERNFDRQKSRI

SEQ ID NO: 13979 - protein, 571 aa, Homo Sapiens
MGEFKVHRVRFFNYVPSGIRCVAYNNQSNRLAVSRTDGTVEIYNLSANYFQEKFFPGHESRATEALCWAEGQRLFSAGLNGEIMEYDLQALNIKYAMDAFGGPIWSMAASPSGSQLLVGCEDGSVKLFQITPDKIQFERNFDRQKSRILSLSWHPSGTHIAAGSIDYISVFDVKSGSAVHKMIVDRQYMGVSKRKCIVWGVAFLSDGTIISVDSAGKVQFWDSATGTLVKSHLIANADVQSIAVADQEDSFVVGTAEGTVFHFQLVPVTSNSSEKQWVRTKPFQHHTHDVRTVAHSPTALISGGTDTHLVFRPLMEKVEVKNYDAALRKITFPHRCLISCSKKRQLLLFQFAHHLELWRLGSTVATGTVEAMCLLAVSPDGNWLAASGTSAGVHVYNVKQLKLHCTVPAYNFPVTAMAIAPNTNNLVIAHSDQQVFEYSIPDKQYTDWSRTVQKQGFHHLWLQRDTPITHISFHPKRPMHILLHDAYMFCIIDKSLPLPNDKTLLYNPFPPTNESDVIRRRTAHAFKISKIYKPLLFMDLLDERTLVAVERPLDDIIAQLPPPIKKKKFGT

SEQ ID NO: 13980 - protein, 686 aa, Homo Sapiens
MGEFKVHRVRFFNYVPSGIRCVAYNNQSNRLAVSRTDGTVEIYNLSANYFQEKFFPGHESRATEALCWAEGQRLFSAGLNGEIMEYDLQALNIKYAMDAFGGPIWSMAASPSGSQLLVGCEDGSVKLFQITPDKIQFERNFDRQKSRILSLSWHPSGTHIAAGSIDYISVFDVKSGSAVHKMIVDRQYMGVSKRKCIVWGVAFLSDGTIISVDSAGKVQFWDSATGTLVKSHLIANADVQSIAVADQEDSFVVGTAEGTVFHFQLVPVTSNSSEKQWVRTKPFQHHTHDVRTVAHSPTALISGGTDTHLVFRPLMEKVEVKNYDAALRKITFPHRCLISCSKKRQLLLFQFAHHLELWRLGSTVATGKNGDTLPLSKNADHLLHLKTKGPENIICSCISPCGSWIAYSTVSRFFLYRLNYEHDNISLKRVSKMPAFLRSALQILFSEDSTKLFVASNQGALHIVQLSGGSFKHLHAFQPQSGTVEAMCLLAVSPDGNWLAASGTSAGVHVYNVKQLKLHCTVPAYNFPVTAMAIAPNTNNLVIAHSDQQVFEYSIPDKQYTDWSRTVQKQGFHHLWLQRDTPITHISFHPKRPMHILLHDAYMFCIIDKSLPLPNDKTLLYNPFPPTNESDVIRRRTAHAFKISKIYKPLLFMDLLDERTLVAVERPLDDIIAQLPPPIKKKKFGT

SEQ ID NO: 13981 - protein, 625 aa, Homo Sapiens
MGEFKVHRVRFFNYVPSGIRCVAYNNQSNRLAVSRTDGTVEIYNLSANYFQEKFFPGHESRATEALCWAEGQRLFSAGLNGEIMEYDLQALNIKYAMDAFGGPIWSMAASPSGSQLLVGCEDGSVKLFQITPDKIQFERNFDRQKSRILSLSWHPSGTHIAAGSIDYISVFDVKSGSAVHKMIVDRQYMGVSKRKCIVWGVAFLSDGTIISVDSAGKVQFWDSATGTLVKSHLIANADVQSIAVADQEDSFVVGTAEGTVFHFQLVPVTSNSSEKQWVRTKPFQHHTHDVRTVAHSPTALISGGTDTHLVFRPLMEKVEVKNYDAALRKITFPHRCLISCSKKRQLLLFQFAHHLELWRLGSTVATGKNGDTLPLSKNADHLLHLKTKGPENIICSCISPCGSWIAYSTVSRFFLYRLNYEHDNISLKRVSKMPAFLRSALQILFSEDSTKLFVASNQGALHIVQLSGGSFKHLHAFQPQSGTVEAMCLLAVSPDGNWLAASGTSAGVHVYNVKQLKLHCTVPAYNFPVTAMAIAPNTNNLVIAHSDQQVFEYSIPDKQYTDWSRTVQKQGFHHLWLQRDTPITHISFHPKRPMHILLHDAYMFCIIDKSLVSSSLLPPKSSSES

SEQ ID NO: 13982 - protein, 198 aa, Homo Sapiens
MVFLQFFPGHESRATEALCWAEGQRLFSAGLNGEIMEYDLQALNIKYAMDAFGGPIWSMAASPSGSQLLVGCEDGSVKLFQITPDKIQFERNFDRQKSRILSLSWHPSGTHIAAGSIDYISVFDVKSGSAVHKMIVDRQYMGVSKRKCIVWGVAFLSDGTIISVDSAGKVQFWDSATGTLVKSHLIANADVQSIAVAD

SEQ ID NO: 13983 - protein, 700 aa, Homo Sapiens
RSTSGAEPESARARGAGAERGEHREGERGAAGIRCVAYNNQSNRLAVSRTDGTVEIYNLSANYFQEKFFPGHESRATEALCWAEGQRLFSAGLNGEIMEYDLQALNIKYAMDAFGGPIWSMAASPSGSQLLVGCEDGSVKLFQITPDKIQFERNFDRQKSRILSLSWHPSGTHIAAGSIDYISVFDVKSGSAVHKMIVDRQYMGVSKRKCIVWGVAFLSDGTIISVDSAGKVQFWDSATGTLVKSHLIANADVQSIAVADQEDSFVVGTAEGTVFHFQLVPVTSNSSEKQWVRTKPFQHHTHDVRTVAHSPTALISGGTDTHLVFRPLMEKVEVKNYDAALRKITFPHRCLISCSKKRQLLLFQFAHHLELWRLGSTVATGKNGDTLPLSKNADHLLHLKTKGPENIICSCISPCGSWIAYSTVSRFFLYRLNYEHDNISLKRVSKMPAFLRSALQILFSEDSTKLFVASNQGALHIVQLSGGSFKHLHAFQPQSGTVEAMCLLAVSPDGNWLAASGTSAGVHVYNVKQLKLHCTVPAYNFPVTAMAIAPNTNNLVIAHSDQQVFEYSIPDKQYTDWSRTVQKQGFHHLWLQRDTPITHISFHPKRPMHILLHDAYMFCIIDKSLPLPNDKTLLYNPFPPTNESDVIRRRTAHAFKISKIYKPLLFMDLLDERTLVAVERPLDDIIAQLPPPIKKKKFGT

SEQ ID NO: 13984 - protein, 139 aa, Homo Sapiens
METNVFHLMLCVTSARTHKSTSLCFGHFNSYPSLPLIHDLLLEISFQLSAPHEDARLTPEELERASLLQILPEMLGAERGDILRKADSSTNIFNPRGNLRKFQDFSGQDPNILLSHLLARIWKPYKKRETPDCFWKYCV

SEQ ID NO: 13985 - protein, 139 aa, Homo Sapiens
MYKLASCCLLFIGFLNPLLSLPLLDSREISFQLSAPHEDARLTPEELERASLLQILPEMLGAERGDILRKADSSTNIFNPRGNLRKFQDFSGQDPNILLSHLLARIWKPYKKQRRKLRQDLRLWKKEPGLRIFKNYVWV

SEQ ID NO: 13986 - protein, 124 aa, Homo Sapiens
MYKLASCCLLFIGFLNPLLSLPLLDSREISFQLSAPHEDARLTPEELERASLLQILPEMLGAERGDILRKADSSTNIFNPRGNLRKFQDFSGQDPNILLSHLLARIWKPYKKRETPDCFWKYCV

SEQ ID NO: 13987 - protein, 38 aa, Homo Sapiens
MNKILSSTVCFGLLTLLSVLSFLQSVHGRPYLTQGNEI

SEQ ID NO: 13988 - protein, 81 aa, Homo Sapiens
MNKILSSTVCFGLLTLLSVLSFLQSVHGRPYLTQGNEIFPDKKYTNREELLLALLNKNFDFQRPFNTAGKAKRTASGGEGF

SEQ ID NO: 13989 - protein, 81 aa, Homo Sapiens; identical to SEQ ID NO: 13988

SEQ ID NO: 13990 - protein, 119 aa, Homo Sapiens
MNKILSSTVCFGLLTLLSVLSFLQSVHGRPYLTQGNEIFPDKKYTNREELLLALLNKNFDFQRPFNTDLALPNKLEELNQLEKLKEQLVEEKDSETSYAVDGLFSSHPSKRACFWKYCV

SEQ ID NO: 13991 - protein, 119 aa, Homo Sapiens; identical to SEQ ID NO: 13990

SEQ ID NO: 13992 - protein, 132 aa, Homo Sapiens
MNKILSSTVCFGLLTLLSVLSFLQSVHGRPYLTQGNEIFPDKKYTNREELLLALLNKNFDFQRPFNTDLALPNKLEELNQLEKLKEQLVEEKDSETSYAVDGLFSSHPSKRALSSRTLIQLNCLQHCQNRRG

SEQ ID NO: 13993 - protein, 1240 aa, Homo Sapiens
MKSCAVSLTTAAVAFGDEAKKMAEGKASRESEEESVSLTVEEREALGGMDSRLFGFVRLHEDGARTKTLLGKAVRCYESLILKAEGKVESDFFCQLGHFNLLLEDYSKALSAYQRYYSLQADYWKNAAFLYGLGLVYFYYNAFHWAIKAFQDVLYVDPSFCRAKEIHLRLGLMFKVNTDYKSSLKHFQLALIDCNPCTLSNAEIQFHIAHLYETQRKYHSAKEAYEQLLQTENLPAQVKATVLQQLGWMHHNMDLVGDKATKESYAIQYLQKSLEADPNSGQSWYFLGRCYSSIGKVQDAFISYRQSIDKSEASADTWCSIGVLYQQQNQPMDALQAYICAVQLDHGHAAAWMDLGTLYESCNQPQDAIKCYLNAARSKRCSNTSTLAARIKFLQNGSDNWNGGQSLSHHPVQQVYSLCLTPQKLQHLEQLRANRDNLNPAQKHQLEQLESQFVLMQQMRHKEVAQVRTTGIHNGAITDSSLPTNSVSNRQPHGALTRVSSVSQPGVRPACVEKLLSSGAFSAGCIPCGTSKILGSTDTILLGSNCIAGSESNGNVPYLQQNTHTLPHNHTDLNSSTEEPWRKQLSNSAQGLHKSQSSCLSGPNEEQPLFSTGSAQYHQATSTGIKKANEHLTLPSNSVPQGDADSHLSCHTATSGGQQGIMFTKESKPSKNRSLVPETSRHTGDTSNGCADVKGLSNHVHQLIADAVSSPNHGDSPNLLIADNPQLSALLIGKANGNVGTGTCDKVNNIHPAVHTKTDHSVASSPSSAISTATPSPKSTEQRSINSVTSLNSPHSGLHTVNGEGLGKSQSSTKVDLPLASHRSTSQILPSMSVSICPSSTEVLKACRNPGKNGLSNSCILLDKCPPPRPPTSPYPPLPKDKLNPPTPSIYLENKRDAFFPPLHQFCTNPKNPVTVIRGLAGALKLDLGLFSTKTLVEANNEHMVEVRTQLLQPADENWDPTGTKKIWRCESNRSHTTIAKYAQYQASSFQESLREENEKRTQHKDHSDNESTSSENSGRRRKGPFKTIKFGTNIDLSDNKKWKLQLHELTKLPAFARVVSAGNLLTHVGHTILGMNTVQLYMKVPGSRTPGHQENNNFCSVNINIGPGDCEWFVVPEDYWGVLNDFCEKNNLNFLMSSWWPNLEDLYEANVPVYRFIQRPGDLVWINAGTVHWVQAVGWCNNIAWNVGPLTACQYKLAVERYEWNKLKSVKSPVPMVHLSWNMARNIKVSDPKLFEMIK

SEQ ID NO: 13994 - protein, 1079 aa, Homo Sapiens
MKSCAVSLTTAAVAFGDEAKKMAEGKASRESEEESVSLTVEEREALGGMDSRLFGFVRLHEDGARTKTLLGKAVRCYESLILKAEGKVESDFFCQLGHFNLLLEDYSKALSAYQRYYSLQADYWKNAAFLYGLGLVYFYYNAFHWAIKAFQDVLYVDPSFCRAKEIHLRLGLMFKVNTDYKSSLKHFQLALIDCNPCTLSNAEIQFHIAHLYETQRKYHSAKEAYEQLLQTENLPAQVKATVLQQLGWMHHNMDLVGDKATKESYAIQYLQKSLEADPNSGQSWYFLGRCYSSIGKVQDAFISYRQSIDKSEASADTWCSIGVLYQQQNQPMDALQAYICAVQLDHGHAAAWMDLGTLYESCNQPQDAIKCYLNAARSKRCSNTSTLAARIKFLQNGSDNWNGGQSLSHHPVQQVYSLCLTPQKLQHLEQLRANRDNLNPAQKHQLEQLESQFVLMQQMRHKEVAQVRTTGIHNGAITDSSLPTNSVSNRQPHGALTRVSSVSQPGVRPACVEKLLSSGAFSAGCIPCGTSKILGSTDTILLGSNCIAGSESNGNVPYLQQNTHTLPHNHTDLNSSTEEPWRKQLSNSAQGLHKSQSSCLSGPNEEQPLFSTGSAQYHQATSTGIKKANEHLTLPSNSVPQGDADSHLSCHTATSGGQQGIMFTKESKPSKNRSLVPETSRHTGDTSNGCADVKGLSNHVHQLIADAVSSPNHGDSPNLLIADNPQLSALLIGKANGNVGTGTCDKVNNIHPAVHTKTDHSVASSPSSAISTATPSPKSTEQRSINSVTSLNSPHSGLHTVNGEGLGKSQSSTKVDLPLASHRSTSQILPSMSVSICPSSTEVLKACRNPGKNGLSNSCILLDKCPPPRPPTSPYPPLPKDKLNPPTPSIYLENKRDAFFPPLHQFCTNPKNPVTVIRGLAGALKLDLGLFSTKTLVEANNEHMVEVRTQLLQPADENWDPTGTKKIWRCESNRSHTTIAKYAQYQASSFQESLRAGMQWCDLSSLQPPPPGFKRFSHLSLPNSWNYRHLPSCPTNFCIFVETGFHHVGQACLELLTSGGLLASASQSAGITGVSHHAR

SEQ ID NO: 13995 - protein, 1347 aa, Homo Sapiens
MKSCAVSLTTAAVAFGDEAKKMAEGKASRESEEESVSLTVEEREALGGMDSRLFGFVRLHEDGARTKTLLGKAVRCYESLILKAEGKVESDFFCQLGHFNLLLEDYSKALSAYQRYYSLQADYWKNAAFLYGLGLVYFYYNAFHWAIKAFQDVLYVDPSFCRAKEIHLRLGLMFKVNTDYKSSLKHFQLALIDCNPCTLSNAEIQFHIAHLYETQRKYHSAKEAYEQLLQTENLPAQVKATVLQQLGWMHHNMDLVGDKATKESYAIQYLQKSLEADPNSGQSWYFLGRCYSSIGKVQDAFISYRQSIDKSEASADTWCSIGVLYQQQNQPMDALQAYICAVQLDHGHAAAWMDLGTLYESCNQPQDAIKCYLNAARSKRCSNTSTLAARIKFLQNGSDNWNGGQSLSHHPVQQVYSLCLTPQKLQHLEQLRANRDNLNPAQKHQLEQLESQFVLMQQMRHKEVAQVRTTGIHNGAITDSSLPTNSVSNRQPHGALTRVSSVSQPGVRPACVEKLLSSGAFSAGCIPCGTSKILGSTDTILLGSNCIAGSESNGNVPYLQQNTHTLPHNHTDLNSSTEEPWRKQLSNSAQGLHKSQSSCLSGPNEEQPLFSTGSAQYHQATSTGIKKANEHLTLPSNSVPQGDADSHLSCHTATSGGQQGIMFTKESKPSKNRSLVPETSRHTGDTSNGCADVKGLSNHVHQLIADAVSSPNHGDSPNLLIADNPQLSALLIGKANGNVGTGTCDKVNNIHPAVHTKTDHSVASSPSSAISTATPSPKSTEQRSINSVTSLNSPHSGLHTVNGEGLGKSQSSTKVDLPLASHRSTSQILPSMSVSICPSSTEVLKACRNPGKNGLSNSCILLDKCPPPRPPTSPYPPLPKDKLNPPTPSIYLENKRDAFFPPLHQFCTNPKNPVTVIRGLAGALKLDLGLFSTKTLVEANNEHMVEVRTQLLQPADENWDPTGTKKIWRCESNRSHTTIAKYAQYQASSFQESLREENEKRTQHKDHSDNESTSSENSGRRRKGPFKTIKFGTNIDLSDNKKWKLQLHELTKLPAFARVVSAGNLLTHVGHTILGMNTVQLYMKVPGSRTPGHQENNNFCSVNINIGPGDCEWFVVPEDYWGVLNDFCEKNNLNFLMSSWWPNLEDLYEANVPVYRFIQRPGDLVWINAGTVHWVQAVGWCNNIAWNVGPLTACQYKLAVERYEWNKLKSVKSPVPMVHLSWNMARNIKVSDPKLFEMIKYCLLKILKQYQTLREALVAAGKEVIWHGRTNDEPAHYCSICEVEVFNLLFVTNESNTQKTYIVHCHDCARKTSKSLENFVVLEQYKMEDLIQVYDQFTLALSLSSSS

SEQ ID NO: 13996 - protein, 1392 aa, Homo Sapiens
MKSCAVSLTTAAVAFGDEAKKMAEGKASRESEEESVSLTVEEREALGGMDSRLFGFVRLHEDGARTKTLLGKAVRCYESLILKAEGKVESDFFCQLGHFNLLLEDYSKALSAYQRYYSLQADYWKNAAFLYGLGLVYFYYNAFHWAIKAFQDVLYVDPSFCRAKEIHLRLGLMFKVNTDYKSSLKHFQLALIDCNPCTLSNAEIQFHIAHLYETQRKYHSAKEAYEQLLQTENLPAQVKATVLQQLGWMHHNMDLVGDKATKESYAIQYLQKSLEADPNSGQSWYFLGRCYSSIGKVQDAFISYRQSIDKSEASADTWCSIGVLYQQQNQPMDALQAYICAVQLDHGHAAAWMDLGTLYESCNQPQDAIKCYLNAARSKRCSNTSTLAARIKFLQAQLCNLPQSSLQNKTKLLPSIEEAWSLPIPAELTSRQGAMNTAQQNGSDNWNGGQSLSHHPVQQVYSLCLTPQKLQHLEQLRANRDNLNPAQKHQLEQLESQFVLMQQMRHKEVAQVRTTGIHNGAITDSSLPTNSVSNRQPHGALTRVSSVSQPGVRPACVEKLLSSGAFSAGCIPCGTSKILGSTDTILLGSNCIAGSESNGNVPYLQQNTHTLPHNHTDLNSSTEEPWRKQLSNSAQGLHKSQSSCLSGPNEEQPLFSTGSAQYHQATSTGIKKANEHLTLPSNSVPQGDADSHLSCHTATSGGQQGIMFTKESKPSKNRSLVPETSRHTGDTSNGCADVKGLSNHVHQLIADAVSSPNHGDSPNLLIADNPQLSALLIGKANGNVGTGTCDKVNNIHPAVHTKTDHSVASSPSSAISTATPSPKSTEQRSINSVTSLNSPHSGLHTVNGEGLGKSQSSTKVDLPLASHRSTSQILPSMSVSICPSSTEVLKACRNPGKNGLSNSCILLDKCPPPRPPTSPYPPLPKDKLNPPTPSIYLENKRDAFFPPLHQFCTNPKNPVTVIRGLAGALKLDLGLFSTKTLVEANNEHMVEVRTQLLQPADENWDPTGTKKIWRCESNRSHTTIAKYAQYQASSFQESLREENEKRTQHKDHSDNESTSSENSGRRRKGPFKTIKFGTNIDLSDNKKWKLQLHELTKLPAFARVVSAGNLLTHVGHTILGMNTVQLYMKVPGSRTPGHQENNNFCSVNINIGPGDCEWFVVPEDYWGVLNDFCEKNNLNFLMSSWWPNLEDLYEANVPVYRFIQRPGDLVWINAGTVHWVQAVGWCNNIAWNVGPLTACQYKLAVERYEWNKLKSVKSPVPMVHLSWNMARNIKVSDPKLFEMIKYCLLKILKQYQTLREALVAAGKEVIWHGRTNDEPAHYCSICEVEVFNLLFVTNESNTQKTYIVHCHDCARKTSKSLENFVVLEQYKMEDLIQVYDQFTLALSLSSSS

SEQ ID NO: 13997 - protein, 1389 aa, Homo Sapiens
MKSCAVSLTTAAVAFGDEAKKMAEGKASRESEEESVSLTVEEREALGGMDSRLFGFVRLHEDGARTKTLLGKAVRCYESLILKAEGKVESDFFCQLGHFNLLLEDYSKALSAYQRYYSLQADYWKNAAFLYGLGLVYFYYNAFHWAIKAFQDVLYVDPSFCRAKEIHLRLGLMFKVNTDYKSSLKHFQLALIDCNPCTLSNAEIQFHIAHLYETQRKYHSAKEAYEQLLQTENLPAQVKATVLQQLGWMHHNMDLVGDKATKESYAIQYLQKSLEADPNSGQSWYFLGSVLYQQQNQPMDALQAYICAVQLDHGHAAAWMDLGTLYESCNQPQDAIKCYLNAARSKRCSNTSTLAARIKFLQAQLCNLPQSSLQNKTKLLPSIEEAWSLPIPAELTSRQGAMNTAQQQSLSLHMITSSQVEGLSSPAKKKRTSSPTKNGSDNWNGGQSLSHHPVQQVYSLCLTPQKLQHLEQLRANRDNLNPAQKHQLEQLESQFVLMQQMRHKEVAQVRTTGIHNGAITDSSLPTNSVSNRQPHGALTRVSSVSQPGVRPACVEKLLSSGAFSAGCIPCGTSKILGSTDTILLGSNCIAGSESNGNVPYLQQNTHTLPHNHTDLNSSTEEPWRKQLSNSAQGLHKSQSSCLSGPNEEQPLFSTGSAQYHQATSTGIKKANEHLTLPSNSVPQGDADSHLSCHTATSGGQQGIMFTKESKPSKNRSLVPETSRHTGDTSNGCADVKGLSNHVHQLIADAVSSPNHGDSPNLLIADNPQLSALLIGKANGNVGTGTCDKVNNIHPAVHTKTDHSVASSPSSAISTATPSPKSTEQRSINSVTSLNSPHSGLHTVNGEGLGKSQSSTKVDLPLASHRSTSQILPSMSVSICPSSTEVLKACRNPGKNGLSNSCILLDKCPPPRPPTSPYPPLPKDKLNPPTPSIYLENKRDAFFPPLHQFCTNPKNPVTVIRGLAGALKLDLGLFSTKTLVEANNEHMVEVRTQLLQPADENWDPTGTKKIWRCESNRSHTTIAKYAQYQASSFQESLREENEKRTQHKDHSDNESTSSENSGRRRKGPFKTIKFGTNIDLSDNKKWKLQLHELTKLPAFARVVSAGNLLTHVGHTILGMNTVQLYMKVPGSRTPGHQENNNFCSVNINIGPGDCEWFVVPEDYWGVLNDFCEKNNLNFLMSSWWPNLEDLYEANVPVYRFIQRPGDLVWINAGTVHWVQAVGWCNNIAWNVGPLTACQYKLAVERYEWNKLKSVKSPVPMVHLSWNMARNIKVSDPKLFEMIKYCLLKILKQYQTLREALVAAGKEVIWHGRTNDEPAHYCSICEVEVFNLLFVTNESNTQKTYIVHCHDCARKTSKSLENFVVLEQYKMEDLIQVYDQFTLALSLSSSS

SEQ ID NO: 13998 - protein, 1335 aa, Homo Sapiens
MKSCAVSLTTAAVAFGDEAKKMAEGKASRESEEESVSLTVEEREALGGMDSRLFGFVRLHEDGARTKTLLGKAVRCYESLILKAEGKVESDFFCQLGHFNLLLEDYSKALSAYQRYYSLQADYWKNAAFLYGLGLVYFYYNAFHWAIKAFQDVLYVDPSFCRAKEIHLRLGLMFKVNTDYKSSLKHFQLALIDCNPCTLSNAEIQFHIAHLYETQRKYHSAKEAYEQLLQTENLPAQVKATVLQQLGWMHHNMDLVGDKATKESYAIQYLQKSLEADPNSGQSWYFLGRCYSSIGKVQDAFISYRQSIDKSEASADTWCSIGVLYQQQNQPMDALQAYICAVQLDHGHAAAWMDLGTLYESCNQPQDAIKCYLNAARSKRCSNTSTLAARIKFLQAQLCNLPQSSLQNKTKLLPSIEEAWSLPIPAELTSRQGAMNTAQQNGSDNWNGGQSLSHHPVQQVYSLCLTPQKLQHLEQLRANRDNLNPAQKHQLEQLESQFVLMQQMRHKEVAQVRTTGIHNGAITDSSLPTNSVSNRQPHGALTRVSSVSQPGVRPACVEKLLSSGAFSAGCIPCGTSKILGSTDTILLGSNCIAGSESNGNVPYLQQNTHTLPHNHTDLNSSTEEPWRKQLSNSAQGLHKSQSSCLSGPNEEQPLFSTGSAQYHQATSTGIKKANEHLTLPSNSVPQGDADSHLSCHTATSGGQQGIMFTKESKPSKNRSLVPETSRHTGDTSNGCADVKGLSNHVHQLIADAVSSPNHGDSPNLLIADNPQLSALLIGKANGNVGTGTCDKVNNIHPAVHTKTDHSVASSPSSAISTATPSPKSTEQRSINSVTSLNSPHSGLHTVNGEGLGKSQSSTKVDLPLASHRSTSQILPSMSVSICPSSTEVLKACRNPGKNGLSNSCILLDKCPPPRPPTSPYPPLPKDKLNPPTPSIYLENKRDAFFPPLHQFCTNPKNPVTVIRGLAGALKLDLGLFSTKTLVEANNEHMVEVRTQLLQPADENWDPTGTKKIWRCESNRSHTTIAKYAQYQASSFQESLREENEKRTQHKDHSDNESTSSENSGRRRKGPFKTIKFGTNIDLSDNKKWKLQLHELTKLPAFARVVSAGNLLTHVGHTILGMNTVQLYMKVPGSRTPGHQENNNFCSVNINIGPGDCEWFVVPEDYWGVLNDFCEKNNLNFLMSSWWPNLEDLYEANVPVYRFIQRPGDLVWINAGTVHWVQAVGWCNNIAWNVGPLTACQYKLAVERYEWNKLKSVKSPVPMVHLSWNMARNIKVSDPKLFEMIKYCLLKILKQYQTLREALVAAGKEVIWHGRTNDEPAHYCSICEALSLSSSS

SEQ ID NO: 13999 - protein, 1444 aa, Homo Sapiens
MKSCAVSLTTAAVAFGDEAKKMAEGKASRESEEESVSLTVEEREALGGMDSRLFGFVRLHEDGARTKTLLGKAVRCYESLILKAEGKVESDFFCQLGHFNLLLEDYSKALSAYQRYYSLQADYWKNAAFLYGLGLVYFYYNAFHWAIKAFQDVLYVDPSFCRAKEIHLRLGLMFKVNTDYKSSLKHFQLALIDCNPCTLSNAEIQFHIAHLYETQRKYHSAKEAYEQLLQTENLPAQVKATVLQQLGWMHHNMDLVGDKATKESYAIQYLQKSLEADPNSGQSWYFLGRCYSSIGKVQDAFISYRQSIDKSEASADTWCSIGVLYQQQNQPMDALQAYICAVQLDHGHAAAWMDLGTLYESCNQPQDAIKCYLNAARSKRCSNTSTLAARIKFLQAQLCNLPQSSLQNKTKLLPSIEEAWSLPIPAELTSRQGAMNTAQQAYRAHDPNTEHVLNHSQTPILQQSLSLHMITSSQVEGLSSPAKKKRTSSPTKNGSDNWNGGQSLSHHPVQQVYSLCLTPQKLQHLEQLRANRDNLNPAQKHQLEQLESQFVLMQQMRHKEVAQVRTTGIHNGAITDSSLPTNSVSNRQPHGALTRVSSVSQPGVRPACVEKLLSSGAFSAGCIPCGTSKILGSTDTILLGSNCIAGSESNGNVPYLQQNTHTLPHNHTDLNSSTEEPWRKQLSNSAQGLHKSQSSCLSGPNEEQPLFSTGSAQYHQATSTGIKKANEHLTLPSNSVPQGDADSHLSCHTATSGGQQGIMFTKESKPSKNRSLVPETSRHTGDTSNGCADVKGLSNHVHQLIADAVSSPNHGDSPNLLIADNPQLSALLIGKANGNVGTGTCDKVNNIHPAVHTKTDHSVASSPSSAISTATPSPKSTEQRSINSVTSLNSPHSGLHTVNGEGLGKSQSSTKVDLPLASHRSTSQILPSMSVSICPSSTEVLKACRNPGKNGLSNSCILLDKCPPPRPPTSPYPPLPKDKLNPPTPSIYLENKRDAFFPPLHQFCTNPKNPVTVIRGLAGALKLDLGLFSTKTLVEANNEHMVEVRTQLLQPADENWDPTGTKKIWRCESNRSHTTIAKYAQYQASSFQESLREENEKRTQHKDHSDNESTSSENSGRRRKGPFKTIKFGTNIDLSDNKKWKLQLHELTKLPAFARVVSAGNLLTHVGHTILGMNTVQLYMKVPGSRTPGHQENNNFCSVNINIGPGDCEWFVVPEDYWGVLNDFCEKNNLNFLMSSWWPNLEDLYEANVPVYRFIQRPGDLVWINAGTVHWVQAVGWCNNIAWNVGPLTACQYKLAVERYEWNKLKSVKSPVPMVHLSWNMARNIKVSDPKLFEMIKYCLLKILKQYQTLREALVAAGKEVIWHGRTNDEPAHYCSICEVEVFNLLFVTNESNTQKTYIVHCHDCARKTSKSLENFVVLEQYKMEDLIQVYDQFTLALSLSSSS

SEQ ID NO: 14000 - protein, 1363 aa, Homo Sapiens
MKSCAVSLTTAAVAFGDEAKKMAEGKASRESEEESVSLTVEEREALGGMDSRLFGFVRLHEDGARTKTLLGKAVRCYESLILKAEGKVESDFFCQLGHFNLLLEDYSKALSAYQRYYSLQADYWKNAAFLYGLGLVYFYYNAFHWAIKAFQDVLYVDPSFCRAKEIHLRLGLMFKVNTDYKSSLKHFQLALIDCNPCTLSNAEIQFHIAHLYETQRKYHSAKEAYEQLLQTENLPAQVKATVLQQLGWMHHNMDLVGDKATKESYAIQYLQKSLEADPNSGQSWYFLGRCYSSIGKVQDAFISYRQSIDKSEASADTWCSIGVLYQQQNQPMDALQAYICAVQLDHGHAAAWMDLGTLYESCNQPQDAIKCYLNAARSKRCSNTSTLAARIKFLQNGSDNWNGGQSLSHHPVQQVYSLCLTPQKLQHLEQLRANRDNLNPAQKHQLEQLESQFVLMQQMRHKEVAQVRTTGIHNGAITDSSLPTNSVSNRQPHGALTRVSSVSQPGVRPACVEKLLSSGAFSAGCIPCGTSKILGSTDTILLGSNCIAGSESNGNVPYLQQNTHTLPHNHTDLNSSTEEPWRKQLSNSAQAYLGHLTGFIQDNCNKGLHKSQSSCLSGPNEEQPLFSTGSAQYHQATSTGIKKANEHLTLPSNSVPQGDADSHLSCHTATSGGQQGIMFTKESKPSKNRSLVPETSRHTGDTSNGCADVKGLSNHVHQLIADAVSSPNHGDSPNLLIADNPQLSALLIGKANGNVGTGTCDKVNNIHPAVHTKTDHSVASSPSSAISTATPSPKSTEQRSINSVTSLNSPHSGLHTVNGEGLGKSQSSTKVDLPLASHRSTSQILPSMSVSICPSSTEVLKACRNPGKNGLSNSCILLDKCPPPRPPTSPYPPLPKDKLNPPTPSIYLENKRDAFFPPLHQFCTNPKNPVTVIRGLAGALKLDLGLFSTKTLVEANNEHMVEVRTQLLQPADENWDPTGTKKIWRCESNRSHTTIAKYAQYQASSFQESLREENEKRTQHKDHSDNESTSSENSGRRRKGPFKTIKFGTNIDLSDNKKWKLQLHELTKLPAFARVVSAGNLLTHVGHTILGMNTVQLYMKVPGSRTPGHQENNNFCSVNINIGPGDCEWFVVPEDYWGVLNDFCEKNNLNFLMSSWWPNLEDLYEANVPVYRFIQRPGDLVWINAGTVHWVQAVGWCNNIAWNVGPLTACQYKLAVERYEWNKLKSVKSPVPMVHLSWNMARNIKVSDPKLFEMIKYCLLKILKQYQTLREALVAAGKEVIWHGRTNDEPAHYCSICEVEVFNLLFVTNESNTQKTYIVHCHDCARKTSKSLENFVVLEQYKMEDLIQVYDQFTLALSLSSSS

SEQ ID NO: 14001 - protein, 1211 aa, Homo Sapiens
MKSCAVSLTTAAVAFGDEAKKMAEGKASRESEEESVSLTVEEREALGGMDSRLFGFVRLHEDGARTKTLLGKAVRCYESLILKAEGKVESDFFCQLGHFNLLLEDYSKALSAYQRYYSLQADYWKNAAFLYGLGLVYFYYNAFHWAIKAFQDVLYVDPSFCRAKEIHLRLGLMFKVNTDYKSSLKHFQLALIDCNPCTLSNAEIQFHIAHLYETQRKYHSAKEAYEQLLQTENLPAQVKATVLQQLGWMHHNMDLVGDKATKESYAIQYLQKSLEADPNSGQSWYFLGRCYSSIGKVQDAFISYRQSIDKSEASADTWCSIGVLYQQQNQPMDALQAYICAVQLDHGHAAAWMDLGTLYESCNQPQDAIKCYLNAARSKRCSNTSTLAARIKFLQAQLCNLPQSSLQNKTKLLPSIEEAWSLPIPAELTSRQGAMNTAQQNGSDNWNGGQSLSHHPVQQVYSLCLTPQKLQHLEQLRANRDNLNPAQKHQLEQLESQFVLMQQMRHKEVAQGLHKSQSSCLSGPNEEQPLFSTGSAQYHQATSTGIKKANEHLTLPSNSVPQGDADSHLSCHTATSGGQQGIMFTKESKPSKNRSLVPETSRHTGDTSNGCADVKGLSNHVHQLIADAVSSPNHGDSPNLLIADNPQLSALLIGKANGNVGTGTCDKVNNIHPAVHTKTDHSVASSPSSAISTATPSPKSTEQRSINSVTSLNSPHSGLHTVNGEGLGKSQSSTKVDLPLASHRSTSQILPSMSVSICPSSTEVLKACRNPGKNGLSNSCILLDKCPPPRPPTSPYPPLPKDKLNPPTPSIYLENKRDAFFPPLHQFCTNPKNPVTVIRGLAGALKLDLGLFSTKTLVEANNEHMVEVRTQLLQPADENWDPTGTKKIWRCESNRSHTTIAKYAQYQASSFQESLREENEKRTQHKDHSDNESTSSENSGRRRKGPFKTIKFGTNIDLSDNKKWKLQLHELTKLPAFARVVSAGNLLTHVGHTILGMNTVQLYMKVPGSRTPGHQENNNFCSVNINIGPGDCEWFVVPEDYWGVLNDFCEKNNLNFLMSSWWPNLEDLYEANVPVYRFIQRPGDLVWINAGTVHWVQAVGWCNNIAWNVGPLTACQYKLAVERYEWNKLKSVKSPVPMVHLSWNMARNIKVSDPKLFEMIKYCLLKILKQYQTLREALVAAGKEVIWHGRTNDEPAHYCSICEALSLSSSS

SEQ ID NO: 14002 - protein, 1399 aa, Homo Sapiens
MKSCAVSLTTAAVAFGDEAKKMAEGKASRESEEESVSLTVEEREALGGMDSRLFGFVRLHEDGARTKTLLGKAVRCYESLILKAEGKVESDFFCQLGHFNLLLEDYSKALSAYQRYYSLQADYWKNAAFLYGLGLVYFYYNAFHWAIKAFQDVLYVDPSFCRAKEIHLRLGLMFKVNTDYKSSLKHFQLALIDCNPCTLSNAEIQFHIAHLYETQRKYHSAKEAYEQLLQTENLPAQVKATVLQQLGWMHHNMDLVGDKATKESYAIQYLQKSLEADPNSGQSWYFLGRCYSSIGKVQDAFISYRQSIDKSEASADTWCSIGVLYQQQNQPMDALQAYICAVQLDHGHAAAWMDLGTLYESCNQPQDAIKCYLNAARSKRCSNTSTLAARIKFLQAYRAHDPNTEHVLNHSQTPILQQSLSLHMITSSQVEGLSSPAKKKRTSSPTKNGSDNWNGGQSLSHHPVQQVYSLCLTPQKLQHLEQLRANRDNLNPAQKHQLEQLESQFVLMQQMRHKEVAQVRTTGIHNGAITDSSLPTNSVSNRQPHGALTRVSSVSQPGVRPACVEKLLSSGAFSAGCIPCGTSKILGSTDTILLGSNCIAGSESNGNVPYLQQNTHTLPHNHTDLNSSTEEPWRKQLSNSAQGLHKSQSSCLSGPNEEQPLFSTGSAQYHQATSTGIKKANEHLTLPSNSVPQGDADSHLSCHTATSGGQQGIMFTKESKPSKNRSLVPETSRHTGDTSNGCADVKGLSNHVHQLIADAVSSPNHGDSPNLLIADNPQLSALLIGKANGNVGTGTCDKVNNIHPAVHTKTDHSVASSPSSAISTATPSPKSTEQRSINSVTSLNSPHSGLHTVNGEGLGKSQSSTKVDLPLASHRSTSQILPSMSVSICPSSTEVLKACRNPGKNGLSNSCILLDKCPPPRPPTSPYPPLPKDKLNPPTPSIYLENKRDAFFPPLHQFCTNPKNPVTVIRGLAGALKLDLGLFSTKTLVEANNEHMVEVRTQLLQPADENWDPTGTKKIWRCESNRSHTTIAKYAQYQASSFQESLREENEKRTQHKDHSDNESTSSENSGRRRKGPFKTIKFGTNIDLSDNKKWKLQLHELTKLPAFARVVSAGNLLTHVGHTILGMNTVQLYMKVPGSRTPGHQENNNFCSVNINIGPGDCEWFVVPEDYWGVLNDFCEKNNLNFLMSSWWPNLEDLYEANVPVYRFIQRPGDLVWINAGTVHWVQAVGWCNNIAWNVGPLTACQYKLAVERYEWNKLKSVKSPVPMVHLSWNMARNIKVSDPKLFEMIKYCLLKILKQYQTLREALVAAGKEVIWHGRTNDEPAHYCSICEVEVFNLLFVTNESNTQKTYIVHCHDCARKTSKSLENFVVLEQYKMEDLIQVYDQFTLALSLSSSS

SEQ ID NO: 14003 - protein, 1367 aa, Homo Sapiens
MKSCAVSLTTAAVAFGDEAKKMAEGKASRESEEESVSLTVEEREALGGMDSRLFGFVRLHEDGARTKTLLGKAVRCYESLILKAEGKVESDFFCQLGHFNLLLEDYSKALSAYQRYYSLQADYWKNAAFLYGLGLVYFYYNAFHWAIKAFQDVLYVDPSFCRAKEIHLRLGLMFKVNTDYKSSLKHFQLALIDCNPCTLSNAEIQFHIAHLYETQRKYHSAKEAYEQLLQTENLPAQVKATVLQQLGWMHHNMDLVGDKATKESYAIQYLQKSLEADPNSGQSWYFLGRCYSSIGKVQDAFISYRQSIDKSEASADTWCSIGVLYQQQNQPMDALQAYICAVQLDHGHAAAWMDLGTLYESCNQPQDAIKCYLNAARSKRCSNTSTLAARIKFLQAQLCNLPQSSLQNKTKLLPSIEEAWSLPIPAELTSRQGAMNTAQQNGSDNWNGGQSLSHHPVQQVYSLCLTPQKLQHLEQLRANRDNLNPAQKHQLEQLESQFVLMQQMRHKEVAQVRTTGIHNGAITDSSLPTNSVSNRQPHGALTRVSSVSQPGVRPACVEKLLSSGAFSAGCIPCGTSKILGSTDTILLGSNCIAGSESNGNVPYLQQNTHTLPHNHTDLNSSTEEPWRKQLSNSAQGLHKSQSSCLSGPNEEQPLFSTGSAQYHQATSTGIKKANEHLTLPSNSVPQGDADSHLSCHTATSGGQQGIMFTKESKPSKNRSLVPETSRHTGDTSNGCADVKGLSNHVHQLIADAVSSPNHGDSPNLLIADNPQLSALLIGKANGNVGTGTCDKVNNIHPAVHTKTDHSVASSPSSAISTATPSPKSTEQRSINSVTSLNSPHSGLHTVNGEGLGKSQSSTKVDLPLASHRSTSQILPSMSVSICPSSTEVLKACRNPGKNGLSNSCILLDKCPPPRPPTSPYPPLPKDKLNPPTPSIYLENKRDAFFPPLHQFCTNPKNPVTVIRGLAGALKLDLGLFSTKTLVEANNEHMVEVRTQLLQPADENWDPTGTKKIWRCESNRSHTTIAKYAQYQASSFQESLREENEKRTQHKDHSDNESTSSEKWKLQLHELTKLPAFARVVSAGNLLTHVGHTILGMNTVQLYMKVPGSRTPGHQENNNFCSVNINIGPGDCEWFVVPEDYWGVLNDFCEKNNLNFLMSSWWPNLEDLYEANVPVYRFIQRPGDLVWINAGTVHWVQAVGWCNNIAWNVGPLTACQYKLAVERYEWNKLKSVKSPVPMVHLSWNMARNIKVSDPKLFEMIKYCLLKILKQYQTLREALVAAGKEVIWHGRTNDEPAHYCSICEVEVFNLLFVTNESNTQKTYIVHCHDCARKTSKSLENFVVLEQYKMEDLIQVYDQFTLALSLSSSS

SEQ ID NO: 14004 - protein, 207 aa, Homo Sapiens
MKSCAVSLTTAAVAFGDEAKKMAEGKASRESEEESVSLTVEEREALGGMDSRLFGFVRLHEDGARTKTLLGKAVRCYESLILKAEGKVESDFFCQLGHFNLLLEDYSKALSAYQRYYSLQADYWKNAAFLYGLGLVYFYYNAFHWAIKAFQDVLYVDPSFCRAKEIHLRLGLMFKVNTDYKSSLKHFQLALIDCNPCTLSNAESKYF

SEQ ID NO: 14005 - protein, 1264 aa, Homo Sapiens
MKSCAVSLTTAAVAFGDEAKKMAEGKASRESEEESVSLTVEEREALGGMDSRLFGFVRLHEDGARTKTLLGKNAAFLYGLGLVYFYYNAFHWAIKAFQDVLYVDPSFCRAKEIHLRLGLMFKVNTDYKSSLKRKYHSAKEAYEQLLQTENLPAQVKATVLQQLGWMHHNMDLVGDKATKESYAIQYLQKSLEADPNSGQSWYFLGRCYSSIGKVQDAFISYRQSIDKSEASADTWCSIGVLYQQQNQPMDALQAYICAVQLDHGHAAAWMDLGTLYESCNQPQDAIKCYLNAARSKRCSNTSTLAARIKFLQNGSDNWNGGQSLSHHPVQQVYSLCLTPQKLQHLEQLRANRDNLNPAQKHQLEQLESQFVLMQQMRHKEVAQVRTTGIHNGAITDSSLPTNSVSNRQPHGALTRVSSVSQPGVRPACVEKLLSSGAFSAGCIPCGTSKILGSTDTILLGSNCIAGSESNGNVPYLQQNTHTLPHNHTDLNSSTEEPWRKQLSNSAQGLHKSQSSCLSGPNEEQPLFSTGSAQYHQATSTGIKKANEHLTLPSNSVPQGDADSHLSCHTATSGGQQGIMFTKESKPSKNRSLVPETSRHTGDTSNGCADVKGLSNHVHQLIADAVSSPNHGDSPNLLIADNPQLSALLIGKANGNVGTGTCDKVNNIHPAVHTKTDHSVASSPSSAISTATPSPKSTEQRSINSVTSLNSPHSGLHTVNGEGLGKSQSSTKVDLPLASHRSTSQILPSMSVSICPSSTEVLKACRNPGKNGLSNSCILLDKCPPPRPPTSPYPPLPKDKLNPPTPSIYLENKRDAFFPPLHQFCTNPKNPVTVIRGLAGALKLDLGLFSTKTLVEANNEHMVEVRTQLLQPADENWDPTGTKKIWRCESNRSHTTIAKYAQYQASSFQESLREENEKRTQHKDHSDNESTSSENSGRRRKGPFKTIKFGTNIDLSDNKKWKLQLHELTKLPAFARVVSAGNLLTHVGHTILGMNTVQLYMKVPGSRTPGHQENNNFCSVNINIGPGDCEWFVVPEDYWGVLNDFCEKNNLNFLMSSWWPNLEDLYEANVPVYRFIQRPGDLVWINAGTVHWVQAVGWCNNIAWNVGPLTACQYKLAVERYEWNKLKSVKSPVPMVHLSWNMARNIKVSDPKLFEMIKYCLLKILKQYQTLREALVAAGKEVIWHGRTNDEPAHYCSICEVEVFNLLFVTNESNTQKTYIVHCHDCARKTSKSLENFVVLEQYKMEDLIQVYDQFTLALSLSSSS

SEQ ID NO: 14006 - protein, 190 aa, Homo Sapiens
MVEPLREKIRDLEKSFTQKYPPVKFLSEKDRKRILITGGAGFVGSHLTDKLMMDGHEVTVVDNFFTGRKRNVEHWIGHENFELINHDVVEPLYIEVDQIYHLASPASPPNYMYNPIKTLKTNTIGTLNMLGLAKRVGARLLLASTSEVYGDPEVHPQSEDYWGHVNPIGPRACYDEGKRVAETMCYAYMK

SEQ ID NO: 14007 - protein, 420 aa, Homo Sapiens
MVSKALLRLVSAVNRRRMKLLLGIALLAYVASVWGNFVNMRSIQENGELKIESKIEEMVEPLREKIRDLEKSFTQKYPPVKFLSEKDRKRILITGGAGFVGSHLTDKLMMDGHEVTVVDNFFTGRKRNVEHWIGHENFELINHDVVEPLYIEVDQIYHLASPASPPNYMYNPIKTLKTNTIGTLNMLGLAKRVGARLLLASTSEVYGDPEVHPQSEDYWGHVNPIGPRACYDEGKRVAETMCYAYMKQEGVEVRVARIFNTFGPRMHMNDGRVVSNFILQALQGEPLTVYGSGSQTRAFQYVSDLVNGLVALMNSNVSSPVNLGNPEEHTILEFAQLIKNLVGSGSEIQFLSEAQDDPQKRKPDIKKAKLMLGWEPVVPLEEGLNKAIHYFRKELEYQANNQYIPKPKPARIKKGRTRHS

SEQ ID NO: 14008 - protein, 425 aa, Homo Sapiens
MVSKALLRLVSAVNRRRMKLLLGIALLAYVASVWGNFVNMSFLLNRSIQENGELKIESKIEEMVEPLREKIRDLEKSFTQKYPPVKFLSEKDRKRILITGGAGFVGSHLTDKLMMDGHEVTVVDNFFTGRKRNVEHWIGHENFELINHDVVEPLYIEVDQIYHLASPASPPNYMYNPIKTLKTNTIGTLNMLGLAKRVGARLLLASTSEVYGDPEVHPQSEDYWGHVNPIGPRACYDEGKRVAETMCYAYMKQEGVEVRVARIFNTFGPRMHMNDGRVVSNFILQALQGEPLTVYGSGSQTRAFQYVSDLVNGLVALMNSNVSSPVNLGNPEEHTILEFAQLIKNLVGSGSEIQFLSEAQDDPQKRKPDIKKAKLMLGWEPVVPLEEGLNKAIHYFRKELEYQANNQYIPKPKPARIKKGRTRHS

SEQ ID NO: 14009 - protein, 171 aa, Homo Sapiens [sequence omitted]

SEQ ID NO: 14010 - protein, 52 aa, Homo Sapiens
MYNPIKTLKTNTIGTLNMLGLAKRVGARLLLASTSEVYGDPEVHPQSEDYWG

SEQ ID NO: 14011 - protein, 121 aa, Homo Sapiens
MYNPIKTLKTNTIGTLNMLGLAKRVGARLLLASTSEVYGDPEVHPQSEDYWGHVNPIGPRACYDEGKRVAETMCYAYMKQEGVEVRVARIFNTFGPRMHMNDGRVVSNFILQALQGEPLTV

SEQ ID NO: 14012 - protein, 134 aa, Homo Sapiens
MYNPIKTLKTNTIGTLNMLGLAKRVGARLLLASTSEVYGDPEVHPQSEDYWGHVNPIGPRACYDEGKRVAETMCYAYMKQEGVEVRVARIFNTFGPRMHMNDGRVVSNFILQALQGEPLTVYGSGSQTRAFQYV

SEQ ID NO: 14013 - protein, 252 aa, Homo Sapiens
MYNPIKTLKTNTIGTLNMLGLAKRVGARLLLASTSEVYGDPEVHPQSEDYWGHVNPIGPRACYDEGKRVAETMCYAYMKQEGVEVRVARIFNTFGPRMHMNDGRVVSNFILQALQGEPLTVYGSGSQTRAFQYVSDLVNGLVALMNSNVSSPVNLGNPEEHTILEFAQLIKNLVGSGSEIQFLSEAQDDPQKRKPDIKKAKLMLGWEPVVPLEEGLNKAIHYFRKELEYQANNQYIPKPKPARIKKGRTRHS

SEQ ID NO: 14014 - protein, 91 aa, Homo Sapiens
MGPGEGNCWFCWCLCPWLLSGSWVHLISGKSPSLTRPVMGGGGGVEMFLQFCLPWQNLDPGKGKQGRSPSEKGLCSPLTRSLAQATSAPRA

SEQ ID NO: 14015 - protein, 365 aa, Homo Sapiens
MPGGKKVAGGGSSGATPTSAAATAPSGVRRLETSEGTSAQRDEEPEEEGEEDLRDGGVPFFVNRGGLPVDEATWERMWKHVAKIHPDGEKVAQRIRGATDLPKIPIPSVPTFQPSTPVPERLEAVQRYIRELQYNHTGTQFFEIKKSRPLTGLMDLAKEMTKEALPIKCLEAVILGIYLTNSMPTLERFPISFKTYFSGNYFRHIVLGVNFAGRYGALGMSRREDLMYKPPAFRTLSELVLDFEAAYGRCWHVLKKVKLGQSVSHDPHSVEQIEWKHSVLDVERLGRDDFRKELERHARDMRLKIGKGTGPPSPTKDRKKDVSSPQRAQSSPHRRNSRSERRPSGDKKTSEPKAMPDLNGYQIRV

SEQ ID NO: 14016 - protein, 204 aa, Homo Sapiens
MPGGKKVAGGGSSGATPTSAAATAPSGVRRLETSEGTSAQRDEEPEEEGEEDLRDGGVPFFVNRGGLPVDEATWERMWKHVAKIHPDGEKVAQRIRGATDLPKIPIPSVPTFQPSTPVPERLEAVQRYIRELQYNHTGTQFFEIKKSRPLTGLMDLAKEMTKEALPIKCLEAVILGMYPSSPEGEGSGLLWASASCSESEGGVG

SEQ ID NO: 14017 - protein, 3396 aa, Homo Sapiens
MFINIKSILWMCSTLIVTHALHKVKVGKSPPVRGSLSGKVSLPCHFSTMPTLPPSYNTSEFLRIKWSKIEVDKNGKDLKETTVLVAQNGNIKIGQDYKGRVSVPTHPEAVGDASLTVVKLLASDAGLYRCDVMYGIEDTQDTVSLTVDGVVFHYRAATSRYTLNFEAAQKACLDVGAVIATPEQLFAAYEDGFEQCDAGWLADQTVRYPIRAPRVGCYGDKMGKAGVRTYGFRSPQETYDVYCYVDHLDGDVFHLTVPSKFTFEEAAKECENQDARLATVGELQAAWRNGFDQCDYGWLSDASVRHPVTVARAQCGGGLLGVRTLYRFENQTGFPPPDSRFDAYCFKPKEATTIDLSILAETASPSLSKEPQMVSDRTTPIIPLVDELPVIPTEFPPVGNIVSFEQKATVQPQAITDSLATKLPTPTGSTKKPWDMDDYSPSASGPLGKLDISEIKEEVLQSTTGVSHYATDSWDGVVEDKQTQESVTQIEQIEVGPLVTSMEILKHIPSKEFPVTETPLVTARMILESKTEKKMVSTVSELVTTGHYGFTLGEEDDEDRTLTVGSDESTLIFDQIPEVITVSKTSEDTIHTHLEDLESVSASTTVSPLIMPDNNGSSMDDWEERQTSGRITEEFLGKYLSTTPFPSQHRTEIELFPYSGDKILVEGISTVIYPSLQTEMTHRRERTETLIPEMRTDTYTDEIQEEITKSPFMGKTEEEVFSGMKLSTSLSEPIHVTESSVEMTKSFDFPTLITKLSAEPTEVRDMEEDFTATPGTTKYDENITTVLLAHGTLSVEAATVSKWSWDEDNTTSKPLESTEPSASSKLPPALLTTVGMNGKDKDIPSFTEDGADEFTLIPDSTQKQLEEVTDEDIAAHGKFTIRFQPTTSTGIAEKSTLRDSTTEEKVPPITSTEGQVYATMEGSALGEVEDVDLSKPVSTVPQFAHTSEVEGLAFVSYSSTQEPTTYVDSSHTIPLSVIPKTDWGVLVPSVPSEDEVLGEPSQDILVIDQTRLEATISPETMRTTKITEGTTQEEFPWKEQTAEKPVPALSSTAWTPKEAVTPLDEQEGDGSAYTVSEDELLTGSERVPVLETTPVGKIDHSVSYPPGAVTEHKVKTDEVVTLTPRIGPKVSLSPGPEQKYETEGSSTTGFTSSLSPFSTHITQLMEETTTEKTSLEDIDLGSGLFEKPKATELIEFSTIKVTVPSDITTAFSSVDRLHTTSAFKPSSAITKKPPLIDREPGEETTSDMVIIGESTSHVPPTTLEDIVAKETETDIDREYFTTSSPPATQPTRPPTVEDKEAFGPQALSTPQPPASTKFHPDINVYIIEVRENKTGRMSDLSVIGHPIDSESKEDEPCSEETDPVHDLMAEILPEFPDIIEIDLYHSEENEEEEEECANATDVTTTPSVQYINGKHLVTTVPKDPEAAEARRGQFESVAPSQNFSDSSESDTHPFVIAKTELSTAVQPNESTETTESLEVTWKPETYPETSEHFSGGEPDVFPTVPFHEEFESGTAKKGAESVTERDTEVGHQAHEHTEPVSLFPEESSGEIAIDQESQKIAFARATEVTFGEEVEKSTSVTYTPTIVPSSASAYVSEEEAVTLIGNPWPDDLLSTKESWVEATPRQVVELSGSSSIPITEGSGEAEEDEDTMFTMVTDLSQRNTTDTLITLDTSRIITESFFEVPATTIYPVSEQPSAKVVPTKFVSETDTSEWISSTTVEEKKRKEEEGTTGTASTFEVYSSTQRSDQLILPFELESPNVATSSDSGTRKSFMSLTTPTQSEREMTDSTPVFTETNTLENLGAQTTEHSSIHQPGVQEGLTTLPRSPASVFMEQGSGEAAADPETTTVSSFSLNVEYAIQAEKEVAGTLSPHVETTFSTEPTGLVLSTVMDRVVAENITQTSREIVISERLGEPNYGAEIRGFSTGFPLEEDFSGDFREYSTVSHPIAKEETVMMEGSGDAAFRDTQTSPSTVPTSVHISHISDSEGPSSTMVSTSAFPWEEFTSSAEGSGEQLVTVSSSVVPVLPSAVQKFSGTASSIIDEGLGEVGTVNEIDRRSTILPTAEVEGTKAPVEKEEVKVSGTVSTNFPQTIEPAKLWSRQEVNPVRQEIESETTSEEQIQEEKSFESPQNSPATEQTIFDSQTFTETELKTTDYSVLTTKKTYSDDKEMKEEDTSLVNMSTPDPDANGLESYTTLPEATEKSHFFLATALVTESIPAEHVVTDSPIKKEESTKHFPKGMRPTIQESDTELLFSGLGSGEEVLPTLPTESVNFTEVEQINNTLYPHTSQVESTSSDKIEDFNRMENVAKEVGPLVSQTDIFEGSGSVTSTTLIEILSDTGAEGPTVAPLPFSTDIGHPQNQTVRWAEEIQTSRPQTITEQDSNKNSSTAEINETTTSSTDFLARAYGFEMAKEFVTSAPKPSDLYYEPSGEGSGEVDIVDSFHTSATTQATRQESSTTFVSDGSLEKHPEVPSAKAVTADGFPTVSVMLPLHSEQNKSSPDPTSTLSNTVSYERSTDGSFQDRFREFEDSTLKPNRKKPTENIIIDLDKEDKDLILTITESTILEILPELTSDKNTIIDIDHTKPVYEDILGMQTDIDTEVPSEPHDSNDESNDDSTQVQEIYEAAVNLSLTEETFEGSADVLASYTQATHDESMTYEDRSQLDHMGFHFTTGIPAPSTETELDVLLPTATSLPIPRKSATVIPEIEGIKAEAKALDDMFESSTLSDGQAIADQSEIIPTLGQFERTQEEYEDKKHAGPSFQPEFSSGAEEALVDHTPYLSIATTHLMDQSVTEVPDVMEGSNPPYYTDTTLAVSTFAKLSSQTPSSPLTIYSGSEASGHTEIPQPSALPGIDVGSSVMSPQDSFKEIHVNIEATFKPSSEEYLHITEPPSLSPDTKLEPSEDDGKPELLEEMEASPTELIAVEGTEILQDFQNKTDGQVSGEAIKMFPTIKTPEAGTVITTADEIELEGATQWPHSTSASATYGVEAGVVPWLSPQTSERPTLSSSPEINPETQAALIRGQDSTIAASEQQVAARILDSNDQATVNPVEFNTEVATPPFSLLETSNETDFLIGINEESVEGTAIYLPGPDRCKMNPCLNGGTCYPTETSYVCTCVPGYSGDQCELDFDECHSNPCRNGATCVDGFNTFRCLCLPSYVGALCEQDTETCDYGWHKFQGQCYKYFAHRRTWDAAERECRLQGAHLTSILSHEEQMFVNRVGHDYQWIGLNDKMFEHDFRWTDGSTLQYENWRPNQPDSFFSAGEDCVVIIWHENGQWNDVPCNYHLTYTCKKGTVACGQPPVVENAKTFGKMKPRYEINSLIRYHCKDGFIQRHLPTIRCLGNGRWAIPKITCMNPSAYQRTYSMKYFKNSSSAKDNSINTSKHDHRWSRRWQESRR

SEQ ID NO: 14018 - protein, 2409 aa, Homo Sapiens
MFINIKSILWMCSTLIVTHALHKVKVGKSPPVRGSLSGKVSLPCHFSTMPTLPPSYNTSEFLRIKWSKIEVDKNGKDLKETTVLVAQNGNIKIGQDYKGRVSVPTHPEAVGDASLTVVKLLASDAGLYRCDVMYGIEDTQDTVSLTVDGVVFHYRAATSRYTLNFEAAQKACLDVGAVIATPEQLFAAYEDGFEQCDAGWLADQTVRYPIRAPRVGCYGDKMGKAGVRTYGFRSPQETYDVYCYVDHLDGDVFHLTVPSKFTFEEAAKECENQDARLATVGELQAAWRNGFDQCDYGWLSDASVRHPVTVARAQCGGGLLGVRTLYRFENQTGFPPPDSRFDAYCFKRRMSDLSVIGHPIDSESKEDEPCSEETDPVHDLMAEILPEFPDIIEIDLYHSEENEEEEEECANATDVTTTPSVQYINGKHLVTTVPKDPEAAEARRGQFESVAPSQNFSDSSESDTHPFVIAKTELSTAVQPNESTETTESLEVTWKPETYPETSEHFSGGEPDVFPTVPFHEEFESGTAKKGAESVTERDTEVGHQAHEHTEPVSLFPEESSGEIAIDQESQKIAFARATEVTFGEEVEKSTSVTYTPTIVPSSASAYVSEEEAVTLIGNPWPDDLLSTKESWVEATPRQVVELSGSSSIPITEGSGEAEEDEDTMFTMVTDLSQRNTTDTLITLDTSRIITESFFEVPATTIYPVSEQPSAKVVPTKFVSETDTSEWISSTTVEEKKRKEEEGTTGTASTFEVYSSTQRSDQLILPFELESPNVATSSDSGTRKSFMSLTTPTQSEREMTDSTPVFTETNTLENLGAQTTEHSSIHQPGVQEGLTTLPRSPASVFMEQGSGEAAADPETTTVSSFSLNVEYAIQAEKEVAGTLSPHVETTFSTEPTGLVLSTVMDRVVAENITQTSREIVISERLGEPNYGAEIRGFSTGFPLEEDFSGDFREYSTVSHPIAKEETVMMEGSGDAAFRDTQTSPSTVPTSVHISHISDSEGPSSTMVSTSAFPWEEFTSSAEGSGEQLVTVSSSVVPVLPSAVQKFSGTASSIIDEGLGEVGTVNEIDRRSTILPTAEVEGTKAPVEKEEVKVSGTVSTNFPQTIEPAKLWSRQEVNPVRQEIESETTSEEQIQEEKSFESPQNSPATEQTIFDSQTFTETELKTTDYSVLTTKKTYSDDKEMKEEDTSLVNMSTPDPDANGLESYTTLPEATEKSHFFLATALVTESIPAEHVVTDSPIKKEESTKHFPKGMRPTIQESDTELLFSGLGSGEEVLPTLPTESVNFTEVEQINNTLYPHTSQVESTSSDKIEDFNRMENVAKEVGPLVSQTDIFEGSGSVTSTTLIEILSDTGAEGPTVAPLPFSTDIGHPQNQTVRWAEEIQTSRPQTITEQDSNKNSSTAEINETTTSSTDFLARAYGFEMAKEFVTSAPKPSDLYYEPSGEGSGEVDIVDSFHTSATTQATRQESSTTFVSDGSLEKHPEVPSAKAVTADGFPTVSVMLPLHSEQNKSSPDPTSTLSNTVSYERSTDGSFQDRFREFEDSTLKPNRKKPTENIIIDLDKEDKDLILTITESTILEILPELTSDKNTIIDIDHTKPVYEDILGMQTDIDTEVPSEPHDSNDESNDDSTQVQEIYEAAVNLSLTEETFEGSADVLASYTQATHDESMTYEDRSQLDHMGFHFTTGIPAPSTETELDVLLPTATSLPIPRKSATVIPEIEGIKAEAKALDDMFESSTLSDGQAIADQSEIIPTLGQFERTQEEYEDKKHAGPSFQPEFSSGAEEALVDHTPYLSIATTHLMDQSVTEVPDVMEGSNPPYYTDTTLAVSTFAKLSSQTPSSPLTIYSGSEASGHTEIPQPSALPGIDVGSSVMSPQDSFKEIHVNIEATFKPSSEEYLHITEPPSLSPDTKLEPSEDDGKPELLEEMEASPTELIAVEGTEILQDFQNKTDGQVSGEAIKMFPTIKTPEAGTVITTADEIELEGATQWPHSTSASATYGVEAGVVPWLSPQTSERPTLSSSPEINPETQAALIRGQDSTIAASEQQVAARILDSNDQATVNPVEFNTEVATPPFSLLETSNETDFLIGINEESVEGTAIYLPGPDRCKMNPCLNGGTCYPTETSYVCTCVPGYSGDQCELDFDECHSNPCRNGATCVDGFNTFRCLCLPSYVGALCEQDTETCDYGWHKFQGQCYKYFAHRRTWDAAERECRLQGAHLTSILSHEEQMFVNRVGHDYQWIGLNDKMFEHDFRWTDGSTLQYENWRPNQPDSFFSAGEDCVVIIWHENGQWNDVPCNYHLTYTCKKGTVACGQPPVVENAKTFGKMKPRYEINSLIRYHCKDGFIQRHLPTIRCLGNGRWAIPKITCMNPSAYQRTYSMKYFKNSSSAKDNSINTSKHDHRWSRRWQESRR

SEQ ID NO: 14019 - protein, 1642 aa, Homo Sapiens
MFINIKSILWMCSTLIVTHALHKVKVGKSPPVRGSLSGKVSLPCHFSTMPTLPPSYNTSEFLRIKWSKIEVDKNGKDLKETTVLVAQNGNIKIGQDYKGRVSVPTHPEAVGDASLTVVKLLASDAGLYRCDVMYGIEDTQDTVSLTVDGVVFHYRAATSRYTLNFEAAQKACLDVGAVIATPEQLFAAYEDGFEQCDAGWLADQTVRYPIRAPRVGCYGDKMGKAGVRTYGFRSPQETYDVYCYVDHLDGDVFHLTVPSKFTFEEAAKECENQDARLATVGELQAAWRNGFDQCDYGWLSDASVRHPVTVARAQCGGGLLGVRTLYRFENQTGFPPPDSRFDAYCFKPKEATTIDLSILAETASPSLSKEPQMVSDRTTPIIPLVDELPVIPTEFPPVGNIVSFEQKATVQPQAITDSLATKLPTPTGSTKKPWDMDDYSPSASGPLGKLDISEIKEEVLQSTTGVSHYATDSWDGVVEDKQTQESVTQIEQIEVGPLVTSMEILKHIPSKEFPVTETPLVTARMILESKTEKKMVSTVSELVTTGHYGFTLGEEDDEDRTLTVGSDESTLIFDQIPEVITVSKTSEDTIHTHLEDLESVSASTTVSPLIMPDNNGSSMDDWEERQTSGRITEEFLGKYLSTTPFPSQHRTEIELFPYSGDKILVEGISTVIYPSLQTEMTHRRERTETLIPEMRTDTYTDEIQEEITKSPFMGKTEEEVFSGMKLSTSLSEPIHVTESSVEMTKSFDFPTLITKLSAEPTEVRDMEEDFTATPGTTKYDENITTVLLAHGTLSVEAATVSKWSWDEDNTTSKPLESTEPSASSKLPPALLTTVGMNGKDKDIPSFTEDGADEFTLIPDSTQKQLEEVTDEDIAAHGKFTIRFQPTTSTGIAEKSTLRDSTTEEKVPPITSTEGQVYATMEGSALGEVEDVDLSKPVSTVPQFAHTSEVEGLAFVSYSSTQEPTTYVDSSHTIPLSVIPKTDWGVLVPSVPSEDEVLGEPSQDILVIDQTRLEATISPETMRTTKITEGTTQEEFPWKEQTAEKPVPALSSTAWTPKEAVTPLDEQEGDGSAYTVSEDELLTGSERVPVLETTPVGKIDHSVSYPPGAVTEHKVKTDEVVTLTPRIGPKVSLSPGPEQKYETEGSSTTGFTSSLSPFSTHITQLMEETTTEKTSLEDIDLGSGLFEKPKATELIEFSTIKVTVPSDITTAFSSVDRLHTTSAFKPSSAITKKPPLIDREPGEETTSDMVIIGESTSHVPPTTLEDIVAKETETDIDREYFTTSSPPATQPTRPPTVEDKEAFGPQALSTPQPPASTKFHPDINVYIIEVRENKTGPDRCKMNPCLNGGTCYPTETSYVCTCVPGYSGDQCELDFDECHSNPCRNGATCVDGFNTFRCLCLPSYVGALCEQDTETCDYGWHKFQGQCYKYFAHRRTWDAAERECRLQGAHLTSILSHEEQMFVNRVGHDYQWIGLNDKMFEHDFRWTDGSTLQYENWRPNQPDSFFSAGEDCVVIIWHENGQWNDVPCNYHLTYTCKKGTVACGQPPVVENAKTFGKMKPRYEINSLIRYHCKDGFIQRHLPTIRCLGNGRWAIPKITCMNPSAYQRTYSMKYFKNSSSAKDNSINTSKHDHRWSRRWQESRR

SEQ ID NO: 14020 - protein, 1240 aa, Homo Sapiens
MFINIKSILWMCSTLIVTHALHKVKVGKSPPVRGSLSGKVSLPCHFSTMPTLPPSYNTSEFLRIKWSKIEVDKNGKDLKETTVLVAQNGNIKIGQDYKGRVSVPTHPEAVGDASLTVVKLLASDAGLYRCDVMYGIEDTQDTVSLTVDGVVFHYRAATSRYTLNFEAAQKACLDVGAVIATPEQLFAAYEDGFEQCDAGWLADQTVRYPIRAPRVGCYGDKMGKAGVRTYGFRSPQETYDVYCYVDHLDGDVFHLTVPSKFTFEEAAKECENQDARLATVGELQAAWRNGFDQCDYGWLSDASVRHPVTVARAQCGGGLLGVRTLYRFENQTGFPPPDSRFDAYCFKRRMSDLSVIGHPIDSESKEDEPCSEETDPVHDLMAEILPEFPDIIEIDLYHSEENEEEEEECANATDVTTTPSVQYINGKHLVTTVPKDPEAAEARRGQFESVAPSQNFSDSSESDTHPFVIAKTELSTAVQPNESTETTESLEVTWKPETYPETSEHFSGGEPDVFPTVPFHEEFESGTAKKGAESVTERDTEVGHQAHEHTEPVSLFPEESSGEIAIDQESQKIAFARATEVTFGEEVEKSTSVTYTPTIVPSSASAYVSEEEAVTLIGNPWPDDLLSTKESWVEATPRQVVELSGSSSIPITEGSGEAEEDEDTMFTMVTDLSQRNTTDTLITLDTSRIITESFFEVPATTIYPVSEQPSAKVVPTKFVSETDTSEWISSTTVEEKKRKEEEGTTGTASTFEVYSSTQRSDQLILPFELESPNVATSSDSGTRKSFMSLTTPTQSEREMTDSTPVFTETNTLENLGAQTTEHSSIHQPGVQEGLTTLPRSPASVFMEQGSGEAAADPETTTVSSFSLNVEYAIQAEKEVAGTLSPHVETTFSTEPTGLVLSTVMDRVVAENITQTSREIVISERLGEPNYGAEIRGFSTGFPLEEDFSGDFREYSTVSHPIAKEETVMMEGSGDAAFRDTQTSPSTVPTSVHISHISDSEGPSSTMVSTSAFPWEEFTSSAEGSGEQLVTVSSSVVPVLPSAVQKFSGTASSIIDEGLGEVGTVNEIDRRSTILPTAEVEGTKAPVEKEEVKVSGTVSTNFPQTIEPAKLWSRQEVNPVRQEIESETTSEEQIQEEKSFESPQNSPATEQTIFDSQTFTETELKTTDYSVLTTKKTYSDDKEMKEEDTSLVNMSTPDPDANGLESYTTLPEATEKSHFFLATALVTESIPAEHVVTDSPI

SEQ ID NO: 14021 - protein, 655 aa, Homo Sapiens
MFINIKSILWMCSTLIVTHALHKVKVGKSPPVRGSLSGKVSLPCHFSTMPTLPPSYNTSEFLRIKWSKIEVDKNGKDLKETTVLVAQNGNIKIGQDYKGRVSVPTHPEAVGDASLTVVKLLASDAGLYRCDVMYGIEDTQDTVSLTVDGVVFHYRAATSRYTLNFEAAQKACLDVGAVIATPEQLFAAYEDGFEQCDAGWLADQTVRYPIRAPRVGCYGDKMGKAGVRTYGFRSPQETYDVYCYVDHLDGDVFHLTVPSKFTFEEAAKECENQDARLATVGELQAAWRNGFDQCDYGWLSDASVRHPVTVARAQCGGGLLGVRTLYRFENQTGFPPPDSRFDAYCFKRPDRCKMNPCLNGGTCYPTETSYVCTCVPGYSGDQCELDFDECHSNPCRNGATCVDGFNTFRCLCLPSYVGALCEQDTETCDYGWHKFQGQCYKYFAHRRTWDAAERECRLQGAHLTSILSHEEQMFVNRVGHDYQWIGLNDKMFEHDFRWTDGSTLQYENWRPNQPDSFFSAGEDCVVIIWHENGQWNDVPCNYHLTYTCKKGTVACGQPPVVENAKTFGKMKPRYEINSLIRYHCKDGFIQRHLPTIRCLGNGRWAIPKITCMNPSAYQRTYSMKYFKNSSSAKDNSINTSKHDHRWSRRWQESRR

SEQ ID NO: 14022 - protein, 354 aa, Homo Sapiens
MFINIKSILWMCSTLIVTHALHKVKVGKSPPVRGSLSGKVSLPCHFSTMPTLPPSYNTSEFLRIKWSKIEVDKNGKDLKETTVLVAQNGNIKIGQDYKGRVSVPTHPEAVGDASLTVVKLLASDAGLYRCDVMYGIEDTQDTVSLTVDGVVFHYRAATSRYTLNFEAAQKACLDVGAVIATPEQLFAAYEDGFEQCDAGWLADQTVRYPIRAPRVGCYGDKMGKAGVRTYGFRSPQETYDVYCYVDHLDGDVFHLTVPSKFTFEEAAKECENQDARLATVGELQAAWRNGFDQCDYGWLSDASVRHPVTVARAQCGGGLLGVRTLYRFENQTGFPPPDSRFDAYCFKRKCLIPF

SEQ ID NO: 14023 - protein, 1594 aa, Homo Sapiens
MPTLPPSYNTSEFLRIKWSKIEVDKNGKDLKETTVLVAQNGNIKIGQDYKGRVSVPTHPEAVGDASLTVVKLLASDAGLYRCDVMYGIEDTQDTVSLTVDGVVFHYRAATSRYTLNFEAAQKACLDVGAVIATPEQLFAAYEDGFEQCDAGWLADQTVRYPIRAPRVGCYGDKMGKAGVRTYGFRSPQETYDVYCYVDHLDGDVFHLTVPSKFTFEEAAKECENQDARLATVGELQAAWRNGFDQCDYGWLSDASVRHPVTVARAQCGGGLLGVRTLYRFENQTGFPPPDSRFDAYCFKPKEATTIDLSILAETASPSLSKEPQMVSDRTTPIIPLVDELPVIPTEFPPVGNIVSFEQKATVQPQAITDSLATKLPTPTGSTKKPWDMDDYSPSASGPLGKLDISEIKEEVLQSTTGVSHYATDSWDGVVEDKQTQESVTQIEQIEVGPLVTSMEILKHIPSKEFPVTETPLVTARMILESKTEKKMVSTVSELVTTGHYGFTLGEEDDEDRTLTVGSDESTLIFDQIPEVITVSKTSEDTIHTHLEDLESVSASTTVSPLIMPDNNGSSMDDWEERQTSGRITEEFLGKYLSTTPFPSQHRTEIELFPYSGDKILVEGISTVIYPSLQTEMTHRRERTETLIPEMRTDTYTDEIQEEITKSPFMGKTEEEVFSGMKLSTSLSEPIHVTESSVEMTKSFDFPTLITKLSAEPTEVRDMEEDFTATPGTTKYDENITTVLLAHGTLSVEAATVSKWSWDEDNTTSKPLESTEPSASSKLPPALLTTVGMNGKDKDIPSFTEDGADEFTLIPDSTQKQLEEVTDEDIAAHGKFTIRFQPTTSTGIAEKSTLRDSTTEEKVPPITSTEGQVYATMEGSALGEVEDVDLSKPVSTVPQFAHTSEVEGLAFVSYSSTQEPTTYVDSSHTIPLSVIPKTDWGVLVPSVPSEDEVLGEPSQDILVIDQTRLEATISPETMRTTKITEGTTQEEFPWKEQTAEKPVPALSSTAWTPKEAVTPLDEQEGDGSAYTVSEDELLTGSERVPVLETTPVGKIDHSVSYPPGAVTEHKVKTDEVVTLTPRIGPKVSLSPGPEQKYETEGSSTTGFTSSLSPFSTHITQLMEETTTEKTSLEDIDLGSGLFEKPKATELIEFSTIKVTVPSDITTAFSSVDRLHTTSAFKPSSAITKKPPLIDREPGEETTSDMVIIGESTSHVPPTTLEDIVAKETETDIDREYFTTSSPPATQPTRPPTVEDKEAFGPQALSTPQPPASTKFHPDINVYIIEVRENKTGPDRCKMNPCLNGGTCYPTETSYVCTCVPGYSGDQCELDFDECHSNPCRNGATCVDGFNTFRCLCLPSYVGALCEQDTETCDYGWHKFQGQCYKYFAHRRTWDAAERECRLQGAHLTSILSHEEQMFVNRVGHDYQWIGLNDKMFEHDFRWTDGSTLQYENWRPNQPDSFFSAGEDCVVIIWHENGQWNDVPCNYHLTYTCKKGTVACGQPPVVENAKTFGKMKPRYEINSLIRYHCKDGFIQRHLPTIRCLGNGRWAIPKITCMNPSAYQRTYSMKYFKNSSSAKDNSINTSKHDHRWSRRWQESRR

SEQ ID NO: 14024 - protein, 111 aa, Homo Sapiens
APMAEGGGQNHHEVVKFMDVYQRSYCHPIETLVDIFQEYPDEIEYIFKPSCVPLMRCGGCCNDEGLECVPTEESNITMQTCKCSCKNTDSRCKARQLELNERTCRCDKPRR

SEQ ID NO: 14025 - protein, 317 aa, Homo Sapiens
LTDRQTDTAPSPSYHLLPGRRRTVDAAASRGQGPEPAPGGGVEGVGARGVALKLFVQLLGCSRFGGAVVRAGEAEPSGAARSASSGREEPQPEEGEEEEEKEEERGPQWRLGARKPGSWTGEAAVCADSAPAARAPQALARASGRGGRVARRGAEESGPPHSPSRRGSASRAGPGRASETMNFLLSWVHWSLALLLYLHHAKWSQAAPMAEGGGQNHHEVVKFMDVYQRSYCHPIETLVDIFQEYPDEIEYIFKPSCVPLMRCGGCCNDEGLECVPTEESNITMQIMRIKPHQGQHIGEMSFLQHNKCECRCDKPRR

SEQ ID NO: 14026 - protein, 327 aa, Homo Sapiens
LTDRQTDTAPSPSYHLLPGRRRTVDAAASRGQGPEPAPGGGVEGVGARGVALKLFVQLLGCSRFGGAVVRAGEAEPSGAARSASSGREEPQPEEGEEEEEKEEERGPQWRLGARKPGSWTGEAAVCADSAPAARAPQALARASGRGGRVARRGAEESGPPHSPSRRGSASRAGPGRASETMNFLLSWVHWSLALLLYLHHAKWSQAAPMAEGGGQNHHEVVKFMDVYQRSYCHPIETLVDIFQEYPDEIEYIFKPSCVPLMRCGGCCNDEGLECVPTEESNITMQIMRIKPHQGQHIGEMSFLQHNKCECRPKKDRARQEKCDKPRR

SEQ ID NO: 14027 - protein, 412 aa, Homo Sapiens
LTDRQTDTAPSPSYHLLPGRRRTVDAAASRGQGPEPAPGGGVEGVGARGVALKLFVQLLGCSRFGGAVVRAGEAEPSGAARSASSGREEPQPEEGEEEEEKEEERGPQWRLGARKPGSWTGEAAVCADSAPAARAPQALARASGRGGRVARRGAEESGPPHSPSRRGSASRAGPGRASETMNFLLSWVHWSLALLLYLHHAKWSQAAPMAEGGGQNHHEVVKFMDVYQRSYCHPIETLVDIFQEYPDEIEYIFKPSCVPLMRCGGCCNDEGLECVPTEESNITMQIMRIKPHQGQHIGEMSFLQHNKCECRPKKDRARQEKKSVRGKGKGQKRKRKKSRYKSWSVYVGARCCLMPWSLPGPHPCGPCSERRKHLFVQDPQTCKCSCKNTDSRCKARQLELNERTCRCDKPRR

SEQ ID NO: 14028 - protein, 389 aa, Homo Sapiens
LTDRQTDTAPSPSYHLLPGRRRTVDAAASRGQGPEPAPGGGVEGVGARGVALKLFVQLLGCSRFGGAVVRAGEAEPSGAARSASSGREEPQPEEGEEEEEKEEERGPQWRLGARKPGSWTGEAAVCADSAPAARAPQALARASGRGGRVARRGAEESGPPHSPSRRGSASRAGPGRASETMNFLLSWVHWSLALLLYLHHAKWSQAAPMAEGGGQNHHEVVKFMDVYQRSYCHPIETLVDIFQEYPDEIEYIFKPSCVPLMRCGGCCNDEGLECVPTEESNITMQIMRIKPHQGQHIGEMSFLQHNKCECRPKKDRARQEKKSVRGKGKGQKRKRKKSRPCGPCSERRKHLFVQDPQTCKCSCKNTDSRCKARQLELNERTCRCDKPRR

SEQ ID NO: 14029 - protein, 354 aa, Homo Sapiens
LTDRQTDTAPSPSYHLLPGRRRTVDAAASRGQGPEPAPGGGVEGVGARGVALKLFVQLLGCSRFGGAVVRAGEAEPSGAARSASSGREEPQPEEGEEEEEKEEERGPQWRLGARKPGSWTGEAAVCADSAPAARAPQALARASGRGGRVARRGAEESGPPHSPSRRGSASRAGPGRASETMNFLLSWVHWSLALLLYLHHAKWSQAAPMAEGGGQNHHEVVKFMDVYQRSYCHPIETLVDIFQEYPDEIEYIFKPSCVPLMRCGGCCNDEGLECVPTEESNITMQIMRIKPHQGQHIGEMSFLQHNKCECRPKKDRARQENPCGPCSERRKHLFVQDPQTCKCSCKNTDSRCKM

SEQ ID NO: 14030 - protein, 371 aa, Homo Sapiens
LTDRQTDTAPSPSYHLLPGRRRTVDAAASRGQGPEPAPGGGVEGVGARGVALKLFVQLLGCSRFGGAVVRAGEAEPSGAARSASSGREEPQPEEGEEEEEKEEERGPQWRLGARKPGSWTGEAAVCADSAPAARAPQALARASGRGGRVARRGAEESGPPHSPSRRGSASRAGPGRASETMNFLLSWVHWSLALLLYLHHAKWSQAAPMAEGGGQNHHEVVKFMDVYQRSYCHPIETLVDIFQEYPDEIEYIFKPSCVPLMRCGGCCNDEGLECVPTEESNITMQIMRIKPHQGQHIGEMSFLQHNKCECRPKKDRARQENPCGPCSERRKHLFVQDPQTCKCSCKNTDSRCKARQLELNERTCRCDKPRR

SEQ ID NO: 14031 - protein, 395 aa, Homo Sapiens
LTDRQTDTAPSPSYHLLPGRRRTVDAAASRGQGPEPAPGGGVEGVGARGVALKLFVQLLGCSRFGGAVVRAGEAEPSGAARSASSGREEPQPEEGEEEEEKEEERGPQWRLGARKPGSWTGEAAVCADSAPAARAPQALARASGRGGRVARRGAEESGPPHSPSRRGSASRAGPGRASETMNFLLSWVHWSLALLLYLHHAKWSQAAPMAEGGGQNHHEVVKFMDVYQRSYCHPIETLVDIFQEYPDEIEYIFKPSCVPLMRCGGCCNDEGLECVPTEESNITMQIMRIKPHQGQHIGEMSFLQHNKCECRPKKDRARQEKKSVRGKGKGQKRKRKKSRYKSWSVPCGPCSERRKHLFVQDPQTCKCSCKNTDSRCKARQLELNERTCRCDKPRR

SEQ ID NO: 14032 - protein, 371 aa, Homo Sapiens
LTDRQTDTAPSPSYHLLPGRRRTVDAAASRGQGPEPAPGGGVEGVGARGVALKLFVQLLGCSRFGGAVVRAGEAEPSGAARSASSGREEPQPEEGEEEEEKEEERGPQWRLGARKPGSWTGEAAVCADSAPAARAPQALARASGRGGRVARRGAEESGPPHSPSRRGSASRAGPGRASETMNFLLSWVHWSLALLLYLHHAKWSQAAPMAEGGGQNHHEVVKFMDVYQRSYCHPIETLVDIFQEYPDEIEYIFKPSCVPLMRCGGCCNDEGLECVPTEESNITMQIMRIKPHQGQHIGEMSFLQHNKCECRPKKDRARQENPCGPCSERRKHLFVQDPQTCKCSCKNTDSRCKARQLELNERTCRSLTRKD

SEQ ID NO: 14033 - protein, 371 aa, Homo Sapiens; identical to SEQ ID NO: 14030

SEQ ID NO: 14034 - protein, 327 aa, Homo Sapiens; identical to SEQ ID NO: 14026

SEQ ID NO: 14035 - protein, 389 aa, Homo Sapiens; identical to SEQ ID NO: 14028

SEQ ID NO: 14036 - protein, 371 aa, Homo Sapiens; identical to SEQ ID NO: 14032

SEQ ID NO: 14037 - protein, 354 aa, Homo Sapiens; identical to SEQ ID NO: 14029

SEQ ID NO: 14038 - protein, 395 aa, Homo Sapiens; identical to SEQ ID NO: 14031

SEQ ID NO: 14039 - protein, 412 aa, Homo Sapiens; identical to SEQ ID NO: 14027

SEQ ID NO: 14040 - protein, 163 aa, Homo Sapiens
MAEGGGQNHHEVVKFMDVYQRSYCHPIETLVDIFQEYPDEIEYIFKPSCVPLMRCGGCCNDEGLECVPTEESNITMQIMRIKPHQGQHIGEMSFLQHNKCECRPKKDRARQENPCGPCSERRKHLFVQDPQTCKCSCKNTDSRCKARQLELNERTCRCDKPRR

SEQ ID NO: 14041 - protein, 137 aa, Homo Sapiens
MNFLLSWVHWSLALLLYLHHAKWSQAAPMAEGGGQNHHEVVKFMDVYQRSYCHPIETLVDIFQEYPDEIEYIFKPSCVPLMRCGGCCNDEGLECVPTEESNITMQIMRIKPHQGQHIGEMSFLQHNKCECRCDKPRR

SEQ ID NO: 14042 - protein, 147 aa, Homo Sapiens
MNFLLSWVHWSLALLLYLHHAKWSQAAPMAEGGGQNHHEVVKFMDVYQRSYCHPIETLVDIFQEYPDEIEYIFKPSCVPLMRCGGCCNDEGLECVPTEESNITMQIMRIKPHQGQHIGEMSFLQHNKCECRPKKDRARQEKCDKPRR

SEQ ID NO: 14043 - protein, 209 aa, Homo Sapiens
MNFLLSWVHWSLALLLYLHHAKWSQAAPMAEGGGQNHHEVVKFMDVYQRSYCHPIETLVDIFQEYPDEIEYIFKPSCVPLMRCGGCCNDEGLECVPTEESNITMQIMRIKPHQGQHIGEMSFLQHNKCECRPKKDRARQEKKSVRGKGKGQKRKRKKSRPCGPCSERRKHLFVQDPQTCKCSCKNTDSRCKARQLELNERTCRCDKPRR

SEQ ID NO: 14044 - protein, 215 aa, Homo Sapiens
MNFLLSWVHWSLALLLYLHHAKWSQAAPMAEGGGQNHHEVVKFMDVYQRSYCHPIETLVDIFQEYPDEIEYIFKPSCVPLMRCGGCCNDEGLECVPTEESNITMQIMRIKPHQGQHIGEMSFLQHNKCECRPKKDRARQEKKSVRGKGKGQKRKRKKSRYKSWSVPCGPCSERRKHLFVQDPQTCKCSCKNTDSRCKARQLELNERTCRCDKPRR

SEQ ID NO: 14045 - protein, 232 aa, Homo Sapiens
MNFLLSWVHWSLALLLYLHHAKWSQAAPMAEGGGQNHHEVVKFMDVYQRSYCHPIETLVDIFQEYPDEIEYIFKPSCVPLMRCGGCCNDEGLECVPTEESNITMQIMRIKPHQGQHIGEMSFLQHNKCECRPKKDRARQEKKSVRGKGKGQKRKRKKSRYKSWSVYVGARCCLMPWSLPGPHPCGPCSERRKHLFVQDPQTCKCSCKNTDSRCKARQLELNERTCRCDKPRR

SEQ ID NO: 14046 - protein, 191 aa, Homo Sapiens
MNFLLSWVHWSLALLLYLHHAKWSQAAPMAEGGGQNHHEVVKFMDVYQRSYCHPIETLVDIFQEYPDEIEYIFKPSCVPLMRCGGCCNDEGLECVPTEESNITMQIMRIKPHQGQHIGEMSFLQHNKCECRPKKDRARQENPCGPCSERRKHLFVQDPQTCKCSCKNTDSRCKARQLELNERTCRCDKPRR

SEQ ID NO: 14047 - protein, 191 aa, Homo Sapiens
MNFLLSWVHWSLALLLYLHHAKWSQAAPMAEGGGQNHHEVVKFMDVYQRSYCHPIETLVDIFQEYPDEIEYIFKPSCVPLMRCGGCCNDEGLECVPTEESNITMQIMRIKPHQGQHIGEMSFLQHNKCECRPKKDRARQENPCGPCSERRKHLFVQDPQTCKCSCKNTDSRCKARQLELNERTCRSLTRKD

SEQ ID NO: 14048 - protein, 174 aa, Homo Sapiens
MNFLLSWVHWSLALLLYLHHAKWSQAAPMAEGGGQNHHEVVKFMDVYQRSYCHPIETLVDIFQEYPDEIEYIFKPSCVPLMRCGGCCNDEGLECVPTEESNITMQIMRIKPHQGQHIGEMSFLQHNKCECRPKKDRARQENPCGPCSERRKHLFVQDPQTCKCSCKNTDSRCKM

SEQ ID NO: 14049 - protein, 323 aa, Homo Sapiens
  misc_feature (1)..(1): Xaa can be any naturally occurring amino acid
XRGQGPEPAPGGGVEGVGARGVALKLFVQLLGCSRFGGAVVRAGEAEPSGAARSASSGREEPQPEEGEEEEEKEEERGPQWRLGARKPGSWTGEAAVCADSAPAARAPQALARASGRGGRVARRGAEESGPPHSPSRRGSASRAGPGRASETMNFLLSWVHWSLALLLYLHHAKWSQAAPMAEGGGQNHHEVVKFMDVYQRSYCHPIETLVDIFQEYPDEIEYIFKPSCVPLMRCGGCCNDEGLECVPTEESNITMQIMRIKPHQGQHIGEMSFLQHNKCECRPKKDRARQEKKSVRGKGKGQKRKRKKSRYKSWSVCDKPRR

SEQ ID NO: 14050 - protein, 207 aa, Homo Sapiens
MSPLLRRLLLAALLQLAPAQAPVSQPDAPGHQRKVVSWIDVYTRATCQPREVVVPLTVELMGTVAKQLVPSCVTVQRCGGCCPDDGLECVPTGQHQVRMQILMIRYPSSQLGEMSLEEHSQCECRPKKKDSAVKPDRAATPHHRPQPRSVPGWDSAPGAPSPADITHPTPAPGPSAHAAPSTTSALTPGPAAAAADAAASSVAKGGA

SEQ ID NO: 14051 - protein, 188 aa, Homo Sapiens
MSPLLRRLLLAALLQLAPAQAPVSQPDAPGHQRKVVSWIDVYTRATCQPREVVVPLTVELMGTVAKQLVPSCVTVQRCGGCCPDDGLECVPTGQHQVRMQILMIRYPSSQLGEMSLEEHSQCECRPKKKDSAVKPDSPRPLCPRCTQHHQRPDPRTCRCRCRRRSFLRCQGRGLELNPDTCRCRKLRR

SEQ ID NO: 14052 - protein, 32 aa, Homo Sapiens
  misc_feature (1)..(1): Xaa can be any naturally occurring amino acid
XHAAPSTTSALTPGPAAAAADAAASSVAKGGA

SEQ ID NO: 14053 - protein, 419 aa, Homo Sapiens
MHLLGFFSVACSLLAAALLPGPREAPAAAAAFESGLDLSDAEPDAGEATAYASKDLEEQLRSVSSVDELMTVLYPEYWKMYKCQLRKGGWQHNREQANLNSRTEETIKFAAAHYNTEILKSIDNEWRKTQCMPREVCIDVGKEFGVATNTFFKPPCVSVYRCGGCCNSEGLQCMNTSTSYLSKTLFEITVPLSQGPKPVTISFANHTSCRCMSKLDVYRQVHSIIRRSLPATLPQCQAANKTCPTNYMWNNHICRCLAQEDFMFSSDAGDDSTDGFHDICGPNKELDEETCQCVCRAGLRPASCGPHKELDRNSCQCVCKNKLFPSQCGANREFDENTCQCVCKRTCPRNQPLNPGKCACECTESPQKCLLKGKKFHHQTCSCYRRPCTNRQKACEPGFSYSEEVCRCVPSYWKRPQMS

SEQ ID NO: 14054 - protein, 354 aa, Homo Sapiens
MYREWVVVNVFMMLYVQLVQGSSNEHGPVKRSSQSTLERSEQQIRAASSLEELLRITHSEDWKLWRCRLRLKSFTSMDSRSASHRSTRFAATFYDIETLKVIDEEWQRTQCSPRETCVEVASELGKSTNTFFKPPCVNVFRCGGCCNEESLICMNTSTSYISKQLFEISVPLTSVPELVPVKVANHTGCKCLPTAPRHPYSIIRRSIQIPEEDRCSHSKKLCPIDMLWDSNKCKCVLQEENPLAGTEDHSHLQEPALCGPHMMFDEDRCECVCKTPCPKDLIQHPKNCSCFECKESLETCCQKHKLFHPDTCSCEDRCPFHTRPCASGKTACAKHCRFPKEKRAAQGPHSRKNP

SEQ ID NO: 14055 - protein, 615 aa, Homo Sapiens
MKALRLSASALFCLLLINGLGAAPPGRPEAQPPPLSSEHKEPVAGDAVPGPKDGSAPEVRGARNSEPQDEGELFQGVDPRALAAVLLQALDRPASPPAPSGSQQGPEEEAAEALLTETVRSQTHSLPAPESPEPAAPPRPQTPENGPEASDPSEELEALASLLQELRDFSPSSAKRQQETAAAETETRTHTLTRVNLESPGPERVWRASWGEFQARVPERAPLPPPAPSQFQARMPDSGPLPETHKFGEGVSSPKTHLGEALAPLSKAYQGVAAPFPKARRPESALLGGSEAGERLLQQGLAQVEAGRRQAEATRQAAAQEERLADLASDLLLQYLLQGGARQRGLGGRGLQEAAEERESAREEEEAEQERRGGEERVGEEDEEAAEAEAEAEEAERARQNALLFAEEEDGEAGAEDKRSQEETPGHRRKEAEGTEEGGEEEDDEEMDPQTIDSLIELSTKLHLPADDVVSIIEEVEEKRKRKKNAPPEPVPPPRAAPAPTHVRSPQPPPPAPAPARDELPDWNEVLPPWDREEDEVYPPGPYHPFPNYIRPRTLQPPSALRRRHYHHALPPSRHYPGREAQARRAQEEAEAEERRLQEQEELENYIEHVLLRRP

SEQ ID NO: 14056 - protein, 615 aa, Homo Sapiens; identical to SEQ ID NO: 14055

SEQ ID NO: 14057 - protein, 377 aa, Homo Sapiens
MKALRLSASALFCLLLINGLGAAPPGRPEAQPPPLSSEHKEPVAGDAVPGPKDGSAPEVRGARNSEPQDEGELFQGVDPRALAAVLLQALDRPASPPAPSGSQQGPEEEAAEALLTETVRSQTHSLPAPESPEPAAPPRPQTPENGPEASDPSEELEALASLLQELRDFSPSSAKRQQETAAAETETRTHTLTRVNLESPGPERVWRASWGEFQARVPERAPLPPPAPSQFQARMPDSGPLPETHKFGEGVSSPKTHLGEALAPLSKAYQGVAAPFPKARRPESALLGGSEAGERLLQQGLAQVEAGRRQAEATRQAAAQEERLADLASDLLLQFAAGRGPAARPCPLALPLSPGCVGTCQTPLPGPEPELPELTRG

SEQ ID NO: 14058 - protein, 169 aa, Homo Sapiens
MDTRNKAQLLVLLTLLSVLFSQTSAWPLYRAPSALRLGDRIPFEGANEPDQVSLKEDIDMLQNALAENDTPYYDVSRNARHADGVFTSDFSKLLGQLSAKKYLESLMGKRVSNISEDPVPVKRHSDAVFTDNYTRLRKQMAVKKYLNSILNGKRSSEGESPDFPEELEK

SEQ ID NO: 14059 - protein, 170 aa, Homo Sapiens
MDTRNKAQLLVLLTLLSVLFSQTSAWPLYRAPSALRLGDRIPFEGANEPDQVSLKEDIDMLQNALAENDTPYYDVSRNARHADGVFTSDFSKLLGQLSAKKYLESLMGKRVSSNISEDPVPVKRHSDAVFTDNYTRLRKQMAVKKYLNSILNGKRSSEGESPDFPEELEK

SEQ ID NO: 14060 - protein, 119 aa, Homo Sapiens
  misc_feature (1)..(1): Xaa can be any naturally occurring amino acid
XVSLKEDIDMLQNALAENDTPYYDVSRNARHADGVFTSDFSKLLGQLSAKKYLESLMGKRVSSNISEDPVPVKRHSDAVFTDNYTRLRKQMAVKKYLNSILNGKRSEGESPDFPEELEK

SEQ ID NO: 14061 - protein, 422 aa, Homo Sapiens
MPLWEAPSDHPANPPATLQGHTSLPGCQEEPARDPQSGLPQITSESSSFSEGSLPSWSSGPAGAKLNASHEGIGSSSDGNGDSKAATERVVSAMDTVRRKHPEITFYILVKAIYTLGYSVSLMSLATGSIILCLFRKLHCTRNYIHLNLFLSFILRAISVLVKDDVLYSSSGTLHCPDQPSSWVGCKLSLVFLQYCIMANFFWLLVEGLYLHTLLVAMLPPRRCFLAYLLIGWGLPTVCIGAWTAARLYLEDTGCWDTNDHSVPWWVIRIPILISIIVNFVLFISIIRILLQKLTSPDVGGNDQSQYKRLAKSTLLLIPLFGVHYMVFAVFPISISSKYQILFELCLGSFQGLVVAVLYCFLNSEVQCELKRKWRSRCPTPSASRDYRVCGSSFSRNGSEGALQFHRGSRAQSFLQTETSVI

SEQ ID NO: 14062 - protein, 438 aa, Homo Sapiens
MRTLLPPALLTCWLLAPVNSIHPECRFHLEIQEEETKCAELLRSQTEKHKACSGVWDNITCWRPANVGETVTVPCPKVFSNFYSKAGNISKNCTSDGWSETFPDFVDACGYSDPEDESKITFYILVKAIYTLGYSVSLMSLATGSIILCLFRKLHCTRNYIHLNLFLSFILRAISVLVKDDVLYSSSGTLHCPDQPSSWVGCKLSLVFLQYCIMANFFWLLVEGLYLHTLLVAMLPPRRCFLAYLLIGWGLPTVCIGAWTAARLYLEDTGCWDTNDHSVPWWVIRIPILISIIVNFVLFISIIRILLQKLTSPDVGGNDQSQYKRLAKSTLLLIPLFGVHYMVFAVFPISISSKYQILFELCLGSFQGLVVAVLYCFLNSEVQCELKRKWRSRCPTPSASRDYRVCGSSFSRNGSEGALQFHRGSRAQSFLQTETSVI

SEQ ID NO: 14063 - protein, 77 aa, Homo Sapiens
MRTLLPPALLTCWLLAPVNSIHPECRFHLEIQEEETKCAELLRSQTEKHKGHTKGFILIHAGGLKRILDPHTYPLAP

SEQ ID NO: 14064 - protein, 579 aa, Homo Sapiens
MRTLLPPALLTCWLLAPVSAPATPAPRRLGPGSPLPRRALLPPVFAFLPGAGARAGSGRGSGVARGPELPPGEREALSSGPAGLRDSGWEAACALPRAPPSGVCWKRDRFFLDASTMSSFGAVPGAGSCGRLRGLRVSRGDRGWRWPQMPLGPSLYLLVNSIHPECRFHLEIQEEETKCAELLRSQTEKHKACSGVWDNITCWRPANVGETVTVPCPKVFSNFYSKAGNISKNCTSDGWSETFPDFVDACGYSDPEDESKITFYILVKAIYTLGYSVSLMSLATGSIILCLFRKLHCTRNYIHLNLFLSFILRAISVLVKDDVLYSSSGTLHCPDQPSSWVGCKLSLVFLQYCIMANFFWLLVEGLYLHTLLVAMLPPRRCFLAYLLIGWGLPTVCIGAWTAARLYLEDTGCWDTNDHSVPWWVIRIPILISIIVNFVLFISIIRILLQKLTSPDVGGNDQSQYKRLAKSTLLLIPLFGVHYMVFAVFPISISSKYQILFELCLGSFQGLVVAVLYCFLNSEVQCELKRKWRSRCPTPSASRDYRVCGSSFSRNGSEGALQFHRGSRAQSFLQTETSVI

SEQ ID NO: 14065 - protein, 347 aa, Homo Sapiens
MGVVQYGDNPATHFNLKTHTNSRDLKTAIEKITQRGGLSNVGRAISFVTKNFFSKANGNRSGAPNVVVVMVDGWPTDKVEEASRLARESGINIFFITIEGAAENEKQYVVEPNFANKAVCRTNGFYSLHVQSWFGLHKTLQPLVKRVCDTDRLACSKTCLNSADIGFVIDGSSSVGTGNFRTVLQFVTNLTKEFEISDTDTRIGAVQYTYEQRLEFGFDKYSSKPDILNAIKRVGYWSGGTSTGAAINFALEQLFKKSKPNKRKLMILITDGRSYDDVRIPAMAAHLKGVITYAIGVAWAAQEELEVIATHPARDHSFFVDEFDNLHQYVPRIIQNICTEFNSQPRN

SEQ ID NO: 14066 - protein, 630 aa, Homo Sapiens
MRTVVLTMKASVIEMFLAVPQINCDVKAGKIIDPEFIVKCPAGCQDPKYHVYGTDVYASYSSVCGAAVHSGVLDNSGGKILVRKVAGQSGYKGSYSNGVQSLSLPRWRESFIVLESKPKKGVTYPSALTYSSSKSPAAQAGETTKAYQRPPIPGTTAQPVTLMQLLAVTVAVATPTTLPRPSPSAASTTSIPRPQSVGHRSQEMGEMDSWKPGSVLLDEGLVPKEELSTQSLEPVSLGDPNCKIDLSFLIDGSTSIGKRRFRIQKQLLADVAQALDIGPAGPLMGVVQYGDNPATHFNLKTHTNSRDLKTAIEKITQRGGLSNVGRAISFVTKNFFSKANGNRSGAPNVVVVMVDGWPTDKVEEASRLARESGINIFFITIEGAAENEKQYVVEPNFANKAVCRTNGFYSLHVQSWFGLHKTLQPLVKRVCDTDRLACSKTCLNSADIGFVIDGSSSVGTGNFRTVLQFVTNLTKEFEISDTDTRIGAVQYTYEQRLEFGFDKYSSKPDILNAIKRVGYWSGGTSTGAAINFALEQLFKKSKPNKRKLMILITDGRSYDDVRIPAMAAHLKGVITYAIGVAWAAQEELEVIATHPARDHSFFVDEFDNLHQYVPRIIQNICTEFNSQPRN

SEQ ID NO: 14067 - protein, 657 aa, Homo Sapiens
MRTVVLTMKASVIEMFLVLLVTGVHSNKETAKKIKRPKFTVPQINCDVKAGKIIDPEFIVKCPAGCQDPKYHVYGTDVYASYSSVCGAAVHSGVLDNSGGKILVRKVAGQSGYKGSYSNGVQSLSLPRWRESFIVLESKPKKGVTYPSALTYSSSKSPAAQAGETTKAYQRPPIPGTTAQPVTLMQLLAVTVAVATPTTLPRPSPSAASTTSIPRPQSVGHRSQEMDLWSTATYTSSQNRPRADPGIQRQDPSGAAFQKPVGADVSLDCKIDLSFLIDGSTSIGKRRFRIQKQLLADVAQALDIGPAGPLMGVVQYGDNPATHFNLKTHTNSRDLKTAIEKITQRGGLSNVGRAISFVTKNFFSKANGNRSGAPNVVVVMVDGWPTDKVEEASRLARESGINIFFITIEGAAENEKQYVVEPNFANKAVCRTNGFYSLHVQSWFGLHKTLQPLVKRVCDTDRLACSKTCLNSADIGFVIDGSSSVGTGNFRTVLQFVTNLTKEFEISDTDTRIGAVQYTYEQRLEFGFDKYSSKPDILNAIKRVGYWSGGTSTGAAINFALEQLFKKSKPNKRKLMILITDGRSYDDVRIPAMAAHLKGVITYAIGVAWAAQEELEVIATHPARDHSFFVDEFDNLHQYVPRIIQNICTEFNSQPRN

SEQ ID NO: 14068 - protein, 693 aa, Homo Sapiens
MRTVVLTMKASVIEMFLVLLVTGVHSNKETAKKIKRPKFTVPQINCDVKAGKIIDPEFIVKCPAGCQDPKYHVYGTDVYASYSSVCGAAVHSGVLDNSGGKILVRKVAGQSGYKGSYSNGVQSLSLPRWRESFIVLESKPKKGVTYPSALTYSSSKSPAAQAGETTKAYQRPPIPGTTAQPVTLMQLLAVTVAVATPTTLPRPSPSAASTTSIPRPQSVGHRSQEMDLWSTATYTSSQNRPRADPGIQRQDPSGAAFQKPVGADVSLGEMDSWKPGSVLLDEGLVPKEELSTQSLEPVSLGDPNCKIDLSFLIDGSTSIGKRRFRIQKQLLADVAQALDIGPAGPLMGVVQYGDNPATHFNLKTHTNSRDLKTAIEKITQRGGLSNVGRAISFVTKNFFSKANGNRSGAPNVVVVMVDGWPTDKVEEASRLARESGINIFFITIEGAAENEKQYVVEPNFANKAVCRTNGFYSLHVQSWFGLHKTLQPLVKRVCDTDRLACSKTCLNSADIGFVIDGSSSVGTGNFRTVLQFVTNLTKEFEISDTDTRIGAVQYTYEQRLEFGFDKYSSKPDILNAIKRVGYWSGGTSTGAAINFALEQLFKKSKPNKRKLMILITDGRSYDDVRIPAMAAHLKGVITYAIGVAWAAQEELEVIATHPARDHSFFVDEFDNLHQYVPRIIQNICTEFNSQPRN

SEQ ID NO: 14069 - protein, 678 aa, Homo Sapiens
MRTVVLTMKASVIEMFLVLLVTGVHSNKETAKKIKRPKFTVPQINCDVKAGKIIDPEFIVKCPAGCQDPKYHVYGTDVYASYSSVCGAAVHSGVLDNSGGKILVRKVAGQSGYKGSYSNGVQSLSLPRWRESFIVLESKPKKGVTYPSALTYSSSKSPAAQAGETTKAYQRPPIPGTTAQPVTLMQLLAVTVAVATPTTLPRPSPSAASTTSIPRPQSVGHRSQEMDLWSTATYTSSQNRPRADPGIQRQDPSGAAFQKPVGADVSLGLVPKEELSTQSLEPVSLGDPNCKIDLSFLIDGSTSIGKRRFRIQKQLLADVAQALDIGPAGPLMGVVQYGDNPATHFNLKTHTNSRDLKTAIEKITQRGGLSNVGRAISFVTKNFFSKANGNRSGAPNVVVVMVDGWPTDKVEEASRLARESGINIFFITIEGAAENEKQYVVEPNFANKAVCRTNGFYSLHVQSWFGLHKTLQPLVKRVCDTDRLACSKTCLNSADIGFVIDGSSSVGTGNFRTVLQFVTNLTKEFEISDTDTRIGAVQYTYEQRLEFGFDKYSSKPDILNAIKRVGYWSGGTSTGAAINFALEQLFKKSKPNKRKLMILITDGRSYDDVRIPAMAAHLKGVITYAIGVAWAAQEELEVIATHPARDHSFFVDEFDNLHQYVPRIIQNICTEFNSQPRN

SEQ ID NO: 14070 - protein, 656 aa, Homo Sapiens
MRTVVLTMKASVIEMFLVLLVTGVHSNKETAKKIKRPKFTVPQINCDVKAGKIIDPEFIVKCPAGCQDPKYHVYGTDVYASYSSVCGAAVHSGVLDNSGGKILVRKVAGQSGYKGSYSNGVQSLSLPRWRESFIVLESKPKKGVTYPSALTYSSSKSPAAQAGETTKAYQRPPIPGTTAQPVTLMQLLAVTVAVATPTTLPRPSPSAASTTSIPRPQSVGHRSQEMDLWSTATYTSSQNRPRADPGLVPKEELSTQSLEPVSLGDPNCKIDLSFLIDGSTSIGKRRFRIQKQLLADVAQALDIGPAGPLMGVVQYGDNPATHFNLKTHTNSRDLKTAIEKITQRGGLSNVGRAISFVTKNFFSKANGNRSGAPNVVVVMVDGWPTDKVEEASRLARESGINIFFITIEGAAENEKQYVVEPNFANKAVCRTNGFYSLHVQSWFGLHKTLQPLVKRVCDTDRLACSKTCLNSADIGFVIDGSSSVGTGNFRTVLQFVTNLTKEFEISDTDTRIGAVQYTYEQRLEFGFDKYSSKPDILNAIKRVGYWSGGTSTGAAINFALEQLFKKSKPNKRKLMILITDGRSYDDVRIPAMAAHLKGVITYAIGVAWAAQEELEVIATHPARDHSFFVDEFDNLHQYVPRIIQNICTEFNSQPRN

SEQ ID NO: 14071 - protein, 203 aa, Homo Sapiens
MRTVVLTMKASVIEMFLVLLVTGVHSNKETAKKIKRPKFTVPQINCDVKAGKIIDPEFIVKCPAGCQDPKYHVYGTDVYASYSSVCGAAVHSGVLDNSGGKILVRKVAGQSGYKGSYSNGVQSLSLPRWRESFIVLESKPKKGVTYPSALTYSSSKSPAAQAGKCSRVIESKPSESMNTRRVLGDSGEINILTGQAPLALAIF

SEQ ID NO: 14072 - protein, 134 aa, Homo Sapiens
  misc_feature (1)..(1): Xaa can be any naturally occurring amino acid
XTSSQNRPRADPGIQRQDPSGAAFQKPVGADVSLGLVPKEELSTQSLEPVSLGDPNCKIDLSFLIDGSTSIGKRRFRIQKQLLADVAQALDIGPAGPLMGVVQYGPLHWYWKNSPGNGEEWVGRETAPISQLST

SEQ ID NO: 14073 - protein, 92 aa, Homo Sapiens
MGSTWGSPGWVRLALCLTGLVLSLYALHVKAARARDRDYRALCDVGTAISCSRVFSSRLPADTLGLCPDAAELPGVSRWFCLPGLDPVLRAL

SEQ ID NO: 14074 - protein, 149 aa, Homo Sapiens
MGSTWGSPGWVRLALCLTGLVLSLYALHVKAARARDRDYRALCDVGTAISCSRVFSSRVQGTGLTVLTWFHPTPPLCQVGQGFRAGGACAGTGQHPQSIQQHIRLHLLHTTAIVRLPADTLGLCPDAAELPGVSRWFCLPGLDPVLRAL

SEQ ID NO: 14075 - protein, 156 aa, Homo Sapiens
MGSTWGSPGWVRLALCLTGLVLSLYALHVKAARARDRDYRALCDVGTAISCSRVFSSRWGRGFGLVEHVLGQDSILNQSNSIFGCIFYTLQLLLDGVSPCCPGWSQAICLPQPPKVLGGLQALPADTLGLCPDAAELPGVSRWFCLPGLDPVLRAL

SEQ ID NO: 14076 - protein, 163 aa, Homo Sapiens
MGSTWGSPGWVRLALCLTGLVLSLYALHVKAARARDRDYRALCDVGTAISCSRVFSSRWGRGFGLVEHVLGQDSILNQSNSIFGCIFYTLQLLLGCLRTRWASVLMLLSSLVSLAGSVYLAWILFFVLYDFCIVCITTYAINVSLMWLSFRKVQEPQGKAKRH

SEQ ID NO: 14077 - protein, 160 aa, Homo Sapiens
MIILESGIGVPGERTRGWTARGVVAQGLSYPAILVFEIRVRGKGPDSAGDWDYSGDSHVNWMPRNNGDQERRGGRMAVEIDDGLKDGAQVGQGFRAGGACAGTGQHPQSIQQHIRLHLLHTTAIVRLPADTLGLCPDAAELPGVSRWFCLPGLDPVLRAL

SEQ ID NO: 14078 - protein, 161 aa, Homo Sapiens
MIVERLGYCQGCVWPKEWFCECMGERETDHQEALVRQDPGGWEAAARMVPEIVSGEMLGSRIGSPYSLDPLIRWSLGPGCCNSYNRTWHRVGQGFRAGGACAGTGQHPQSIQQHIRLHLLHTTAIVRLPADTLGLCPDAAELPGVSRWFCLPGLDPVLRAL

SEQ ID NO: 14079 - protein, 43 aa, Homo Sapiens
MLLSSLVSLAGSVYLAWILFFVLYDFCIVCITTYAINVSLMWL

SEQ ID NO: 14080 - protein, 92 aa, Homo Sapiens
  misc_feature (1)..(1): Xaa can be any naturally occurring amino acid
XQGCVWPKEWFCECMGERETDHQEALVRQDPGGWEAAARMVPEIVSGEMLGSRIGSPYSLDPLIRWSLGPGCCNSYNRTWHRVACGHAGPLS

SEQ ID NO: 14081 - protein, 845 aa, Homo Sapiens
MGTSALWALWLLLALCWAPRESGATGTGRKAKCEPSQFQCTNGRCITLLWKCDGDEDCVDGSDEKNCVKKTCAESDFVCNNGQCVPSRWKCDGDPDCEDGSDESPEQCHMRTCRIHEISCGAHSTQCIPVSWRCDGENDCDSGEDEENCGNITCSPDEFTCSSGRCISRNFVCNGQDDCSDGSDELDCAPPTCGAHEFQCSTSSCIPISWVCDDDADCSDQSDESLEQCGRQPVIHTKCPASEIQCGSGECIHKKWRCDGDPDCKDGSDEVNCPSRTCRPDQFECEDGSCIHGSRQCNGIRDCVDGSDEVNCKNVNQCLGPGKFKCRSGECIDISKVCNQEQDCRDWSDEPLKECHINECLVNNGGCSHICKDLVIGYECDCAAGFELIDRKTCGDIDECQNPGICSQICINLKGGYKCECSRGYQMDLATGVCKAVGKEPSLIFTNRRDIRKIGLERKEYIQLVEQLRNTVALDADIAAQKLFWADLSQKAIFSASIDDKVGRHVKMIDNVYNPAAIAVDWVYKTIYWTDAASKTISVATLDGTKRKFLFNSDLREPASIAVDPLSGFVYWSDWGEPAKIEKAGMNGFDRRPLVTADIQWPNGITLDLIKSRLYWLDSKLHMLSSVDLNGQDRRIVLKSLEFLAHPLALTIFEDRVYWIDGENEAVYGANKFTGSELATLVNNLNDAQDIIVYHELVQPSGKNWCEEDMENGGCEYLCLPAPQINDHSPKYTCSCPSGYNVEENGRDCQRINVTTAVSEVSVPPKGTSAAWAILPLLLLVMAAVGGYLMWRNWQHKNMKSMNFDNPVYLKTTEEDLSIDIGRHSASVGHTYPAISVVSTDDDLA

SEQ ID NO: 14082 - protein, 873 aa, Homo Sapiens
MGTSALWALWLLLALCWAPRESGATGTGRKAKCEPSQFQCTNGRCITLLWKCDGDEDCVDGSDEKNCVKKTCAESDFVCNNGQCVPSRWKCDGDPDCEDGSDESPEQCHMRTCRIHEISCGAHSTQCIPVSWRCDGENDCDSGEDEENCGNITCSPDEFTCSSGRCISRNFVCNGQDDCSDGSDELDCAPPTCGAHEFQCSTSSCIPISWVCDDDADCSDQSDESLEQCGRQPVIHTKCPASEIQCGSGECIHKKWRCDGDPDCKDGSDEVNCPSRTCRPDQFECEDGSCIHGSRQCNGIRDCVDGSDEVNCKNVNQCLGPGKFKCRSGECIDISKVCNQEQDCRDWSDEPLKECHINECLVNNGGCSHICKDLVIGYECDCAAGFELIDRKTCGDIDECQNPGICSQICINLKGGYKCECSRGYQMDLATGVCKAVGKEPSLIFTNRRDIRKIGLERKEYIQLVEQLRNTVALDADIAAQKLFWADLSQKAIFSASIDDKVGRHVKMIDNVYNPAAIAVDWVYKTIYWTDAASKTISVATLDGTKRKFLFNSDLREPASIAVDPLSGFVYWSDWGEPAKIEKAGMNGFDRRPLVTADIQWPNGITLDLIKSRLYWLDSKLHMLSSVDLNGQDRRIVLKSLEFLAHPLALTIFEDRVYWIDGENEAVYGANKFTGSELATLVNNLNDAQDIIVYHELVQPSGKNWCEEDMENGGCEYLCLPAPQINDHSPKYTCSCPSGYNVEENGRDCQSTATTVTYSETKDTNTTEISATSGLVPGGINVTTAVSEVSVPPKGTSAAWAILPLLLLVMAAVGGYLMWRNWQHKNMKSMNFDNPVYLKTTEEDLSIDIGRHSASVGHTYPAISVVSTDDDLA

SEQ ID NO: 14083 - protein, 173 aa, Homo Sapiens
MGTSALWALWLLLALCWAPRESGATGTGRKAKCEPSQFQCTNGRCITLLWKCDGDEDCVDGSDEKNCVKKTCAESDFVCNNGQCVPSRWKCDGDPDCEDGSDESPEQCRNITCSPDEFTCSSGRCISRNFVCNGQDDCSDGSDELDCAPPTCGAHEFQCSTSSCIPISWVCDD

SEQ ID NO: 14084 - protein, 70 aa, Homo Sapiens
MERGAGAKLLPLLLLLRATGFTCAQTDGRNGYTAVIEVTSGGPWGDWAWPEMCPDGFFASGFSLKLGRME

SEQ ID NO: 14085 - protein, 102 aa, Homo Sapiens
MERGAGAKLLPLLLLLRATGFTCAQTDGRNGYTAVIEVTSGGPWGDWAWPEMCPDGFFASGFSLKVEPPQGIPGDDTALNGIRLHCARGNVLGNTHVLGRME

SEQ ID NO: 14086 - protein, 114 aa, Homo Sapiens
MERGAGAKLLPLLLLLRATGFTCAQTDGRNGYTAVIEVTSGGPWGDWAWPEMCPDGFFASGFSLKVEPPQGIPGDDTALNGIRLHCARGNVLGNTHVVESQSGRWGAGVEDPLG

SEQ ID NO: 14087 - protein, 202 aa, Homo Sapiens
MERGAGAKLLPLLLLLRATGFTCAQTDGRNGYTAVIEVTSGGPWGDWAWPEMCPDGFFASGFSLKVEPPQGIPGDDTALNGIRLHCARGNVLGNTHVVESQSGSWGEWSEPLWCRGGAYLVAFSLRVEAPTTLGDNTAANNVRFRCSDGEELQGPGLSWGDFGDWSDHCPKGACGLQTKIQGPRGLGDDTALNDARLFCCRS

SEQ ID NO: 14088 - protein, 513 aa, Homo Sapiens
MTTQLPAYVAILLFYVSRASCQDTFTAAVYEHAAILPNATLTPVSREEALALMNRNLDILEGAITSAADQGAHIIVTPEDAIYGWNFNRDSLYPYLEDIPDPEVNWIPCNNRNRFGQTPVQERLSCLAKNNSIYVVANIGDKKPCDTSDPQCPPDGRYQYNTDVVFDSQGKLVARYHKQNLFMGENQFNVPKEPEIVTFNTTFGSFGIFTCFDILFHDPAVTLVKDFHVDTIVFPTAWMNVLPHLSAVEFHSAWAMGMRVNFLASNIHYPSKKMTGSGIYAPNSSRAFHYDMKTEEGKLLLSQLDSHPSHSAVVNWTSYASSIEALSSGNKEFKGTVFFDEFTFVKLTGVAGNYTVCQKDLCCHLSYKMSENIPNEVYALGAFDGLHTVEGRYYLQICTLLKCKTTNLNTCGDSAETASTRFEMFSLSGTFGTQYVFPEVLLSENQLAPGEFQVSTDGRLFSLKPTSGPVLTVTLFGRLYEKDWASNASSGLTAQARIIMLIVIAPIVCSLSW

SEQ ID NO: 14089 - protein, 102 aa, Homo Sapiens
MNENIDILETAIKQAAEQGARIIVTPEDALYGWKFTRETVFPYLEDIPDPQVNWIPCQDPHRFGHTPVQARLSCLAKDNSIYVLANLGDKKPCNSRDSTCPP

SEQ ID NO: 14090 - protein, 131 aa, Homo Sapiens
MNENIDILETAIKQAAEQGARIIVTPEDALYGWKFTRETVFPYLEDIPDPQVNWIPCQDPHRFGHTPVQARLSCLAKDNSIYVLANLGDKKPCNSRDSTCPPNGYFQYNTNVVYNTEGKLVARYHKVGKSH

SEQ ID NO: 14091 - protein, 467 aa, Homo Sapiens
MNENIDILETAIKQAAEQGARIIVTPEDALYGWKFTRETVFPYLEDIPDPQVNWIPCQDPHRFGHTPVQARLSCLAKDNSIYVLANLGDKKPCNSRDSTCPPNGYFQYNTNVVYNTEGKLVARYHKYHLYSEPQFNVPEKPELVTFNTAFGRFGIFTCFDIFFYDPGVTLVKDFHVDTILFPTAWMNVLPLLTAIEFHSAWAMGMGVNLLVANTHHVSLNMTGSGIYAPNGPKVYHYDMKTELGKLLLSEVDSHPLSSLAYPTAVNWNAYATTIKPFPVQKNTFRGFISRDGFNFTELFENAGNLTVCQKELCCHLSYRMLQKEENEVYVLGAFTGLHGRRRREYWQVCTLLKCKTTNLTTCGRPVETASTRFEMFSLSGTFGTEYVFPEVLLTEIHLSPGKFEVLKDGRLVNKNGSSGPILTVSLFGRWYTKDSLYSSCGTSNSAITYLLIFILLMIIALQNIVML

SEQ ID NO: 14092 - protein, 101 aa, Homo Sapiens
MVTSSFPISVAVFALITLQVGTQDSFIAAVYEHAVILPNKTETPVSQEDALNLMNENIDILETAIKQAAEQGARIIVTPEDALYGWKFTRETVFPYLEDIP

SEQ ID NO: 14093 - protein, 166 aa, Homo Sapiens
MVTSSFPISVAVFALITLQVGTQDSFIAAVYEHAVILPNKTETPVSQEDALNLMNENIDILETAIKQAAEQGARIIVTPEDALYGWKFTRETVFPYLEDIPDPQVNWIPCQDPHRFGHTPVQARLSCLAKDNSIYVLANLGDKKPCNSRDSTCPPNGYFQYNTNVV

SEQ ID NO: 14094 - protein, 192 aa, Homo Sapiens
MVTSSFPISVAVFALITLQVGTQDSFIAAVYEHAVILPNKTETPVSQEDALNLMNENIDILETAIKQAAEQGARIIVTPEDALYGWKFTRETVFPYLEDIPDPQVNWIPCQDPHRFGHTPVQARLSCLAKDNSIYVLANLGDKKPCNSRDSTCPPNGYFQYNTNVVYNTEGKLVARYHKETLQSVKRSFAVI

SEQ ID NO: 14095 - protein, 195 aa, Homo Sapiens
MVTSSFPISVAVFALITLQVGTQDSFIAAVYEHAVILPNKTETPVSQEDALNLMNENIDILETAIKQAAEQGARIIVTPEDALYGWKFTRETVFPYLEDIPDPQVNWIPCQDPHRFGHTPVQARLSCLAKDNSIYVLANLGDKKPCNSRDSTCPPNGYFQYNTNVVYNTEGKLVARYHKEVVFMHQMVPKCIIMT

SEQ ID NO: 14096 - protein, 299 aa, Homo Sapiens
MVTSSFPISVAVFALITLQVGTQDSFIAAVYEHAVILPNKTETPVSQEDALNLMNENIDILETAIKQAAEQGARIIVTPEDALYGWKFTRETVFPYLEDIPDPQVNWIPCQDPHRFGHTPVQARLSCLAKDNSIYVLANLGDKKPCNSRDSTCPPNGYFQYNTNVVYNTEGKLVARYHKVCTLLKCKTTNLTTCGRPVETASTRFEMFSLSGTFGTEYVFPEVLLTEIHLSPGKFEVLKDGRLVNKNGSSGPILTVSLFGRWYTKDSLYSSCGTSNSAITYLLIFILLMIIALQNIVML

SEQ ID NO: 14097 - protein, 184 aa, Homo Sapiens
MVTSSFPISVAVFALITLQVGTQDSFIAAVYEHAVILPNKTETPVSQEDALNLMNENIDILETAIKQAAEQGARIIVTPEDALYGWKFTRETVFPYLEDIPDPQVNWIPCQDPHRFGHTPVQARLSCLAKDNSIYVLANLGDKKPCNSRDSTCPPNGYFQYNTNVVYNTEGKLVARYHKVGKSH

SEQ ID NO: 14098 - protein, 520 aa, Homo Sapiens
MVTSSFPISVAVFALITLQVGTQDSFIAAVYEHAVILPNKTETPVSQEDALNLMNENIDILETAIKQAAEQGARIIVTPEDALYGWKFTRETVFPYLEDIPDPQVNWIPCQDPHRFGHTPVQARLSCLAKDNSIYVLANLGDKKPCNSRDSTCPPNGYFQYNTNVVYNTEGKLVARYHKYHLYSEPQFNVPEKPELVTFNTAFGRFGIFTCFDIFFYDPGVTLVKDFHVDTILFPTAWMNVLPLLTAIEFHSAWAMGMGVNLLVANTHHVSLNMTGSGIYAPNGPKVYHYDMKTELGKLLLSEVDSHPLSSLAYPTAVNWNAYATTIKPFPVQKNTFRGFISRDGFNFTELFENAGNLTVCQKELCCHLSYRMLQKEENEVYVLGAFTGLHGRRRREYWQVCTLLKCKTTNLTTCGRPVETASTRFEMFSLSGTFGTEYVFPEVLLTEIHLSPGKFEVLKDGRLVNKNGSSGPILTVSLFGRWYTKDSLYSSCGTSNSAITYLLIFILLMIIALQNIVML

SEQ ID NO: 14099 - protein, 290 aa, Homo Sapiens
MVTSSFPISVAVFALITLQVGTQDSFIAAVYEHAVILPNKTETPVSQEDALNLMNENIDILETAIKQAAEQGARIIVTPEDALYGWKFTRETVFPYLEDIPDPQVNWIPCQDPHRFGHTPVQARLSCLAKDNSIYVLANLGDKKPCNSRDSTCPPNGYFQYNTNVVYNTEGKLVARYHKYHLYSEPQFNVPEKPELVTFNTAFGRFGIFTCFDIFFYDPGVTLVKDFHVDTILFPTAWMNVLPLLTAIEFHSAWAMGMGVNLLVANTHHVSLNMTVVFMHQMVPKCIIMT

SEQ ID NO: 14100 - protein, 219 aa, Homo Sapiens
MVTSSFPISVAVFALITLQVGTQDSFIAAVYEHAVILPNKTETPVSQEDALNLMNENIDILETAIKQAAEQGARIIVTPEDALYGWKFTRETVFPYLEDIPDPQVNWIPCQDPHRFGHTPVQARLSCLAKDNSIYVLANLGDKKPCNSRDSTCPPNGYFQYNTNVVYNTEGKLVARYHKYHLYSEPQFNVPEKPELVTFNTAFGRKWYLCTKWSQSVSL

SEQ ID NO: 14101 - protein, 216 aa, Homo Sapiens
MVTSSFPISVAVFALITLQVGTQDSFIAAVYEHAVILPNKTETPVSQEDALNLMNENIDILETAIKQAAEQGARIIVTPEDALYGWKFTRETVFPYLEDIPDPQVNWIPCQDPHRFGHTPVQARLSCLAKDNSIYVLANLGDKKPCNSRDSTCPPNGYFQYNTNVVYNTEGKLVARYHKYHLYSEPQFNVPEKPELVTFNTAFGSLDERFAPFDSY

SEQ ID NO: 14102 - protein, 119 aa, Homo Sapiens
MVTSSFPISVAVFALITLQVGTQDSFIAAVYEHAVILPNKTETPVSQEDALNLMNENIDILETAIKQAAEQGARIIVTPEDALYGWKFTRETVFPYLEDIPDPQVNWIPCQDPHRSAHC

SEQ ID NO: 14103 - protein, 129 aa, Homo Sapiens
MIISHFPKCVAVFALLALSVGALDTFIAAVYEHAVILPNRTETPVSKEEALLLMNKNIDVLEKAVKLAAKQGAHIIVTPEDGIYGWIFTRESIYPYLEDIPDPGVNWIPCRDPWREWNLRPRSSQGVPL

SEQ ID NO: 14104 - protein, 129 aa, Homo Sapiens; identical to SEQ ID NO: 14103

SEQ ID NO: 14105 - protein, 207 aa, Homo Sapiens
MIISHFPKCVAVFALLALSVGALDTFIAAVYEHAVILPNRTETPVSKEEALLLMNKNIDVLEKAVKLAAKQGAHIIVTPEDGIYGWIFTRESIYPYLEDIPDPGVNWIPCRDPWRFGNTPVQQRLSCLAKDNSIYVVANIGDKKPCNASDSQCPPDGRYQYNTDVVFDSQGKLLARYHKGVESTPQKQSRCTTMTWKQRVVSCCYQN

SEQ ID NO: 14106 - protein, 274 aa, Homo Sapiens
MIISHFPKCVAVFALLALSVGALDTFIAAVYEHAVILPNRTETPVSKEEALLLMNKNIDVLEKAVKLAAKQGAHIIVTPEDGIYGWIFTRESIYPYLEDIPDPGVNWIPCRDPWRFGNTPVQQRLSCLAKDNSIYVVANIGDKKPCNASDSQCPPDGRYQYNTDVVFDSQGKLLARYHKYNLFAPEIQFDFPKDSELVTFDTPFGKFGIFTCFDIFSHDPAVVVVDEFQLTAFSTPQHGTTRCPSSRLFPSIQHGPRPWESIYLLQIPTTPACT

SEQ ID NO: 14107 - protein, 147 aa, Homo Sapiens
MIISHFPKCVAVFALLALSVGALDTFIAAVYEHAVILPNRTETPVSKEEALLLMNKNIDVLEKAVKLAAKQGAHIIVTPEDGIYGWIFTRESIYPYLEDIPDPGVNWIPCRDPWRKSKKMNEPVSKELCYHCHSECNQYGQWKLYRT

SEQ ID NO: 14108 - protein, 117 aa, Homo Sapiens
MIISHFPKCVAVFALLALSVGALDTFIAAVYEHAVILPNRTETPVSKEEALLLMNKNIDVLEKAVKLAAKQGAHIIVTPEDGIYGWIFTRESIYPYLEDIPDPGVNWIPCRDPWRNH

SEQ ID NO: 14109 - protein, 117 aa, Homo Sapiens; identical to SEQ ID NO: 14108

SEQ ID NO: 14110 - protein, 117 aa, Homo Sapiens; identical to SEQ ID NO: 14108

SEQ ID NO: 14111 - protein, 133 aa, Homo Sapiens
MIISHFPKCVAVFALLALSVGALDTFIAAVYEHAVILPNRTETPVSKEEALLLMNKNIDVLEKAVKLAAKQGAHIIVTPEDGIYGWIFTRESIYPYLEDIPDPGVNWIPCRDPWSTIFLHLKFSLISPRIQNL

SEQ ID NO: 14112 - protein, 169 aa, Homo Sapiens
MIISHFPKCVAVFALLALSVGALDTFIAAVYEHAVILPNRTETPVSKEEALLLMNKNIDVLEKAVKLAAKQQGAHIIVTPEDGIYGWIFTRESIYPYLEDIPDPGVNWIPCRDPWSMVQHAAPPLGCSLPFSMGQGHGSQSTCCKYPQHQHAHDREWNLRPRSSQGVPL

SEQ ID NO: 14113 - protein, 161 aa, Homo Sapiens
MIISHFPKCVAVFALLALSVGALDTFIAAVYEHAVILPNRTETPVSKEEALLLMNKNIDVLEKAVKLAAKQVLPFYTCKGDLQFGQRVFGIHDKLFCPTCFEQGAHIIVTPEDGIYGWIFTRESIYPYLEDIPDPGVNWIPCRDPWREWNLRPRSSQGVPL

SEQ ID NO: 14114 - protein, 60 aa, Homo Sapiens
  misc_feature (1)..(1): Xaa can be any naturally occurring amino acid
XTRESIYPYLEDIPDPGVNWIPCRDPWRKSKKMNEPVSKELCYHCHSECNQYGQWKLYRT

SEQ ID NO: 14115 - protein, 155 aa, Homo Sapiens
MCTEAKKHCWYFEGLYPTYYICRSYEDCCGSRCCVRALSIQRLWYFWFLLMMGVLFCCGAGFFIRRRMYPPPLIEEPAFNVSYTRQPPNPGPGAQQPGPPYYTDPGGPGMNPVGNSMAMAFQVPPNSPQGSVACPPPPAYCNTPPPPYEQVVKAK

SEQ ID NO: 14116 - protein, 109 aa, Homo Sapiens
MFLLMMGVLFCCGAGFFIRRRMYPPPLIEEPAFNVSYTRQPPNPGPGAQQPGPPYYTDPGGPGMNPVGNSMAMAFQVPPNSPQGSVACPPPPAYCNTPPPPYEQVVKAK

SEQ ID NO: 14117 - protein, 169 aa, Homo Sapiens
MLSETLGYLSSVLLQCTEAKKHCWYFEGLYPTYYICRSYEDCCGSRCCVRALSIQRLWYFWFLLMMGVLFCCGAGFFIRRRMYPPPLIEEPAFNVSYTRQPPNPGPGAQQPGPPYYTDPGGPGMNPVGNSMAMAFQVPPNSPQGSVACPPPPAYCNTPPPPYEQVVKAK

SEQ ID NO: 14118 - protein, 22 aa, Homo Sapiens
MMGVLFCCGAGFFIRRRMYPPP

SEQ ID NO: 14119 - protein, 53 aa, Homo Sapiens
MMGVLFCCGAGFFIRRRMYPPPLIEEPAFNVSYTRQPPNPGPGAQQPGPPYYT

SEQ ID NO: 14120 - protein, 85 aa, Homo Sapiens
MMGVLFCCGAGFFIRRRMYPPPLIEEPAFNVSYTRQPPNPGPGAQQPGPPYYTDPGGPGMNPVGNSMAMAFQVPPNSPQGSVACP

SEQ ID NO: 14121 - protein, 96 aa, Homo Sapiens
MMGVLFCCGAGFFIRRRMYPPPLIEEPAFNVSYTRQPPNPGPGAQQPGPPYYTDPGGPGMNPVGNSMAMAFQVPPNSPQGSVACPPPPAYCNTPPP

SEQ ID NO: 14122 - protein, 105 aa, Homo Sapiens
MMGVLFCCGAGFFIRRRMYPPPLIEEPAFNVSYTRQPPNPGPGAQQPGPPYYTDPGGPGMNPVGNSMAMAFQVPPNSPQGSVACPPPPAYCNTPPPPYEQVVKAK

SEQ ID NO: 14123 - protein, 105 aa, Homo Sapiens; identical to SEQ ID NO: 14122

SEQ ID NO: 14124 - protein, 105 aa, Homo Sapiens; identical to SEQ ID NO: 14122

SEQ ID NO: 14125 - protein, 170 aa, Homo Sapiens
MRIRSLHPVQQTEPTTCTEAKKHCWYFEGLYPTYYICRSYEDCCGSRCCVRALSIQRLWYFWFLLMMGVLFCCGAGFFIRRRMYPPPLIEEPAFNVSYTRQPPNPGPGAQQPGPPYYTDPGGPGMNPVGNSMAMAFQVPPNSPQGSVACPPPPAYCNTPPPPYEQVVKAK

SEQ ID NO: 14126 - protein, 172 aa, Homo Sapiens
MRRQPAKVAALLLGLLLECTEAKKHCWYFEGLYPTYYICRSYEDCCGSRCCVRALSIQRLWYFWFLLMMGVLFCCGAGFFIRRRMYPPPLIEEPAFNVSYTRQPPNPGPGAQQPGPPYYTDPGGPGMNPVGNSMAMAFQVPPNSPQGSVACPPPPAYCNTPPPPYEQVVKAK

SEQ ID NO: 14127 - protein, 163 aa, Homo Sapiens
MRRTGSHAQCTEAKKHCWYFEGLYPTYYICRSYEDCCGSRCCVRALSIQRLWYFWFLLMMGVLFCCGAGFFIRRRMYPPPLIEEPAFNVSYTRQPPNPGPGAQQPGPPYYTDPGGPGMNPVGNSMAMAFQVPPNSPQGSVACPPPPAYCNTPPPPYEQVVKAK

SEQ ID NO: 14128 - protein, 144 aa, Homo Sapiens
MSAPCPGLLSCSCCLSTAQPVLHQPPAMSSALGTTIRLTCTLRNDHDIGVYSVYWYQQRPGHPPRFLLRYFSQSDKSQGPQVPPRFSGSKDVARNRGYLSISELQPEDEAMYYCAMGARSSEKEEREREWEEEMEPTAARTRVP

SEQ ID NO: 14129 - protein, 145 aa, Homo Sapiens
MSWAPVLLMLFVYCTGCGPQPVLHQPPAMSSALGTTIRLTCTLRNDHDIGVYSVYWYQQRPGHPPRFLLRYFSQSDKSQGPQVPPRFSGSKDVARNRGYLSISELQPEDEAMYYCAMGARSSEKEEREREWEEEMEPTAARTRVP

SEQ ID NO: 14130 - protein, 107 aa, Homo Sapiens
MACRCLSFLLMGTFLSGQVAQLSCTLSPQHVTIRDYGVSWYQQRAGSAPRYLLYYRSEEDHHRPADIPDRFSAAKDEAHNACVLTISPVQPEDDADYYCSVGYGFSP

SEQ ID NO: 14131 - protein, 123 aa, Homo Sapiens
MACRCLSFLLMGTFLSVSQTVLAQLDALLVFPGQVAQLSCTLSPQHVTIRDYGVSWYQQRAGSAPRYLLYYRSEEDHHRPADIPDRFSAAKDEAHNACVLTISPVQPEDDADYYCSVGYGFSP

SEQ ID NO: 14132 - protein, 271 aa, Homo Sapiens
MAGAGSEARFAGLSLVQLNELLEDEGQLTEMVQKMEENVQLNKEMTLASNRSLAEGNLLYQPQLDTLKARLTQKYQELQVLFEAYQIKKTKLDRQSSSASLETLLALLQAEGAKIEEDTENMAEKFLDGELPLDSFIDVYQSKRKLAHMRRVKIEKLQEMVLKGQRLPQALAPLPPRLPELAPTAPLPYPAPEASGPPAVAPRRIPPPPPPVPAGRLATPFTAAMSSGQAVPYPGLQCPPLPPRVGLPTQQGFSSQFVSPYPPPLPQRPPP

SEQ ID NO: 14133 - protein, 285 aa, Homo Sapiens
MAGAGSEARFAGLSLVQLNELLEDEGQLTEMVQKMEETQNVQLNKEMTLASNRSLAEGNLLYQPQLDTLKARLTQKYQELQVLFEAYQIKKTKLDRQSSSASLETLLALLQAEGAKIEEDTENMAEKFLDGELPLDSFIDVYQSKRKLAHMRRVKIEKLQEMVLKGQRLPQALAPLPPRLPELAPTAPLPYPAPEASGPPAVAPRRIPPPPPPVPAGRLATPFTAAMSSGQAVPYPGLQCPPLPPRVGLPTQQGFSSQFVSPYPPPLPQRPPPRLPPHQPGFILQ

SEQ ID NO: 14134 - protein, 184 aa, Homo Sapiens
MQSGCVLELRNAGLVACLALITVFVAECCYGDSCQTQNVQLNKEMTLASNRSLAEGNLLYQPQLDTLKARLTQKYQELQVLFEAYQIKKTKLDRQSSSASLETLLALLQAEGAKIEEDTENMAEKFLDGELPLDSFIDVYQSKRKLAHMRRVKIEKLQEMVLKGQRLPQALAPLPPRLPELAPT

SEQ ID NO: 14135 - protein, 334 aa, Homo Sapiens
MAAAAAAGPSPGSGPGDSPEGPEGEAPERRRKAHGMLKLYYGLSEGEAAGRPAGPDPLDPTDLNGAHFDPEVYLDKLRRECPLAQLMDSETDMVRQIRALDSDMQTLVYENYNKFISATDTIRKMKNDFRKMEDEMDRLATNMAVITDFSARISATLQDRHERITKLAGGRCRAGPAVGLSWGSGANVTLRPPGVHALLRKLQFLFELPSRLTKCVELGAYGQAVRYQGRAQAVLQQYQHLPSFRAIQDDCQVITARLAQQLRQRFREGGSGAPEQAECVELLLALGEPAEELCEEFLAHARGRLEKELRNLEAELGPSPPAPDVLEFTDHGGS

SEQ ID NO: 14136 - protein, 782 aa, Homo Sapiens
MAAAAAAGPSPGSGPGDSPEGPEGEAPERRRKAHGMLKLYYGLSEGEAAGRPAGPDPLDPTDLNGAHFDPEVYLDKLRRECPLAQLMDSETDMVRQIRALDSDMQTLVYENYNKFISATDTIRKMKNDFRKMEDEMDRLATNMAVITDFSARISATLQDRHERITKLAGVHALLRKLQFLFELPSRLTKCVELGAYGQAVRYQGRAQAVLQQYQHLPSFRAIQDDCQVITARLAQQLRQRFREGGSGAPEQAECVELLLALGEPAEELCEEFLAHARGRLEKELRNLEAELGPSPPAPDVLEFTDHGGSGFVGGLCQVAAAYQELFAAQGPAGAEKLAAFARQLGSRYFALVERRLAQEQGGGDNSLLVRALDRFHRRLRAPGALLAAAGLADAATEIVERVARERLGHHLQGLRAAFLGCLTDVRQALAAPRVAGKEGPGLAELLANVASSILSHIKASLAAVHLFTAKEVSFSNKPYFRGEFCSQGVREGLIVGFVHSMCQTAQSFCDSPGEKGGATPPALLLLLSRLCLDYETATISYILTLTDEQFLVQDQFPVTPVSTLCAEARETARRLLTHYVKVQGLVISQMLRKSVETRDWLSTLEPRNVRAVMKRVVEDTTAIDVQVGLLYEEGVRKAQSSDSSKRTFSVYSSSRQQGRYAPSYTPSAPMDTNLLSNIQKLFSERIDVFSPVEFNKVSVLTGIIKISLKTLLECVRLRTFGRFGLQQVQVDCHFLQLYLWRFVADEELVHLLLDEVVASAALRCPDPVPMEPSVVEVICERG

SEQ ID NO: 14137 - protein, 163 aa, Homo Sapiens
MAAAAAAGPSPGSGPGDSPEGPEGEAPERRRKAHGMLKLYYGLSEGEAAGRPAGPDPLDPTDLNGAHFDPEVYLDKLRRECPLAQLMDSETDMVRQIRALDSDMQTLVYENYNKFISATGSALDTQMRLGASGPCLGCLWSDGAVEAQWWQLAKHLRPASDLD

SEQ ID NO: 14138 - protein, 233 aa, Homo Sapiens
MAAAAAAGPSPGSGPGDSPEGPEGEAPERRRKAHGMLKLYYGLSEGEAAGRPAGPDPLDPTDLNGAHFDPEVYLDKLRRECPLAQLMDSETDMVRQIRALDSDMQTLVYENYNKFISATGVHALLRKLQFLFELPSRLTKCVELGAYGQAVRYQGRAQAVLQQYQHLPSFRAIQDDCQVITARLAQQLRQRFREGGSGAPEQAECVELLLALGEPAEELCEEFLAHARGRLEK

SEQ ID NO: 14139 - protein, 81 aa, Homo Sapiens
MAAAAAAGPSPGSGPGDSPEGPEGEAPERRRKAHGMLKLYYGLSEGEAAGRPAGPDPLDPTDLNGAHFDPEVYLDKTPSGR

SEQ ID NO: 14140 - protein, 81 aa, Homo Sapiens [sequence omitted]

SEQ ID NO: 14141 - protein, 110 aa, Homo Sapiens
MDSETDMVRQIRALDSDMQTLVYENYNKFISATDTIRKMKNDFRKMEDEMDRLATNMAVITDFSARISATLQDRHERITKLAGVHALLRKLQFLFELPSRLTKCVELGAY

SEQ ID NO: 14142 - protein, 255 aa, Homo Sapiens
MDSETDMVRQIRALDSDMQTLVYENYNKFISATDTIRKMKNDFRKMEDEMDRLATNMAVITDFSARISATLQDRHERITKLAGVHALLRKLQFLFELPSRLTKCVELGAYGQAVRYQGRAQAVLQQYQHLPSFRAIQDDCQVITARLAQQLRQRFREGGSGAPEQAECVELLLALGEPAEELCEEFLAHARGRLEKELRNLEAELGPSPPAPDVLEFTDHGGSGFVGGLCQVAAAYQELFAAQGPAGAEKLAAFA

SEQ ID NO: 14143 - protein, 165 aa, Homo Sapiens
MIMPLYSKLGDREKKKRKEKASRPWAAVGTMAAAAAAGPSPGSGPGDSPEGPEGEAPERRRKAHGMLKLYYGLSEGEAAGRPAGPDPLDPTDLNGAHFDPEVYLDKLRRECPLAQLMDSETDMVRQIRALDSDMQTLVYENYNKFISATDTIRKMKNDFRKMEDE

SEQ ID NO: 14144 - protein, 99 aa, Homo Sapiens
VGLLYEEGVRKAQSSDSSKRTFSVYSSSRQQGRYAPSYTPSAPMDTNLLSNIQKLFSERIDVFSPVEFNKMTALILYPSLLIWPRRLSASSQLLPSCRC

SEQ ID NO: 14145 - protein, 72 aa, Homo Sapiens
  misc_feature (1)..(1): Xaa can be any naturally occurring amino acid
XSQGVREGLIVGFVHSMCQTAQSFCDSPGEKGGATPPALLLLLSRLCLDYETATISYILTLTDEQFLVQVKH

SEQ ID NO: 14146 - protein, 199 aa, Homo Sapiens
  misc_feature (1)..(1): Xaa can be any naturally occurring amino acid
XTAQSFCDSPGEKGGATPPALLLLLSRLCLDYETATISYILTLTDEQFLVQDQFPVTPVSTLCAEARETARRLLTHYVKVQGLVISQMLRKSVETRDWLSTLEPRNVRAVMKRVVEDTTAIDVQVGLLYEEGVRKAQSSDSSKRTFSVYSSSRQQGRYAPSYTPSAPMDTNLLSNIQKLFSERIDVFSPVEFNKVRLPT

SEQ ID NO: 14147 - protein, 168 aa, Homo Sapiens
MVFAFWKVFLILSCLAGQVSVVQVTIPDGFVNVTVGSNVTLICIYTTTVASREQLSIQWSFFHKKEMEPISHSSCLSTEGMEEKAVSQCLKMTHARDARGRCSWTSEIYFSQGGQAVAIGQFKDRITGSNDPGNASITISHMQPADSGIYICDVNNPPDFLGQNQGIL

SEQ ID NO: 14148 - protein, 423 aa, Homo Sapiens
MVFAFWKVFLILSCLAGQVSVVQVTIPDGFVNVTVGSNVTLICIYTTTVASREQLSIQWSFFHKKEMEPISHSSCLSTEGMEEKAVSQCLKMTHARDARGRCSWTSEIYFSQGGQAVAIGQFKDRITGSNDPGNASITISHMQPADSGIYICDVNNPPDFLGQNQGILNVSVLVKPSKPLCSVQGRPETGHTISLSCLSALGTPSPVYYWHKLEGRDIVPVKENFNPTTGILVIGNLTNFEQGYYQCTAINRLGNSSCEIDLTSSHPEVGIIVGALIGSLVGAAIIISVVCFARNKAKAKAKERNSKTIAELEPMTKINPRGESEAMPREDATQLEVTLPSSIHETGPDTIQEPDYEPKPTQEPAPEPAPGSEPMAVPDLDIELELEPETQSELEPEPEPEPESEPGVVVEPLSEDEKGVVKA

SEQ ID NO: 14149 - protein, 387 aa, Homo Sapiens
MVFAFWKVFLILSCLAGQVSVVQVTIPDGFVNVTVGSNVTLICIYTTTVASREQLSIQWSFFHKKEMEPISIYFSQGGQAVAIGQFKDRITGSNDPGNASITISHMQPADSGIYICDVNNPPDFLGQNQGILNVSVLVKPSKPLCSVQGRPETGHTISLSCLSALGTPSPVYYWHKLEGRDIVPVKENFNPTTGILVIGNLTNFEQGYYQCTAINRLGNSSCEIDLTSSHPEVGIIVGALIGSLVGAAIIISVVCFARNKAKAKAKERNSKTIAELEPMTKINPRGESEAMPREDATQLEVTLPSSIHETGPDTIQEPDYEPKPTQEPAPEPAPGSEPMAVPDLDIELELEPETQSELEPEPEPEPESEPGVVVEPLSEDEKGVVKA

SEQ ID NO: 14150 - protein, 190 aa, Homo Sapiens
MAAGGSAPEPRVLVCLGALLAGWVAVGLEAVVIGEVHENVTLHCGNISGLRGQVTWYRNNSEPVFLLSSNSSLRPAEPRFSLVDATSLHIESLSLGDEGIYTCQEILNVTQWFQVWLQVANPPPSAPQCWAQMASGSFMLQLTCRWDGGYPDPDFLWIEEPGGVIVGKSKLGVEMLSESQLSDGKKFKCV

SEQ ID NO: 14151 - protein, 540 aa, Homo Sapiens
MAAGGSAPEPRVLVCLGALLAGWVAVGLEAVVIGEVHENVTLHCGNISGLRGQVTWYRNNSEPVFLLSSNSSLRPAEPRFSLVDATSLHIESLSLGDEGIYTCQEILNVTQWFQVWLQVASGPYQIEVHIVATGTLPNGTLYAARGSQVDFSCNSSSRPPPVVEWWFQALNSSSESFGHNLTVNFFSLLLISPNLQGNYTCLALNQLSKRHRKVTTELLVYYPPPSAPQCWAQMASGSFMLQLTCRWDGGYPDPDFLWIEEPGGVIVGKSKLGVEMLSESQLSDGKKFKCVTSHIVGPESGASCMVQIRGPSLLSEPMKTCFTGGNVTLTCQVSGAYPPAKILWLRNLTQPEVIIQPSSRHLITQDGQNSTLTIHNCSQDLDEGYYICRADSPVGVREMEIWLSVKEPLNIGGIVGTIVSLLLLGLAIISGLLLHYSPVFCWKVGNTSRGQNMDDVMVLVDSEEEEEEEEEEEEDAAVGEQEGAREREELPKEIPKQDHIHRVTALVNGNIEQMGNGFQDLQDDSSEEQSDIVQEEDRPV

SEQ ID NO: 14152 - protein, 126 aa, Homo Sapiens
EFPFTDLKPKDAGRYFCAYKTTASHEWSESSEHLQLVVTDKHDELEAPSMKTGSSSEESTKRTSHSKLPEQEAAEADLSNMERVSLSTADPQGVTYAELSTSALSEAASDTTQEPPGSHEYAALKV

SEQ ID NO: 14153 - protein, 116 aa, Homo Sapiens
MTAEFLSLLCLDTRTIFVAIFSCISILLLFLSVFIIYRCSQHSSSSEESTKRTSHSKLPEQEAAEADLSNMERVSLSTADPQGVTYAELSTSALSEAASDTTQEPPGSHEYAALKV

SEQ ID NO: 14154 - protein, 174 aa, Homo Sapiens
MTAEFLSLLCLGLCLGYEDEKKNEKPPKPSLHAWPSSVVEAESNVTLKCQAHSQNVTFVLRKVNDSGYKQEQSSAENEAEFPFTDLKPKDAGRYFCAYKTTASHEWSESSEHLQLVVTDKHDELEAPSMKTDTRTIFVAIFSCISILLLFLSVFIIYRCSQHSELRERKGREGE

SEQ ID NO: 14155 - protein, 236 aa, Homo Sapiens
MTAEFLSLLCLGLCLGYEDEKKNEKPPKPSLHAWPSSVVEAESNVTLKCQAHSQNVTFVLRKVNDSGYKQEQSSAENEAEFPFTDLKPKDAGRYFCAYKTTASHEWSESSEHLQLVVTDKHDELEAPSMKTDTRTIFVAIFSCISILLLFLSVFIIYRCSQHSSSSEESTKRTSHSKLPEQEAAEADLSNMERVSLSTADPQGVTYAELSTSALSEAASDTTQEPPGSHEYAALKV

SEQ ID NO: 14156 - protein, 205 aa, Homo Sapiens
MTAEFLSLLCLGLCLGYEDEKKNEKPPKPSLHAWPSSVVEAESNVTLKCQAHSQNVTFVLRKVNDSGYKQEQSSAENEAEFPFTDLKPKDAGRYFCAYKTTASHEWSESSEHLQLVVTDKHDELEAPSMKTGSSSEESTKRTSHSKLPEQEAAEADLSNMERVSLSTADPQGVTYAELSTSALSEAASDTTQEPPGSHEYAALKV

SEQ ID NO: 14157 - protein, 143 aa, Homo Sapiens
MTAEFLSLLCLGLCLGYEDEKKNEKPPKPSLHAWPSSVVEAESNVTLKCQAHSQNVTFVLRKVNDSGYKQEQSSAENEAEFPFTDLKPKDAGRYFCAYKTTASHEWSESSEHLQLVVTDKHDELEAPSMKTVAHVCNTRTLGR

SEQ ID NO: 14158 - protein, 229 aa, Homo Sapiens
MTAEFLSLLCLGLCLGYEDEKKNEKPPKPSLHAWPSSVVEAESNVTLKCQAHSQNVTFVLRKVNDSGYKQEQSSAENEAEFPFTDLKPKDAGRYFCAYKTTASHEWSESSEHLQLVVTGSLPEPLLSVNVDPGMTPGLRTLRCLTPYNGTECIVIALLKMGIPEPLQVRQVRKNQTDFMLWNVTSNDSGNYSCVYYLSNSSHLASFPSNKLEIWVTDKHDELEAPSMKT

SEQ ID NO: 14159 - protein, 240 aa, Homo Sapiens
MMGIFLVYVGFVFFSVLYVQQGLSSQAKFTEFPRNVTATEGQNVEMSCAFQSGSASVYLEIQWWFLRGPEDLDPGAEGAGAQVELLPDRDPDSDGTKISTVKVQGNDISHKLQISKVRKKDEGLYECRVTDANYGELQEHKAQAYLKVNANSHARRMQAFEASPMWLQDMKPRKNVSAAIPSSIHGSANQRTHSTSSPQVVAKIPKQSPQSAKSKSPVKSTERTAKLTLNSKHHPAPTVL

SEQ ID NO: 14160 - protein, 236 aa, Homo Sapiens
MMGIFLVYVGFVFFSVLYVQQGLSSQAKFTEFPRNVTATEGQNVEMSCAFQSGSASVYLEIQWWFLRGPEDLDPGAEGAGAQVELLPDRDPDSDGTKISTVKVQGNDISHKLQISKVRKKDEGLYECRVTDANYGELQEHKAQAYLKVNANSHARRMQAFEASPMWLQDMKPRKNVSAAIPSSIHGSANQRTHSTSSPQVVAKIPKQSPQSGARIATSHGLSVLLLVCGFVKGALL

SEQ ID NO: 14161 - protein, 244 aa, Homo Sapiens
MMGIFLVYVGFVFFSVLYVQQGLSSQAKFTEFPRNVTATEGQNVEMSCAFQSGSASVYLEIQWWFLRGPEDLDPGAEGAGAQVELLPDRDPDSDGTKISTVKVQGNDISHKLQISKVRKKDEGLYECRVTDANYGELQEHKAQAYLKVNANSHARRMQAFEASPMWLQDMKPRKNVSAAIPSSIHGSANQRTHSTSSPQVVAKIPKQSPQSGMETHFEPFILPLTNAPQKGQSYRVDRFMNGDF

SEQ ID NO: 14162 - protein, 309 aa, Homo Sapiens
MMGIFLVYVGFVFFSVLYVQQGLSSQAKFTEFPRNVTATEGQNVEMSCAFQSGSASVYLEIQWWFLRGPEDLDPGAEGAGAQVELLPDRDPDSDGTKISTVKVQGNDISHKLQISKVRKKDEGLYECRVTDANYGELQEHKAQAYLKVNANSHARRMQAFEASPMWLQDMKPRKNVSAAIPSSIHGSANQRTHSTSSPQVVAKIPKQSPQSVSPILPEVKHLHRPPLLVLPFFSLSSLFSTDPLPTFPTSHRTVKRLPAPLPQPGHGSTPGVQSCVLAPPAKSKSPVKSTERTAKLTLNSKHHPAPTVL

SEQ ID NO: 14163 - protein, 285 aa, Homo Sapiens
MEQRNRLGALGYLPPLLLHALLLFVADAAFTEVPKDVTVREGDDIEMPCAFRASGATSYSLEIQWWYLKEPPRELLHELALSVPGARSKVTNKDATKISTVRVQGNDISHRLRLSAVRLQDEGVYECRVSDYSDDDTQEHKAQAMLRVLSRFAPPNMQAAEAVSHIQSSGPRRHGPASAANANNAGAASRTTSEPGRGDKSPPPGSPPAAIDPAVPEAAAASAAHTPTTTVAAAAAASSASPPSGQAVLLRQRHGSGTGRSYTTDPLLSLLLLALHKFLRLLLGH

SEQ ID NO: 14164 - protein, 204 aa, Homo Sapiens
MGAPLAVALGALHYLALFLQLGGATRPAGHAPWDNHVSGHALFTETPHDMTARTGEDVEMACSFRGSGSPSYSLEIQWWYVRSHRDWTDKQAWASNQLKASQQEDAGKEATKISVVKVVGSNISHKLRLSRVKPTDEGTYECRVIDFSDGKARHHKVKAYLRVQPGENSVLHLPEAPPAAPAPPPPKPGKELRKRSVDQEACSL

SEQ ID NO: 14165 - protein, 149 aa, Homo Sapiens
MGAPLAVALGALHYLALFLQLGGATRPAGHAPWDNHVSGHALFTETPHDMTARTGEDVEMACSFRGSGSPSYSLEIQWWYVRSHRDWTDKQAWASNQVVKVVGSNISHKLRLSRVKPTDEGTYECRVIDFSDGKARHHKVKAYLRVQPG

SEQ ID NO: 14166 - protein, 132 aa, Homo Sapiens
MGAPLAVALGALHYLALFLQLGGATRPAGHAPWDNHVSGHGGQGGGQQHLPQAAPVPGEAHGRRHLRVPRHRLQRRQGPAPQGQGLPAGAARGELRPASARSPSRRARPAAPQARQGAEEALGGPGGLQPLD

SEQ ID NO: 14167 - protein, 191 aa, Homo Sapiens
MRLLALAAAALLARAPAPEVCAALNVTVSPGPVVDYLEGENATLLCHVSQKRRKDSLLAVRWFFAHSFDSQEALMVKMTKLRVVQYYGNFSRSAKRRRLRLLEEQRGALYRLSVLTLQPSDQGHYVCRVQEISRHRNKWTAWSNGSSATEMRGVSSHPVERGAFLGISLVILPHSLPFTADLTMASFLQSS

SEQ ID NO: 14168 - protein, 320 aa, Homo Sapiens
MRLLALAAAALLARAPAPEVCAALNVTVSPGPVVDYLEGENATLLCHVSQKRRKDSLLAVRWFFAHSFDSQEALMVKMTKLRVVQYYGNFSRSAKRRRLRLLEEQRGALYRLSVLTLQPSDQGHYVCRVQEISRHRNKWTAWSNGSSATEMRVISLKASEESSFEKTKETWAFFEDLYVYAVLVCCVGILSILLFMLVIVWQSVFNKRKSRVRHYLVKCPQNSSGETVTSVTSLAPLQPKKGKRQKEKPDIPPAVPAKAPIAPTFHKPKLLKPQRKVTLPKIAEENLTYAELELIKPHRAAKGAPTSTVYAQILFEENKL

SEQ ID NO: 14169 - protein, 118 aa, Homo Sapiens
MAPLRPLLILALLAWVALADQESCKGRCTEGFNVDKKCQCDELCSYYQSCCTDYTAECKPQVTRGDVFTMPEDEYTVYDDGEEKNNATVHEQVGGPSLTSDLQAQSKGNPEQTPVLKP

SEQ ID NO: 14170 - protein, 478 aa, Homo Sapiens
MAPLRPLLILALLAWVALADQESCKGRCTEGFNVDKKCQCDELCSYYQSCCTDYTAECKPQVTRGDVFTMPEDEYTVYDDGEEKNNATVHEQVGGPSLTSDLQAQSKGNPEQTPVLKPEEEAPAPEVGASKPEGIDSRPETLHPGRPQPPAEEELCSGKPFDAFTDLKNGSLFAFRGQYCYELDEKAVRPGYPKLIRDVWGIEGPIDAAFTRINCQGKTYLFKGSQYWRFEDGVLDPDYPRNISDGFDGIPDNVDAALALPAHSYSGRERVYFFKGKQYWEYQFQHQPSQEECEGSSLSAVFEHFAMMQRDSWEDIFELLFWGRTSAGTRQPQFISRDWHGVPGQVDAAMAGRIYISGMAPRPSLAKKQRFRHRNRKGYRSQRGHSRGRNQNSRRPSRATWLSLFSSEESNLGANNYDDYRMDWLVPATCEPIQSVFFFSGDKYYRVNLRTRRVDTVDPPYPRSIAQYWLGCPAPGHL

SEQ ID NO: 14171 - protein, 167 aa, Homo Sapiens
MFLLDSSASVSHYEFSRVREFVGQLVAPLPLGTGALRASLVHVGSRPYTEFPFGQHSSGEAAQDAVRASAQRMGDTHTGLALVYAKEQLFAEASGARPGVPKVLVWVTDGGSSDPVGPPMQELKDLGVTVFIVSTGRGNFLELSAAASAPAEKHLHFVDVDDLHIIV

SEQ ID NO: 14172 - protein, 64 aa, Homo Sapiens
MLPWTALGLALSLRLALARSGAERGAQGPGRHRVHCQHRPRQLPGAVSRCLSPCREAPALCGRG

SEQ ID NO: 14173 - protein, 148 aa, Homo Sapiens
MLPWTALGLALSLRLALARSGAERGPLGEGKHPLKESWGPGGPCLAVGLSGGPTPEAEHSSFPPGPPASAPRGDLMFLLDSSASVSHYEFSRVREFVGQLVAPLPLGTGALRASLVHVGSRPYTEFPFGQHSSGEAAQDAVRASAQRM

SEQ ID NO: 14174 - protein, 445 aa, Homo Sapiens
MLPWTALGLALSLRLALARSGAERGPPASAPRGDLMFLLDSSASVSHYEFSRVREFVGQLVAPLPLGTGALRASLVHVGSRPYTEFPFGQHSSGEAAQDAVRASAQRMGDTHTGLALVYAKEQLFAEASGARPGVPKVLVWVTDGGSSDPVGPPMQELKDLGVTVFIVSTGRGNFLELSAAASAPAEKHLHFVDVDDLHIIVQELRGSILDAMRPQQLHATEITSSGFRLAWPPLLTADSGYYVLELVPSAQPGAARRQQLPGNATDWIWAGLDPDTDYDVALVPESNVRLLRPQILRVRTRPGEAGPGASGPESGAGPAPTQLAALPAPEEAGPERIVISHARPRSLRVSWAPALGSAAALGYHVQFGPLRGGEAQRVEVPAGRNCTTLQGLAPGTAYLVTVTAAFRSGRESALSAKACTPDGPRPRPRPVPRAPTPGTASREP

SEQ ID NO: 14175 - protein, 421 aa, Homo Sapiens
MEAHVFQKDWTATSASARWPLEGRLTVVALKLSLECRVDLLFLLDSSAGTTLDGFLRAKVFVKRFVRAVLSEDSRARVGVATYSRELLVAVPVGEYQDVPDLVWSLDGIPFRGGPTLTGSALRQAAERGFGSATRTGQDRPRRVVVLLTESHSEDEVAGPARHARARELLLLGVGSEAVRAELEEITGSPKHVMVYSDPQDLFNQIPELQGKLCSRQRPGCRTQALDLVFMLDTSASVGPENFAQMQSFVRSCALQFEVNPDVTQVGLVVYGSQVQTAFGLDTKPTRAAMLRAISQAPYLGGVGSAGTALLHIYDKVMTVQRGARPGVPKAVVVLTGGRGAEDAAVPAQKLRNNGISVLVVGVGPVLSEGLRRLAGPRDSLIHVAAYADLRYHQDVLIEWLCGGEWGNPHPQGCPHGRPSA

SEQ ID NO: 14176 - protein, 755 aa, Homo Sapiens
MPPFLLLEAVCVFLFSRVPPSLPLQEVHVSKETIGKISAASKMMWCSAAVDIMFLLDGSNSVGKGSFERSKHFAITVCDGLDISPERVRVGAFQFSSTPHLEFPLDSFSTQQEVKARIKRMVFKGGRTETELALKYLLHRGLPGGRNASVPQILIIVTDGKSQGDVALPSKQLKERGVTVFAVGVRFPRWEELHALASEPRGQHVLLAEQVEDATNGLFSTLSSSAICSSATPDCRVEAHPCEHRTLEMVREFAGNAPCWRGSRRTLAVLAAHCPFYSWKRVFLTHPATCYRTTCPGPCDSQPCQNGGTCVPEGLDGYQCLCPLAFGGEANCALKLSLECRVDLLFLLDSSAGTTLDGFLRAKVFVKRFVRAVLSEDSRARVGVATYSRELLVAVPVGEYQDVPDLVWSLDGIPFRGGPTLTGSALRQAAERGFGSATRTGQDRPRRVVVLLTESHSEDEVAGPARHARARELLLLGVGSEAVRAELEEITGSPKHVMVYSDPQDLFNQIPELQGKLCSRQRPGCRTQALDLVFMLDTSASVGPENFAQMQSFVRSCALQFEVNPDVTQVGLVVYGSQVQTAFGLDTKPTRAAMLRAISQAPYLGGVGSAGTALLHIYDKVMTVQRGARPGVPKAVVVLTGGRGAEDAAVPAQKLRNNGISVLVVGVGPVLSEGLRRLAGPRDSLIHVAAYADLRYHQDVLIEWLCGEAKQPVNLCKPSPCMNEGSCVLQNGSYRCKCRDGWEGPHCENRFLRRP

SEQ ID NO: 14177 - protein, 1024 aa, Homo Sapiens
MLVTGPCLLAGLESPSHALRADAPPHASSAATICVTLAEGHHCDRALEILLHPSEPHQPHLMLEGGSLSSAEYEARVRARRDFQRLQRRDSDGDRQVWFLQRRFHKDILLNPVLALSFCPDLSSKPGHLGTATRELLFLLDSSSVAHKDAIVLAVKSLPPQTLINLAVFGTLVQPLFPESRPCSDDAVQLICESIETLQVPSGPPDVLAALDWAVGQPQHRAYPRQLFLLTAASPMAATTHRTLELMRWHRGTARCFSFGLGPTCHQLLQGLSALSRGQAYFLRPGQRLQPMLVQALRKALEPALSDISVDWFVPDTVEALLTPREIPALYPGDQLLGYCSLFRVDGFRSRPPGGQEPGWQSSGGSVFPSPEEAPSAASPGTEPTGTSEPLGTGTVSAELSSPWAARDSEQTGTDALTDPVTDPGPNPSDTAIWRRIFQSSYIREQYVLTHCSASPEPGPGSTGSSESPGSQGPGSPEGSAPLEPPSQQGCRSLAWGEPAGSRSCPLPAPTPAPFKVGALSTEVLGRQHRAALAGRSLSSPPGRANQVPGRPRKPSLGAILDGPSPEPGQQLGQGLDDSGNLLSPAPMDWDMLMEPPFLFTAVPPSGELAPPAVPPQAPRCHVVIRGLCGEQPMCWEVGVGLETLWGPGDGSQPPSPPVREAAWDQALHRLTAASVVRDNEQLALRGGAETTADRGHARRCWLRALQTSKVSSAPSCFTCPVAVDATTREVLPGALQVCSSEPAEPPGTPPASHSHLDAAPLPTVVYSKGLQRGSPAGAWDSDQNGNSKRALGDPATPTEGPRRPPPRPPCRLSMGRRHKLCSPDPGQANNSEGSDHDYLPLVRLQEAPGSFRLDAPFCAAVRISQERLCRASPFAVHRASLSPTSASLPWALLGPGVGQGDSATASCSPSPSSGSEGPGQVDSGRGSDTEASEGAEGLGGTDLRGRTWATAVALAWLEHRCAAAFDEWELTAAKADCWLRAQHLPDGLDLAALKAAARGLFLLLRHWDQNLQLHLLCYSPANV

SEQ ID NO: 14178 - protein, 1242 aa, Homo Sapiens
MPGLYCPSSWTPLPLTDSWVRACANGPCLSVRARLTYRNPQPQPVDGVFVYPLAEAEVVSGFEAEAAGRRVSFQLQSRRRSQAACCRALGPGLGTPTPRRCAQGHLVLDLAQARSTLVLPTGIIAAAGTMTVTLHSSRELPSRPDGVLHVALPTVLTPLAPPGPPGPPRPPGLCDDSPTSCFGVGSLQEEGLAWEELAAPRDVFSGPARCPAPYTFSFEMLVTGPCLLAGLESPSHALRADAPPHASSAATICVTLAEGHHCDRALEILLHPSEPHQPHLMLEGGSLSSAEYEARVRARRDFQRLQRRDSDGDRQVWFLQRRFHKDILLNPVLALSFCPDLSSKPGHLGTATRELLFLLDSSSVAHKDAIVLAVKSLPPQTLINLAVFGTLVQPLFPESRPCSDDAVQLICESIETLQVPSGPPDVLAALDWAVGQPQHRAYPRQLFLLTAASPMAATTHRTLELMRWHRGTARCFSFGLGPTCHQLLQGLSALSRGQAYFLRPGQRLQPMLVQALRKALEPALSDISVDWFVPDTVEALLTPREIPALYPGDQLLGYCSLFRVDGFRSRPPGGQEPGWQSSGGSVFPSPEEAPSAASPGTEPTGTSEPLGTGTVSAELSSPWAARDSEQSTDALTDPVTDPGPNPSDTAIWRRIFQSSYIREQYVLTHCSASPEPGPGSTGSSESPGSQGPGSPEGSAPLEPPSQQGCRSLAWGEPAGSRSCPLPAPTPAPFKVGALSTEVLGRQHRAALAGRSLSSPPGRANQVPGRPRKPSLGAILDGPSPEPGQQLGQGLDDSGNLLSPAPMDWDMLMEPPFLFTAVPPSGELAPPAVPPQAPRCHVVIRGLCGEQPMCWEVGVGLETLWGPGDGSQPPSPPVREAAWDQALHRLTAASVVRDNEQLALRGGAETTADRGHARRCWLRALQTSKVSSAPSCFTCPVAVDATTREVLPGALQVCSSEPAEPPGTPPASHSHLDAAPLPTVVYSKGLQRGSPAGAWDSDQNGNSKRALGDPATPTEGPRRPPPRPPCRLSMGRRHKLCSPDPGQANNSEGSDHDYLPLVRLQEAPGSFRLDAPFCAAVRISQERLCRASPFAVHRASLSPTSASLPWALLGPGVGQGDSATASCSPSPSSGSEGPGQVDSGRGSDTEASEGAEGLGGTDLRGRTWATAVALAWLEHRCAAAFDEWELTAAKADCWLRAQHLPDGLDLAALKAAARGLFLLLRHWDQNLQLHLLCYSPANV

SEQ ID NO: 14179 - protein, 891 aa, Homo Sapiens
MLPTEVPQSHPGPSALLLLQLLLPPTSAFFPNIWSLLAAPGSITHQDLTEEAALNVTLQLFLEQPPPGRPPLRLEDFLGRTLLADDLFAAYFGPGSSRRFRAALGEVSRANAAQDFLPTSRNDPDLHFDAERLGQGRARLVGALRETVVAARALDHTLARQRLGAALHALQDFYSHSNWVELGEQQPHPHLLWPRQELQNLAQVADPTCSDCEELSCPRNWLGFTLLTSGYFGTHPPKPPGKCSHGGHFDRSSSQPPRGGINKDSTSPGFSPHHMLHLQAAKLALLASIQAFSLLRSRLGDRDFSRLLDITPASSLSFVLDTTGSMGEEINAAKIQARHLVEQRRGSPMEPVHYVLVPFHDPGFGPVFTTSDPDSFWQQLNEIHALGGGDEPEMCLSALQLALLHTPPLSDIFVFTDASPKDAFLTNQVESLTQERRCRVTFLVTEDTSRVQGRARREILSPLRFEPYKAVALASGGEVIFTKDQHIRDVAAIVGESMAALVTLPLDPPVVVPGQPLVFSVDGLLQKITVRIHGDISSFWIKNPAGVSQGQEEGGGPLGHTRRFGQFWMVTMDDPPQTGTWEIQVTAEDTPGVRVQAQTSLDFLFHFGIPMEDGPHPGLYPLTQPVAGLQTQLLVEVTGLGSRANPGDPQPHFSHVILRGVPEGAELGQVPLEPVGPPERGLLAASLSPTLLSTPRPFSLELIGQDAAGRRLHRAAPQPSTVVPVLLELSGPSGFLAPGSKVPLSLRIASFSGPQDLDLRTFVNPSFSLTSNLSRAHLELNESAWGRLWLEVPDSAAPDSVVMVTVTAGGREANPVPPTHAFLRLLVSAPAPQDRHTTPTGSSDPILTTATPAFSPFTLVTQGRAGAGLAAGSPWWGTVGGVLLLLGLASW

SEQ ID NO: 14180 - protein, 325 aa, Homo Sapiens
MPSSTAMAVGALSSSLLVTCCLMVALCSPSIPLEKLAQAPEQPGQEKREHASRDGPGRVNELGRPARDEGGSGRDWKSKSGRGLAGREPWSKLKQAWVSQGGGAKAGDLQVRPRGDTPQAEALAAAAQDAIGPELAPTPEPPEEYVYPDYRGKGCVDESGFVYAIGEKFAPGPSACPCLCTEEGPLCAQPECPRLHPRCIHVDTSQCCPQCKERKNYCEFRGKTYQTLEEFVVSPCERCRCEANGEVLCTVSACPQTECVDPVYEPDQCCPICKNGPNCFAETAVIPAGREVKTDECTICHCTYEEGTWRIERQAMCTRHECRQM

SEQ ID NO: 14181 - protein, 222 aa, Homo Sapiens
MALHIHEACILLLVIPGLVTSAAISHEDYPADEGDQISSNDNLIFDDYRGKGCVDDSGFVYKLGERFFPGHSNCPCVCALDGPVCDQPECPKIHPKCTKVEHNGCCPECKEVKNFCEYHGKNYKILEEFKPSPCEWCRCEPSNEVHCVVADCAVPECVNPVYEPEQCCPVCKNGPNCFAGTTIIPAGIEVKVDECNICHCHNGDWWKPAQCSKRECQGKQTV

SEQ ID NO: 14182 - protein, 139 aa, Homo Sapiens
MALHIHEACILLLVIPGLVTSAAISHEDYPADEGDQISSNDNLIFDDYRGKGCVDDSGFVYKLGERFFPGHSNCPCVCALDGPVCDQPECPKIHPKCTKVEHNGCCPECKEVKNFCEYHGKNYKILEEFKVQTALQERR

SEQ ID NO: 14183 - protein, 670 aa, Homo Sapiens [sequence omitted]

SEQ ID NO: 14184 - protein, 420 aa, Homo Sapiens
MPCPELACPREEWRLGPGQCCFTCQEPTPSTGCSLDDNGVEFPIGQIWSPGDPCELCICQADGSVSCKRTDCVDSCPHPIRIPGQCCPDCSAGCTYTGRIFYNNETFPSVLDPCLSCICLLGSVACSPVDCPITCTYPFHPDGECCPVCRDCNYEGRKVANGQVFTLDDEPCTRCTCQLGEVSCEKVPCQRACADPALLPGDCCSSCPDSLSPLEEKQGLSPHGNVAFSKAGRSLHGDTEAPVNCSSCPGPPTASPSRPVLHLLQLLLRTNLMKTQTLPTSPAGAHGPHSLALGLTATFPGEPGASPRLSPGPSTPPGAPTLPLASPGAPQPPPVTPERSFSASGAQIVSRWPPLPGTLLTEASALSMMDPSPSKTPITLLGPRVLSPTTSRLSTALAATTHPGPQQPPVGASRGEESTM

SEQ ID NO: 14185 - protein, 219 aa, Homo Sapiens
MWAGLLLRAACVALLLPGAPARGYTGRKPPGHFAAERRRLGPHVCLSGFGSGCCPGWAPSMGGGHCTLPLCSFGCGSGICIAPNVCSCQDGEQGATCPETHGPCGEYGCDLTCNHGGCQEVARVCPVGFSMTETAVGIRCTDIDECVTSSCEGHCVNTEGGFVCECGPGMQLSADRHSCQDTDECLGTPCQQRCKNSIGSYKCSCRTGFHLHGNRHSCM

SEQ ID NO: 14186 - protein, 955 aa, Homo Sapiens
MWAGLLLRAACVALLLPGAPARGYTGRKPPGHFAAERRRLGPHVCLSGFGSGCCPGWAPSMGGGHCTLPLCSFGCGSGICIAPNVCSCQDGEQGATCPETHGPCGEYGCDLTCNHGGCQEVARVCPVGFSMTETAVGIRCTDIDECVTSSCEGHCVNTEGGFVCECGPGMQLSADRHSCQDTDECLGTPCQQRCKNSIGSYKCSCRTGFHLHGNRHSCVDVNECRRPLERRVCHHSCHNTVGSFLCTCRPGFRLRADRVSCEAFPKAVLAPSAILQPRQHPSKMLLLLPEAGRPALSPGHSPPSGAPGPPAGVRTTRLPSPTPRLPTSSPSAPVWLLSTLLATPVPTASLLGNLRPPSLLQGEVMGTPSSPRGPESPRLAAGPSPCWHLGAMHESRSRWTEPGCSQCWCEDGKVTCEKVRCEAACSHPIPSRDGGCCPSCTGCFHSGVVRAEGDVFSPPNENCTVCVCLAGNVSCISPECPSGPCQTPPQTDCCTCVPVRCYFHGRWYADGAVFSGGGDECTTCVCQNGEVECSFMPCPELACPREEWRLGPGQCCFTCQEPTPSTGCSLDDNGVEFPIGQIWSPGDPCELCICQADGSVSCKRTDCVDSCPHPIRIPGQCCPDCSAGCTYTGRIFYNNETFPSVLDPCLSCICLLGSVACSPVDCPITCTYPFHPDGECCPVCRDCNYEGRKVANGQVFTLDDEPCTRCTCQLGEVSCEKVPCQRACADPALLPGDCCSSCPDSLSPLEEKQGLSPHGNVAFSKAGRSLHGDTEAPVNCSSCPGPPTASPSRPVLHLLQLLLRTNLMKTQTLPTSPAGAHGPHSLALGLTATFPGEPGASPRLSPGPSTPPGAPTLPLASPGAPQPPPVTPERSFSASGAQIVSRWPPLPGTLLTEASALSMMDPSPSKTPITLLGPRVLSPTTSRLSTALAATTHPGPQQPPVGASRGEESTM

SEQ ID NO: 14187 - protein, 173 aa, Homo Sapiens
MWAGLLLRAACVALLLPGAPARGYTGRKPPGHFAAERRRLGPHVCLSGFGSGCCPGWAPSMGGGHCTLRKCLSLCPKSSPPAVCVASPQSLVRGADGRPQFLVSHLHFSSQPSAPSAVGVASASLPMSAPARMESKGPPAQKPMDHVGSTAVTLPATMEAVRRWPECAPWASR

SEQ ID NO: 14188 - protein, 1590 aa, Homo Sapiens
MPGGACVLVIALMFLAWGEAQECSPGGHQFLRSPYRSVRFDSWHLQQSAVQDLICDHSLSPGWYRFLILDRPAEMPTKCVEMNHCGTQAPIWLSLRDSETLPSPGEIKQLTACATWQFLFSTTKDCCLFQIPVSVRNCGNFSVYLLQPTQGCMGYCAEAISDARLHPCGSDETETGGDCVRQLAASLPPPPAGRPEVLVELIESRLFCRCSFDVPATKNSVGFHIAWSRLSSQEVKEELTQETTVQAFSLLELDGINLRLGDRIFCSASVFFLENPHVQSVAIESQEFFAGFKLQPELSTISEDGKEYYLRIESTVPIICSEFSELDQECKISLKLKTIGQGREHLGLNLALSSCHVDLLQTSSCANGTCSHTFVYYTAVTDFSRDGDRVSNIVVQPIVNEDFLWNNYIPDSIQIKVKDVPTAYCYTFTDPHIITFDGRVYDNFKTGTFVLYKSMSRDFEVHVRQWDCRSLHYPVSCNCGFVAQEGGDIVTFDMCNGQLRESQPYLFIKSQDVTRNIKISESYLGRKVTIWFSSGAFIRADLGEWGMSLTIRAPSVDYRNTLGLCGTFDENPENDFHDKNGMQIDQNFNNYVAFINEWRILPGKSMSDTLPVSMTSPGKPSYCSCSLDTAAYPSSEDLDSVSRSEIALGCKDLNHVSLSSLIPELDVTSEYINSDTLVREINKHTSPEEYNLNLFLQEKKHINLTKLGLNVQKHPGNEKEDSLQYLANKKYTQGRGSHSQEMRYNRQNRWKRQNFHEFPPLFAFPSLSQTDLEELTYFFPEDHAEDVQQEFFPSWPTPSGLTEYSTLTLCQETLANSSIGRLCLAFLGKRLDSVIEMCVKDVLLKDDLSWAEAGVALLENECEKRIVEEGKYNTEEYGTSIEDILSVLKCPNLCSGNGQCMEWGCACSPSFSSYDCSDSYDKAPEITELGNAGFCDVQKYNCMMVRVFGKGFKELPSIKCEVTKLQYNSSEWMPGEPIYTQTVFHNSRAVDCQLPTDVQQFDTMDLVGGKPTGKWQLKVSNDGYKFSNPKITVIYDGACQVCGLYKNDSCTIKENVCIIDGLCYVEGDKNPTSPCLICRPKISRFTWSFLENNQPPVIQALQDKLQTFYGENFEYQFVAFDPEGSDIHFTLDSGPEGASVSSAGLFMWKTDLLTTQQITVRLNDDCDAETRVTIEVTVKSCDCLNGGSCVSDRNFSPGSGVYLCVCLPGFHGSLCEVDISGCQSNPCGLGSYISGFHSYSCDCPPELKVETQFVNQFTTQTVVLTRSDKSVNKEEDDKNAQGRKRHVKPTSGNAFTICKYPCGKSRECVAPNICKCKPGYIGSNCQTALCDPDCKNHGKCIKPNICQCLPGHGGATCDEEHCNPPCQHGGTCLAGNLCTCPYGFVGPRCETMVCNRHCENGGQCLTPDICQCKPGWYGPTCSTALCDPVCLNGGSCNKPNTCLCPNGFFGEHCQNAFCHPPCKNGGHCMRNNVCVCREGYTGRRFQKSICDPTCMNGGKCVGPSTCSCPSGWSGKRCNTPICLQKCKNGGECIAPSICHCPSSWEGVRCQIPICNPKCLYGGRCIFPNVCSCRTEYSGVKCEKKIQIRRH

SEQ ID NO: 14189 - protein, 1302 aa, Homo Sapiens
MPGGACVLVIALMFLAWGEAQECSPGGHQFLRSPYRSVRFDSWHLQQSAVQDLICDHSLSPGWYRFLILDRPAEMPTKCVEMNHCGTQAPIWLSLRDSETLPSPGEIKQLTACATWQFLFSTTKDCCLFQIPVSVRNCGNFSVYLLQPTQGCMGYCAEAISDARLHPCGSDETETGGDCVRQLAASLPPPPAGRPEVLVELIESRLFCRCSFDVPATKNSVGFHIAWSRLSSQEVKEELTQETTVQAFSLLELDGINLRLGDRIFCSASVFFLENPHVQSVAIESQEFFAGFKLQPELSTISEDGKEYYLRIESTVPIICSEFSELDQECKISLKLKTIGQGREHLGLNLALSSCHVDLLQTSSCANGTCSHTFVYYTAVTDFSRDGDRVSNIVVQPIVNEDFLWNNYIPDSIQIKVKDVPTAYCYTFTDPHIITFDGRVYDNFKTGTFVLYKSMSRDFEVHVRQWDCRSLHYPVSCNCGFVAQEGGDIVTFDMCNGQLRESQPYLFIKSQDVTRNIKISESYLGRKVTIWFSSGAFIRADLGEWGMSLTIRAPSVDYRNTLGLCGTFDENPENDFHDKNGMQIDQNFNNYVAFINEWRILPGKSMSDTLPVSMTSPGKPSYCSCSLDTAAYPSSEDLDSVSRSEIALGCKDLNHVSLSSLIPELDVTSEYINSDTLVREINKHTSPEEYNLNLFLQEKKHINLTKLGLNVQKHPGNEKEDSLQYLANKKYTQGRGSHSQEMRYNRQNRWKRQNFHEFPPLFAFPSLSQTDLEELTYFFPEDHAEDVQQEFFPSWPTPSGLTEYSTLTLCQETLANSSIGRLCLAFLGKRLDSVIEMCVKDVLLKDDLSWAEAGVALLENECEKRIVEEGKYNTEEYGTSIEDILSVLKCPNLCSGNGQCMEWGCACSPSFSSYDCSDSYDKAPEITELGNAGFCDVQKYNCMMVRVFGKGFKELPSIKCEVTKLQYNSSEWMPGEPIYTQTVFHNSRAVDCQLPTDVQQFDTMDLVGGKPTGKWQLKVSNDGYKFSNPKITVIYDGACQVCGLYKNDSCTIKENVCIIDGLCYVEGDKNPTSPCLICRPKISRFTWSFLENNQPPVIQALQDKLQTFYGENFEYQFVAFDPEGSDIHFTLDSGPEGASVSSAGLFMWKTDLLTTQQITVRLNDDCDAETRVTIEVTVKSCDCLNGGSCVSDRNFSPGSGVYLCVCLPGFHGSLCEVDISGCQSNPCGLGSYISGFHSYSCDCPPELKGKNCQEDVDECDSKPCFEGVACLNTFGSYHCGSCPEGFYGDGKICHGKSFYFLL

SEQ ID NO: 14190 - protein, 352 aa, Homo Sapiens
MPGGACVLVIALMFLAWGEAQECSPGGHQFLRSPYRSVRFDSWHLQQSAVQDLICDHSLSPGWYRFLILDRPAEMPTKCVEMNHCGTQAPIWLSLRDSETLPSPGEIKQLTACATWQFLFSTTKDCCLFQIPVSVRNCGNFSVYLLQPTQGCMGYCAEAISDARLHPCGSDETETGGDCVRQLAASLPPPPAGRPEVLVELIESRLFCRCSFDVPATKNSVGFHIAWSRLSSQEVKEELTQETTVQAFSLLELDGINLRLGDRIFCSASVFFLENPHVQSVAIESQEFFAGFKLQPELSTISEDGKEYYLRIESTVPIICSEFSELDQECKISLKLKTIGQDLVFFWGIYPC

SEQ ID NO: 14191 - protein, 170 aa, Homo Sapiens
MPGGACVLVIALMFLAWGEAQECSPGGHQFLRSPYRSVRFDSWHLQQSAVQDLICDHSLSPGWYRFLILDRPAEMPTKCVEMNHCGTQAPIWLSLRDSETLPSPGEIKQLTACATWQFLFSTTKDCCLFQIPVSVRNCGNFSVYLLQPTQGCMGYCAEGFFAKIVKSPHT

SEQ ID NO: 14192 - protein, 944 aa, Homo Sapiens
MSLTIRAPSVDYRNTLGLCGTFDENPENDFHDKNGMQIDQNFNNYVAFINEWRILPGKSMSDTLPVSMTSPGKPSYCSCSLDTAAYPSSEDLDSVSRSEIALGCKDLNHVSLSSLIPELDVTSEYINSDTLVREINKHTSPEEYNLNLFLQEKKHINLTKLGLNVQKHPGNEKEDSLQYLANKKYTQGRGSHSQEMRYNRQNRWKRQNFHEFPPLFAFPSLSQTDLEELTYFFPEDHAEDVQQEFFPSWPTPSGLTEYSTLTLCQETLANSSIGRLCLAFLGKRLDSVIEMCVKDVLLKDDLSWAEAGVALLENECEKRIVEEGKYNTEEYGTSIEDILSVLKCPNLCSGNGQCMEWGCACSPSFSSYDCSDSYDKAPEITELGNAGFCDVQKYNCMMVRVFGKGFKELPSIKCEVTKLQYNSSEWMPGEPIYTQTVFHNSRAVDCQLPTDVQQFDTMDLVGGKPTGKWQLKVSNDGYKFSNPKITVIYDGACQVCGLYKNDSCTIKENVCIIDGLCYVEGDKNPTSPCLICRPKISRFTWSFLENNQPPVIQALQDKLQTFYGENFEYQFVAFDPEGSDIHFTLDSGPEGASVSSAGLFMWKTDLLTTQQITVRLNDDCDAETRVTIEVTVKSCDCLNGGSCVSDRNFSPGSGVYLCVCLPGFHGSLCEVDISGCQSNPCGLGSYISGFHSYSCDCPPELKVETQFVNQFTTQTVVLTRSDKSVNKEEDDKNAQGRKRHVKPTSGNAFTICKYPCGKSRECVAPNICKCKPGYIGSNCQTALCDPDCKNHGKCIKPNICQCLPGHGGATCDEEHCNPPCQHGGTCLAGNLCTCPYGFVGPRCETMVCNRHCENGGQCLTPDICQCKPGWYGPTCSTALCDPVCLNGGSCNKPNTCLCPNGFFGEHCQNAFCHPPCKNGGHCMRNNVCVCREGYTGRRFQKRHL

SEQ ID NO: 14193 - protein, 166 aa, Homo Sapiens
VTVKSCDCLNGGSCVSDRNFSPGSGVYLCVCLPGFHGSLCEVDISGCQSNPCGLGSYISGFHSYSCDCPPELKGKNCQEDVDECDSKPCFEGVACLNTFGSYHCGSCPEGFYGDGKICHVETQFVNQFTTQTVVLTRSDKSVNKEEDDKNAQGRKRHVKPTSGNAF

SEQ ID NO: 14194 - protein, 60 aa, Homo Sapiens
MIPARFAGVLLALALILPETRCLQMPSPVGELRSIKVAQNCPILWGHRMRRKESKTWMDY

SEQ ID NO: 14195 - protein, 60 aa, Homo Sapiens; identical to SEQ ID NO: 14194

SEQ ID NO: 14196 - protein, 2813 aa, Homo Sapiens
MIPARFAGVLLALALILPGTLCAEGTRGRSSTARCSLFGSDFVNTFDGSMYSFAGYCSYLLAGGCQKRSFSIIGDFQNGKRVSLSVYLGEFFDIHLFVNGTVTQGDQRVSMPYASKGLYLETEAGYYKLSGEAYGFVARIDGSGNFQVLLSDRYFNKTCGLCGNFNIFAEDDFMTQEGTLTSDPYDFANSWALSSGEQWCERASPPSSSCNISSGEMQKGLWEQCQLLKSTSVFARCHPLVDPEPFVALCEKTLCECAGGLECACPALLEYARTCAQEGMVLYGWTDHSACSPVCPAGMEYRQCVSPCARTCQSLHINEMCQERCVDGCSCPEGQLLDEGLCVESTECPCVHSGKRYPPGTSLSRDCNTCICRNSQWICSNEECPGECLVTGQSHFKSFDNRYFTFSGICQYLLARDCQDHSFSIVIETVQCADDRDAVCTRSVTVRLPGLHNSLVKLKHGAGVAMDGQDVQLPLLKGDLRIQHTVTASVRLSYGEDLQMDWDGRGRLLVKLSPVYAGKTCGLCGNYNGNQGDDFLTPSGLAEPRVEDFGNAWKLHGDCQDLQKQHSDPCALNPRMTRFSEEACAVLTSPTFEACHRAVSPLPYLRNCRYDVCSCSDGRECLCGALASYAAACAGRGVRVAWREPGRCELNCPKGQVYLQCGTPCNLTCRSLSYPDEECNEACLEGCFCPPGLYMDERGDCVPKAQCPCYYDGEIFQPEDIFSDHHTMCYCEDGFMHCTMSGVPGSLLPDAVLSSPLSHRSKRSLSCRPPMVKLVCPADNLRAEGLECTKTCQNYDLECMSMGCVSGCLCPPGMVRHENRCVALERCPCFHQGKEYAPGETVKIGCNTCVCQDRKWNCTDHVCDATCSTIGMAHYLTFDGLKYLFPGECQYVLVQDYCGSNPGTFRILVGNKGCSHPSVKCKKRVTILVEGGEIELFDGEVNVKRPMKDETHFEVVESGRYIILLLGKALSVVWDRHLSISVVLKQTYQEKVCGLCGNFDGIQNNDLTSSNLQVEEDPVDFGNSWKVSSQCADTRKVPLDSSPATCHNNIMKQTMVDSSCRILTSDVFQDCNKLVDPEPYLDVCIYDTCSCESIGDCACFCDTIAAYAHVCAQHGKVVTWRTATLCPQSCEERNLRENGYECEWRYNSCAPACQVTCQHPEPLACPVQCVEGCHAHCPPGKILDELLQTCVDPEDCPVCEVAGRRFASGKKVTLNPSDPEHCQICHCDVVNLTCEACQEPGGLVVPPTDAPVSPTTLYVEDISEPPLHDFYCSRLLDLVFLLDGSSRLSEAEFEVLKAFVVDMMERLRISQKWVRVAVVEYHDGSHAYIGLKDRKRPSELRRIASQVKYAGSQVASTSEVLKYTLFQIFSKIDRPEASRITLLLMASQEPQRMSRNFVRYVQGLKKKKVIVIPVGIGPHANLKQIRLIEKQAPENKAFVLSSVDELEQQRDEIVSYLCDLAPEAPPPTLPPDMAQVTVGPGLLGVSTLGPKRNSMVLDVAFVLEGSDKIGEADFNRSKEFMEEVIQRMDVGQDSIHVTVLQYSYMVTVEYPFSEAQSKGDILQRVREIRYQGGNRTNTGLALRYLSDHSFLVSQGDREQAPNLVYMVTGNPASDEIKRLPGDIQVVPIGVGPNANVQELERIGWPNAPILIQDFETLPREAPDLVLQRCCSGEGLQIPTLSPAPDCSQPLDVILLLDGSSSFPASYFDEMKSFAKAFISKANIGPRLTQVSVLQYGSITTIDVPWNVVPEKAHLLSLVDVMQREGGPSQIGDALGFAVRYLTSEMHGARPGASKAVVILVTDVSVDSVDAAADAARSNRVTVFPIGIGDRYDAAQLRILAGPAGDSNVVKLQRIEDLPTMVTLGNSFLHKLCSGFVRICMDEDGNEKRPGDVWTLPDQCHTVTCQPDGQTLLKSHRVNCDRGLRPSCPNSQSPVKVEETCGCRWTCPCVCTGSSTRHIVTFDGQNFKLTGSCSYVLFQNKEQDLEVILHNGACSPGARQGCMKSIEVKHSALSVELHSDMEVTVNGRLVSVPYVGGNMEVNVYGAIMHEVRFNHLGHIFTFTPQNNEFQLQLSPKTFASKTYGLCGICDENGANDFMLRDGTVTTDWKTLVQEWTVQRPGQTCQPILEEQCLVPDSSHCQVLLLPLFAECHKVLAPATFYAICQQDSCHQEQVCEVIASYAHLCRTNGVCVDWRTPDFCAMSCPPSLVYNHCEHGCPRHCDGNVSSCGDHPSEGCFCPPDKVMLEGSCVPEEACTQCIGEDGVQHQFLEAWVPDHQPCQICTCLSGRKVNCTTQPCPTAKAPTCGLCEVARLRQNADQCCPEYECVCDPVSCDLPPVPHCERGLQPTLTNPGECRPNFTCACRKEECKRVSPPSCPPHRLPTLRKTQCCDEYECACNCVNSTVSCPLGYLASTATNDCGCTTTTCLPDKVCVHRSTIYPVGQFWEEGCDVCTCTDMEDAVMGLRVAQCSQKPCEDSCRSGFTYVLHEGECCGRCLPSACEVVTGSPRGDSQSSWKSVGSQWASPENPCLINECVRVKEEVFIQQRNVSCPQLEVPVCPSGFQLSCKTSACCPSCRCERMEACMLNGTVIGPGKTVMIDVCTTCRCMVQVGVISGFKLECRKTTCNPCPLGYKEENNTGECCGRCLPTACTIQLRGGQIMTLKRDETLQDGCDTHFCKVNERGEYFWEKRVTGCPPFDEHKCLAEGGKIMKIPGTCCDTCEEPECNDITARLQYVKVGSCKSEVEVDIHYCQGKCASKAMYSIDINDVQDQCSCCSPTRTEPMQVALHCTNGSVVYHEVLNAMECKCSPRKCSK

SEQ ID NO: 14197 - protein, 287 aa, Homo Sapiens
MPALCLVLCWFQGLLGEVWNAVDSGHCLQTYSLHTEAVRAARWAPCGRRILSGGFDFALHLTDLETGTQLFSGRSDFRITTLKFHPKDHNIFLCGGFSSEMKAWDIRTGKVMRSYKATIQQTLDILFLREGSEFLSSTDASTRDSADRTIIAWDFRTSAKISNQIFHERFTCPSLALHPREPVFLAQTNGNYLALFSTVWPYRMSRRRRYEGHKVEGYSVGCECSPGGDLLVTGSADGRVLMYSFRTASRACTLQGHTQACVGTTYHPVLPSVLATCSWGGDMKIWH

SEQ ID NO: 14198 - protein, 544 aa, Homo Sapiens
MTARTLSLMASLVAYDDSDSEAETEHAGSFNATGQQKDTSGVARPPGQDFASGTLDVPKAGAQPTKHGSCEDPGGYRLPLAQLGRSDWGSCPSQRLQWPGKEPQVTFPIKEPSCSSLWTSHVPASHMPLAAARFKQVKLSRNFPKSSFHAQSESETVGKNGSSFQKKKCEDCVVPYTPRRLRQRQALSTETGKGKDVEPQGPPAGRAPAPLYVGPGVSEFIQPYLNSHYKETTVPRKVLFHLRGHRGPVNTIQWCPVLSKSHMLLSTSMDKTFKVWNAVDSGHCLQTYSLHTEAVRAARWAPCGRRILSGGFDFALHLTDLETGTQLFSGRSDFRITTLKFHPKDHNIFLCGGFSSEMKAWDIRTGKVMRSYKATIQQTLDILFLREGSEFLSSTDASTRDSADRTIIAWDFRTSAKISNQIFHERFTCPSLALHPREPVFLAQTNGNYLALFSTVWPYRMSRRRRYEGHKVEGYSVGCECSPGGDLLVTGSADGRVLMYSFRTASRACTLQGHTQACVGTTYHPVLPSVLATCSWGGDMKIWH

SEQ ID NO: 14199 - protein, 544 aa, Homo Sapiens; identical to SEQ ID NO: 14198

SEQ ID NO: 14200 - protein, 274 aa, Homo Sapiens
MTARTLSLMASLVAYDDSDSEAETEHAGSFNATGQQKDTSGVARPPGQDFASGTLDVPKAGAQPTKHGSCEDPGGYRLPLAQLGRSDWGSCPSQRLQWPGKEPQVTFPIKEPSCSSLWTSHVPASHMPLAAARFKQVKLSRNFPKSSFHAQSESETVGKNGSSFQKKKCEDCVVPYTPRRLRQRQALSTETGKGKDVEPQGPPAGRAPAPLYVGPGVSEFIQPYLNSHYKETTVPRKVLFHLRGHRGPVNTIQWCPVLSKSHMLLSTSMDKTFK

SEQ ID NO: 14201 - protein, 289 aa, Homo Sapiens
MTARTLSLMASLVAYDDSDSEAETEHAGSFNATGQQKDTSGVARPPGQDFASGTLDVPKAGAQPTKHGSCEDPGGYRLPLAQLGRSDWGSCPSQRLQWPGKEPQVTFPIKEPSCSSLWTSHVPASHMPLAAARFKQVKLSRNFPKSSFHAQSESETVGKNGSSFQKKKCEDCVVPYTPRRLRQRQALSTETGKGKDVEPQGPPAGRAPAPLYVGPGVSEFIQPYLNSHYKETTVPRKVLFHLRGHRGPVNTIQWCPVLSKSHMLLSTSMDKTFKEPSYLVVEVTLESLP

SEQ ID NO: 14202 - protein, 544 aa, Homo Sapiens; identical to SEQ ID NO: 14198

SEQ ID NO: 14203 - protein, 121 aa, Homo Sapiens
  misc_feature (1)..(1): Xaa can be any naturally occurring amino acid
XSTDASTRDSADRTIIAWDFRTSAKISNQIFHERFTCPSLALHPREPVFLAQTNGNYLALFSTVWPYRMSRRRRYEGHKVLLSLSPRRMLSPSPKPPGSPGHGPWGAWSLCLGGSCFLFPG

SEQ ID NO: 14204 - protein, 1941 aa, Homo Sapiens
MAQGSGGREGALRTPAGGWHSPPSPDMQELLRSVERDLSIDPRQLAPAPGGTHVVALVPARWLASLRDRRLPLGPCPRAEGLGEAEVRTLLQRSVQRLPAGWTRVEVHGLRKRRLSYPLGGGLPFEDGSCGPETLTRFMQEVAAQNYRNLWRHAYHTYGQPYSHSPAPSAVPALDSVRQALQRVYGCSFLPVGETTQCPSYAREGPCPPRGSPACPSLLRAEALLESPEMLYVVHPYVQFSLHDVVTFSPAKLTNSQAKVLFILFRVLRAMDACHRQGLACGALSLYHIAVDEKLCSELRLDLSAYERPEEDENEEAPVARDEAGIVSQEEQGGQPGQPTGQEELRSLVLDWVHGRISNFHYLMQLNRLAGRRQGDPNYHPVLPWVVDFTTPHGRFRDLRKSKFRLNKGDKQLDFTYEMTRQAFVAGGAGGGEPPHVPHHISDVLSDITYYVYKARRTPRSVLCGHVRAQWEPHEYPASMERMQNWTPDECIPEFYTDPSIFRSIHPDMPDLDVPAWCSSSQEFVAAHRALLESREVSRDLHHWIDLTFGYKLQGKEAVKEKNVCLHLVDAHTHLASYGVVQLFDQPHPQRLAGAPALAPEPPLIPKLLVQTIQETTGREDFTENPGQLPNGVGRPVLEATPCEASWTRDRPVAGEDDLEQATEALDSISLAGKAGDQLGSSSQASPGLLSFSVASASRPGRRNKAAGADPGEGEEGRILLPEGFNPMQALEELEKTGNFLAKGLGGLLEVPEQPRVQPAVPLQCLLHRDMQALGVLLAEMVFATRVRTLQPDAPLWVRFQAVRGLCTRHPKEVPVSLQPVLDTLLQMSGPEVPMGAERGKLDQLFEYRPVSQGLPPPCPSQLLSPFSSVVPFPPYFPALHRFILLYQARRVEDEAQGRELVFALWQQLGAVLKDITPEGLEILLPFVLSLMSEEHTAVYTAWYLFEPVAKALGPKNANKYLLKPLIGAYESPCQLHGRFYLYTDCFVAQLMVRLGLQAFLTHLLPHVLQVLAGAEASQEESKDLAGAAEEEESGLPGAGPGSCAFGEEIPMDGEPPASSGLGLPDYTSGVSFHDQADLPETEDFQAGLYVTESPQPQEAEAVSLGRLSDKSSTSETSLGEERAPDEGGAPVDKSSLRSGDSSQDLKQSEGSEEEEEEEDSCVVLEEEEGEQEEVTGASELTLSDTVLSMETVVAGGSGGDGEEEEEALPEQSEGKEQKILLDTACKMVRWLSAKLGPTVASRHVARNLLRLLTSCYVGPTRQQFTVSSGESPPLSAGNIYQKRPVLGDIVSGPVLSCLLHIARLYGEPVLTYQYLPYISYLVAPGSASGPSRLNSRKEAGLLAAVTLTQKIIVYLSDTTLMDILPRISHEVLLPVLSFLTSLVTGFPSGAQARTILCVKTISLIALICLRIGQEMVQQHLSEPVATFFQVFSQLHELRQQDLKLDPAGRGEGQLPQVVFSDGQQRPVDPALLDELQKVFTLEMAYTIYVPFSCLLGDIIRKIIPNHELVGELAALYLESISPSSRNPASVEPTMPGTGPEWDPHGGGCPQDDGHSGTFGSVLVGNRIQIPNDSRPENPGPLGPISGVGGGGLGSGSDDNALKQELPRSVHGLSGNWLAYWQYEIGVSQQDAHFHFHQIRLQSFPGHSGAVKCVAPLSSEDFFLSGSKDRTVRLWPLYNYGDGTSETAPRLVYTQHRKSVFFVGQLEAPQHVVSCDGAVHVWDPFTGKTLRTVEPLDSRVPLTAVAVMPAPHTSITMASSDSTLRFVDCRKPGLQHEFRLGGGLNPGLVRALAISPSGRSVVAGFSSGFMVLLDTRTGLVLRGWPAHEGDILQIKAVEGSVLVSSSSDHSLTVWKELEQKPTHHYKSASDPIHTFDLYGSEVVTGTVSNKIGVCSLLEPPSQATTKLSSENFRGTLTSLALLPTKRHLLLGSDNGVIRLLA

SEQ ID NO: 14205 - protein, 890 aa, Homo Sapiens
MDGEPPASSGLGLPDYTSGVSFHDQADLPETEDFQAGLYVTESPQPQEAEAVSLGRLSDKSSTSETSLGEERAPDEGGAPVDKSSLRSGDSSQDLKQSEGSEEEEEEEDSCVVLEEEEGEQEEVTGASELTLSDTVLSMETVVAGGSGGDGEEEEEALPEQSEGKEQKILLDTACKMVRWLSAKLGPTVASRHVARNLLRLLTSCYVGPTRQQFTVSSGESPPLSAGNIYQKRPVLGDIVSGPVLSCLLHIARLYGEPVLTYQYLPYISYLVAPGSASGPSRLNSRKEAGLLAAVTLTQKIIVYLSDTTLMDILPRISHEVLLPVLSFLTSLVTGFPSGAQARTILCVKTISLIALICLRIGQEMVQQHLSEPVATFFQVFSQLHELRQQDLKLDPAGRGEGQLPQVVFSDGQQRPVDPALLDELQKVFTLEMAYTIYVPFSCLLGDIIRKIIPNHELVGELAALYLESISPSSRNPASVEPTMPGTGPEWDPHGGGCPQDDGHSGTFGSVLVGNRIQIPNDSRPENPGPLGPISGVGGGGLGSGSDDNALKQELPRSVHGLSGNWLAYWQYEIGVSQQDAHFHFHQIRLQSFPGHSGAVKCVAPLSSEDFFLSGSKDRTVRLWPLYNYGDGTSETAPRLVYTQHRKSVFFVGQLEAPQHVVSCDGAVHVWDPFTGKTLRTVEPLDSRVPLTAVAVMPAPHTSITMASSDSTLRFVDCRKPGLQHEFRLGGGLNPGLVRALAISPSGRSVVAGFSSGFMVLLDTRTGLVLRGWPAHEGDILQIKAVEGSVLVSSSSDHSLTVWKELEQKPTHHYKSASDPIHTFDLYGSEVVTGTVSNKIGVCSLLEPPSQATTKLSSENFRGTLTSLALLPTKRHLLLGSDNGVIRLLA

SEQ ID NO: 14206 - protein, 580 aa, Homo Sapiens
MDILPRISHEVLLPVLSFLTSLVTGFPSGAQARTILCVKTISLIALICLRIGQEMVQQHLSEPVATFFQVFSQLHELRQQDLKLDPAGRGEGQLPQVVFSDGQQRPVDPALLDELQKVFTLEMAYTIYVPFSCLLGDIIRKIIPNHELVGELAALYLESISPSSRNPASVEPTMPGTGPEWDPHGGGCPQDDGHSGTFGSVLVGNRIQIPNDSRPENPGPLGPISGVGGGGLGSGSDDNALKQELPRSVHGLSGNWLAYWQYEIGVSQQDAHFHFHQIRLQSFPGHSGAVKCVAPLSSEDFFLSGSKDRTVRLWPLYNYGDGTSETAPRLVYTQHRKSVFFVGQLEAPQHVVSCDGAVHVWDPFTGKTLRTVEPLDSRVPLTAVAVMPAPHTSITMASSDSTLRFVDCRKPGLQHEFRLGGGLNPGLVRALAISPSGRSVVAGFSSGFMVLLDTRTGLVLRGWPAHEGDILQIKAVEGSVLVSSSSDHSLTVWKELEQKPTHHYKSASDPIHTFDLYGSEVVTGTVSNKIGVCSLLEPPSQATTKLSSENFRGTLTSLALLPTKRHLLLGSDNGVIRLLA

SEQ ID NO: 14207 - protein, 171 aa, Homo Sapiens
MHAGPCSSQPDTVVPRTQRALFPSGAQARTILCVKTISLIALICLRIGQEMVQQHLSEPVATFFQVFSQLHELRQQDLKLDPAGRGEGQLPQVVFSDGQQRPVDPALLDELQKVFTLEMAYTIYVPFSCLLGDIIRKIIPNHELVGELAALYLESISPSSRNPASVEPTMP

SEQ ID NO: 14208 - protein, 172 aa, Homo Sapiens
MLVRVVLSLTPSFPEPSALYTACKMVRWLSAKLGPTVASRHVARNLLRLLTSCYVGPTRQQFTVSSGESPPLSAGNIYQKRPVLGDIVSGPVLSCLLHIARLYGEPVLTYQYLPYISYLVAPGSASGPSRLNSRKEAGLLAAVTLTQKIIVYLSDTTLMDILPRISHEVLLP

SEQ ID NO: 14209 - protein, 738 aa, Homo Sapiens
MLVRVVLSLTPSFPEPSALYTACKMVRWLSAKLGPTVASRHVARNLLRLLTSCYVGPTRQQFTVSSGESPPLSAGNIYQKRPVLGDIVSGPVLSCLLHIARLYGEPVLTYQYLPYISYLVAPGSASGPSRLNSRKEAGLLAAVTLTQKIIVYLSDTTLMDILPRISHEVLLPVLSFLTSLVTGFPSGAQARTILCVKTISLIALICLRIGQEMVQQHLSEPVATFFQVFSQLHELRQQDLKLDPAGRGEGQLPQVVFSDGQQRPVDPALLDELQKVFTLEMAYTIYVPFSCLLGDIIRKIIPNHELVGELAALYLESISPSSRNPASVEPTMPGTGPEWDPHGGGCPQDDGHSGTFGSVLVGNRIQIPNDSRPENPGPLGPISGVGGGGLGSGSDDNALKQELPRSVHGLSGNWLAYWQYEIGVSQQDAHFHFHQIRLQSFPGHSGAVKCVAPLSSEDFFLSGSKDRTVRLWPLYNYGDGTSETAPRLVYTQHRKSVFFVGQLEAPQHVVSCDGAVHVWDPFTGKTLRTVEPLDSRVPLTAVAVMPAPHTSITMASSDSTLRFVDCRKPGLQHEFRLGGGLNPGLVRALAISPSGRSVVAGFSSGFMVLLDTRTGLVLRGWPAHEGDILQIKAVEGSVLVSSSSDHSLTVWKELEQKPTHHYKSASDPIHTFDLYGSEVVTGTVSNKIGVCSLLEPPSQATTKLSSENFRGTLTSLALLPTKRHLLLGSDNGVIRLLA

SEQ ID NO: 14210 - protein, 132 aa, Homo Sapiens
MVQQHLSEPVATFFQVFSQLHELRQQDLKLDPAGRGEGQLPQVVFSDGQQRPVDPALLDELQKVFTLEMAYTIYVPFSCLLGDIIRKIIPNHELVGELAALYLESISPSSRNPASVEPTMPGTGPEWDPHGG

SEQ ID NO: 14211 - protein, 714 aa, Homo Sapiens
MVRWLSAKLGPTVASRHVARNLLRLLTSCYVGPTRQQFTVSSGESPPLSAGNIYQKRPVLGDIVSGPVLSCLLHIARLYGEPVLTYQYLPYISYLVAPGSASGPSRLNSRKEAGLLAAVTLTQKIIVYLSDTTLMDILPRISHEVLLPVLSFLTSLVTGFPSGAQARTILCVKTISLIALICLRIGQEMVQQHLSEPVATFFQVFSQLHELRQQDLKLDPAGRGEGQLPQVVFSDGQQRPVDPALLDELQKVFTLEMAYTIYVPFSCLLGDIIRKIIPNHELVGELAALYLESISPSSRNPASVEPTMPGTGPEWDPHGGGCPQDDGHSGTFGSVLVGNRIQIPNDSRPENPGPLGPISGVGGGGLGSGSDDNALKQELPRSVHGLSGNWLAYWQYEIGVSQQDAHFHFHQIRLQSFPGHSGAVKCVAPLSSEDFFLSGSKDRTVRLWPLYNYGDGTSETAPRLVYTQHRKSVFFVGQLEAPQHVVSCDGAVHVWDPFTGKTLRTVEPLDSRVPLTAVAVMPAPHTSITMASSDSTLRFVDCRKPGLQHEFRLGGGLNPGLVRALAISPSGRSVVAGFSSGFMVLLDTRTGLVLRGWPAHEGDILQIKAVEGSVLVSSSSDHSLTVWKELEQKPTHHYKSASDPIHTFDLYGSEVVTGTVSNKIGVCSLLEPPSQATTKLSSENFRGTLTSLALLPTKRHLLLGSDNGVIRLLA

SEQ ID NO: 14212 - protein, 197 aa, Homo Sapiens
  misc_feature (1)..(1): Xaa can be any naturally occurring amino acid
XFQAGLYVTESPQPQEAEAVSLGRLSDKSSTSETSLGEERAPDEGGAPVDKSSLRSGDSSQDLKQSEGSEEEEEEEDSCVVLEEEEGEQEEVTGASELTLSDTVLSMETVVAGGSGGDGEEEEEALPEQSEGKEQKILLGPTRQQFTVSSGESPPLSAGNIYQKRPVLGDIVSGPVLSCLLHIARLYGEPVLTYQYL

SEQ ID NO: 14213 - protein, 123 aa, Homo Sapiens
  misc_feature (1)..(1): Xaa can be any naturally occurring amino acid
XRLLTSCYVGPTRQQFTVSSGESPPLSAGNIYQKRPVLGDIVSGPVLSCLLHIARLYGEPVLTYQYLPYISYLVPKWGPGSDHPVCENHQPHRPHLPAHWTGDGPAAPERARGHLFPGLLSAA

SEQ ID NO: 14214 - protein, 475 aa, Homo Sapiens
ARSHTAPVLALAMEQRRGQLATVSQDRTVRIWDLATLQQLYDFTSSEDAPCAVTFHPTRPTFFCGFSSGAVRSFSLEAAEVLVEHTCHRGAVTGLTATPDGRLLFSSCSQGSLAQYSCADPQWHVLRVAADMVCPDAPASPSALAVSRDGRLLAFVGPSRCTVTVMGSASLDELLRVDIGTLDLASSRLDSAMAVCFGPAALGHLLVSTSSNRVVVLDAVSGRIIRELPGVHPEPCPSLTLSEDARFLLIAAGRTIKVWDYATQASPGPQVYIGHSEPVQAVAFSPDQQQVLSAGDAVFLWDVLAPTESDQSFPGAPPACKTGPGAGPLEDAASRASELPRQQVPKPCQASPPRLGVCARPPEGGDGHLPASRQRWVAASEGCRRLQREWAGQHGLEAGHRLLCLHVRPPGGGGGPALWRPAALVRPLCGDLHAGPQPQCPGPGLCLGPKQHDRPLSDPRLGRVWRPLPASHFPP

SEQ ID NO: 14215 - protein, 115 aa, Homo Sapiens
EKIPLPFFAMSLSLSPGTHLLAVGFAGLHRPPGCSSRPPATRSLCGRSPASEMQQGLWWWASRLVMPGTWTQAWQRRQVVNGLMLGQARIHVNRLEQAVVNLAPCEYFHTCCPFA

SEQ ID NO: 14216 - protein, 1748 aa, Homo Sapiens
MARAWQHPFLNVFRHFRVDEWKRSAKQGDVAVVTDKTLKGAVYRIRGSVSAANYIQLPKSSTQSLGLTGRYLYVLFRPLPSKHFVIHLDVSSKDNQVIRVSFSNLFKEFKSTATWLQFPLVLEARTPQRDLVGLAPSGARWTCLQLDLQDVLLVYLNRCYGHLKSIRLCASLLVRNLYTSDLCFEPAISGAQWAKLPVTPMPREMAFPVPKGESWHDRYIHVRFPSESLKVPSKPIEKSCSPPEAVLLGPGPQPLPCPVASSKPVRFSVSPVVQTPSPTASGRAALAPRPFPEVSLSQERSDASNADGPGFHSLEPWAQLEASDIHTAAAGTHVLTHESAEVPVARTGSCEGFLPDPVLRLKGVIGFGGHGTRQALWTPDGAAVVYPCHAVIVVLLVDTGEQRFFLGHTDKVSALALDGSSSLLASAQARAPSVMRLWDFQTGRCLCLFRSPMHVVCSLSFSDSGALLCGVGKDHHGRTMVVAWGTGQVGLGGEVVVLAKAHTDFDVQAFRVTFFDETRMASCGQGSVRLWRLRGGVLRSCPVDLGEHHALQFTDLAFKQARDGCPEPSAAMLFVCSRSGHILEIDCQRMVVRHARRLLPTRTPGGPHPQKQTFSSGPGIAISSLSVSPAMCAVGSEDGFLRLWPLDFSSVLLEAEHEGPVSSVCVSPDGLRVLSATSSGHLGFLDTLSRVYHMLARSHTAPVLALAMEQRRGQLATVSQDRTVRIWDLATLQQLYDFTSSEDAPCAVTFHPTRPTFFCGFSSGAVRSFSLEAAEVLVEHTCHRGAVTGLTATPDGRLLFSSCSQGSLAQYSCADPQWHVLRVAADMVCPDAPASPSALAVSRDGRLLAFVGPSRCTVTVMGSASLDELLRVDIGTLDLASSRLDSAMAVCFGPAALGHLLVSTSSNRVVVLDAVSGRIIRELPGVHPEPCPSLTLSEDARFLLIAAGRTIKVWDYATQASPGPQVYIGHSEPVQAVAFSPDQQQVLSAGDAVFLWDVLAPTESDQSFPGAPPACKTGPGAGPLEDAASRASELPRQQVPKPCQASPPRLGVCARPPEGGDGARDTRNSGAPRTTYLASCKAFTPARVSCSPHSAKGTCPPPASGGWLRLKAVVGYSGNGRANMVWRPDTGFFAYTCGRLVVVEDLHSGAQQHWSGHSAEISTLALSHSAQVLASASGRSSTTAHCQIRVWDVSGGLCQHLIFPHSTTVLALAFSPDDRLLVTLGDHDGRTLALWGTATYDLVSSTRLPEPVHGVAFNPWDAGELTCVGQGTVTFWLLQQRGADISLQVRREPVPEAVGAGELTSLCYGAPPLLYCGTSSGQVCVWDTRAGRCFLSWEADDGGIGLLLFSGSRLVSGSSTGRLRLWAVGAVSELRCKGSGASSVFMEHELVLDGAVVSASFDDSVDMGVVGTTAGTLWFVSWAEGTSTRLISGHRSKVNEVVFSPGESHCATCSEDGSVRVWALASMELVIQFQVLNQSCLCLAWSPPCCGRPEQQRLAAGYGDGSLRIFSVSRTAMELKMHPHPVALTTVAFSTDGQTVLSGDKDGLVAVSHPCTGTTFRVLSDHQGAPISTICVTCKECEDLGVEGTDLWLAASGDQRVSVWASDWLRNHCELVDWLSFPMPATTETQGHLPPSLAAFCPWDGALLMYVGPGVYKEVIIYNLCQKQVVEKIPLPFFAMSLSLSPGTHLLAVGFAECMLRLVDCAMGTAQDFAGHDNAVHLCRFTPSARLLFTAARNEILVWEVPGL

SEQ ID NO: 14217 - protein, 1750 aa, Homo Sapiens
MARAWQHPFLNVFRHFRVDEWKRSAKQGDVAVVTDKTLKGAVYRIRGSVSAANYIQLPKSSTQSLGLTGRYLYVLFRPLPSKHFVIHLDVSSKDNQVIRVSFSNLFKEFKSTATWLQFPLVLEARTPQRDLVGLAPSGARWTCLQLDLQDVLLVYLNRCYGHLKSIRLCASLLVRNLYTSDLCFEPAISGAQWAKLPVTPMPREMAFPVPKGESWHDRYIHVRFPSESLKVPSKPIEKSCSPPEAVLLGPGPQPLPCPVASSKPVRFSVSPVVQTPSPTASGRAALAPRPFPEVSLSQERSDASNADGPGFHSLEPWAQLEASDIHTAAAGTHVLTHESAEVPVARTGSCEGFLPDPVLRLKGVIGFGGHGTRQALWTPDGAAVVYPCHAVIVVLLVDTGEQRFFLGHTDKVSALALDGSSSLLASAQARAPSVMRLWDFQTGRCLCLFRSPMHVVCSLSFSDSGALLCGVGKDHHGRTMVVAWGTGQVGLGGEVVVLAKAHTDFDVQAFRVTFFDETRMASCGQGSVRLWRLRGGVLRSCPVDLGEHHALQFTDLAFKQARDGCPEPSAAMLFVCSRSGHILEIDCQRMVVRHARRLLPTRTPGGPHPQKQTFSSGPGIAISSLSVSPAMCAVGSEDGFLRLWPLDFSSVLLEAEHEGPVSSVCVSPDGLRVLSATSSGHLGFLDTLSRVYHMLARSHTAPVLALAMEQRRGQLATVSQDRTVRIWDLATLQQLYDFTSSEDAPCAVTFHPTRPTFFCGFSSGAVRSFSLEAAEVLVEHTCHRGAVTGLTATPDGRLLFSSCSQGSLAQYSCADPQWHVLRVAADMVCPDAPASPSALAVSRDGRLLAFVGPSRCTVTVMGSASLDELLRVDIGTLDLASSRLDSAMAVCFGPAALGHLLVSTSSNRVVVLDAVSGRIIRELPGVHPEPCPSLTLSEDARFLLIAAGRTIKVWDYATQASPGPQVYIGHSEPVQAVAFSPDQQQVLSAGDAVFLWDVLAPTESDQSFPGAPPACKTGPGAGPLEDAASRASELPRQQVPKPCQASPPRLGVCARPPEGGDGARDTRNSGAPRTTYLASCKAFTPARVSCSPHSAKGTCPPPASGGWLRLKAVVGYSGNGRANMVWRPDTGFFAYTCGRLVVVEDLHSGAQQHWSGHSAEISTLALSHSAQVLASASGRSSTTAHCQIRVWDVSGGLCQHLIFPHSTTVLALAFSPDDRLLVTLGDHDGRTLALWGTATYDLVSSTRLPEPVHGVAFNPWDAGELTCVGQGTVTFWLLQQRGADISLQVRREPVPEAVGAGELTSLCYGAPPLLYCGTSSGQVCVWDTRAGRCFLSWEADDGGIGLLLFSGSRLVSGSSTGRLRLWAVGAVSELRCKGSGARSSSVFMEHELVLDGAVVSASFDDSVDMGVVGTTAGTLWFVSWAEGTSTRLISGHRSKVNEVVFSPGESHCATCSEDGSVRVWALASMELVIQFQVLNQSCLCLAWSPPCCGRPEQQRLAAGYGDGSLRIFSVSRTAMELKMHPHPVALTTVAFSTDGQTVLSGDKDGLVAVSHPCTGTTFRVLSDHQGAPISTICVTCKECEDLGVEGTDLWLAASGDQRVSVWASDWLRNHCELVDWLSFPMPATTETQGHLPPSLAAFCPWDGALLMYVGPGVYKEVIIYNLCQKQVVEKIPLPFFAMSLSLSPGTHLLAVGFAECMLRLVDCAMGTAQDFAGHDNAVHLCRFTPSARLLFTAARNEILVWEVPGL

SEQ ID NO: 14218 - protein, 347 aa, Homo Sapiens
MLWFGQPGPGGWNRKCLRPFTLPRGQHPQPSYGFPQVNEVVFSPGESHCATCSEDGSVRVWALASMELVIQFQVLNQSCLCLAWSPPCCGRPEQQRLAAGYGDGSLRIFSVSRTAMELKMHPHPVALTTVAFSTDGQTVLSGDKDGLVAVSHPCTGTTFRVLSDHQGAPISTICVTCKECEDLGVEGTDLWLAASGDQRVSVWASDWLRNHCELVDWLSFPMPATTETQGHLPPSLAAFCPWDGALLMYVGPGVYKEVIIYNLCQKQVVEKIPLPFFAMSLSLSPGTHLLAVGFAECMLRLVDCAMGTAQDFAGHDNAVHLCRFTPSARLLFTAARNEILVWEVPGL

SEQ ID NO: 14219 - protein, 299 aa, Homo Sapiens
MLWFGQPGPGGWNRKCLRPFTLPRGQHPQPSYGFPQVNEVVFSPGESHCATCSEDGSVRVWALASMELVIQFQVLNQSCLCLAWSPPCCGRPEQQRLAAGYGDGSLRIFSVSRTAMELKMHPHPVALTTVAFSTDGQTVLSGDKDGLVAVSHPCTGTTFRVLSDHQGAPISTICVTCKETQGHLPPSLAAFCPWDGALLMYVGPGVYKEVIIYNLCQKQVVEKIPLPFFAMSLSLSPGTHLLAVGFAECMLRLVDCAMGTAQDFAGHDNAVHLCRFTPSARLLFTAARNEILVWEVPGL

SEQ ID NO: 14220 - protein, 78 aa, Homo Sapiens
  misc_feature (1)..(1): Xaa can be any naturally occurring amino acid
XASGDQRVSVWASDWLRNHCELVDWLSFPMPATTETQGHLPPSLAAFCPWDGALLMYVGPGVYKEVIIYNLCQKQSAC

SEQ ID NO: 14221 - protein, 133 aa, Homo Sapiens
  misc_feature (1)..(1): Xaa can be any naturally occurring amino acid
XPGAGPLEDAASRASELPRQQVPKPCQASPPRLGVCARPPEGGDGARDTRNSGAPRTTYLASCKAFTPARVSCSPHSAKALGHRWPCWAPAASGSPSSQGTCPPPASGGWLRLKAVVGYSGNGRANMVWRPDT

SEQ ID NO: 14222 - protein, 220 aa, Homo Sapiens
MPLTGVGPGSCRRQIIRALCLLLLLLHAGSAKNIWKRALPARLAEKSRAEEAGAPGGPRQPRADRCPPPPRTLPPGACQAARCQADSECPRHRRCCYNGCAYACLEAVPPPPVLDWLVQPKPRWLGGNGWLLDGPEEVLQAEACSTTEDGAEPLLCPSGYECHILSPGDVAEGIPNRGQCVKQRRQADGRILRHKLYKEYPEGDSKNVAEPGRGQQKHFQ

SEQ ID NO: 14223 - protein, 220 aa, Homo Sapiens; identical to SEQ ID NO: 14222

SEQ ID NO: 14224 - protein, 66 aa, Homo Sapiens
MPLTGVGPGSCRRQIIRALCLLLLLLHAGSAKNIWKRALPARLAEKSRVSAWDGEAGAACVGGSQP

SEQ ID NO: 14225 - protein, 79 aa, Homo Sapiens
MAPQTLLPVLVLCVLLLQAQGGYRDKKRMQKTQLSPEIKVCQQQPKLYLCKHLCESHRDCQANNICCSTYCGNVCMSIL

SEQ ID NO: 14226 - protein, 73 aa, Homo Sapiens
MAPQTLLLVLVLCVLLLQAQGGYRDKMRMQRIKVCEKRPSIDLCIHHCSYFQKCETNKICCSAFCGNICMSIL

SEQ ID NO: 14227 - protein, 89 aa, Homo Sapiens
MVSCERRASKSVGQILLWDFGYTCRLSHRRRNSTEILSRNLPALYTGIKVCEKRPSIDLCIHHCSYFQKCETNKICCSAFCGNICMSIL

SEQ ID NO: 14228 - protein, 87 aa, Homo Sapiens
MVSLMKLWIPMLMTFFCTVLLSVLGEMRKKRYDRKELLLEECWGKPNVKECTNKCSKAFRCKDKNYTCCWTYCGNICWINVETSGDY

SEQ ID NO: 14229 - protein, 87 aa, Homo Sapiens; identical to SEQ ID NO: 14228

SEQ ID NO: 14230 - protein, 87 aa, Homo Sapiens; identical to SEQ ID NO: 14228

SEQ ID NO: 14231 - protein, 111 aa, Homo Sapiens
MGSSSFLVLMVSLVLVTLVAVEGVKEGIEKAGVCPADNVRCFKSDPPQCHTDQDCLGERKCCYLHCGFKCVIPVKELEEGGNKDEDVSRPYPEPGWEAKCPGSSSTRCPQK

SEQ ID NO: 14232 - protein, 93 aa, Homo Sapiens
MKPVLPLQFLVVFCLALQLVPGSPKQRVLKYILEPPPCISAPENCTHLCTMQEDCEKGFQCCSSFCGIVCSSETFQKRNRIKHKGSEVIMPAN

SEQ ID NO: 14233 - protein, 73 aa, Homo Sapiens
MLQVQVNLPVSPLPTYPYSFFYPDKEGSCPQVNINFPQLGLCRDQCQVDSQCPGQMKCCRNGCGKVSCVTPNF

SEQ ID NO: 14234 - protein, 76 aa, Homo Sapiens
MPACRLGPLAAALLLSLLLFGFTLVSDKEGSCPQVNINFPQLGLCRDQCQVDSQCPGQMKCCRNGCGKVSCVTPNF

SEQ ID NO: 14235 - protein, 102 aa, Homo Sapiens
MPACRLGPLAAALLLSLLLFGFTLVSGTGAEKTGVCPELQADQNCTQECVSDSECADNLKCCSAGCATFCSLPNALFHWHLKTRRLWEISGPRPRRPTWDSS

SEQ ID NO: 14236 - protein, 124 aa, Homo Sapiens
MPACRLGPLAAALLLSLLLFGFTLVSGTGAEKTGVCPELQADQNCTQECVSDSECADNLKCCSAGCATFCSLPNDKEGSCPQVNINFPQLGLCRDQCQVDSQCPGQMKCCRNGCGKVSCVTPNF

SEQ ID NO: 14237 - protein, 79 aa, Homo Sapiens
MPACRLGPLAAALLLSLLLFGFTLVSGTGAEKTGVCPELQADQNCTQECVSDSECADNLKCCSAGCATFCSLPNGQLAE

SEQ ID NO: 14238 - protein, 137 aa, Homo Sapiens
MMLSCLFLLKALLALGSLESWITAGEHAKEGECPPHKNPCKELCQGDELCPAEQKCCTTGCGRICRDIPKGRGGDCPKVLVGLCIVGCVMDENCQAGEKCCKSGCGRFCVPPVLPPKLTMNPNWTVRSDSELEIPVP

SEQ ID NO: 14239 - protein, 231 aa, Homo Sapiens
MMLSCLFLLKALLALGSLESWITAGEHAKEGECPPHKNPCKELCQGDELCPAEQKCCTTGCGRICRDIPKGRKRDCPRVIRKQSCLKRCITDETCPGVKKCCTLGCNKSCVVPISKQKLAEFGGECPADPLPCEELCDGDASCPQGHKCCSTGCGRTCLGDIEGGRGGDCPKVLVGLCIVGCVMDENCQAGEKCCKSGCGRFCVPPVLPPKLTMNPNWTVRSDSELEIPVP

SEQ ID NO: 14240 - protein, 94 aa, Homo Sapiens
MMLSCLFLLKALLALGSLESWITAGEHGRGGDCPKVLVGLCIVGCVMDENCQAGEKCCKSGCGRFCVPPVLPPKLTMNPNWTVRSDSELEIPVP

SEQ ID NO: 14241 - protein, 225 aa, Homo Sapiens
  misc_feature (1)..(1): Xaa can be any naturally occurring amino acid
XIKEALLALGSLESWITAGEHAKEGECPPHKNPCKELCQGDELCPAEQKCCTTGCGRICRDIPKGRKRDCPRVIRKQSCLKRCITDETCPGVKKCCTLGCNKSCVVPISKQKLAEFGGECPADPLPCEELCDGDASCPQGHKCCSTGCGRTCLGDIEGGRGGDCPKVLVGLCIVGCVMDENCQAGEKCCKSGCGRFCVPPVLPPKLTMNPNWTVRSDSELEIPVP

SEQ ID NO: 14242 - protein, 123 aa, Homo Sapiens
MRTQSLLLLGALLAVGSQLPAVFGRKKGEKSGGCPPDDGPCLLSVPDQCVEDSQCPLTRKCCYRACFRQCVPRVSVKLGSCPEDQLRCLSPMNHLCHKDSDCSGKKRCCHSACGRDCRDPARG

SEQ ID NO: 14243 - protein, 224 aa, Homo Sapiens
MRTQSLLLLGALLAVGSQLPAVFGRKKGEKSGGCPPDDGPCLLSVPDQCVEDSQCPLTRKCCYRACFRQCVPRVSVKLGSCPEDQLRCLSPMNHLCHKDSDCSGKKRCCHSACGRDCRDPARGTAPGCPGQANSDLGSVALHLSWGPTERVHDGRPGALPAGQHYLYQRWFQPSDNHWPADTSLQPIHPWFLLLGVKVHSLSSEEGLCITPVLCTTAIRASHPS

SEQ ID NO: 14244 - protein, 131 aa, Homo Sapiens
MGLSGLLPILVPFILLGDIQEPGHAEGILGKPCPKIKVECEVEEIDQCTKPRDCPENMKCCPFSRGKKCLDFRKIYAVCHRRLAPAWPPYHTGGTIKKTKICSEFIYGGSQGNNNNFQTEAICLVTCKKYH

SEQ ID NO: 14245 - protein, 86 aa, Homo Sapiens
MGLSGLLPILVPFILLGDIQEPGHAEGILGKPCPKIKVECEVEEIDQCTKPRDCPENMKCCPFSRGKKCLDFRKVSLTLYHKEELE

SEQ ID NO: 14246 - protein, 241 aa, Homo Sapiens
MWTVRTEGGHFPLHSPTFSWRNVAFLLLLSLALEWTSAMLTKKIKHKPGLCPKERLTCTTELPDSCNTDFDCKEYQKCCFFACQKKCMDPFQEPCMLPVRHGNCNHEAQRWHFDFKNYRCTPFKYRGCEGNANNFLNEDACRTACMLIVKDGQCPLFPFTERKECPPSCHSDIDCPQTDKCCESRCGFVCARAWTVKKGFCPRKPLLCTKIDKPKCLQDEECPLVEKCCSHCGLKCMDPRR

SEQ ID NO: 14247 - protein, 241 aa, Homo Sapiens; identical to SEQ ID NO: 14246

SEQ ID NO: 14248 - protein, 548 aa, Homo Sapiens
MPALRPLLPLLLLLRLTSGAGLLPGLGSHPGVCPNQLSPNLWVDAQSTCERECSRDQDCAAAEKCCINVCGLHSCVAARFPGSPAAPTTAASCEGFVCPQQGSDCDIWDGQPVCRCRDRCEKEPSFTCASDGLTYYNRCYMDAEACLRGLHLHIVPCKHVLSWPPSSPGPPETTARPTPGAAPVPPALYSSPSPQAVQVGGTASLHCDVSGRPPPAVTWEKQSHQRENLIMRPDQMYGNVVVTSIGQLVLYNARPEDAGLYTCTARNAAGLLRADFPLSVVQREPARDAAPSIPAPAECLPDVQACTGPTSPHLVLWHYDPQRGGCMTFPARGCDGAARGFETYEACQQACARGPGDACVLPAVQGPCRGWEPRWAYSPLLQQCHPFVYGGCEGNGNNFHSRESCEDACPVPRTPPCRACRLRSKLALSLCRSDFAIVGRLTEVLEEPEAAGGIARVALEDVLKDDKMGLKFLGTKYLEVTLSGMDWACPCPNMTAGDGPLVIMGEVRDGVAVLDAGSYVRAASEKRVKKILELLEKQACELLNRFQD

SEQ ID NO: 14249 - protein, 483 aa, Homo Sapiens
MDVKGKKGPVGMPKEATCDHFMCLQQGSECDIWDGQPVCKCKDRCEKEPSFTCASDGLTYYNRCYMDAEACSKGITLAVVTCRYHFTWPNTSPPPPETTMHPTTASPETPELDMAAPALLNNPVHQSVTMGETVSFLCDVVGRPRPEITWEKQLEDRENVVMRPNHVRGNVVVTNIAQLVIYNAQLQDAGIYTCTARNVAGVLRADFPLSVVRGHQAAATSESSPNGTAFPAAECLKPPDSEDCGEEQTRWHFDAQANNCLTFTFGHCHRNLNHFETYEACMLACMSGPLAACSLPALQGPCKAYAPRWAYNSQTGQCQSFVYGGCEGNGNNFESREACEESCPFPRGNQRCRACKPRQKLVTSFCRSDFVILGRVSELTEEPDSGRALVTVDEVLKDEKMGLKFLGQEPLEVTLLHVDWACPCPNVTVSEMPLIIMGEVDGGMAMLRPDSFVGASSARRVRKLREVMHKKTCDVLKEFLGLH

SEQ ID NO: 14250 - protein, 576 aa, Homo Sapiens
MWAPRCRRFWSRWEQVAALLLLLLLLGVPPRSLALPPIRYSHAGICPNDMNPNLWVDAQSTCRRECETDQECETYEKCCPNVCGTKSCVAARYMDVKGKKGPVGMPKEATCDHFMCLQQGSECDIWDGQPVCKCKDRCEKEPSFTCASDGLTYYNRCYMDAEACSKGITLAVVTCRYHFTWPNTSPPPPETTMHPTTASPETPELDMAAPALLNNPVHQSVTMGETVSFLCDVVGRPRPEITWEKQLEDRENVVMRPNHVRGNVVVTNIAQLVIYNAQLQDAGIYTCTARNVAGVLRADFPLSVVRGHQAAATSESSPNGTAFPAAECLKPPDSEDCGEEQTRWHFDAQANNCLTFTFGHCHRNLNHFETYEACMLACMSGPLAACSLPALQGPCKAYAPRWAYNSQTGQCQSFVYGGCEGNGNNFESREACEESCPFPRGNQRCRACKPRQKLVTSFCRSDFVILGRVSELTEEPDSGRALVTVDEVLKDEKMGLKFLGQEPLEVTLLHVDWACPCPNVTVSEMPLIIMGEVDGGMAMLRPDSFVGASSARRVRKLREVMHKKTCDVLKEFLGLH

SEQ ID NO: 14251 - protein, 524 aa, Homo Sapiens
MANSAGFLGDLTTEGINKPGFYKGPAGSQVTLSSLGNQTRVLLEEQARHLLNEQEHATMAYYLDEYRGGSVSVEALVMALFKLLNTHAKFSLLSEVRGTISPQDLERFDHLVLRREIESMKARQPPGPGAGDTYSMVSYSDTGSSTGSHGTSTTVSSARNTLDLEETGEAVQGNINALPDVSVDDVRSTSQGLSSFKPLPRPPPLAQGNDLPLGQPRKLGREDLQPPSSMPSCSGTVFSAPQNRSPPAGTAPTPGTSSAQDLPSSPIYASVSPANPSSKRPLDAHLALVNQHPIGPFPRVQSPPHLKSPSAEATVAGGCLLPPSPSGHPDQTGTNQHFVMVEVHRPDSEPDVNEVRALPQTRTASTLSQLSDSGQTLSEDSGVDAGEAEASAPGRGRQSVSTKSRSSKELPRNERPTDGANKPPGLLEPTSTLVRVKKSAATLGIAIEGGANTRQPLPRIVTIQRGGSAHNCGQLKVGHVILEVNGLTLRGKEHREAARIIAEAFKTKDRDYIDFLVTEFNVML

SEQ ID NO: 14252 - protein, 556 aa, Homo Sapiens
MHGSLEALLFLPQVTLSLAHAHLICSNAQLEMCVFPHRFLGDLTTEGINKPGFYKGPAGSQVTLSSLGNQTRVLLEEQARHLLNEQEHATMAYYLDEYRGGSVSVEALVMALFKLLNTHAKFSLLSEVRGTISPQDLERFDHLVLRREIESMKARQPPGPGAGDTYSMVSYSDTGSSTGSHGTSTTVSSARNTLDLEETGEAVQGNINALPDVSVDDVRSTSQGLSSFKPLPRPPPLAQGNDLPLGQPRKLGREDLQPPSSMPSCSGTVFSAPQNRSPPAGTAPTPGTSSAQDLPSSPIYASVSPANPSSKRPLDAHLALVNQHPIGPFPRVQSPPHLKSPSAEATVAGGCLLPPSPSGHPDQTGTNQHFVMVEVHRPDSEPDVNEVRALPQTRTASTLSQLSDSGQTLSEDSGVDAGEAEASAPGRGRQSVSTKSRSSKELPRNERPTDGANKPPGLLEPTSTLVRVKKSAATLGIAIEGGANTRQPLPRIVTIQRGGSAHNCGQLKVGHVILEVNGLTLRGKEHREAARIIAEAFKTKDRDYIDFLVTEFNVML

SEQ ID NO: 14253 - protein, 345 aa, Homo Sapiens
MNAPLDGLSVSSSSTGSLGSAAGAGGGGGAGLRLLSANVRQLHQALTALLSEAEREQFTHCLNAYHARRNVFDLVRTLRVLLDSPVKRRLLPMLRLVIPRSDQLLFDQYTAEGLYLPATTPYRQPAWGGPDSAGPGEVRLVSLRRAKAHEGLGFSIRGGSEHGVGIYVSLVEPGSLAEKEGLRVGDQILRVNDKSLARVTHAEAVKALKGSKKLVLSVYSAGRIPGGYVTNHIYTWVDPQGRSISPPSGLPQPHGGALRQQEGDRRSTLHLLQGGDEKKVSGVGKGGQPLRHRILPPNPEQQSCLEAARRGWFCPGSVFPQVCTEGWCFFFAFLFDLCSVCYNTG

SEQ ID NO: 14254 - protein, 907 aa, Homo Sapiens
MNAPLDGLSVSSSSTGSLGSAAGAGGGGGAGLRLLSANVRQLHQALTALLSEAEREQFTHCLNAYHARRNVFDLVRTLRVLLDSPVKRRLLPMLRLVIPRSDQLLFDQYTAEGLYLPATTPYRQPAWGGPDSAGPGEVRLVSLRRAKAHEGLGFSIRGGSEHGVGIYVSLVEPGSLAEKEGLRVGDQILRVNDKSLARVTHAEAVKALKGSKKLVLSVYSAGRIPGGYVTNHIYTWVDPQGRSISPPSGLPQPHGGALRQQEGDRRSTLHLLQGGDEKKVNLVLGDGRSLGLTIRGGAEYGLGIYITGVDPGSEAEGSGLKVGDQILEVNGRSFLNILHDEAVRLLKSSRHLILTVKDVGRLPHARTTVDETKWIASSRIRETMANSAGFLGDLTTEGINKPGFYKGPAGSQVTLSSLGNQTRVLLEEQARHLLNEQEHATMAYYLDEYRGGSVSVEALVMALFKLLNTHAKFSLLSEVRGTISPQDLERFDHLVLRREIESMKARQPPGPGAGDTYSMVSYSDTGSSTGSHGTSTTVSSARNTLDLEETGEAVQGNINALPDVSVDDVRSTSQGLSSFKPLPRPPPLAQGNDLPLGQPRKLGREDLQPPSSMPSCSGTVFSAPQNRSPPAGTAPTPGTSSAQDLPSSPIYASVSPANPSSKRPLDAHLALVNQHPIGPFPRVQSPPHLKSPSAEATVAGGCLLPPSPSGHPDQTGTNQHFVMVEVHRPDSEPDVNEVRALPQTRTASTLSQLSDSGQTLSEDSGVDAGEAEASAPGRGRQSVSTKSRSSKELPRNERPTDGANKPPGLLEPTSTLVRVKKSAATLGIAIEGGANTRQPLPRIVTIQRGGSAHNCGQLKVGHVILEVNGLTLRGKEHREAARIIAEAFKTKDRDYIDFLVTEFNVML

SEQ ID NO: 14255 - protein, 128 aa, Homo Sapiens
GVNCDKANCSTTCFNGGTCFYPGKCICPPGLEGEQCEISKCPQPCRNGGKCIGKSKSVCEPGCGAHGTCHEPNKCQCQEGWHGRHCNKRYEASLIHALRPAGAQLRQHTPSLKKAEERRDPPESNYIW

SEQ ID NO: 14256 - protein, 133 aa, Homo Sapiens
MAPFTHDFRKAQQRMPAIPVNIHSMNFTWQAAGQAEYFYEFLSLRSLDKGIMADPTVNVPLLGTVPHKASVVQVGFPCLGKQDGVAAFEVDVIVMNSEGNTILQTPQNAIFFKTCQQAECPGGCRNGGFCNER

SEQ ID NO: 14257 - protein, 379 aa, Homo Sapiens
MARRSAFPAAALWLWSILLCLLALRAEAGPPQEESLYLWIDAHQARVLIGFEEDILIVSEGKMAPFTHDFRKAQQRMPAIPVNIHSMNFTWQAAGQAEYFYEFLSLRSLDKGIMADPTVNVPLLGTVPHKASVVQVGFPCLGKQDGVAAFEVDVIVMNSEGNTILQTPQNAIFFKTCQQAECPGGCRNGGFCNERRICECPDGFHGPHCEKALCTPRCMNGGLCVTPGFCICPPGFYGVNCDKANCSTTCFNGGTCFYPGKCICPPGLEGEQCEISKCPQPCRNGGKCIGKSKCKCSKGYQGDLCSKPVCEPGCGAHGTCHEPNKCQCQEGWHGRHCNKRYEASLIHALRPAGAQLRQHTPSLKKAEERRDPPESNYIW

SEQ ID NO: 14258 - protein, 122 aa, Homo Sapiens
MRWFLPWTLAAVTAAAASTVLATAGKKCLAVYQPEASMNFTLAGCISTRSYQPKYCGVCMDNRCCIPYKSKTIDVSFQCPDGLGFSRQVLWINACFCNLSCRNPNDIFADLESYPDFSEIAN

SEQ ID NO: 14259 - protein, 280 aa, Homo Sapiens
MRWFLPWTLAAVTAAAASTVLATALSPAPTTMDFTPAPLEDTSSRPQFCKWPCECPPSPPRCPLGVSLITDGCECCKMCAQQLGDNCTEAAICDPHRGLYCDYSGDRPRYAIGVCAHAVGEVEAWHRNCIAYTSPWSPCSTSCGLGVSTRISNVNAQCWPEQESRLCNLRPCDVDIHTLIKAGKKCLAVYQPEASMNFTLAGCISTRSYQPKYCGVCMDNRCCIPYKSKTIDVSFQCPDGLGFSRQVLWINACFCNLSCRNPNDIFADLESYPDFSEIAN

SEQ ID NO: 14260 - protein, 367 aa, Homo Sapiens
MRWFLPWTLAAVTAAAASTVLATALSPAPTTMDFTPAPLEDTSSRPQFCKWPCECPPSPPRCPLGVSLITDGCECCKMCAQQLGDNCTEAAICDPHRGLYCDYSGDRPRYAIGVCAQVVGVGCVLDGVRYNNGQSFQPNCKYNCTCIDGAVGCTPLCLRVRPPRLWCPHPRRVSIPGHCCEQWVCEDDAKRPRKTAPRDTGAFDAVGEVEAWHRNCIAYTSPWSPCSTSCGLGVSTRISNVNAQCWPEQESRLCNLRPCDVDIHTLIKAGKKCLAVYQPEASMNFTLAGCISTRSYQPKYCGVCMDNRCCIPYKSKTIDVSFQCPDGLGFSRQVLWINACFCNLSCRNPNDIFADLESYPDFSEIAN

SEQ ID NO: 14261 - protein, 155 aa, Homo Sapiens
MRWFLPWTLAAVTAAAASTVLATALSPAPTTMDFTPAPLEDTSSRPQFCKWPCECPPSPPRCPLGVSLITDGCECCKMCAQQLGDNCTEAAICDPHRGLYCDYSGDRPRYAIGVCARREEVSGCVPARGIHELHTCGLHQHTLLSTQVLWSLHGQ

SEQ ID NO: 14262 - protein, 36 aa, Homo Sapiens
MRWFLPWTLAAVTAAAASTVLATMLWVRWRHGTGTA

SEQ ID NO: 14263 - protein, 218 aa, Homo Sapiens
MRGTPKTHLLAFSLLCLLSKVRTQLCPTPCTCPWPPPRCPLGVPLVLDGCGCCRVCARRLGEPCDQLHVCDASQGLVCQPGAGPGGRGALCLCKQDPSFLALSLPCPLVSPAQNGARPGDPARPPVGWAWPPGCPTRTASADWRPSAACACPGPAHPPGVAVHKTVPSRAGLGMGTRCPPSPAGGPVPGPWADGRWSVPRPLAAGNTLAWVHHAEHQY

SEQ ID NO: 14264 - protein, 250 aa, Homo Sapiens
MRGTPKTHLLAFSLLCLLSKVRTQLCPTPCTCPWPPPRCPLGVPLVLDGCGCCRVCARRLGEPCDQLHVCDASQGLVCQPGAGPGGRGALCLLAEDDSSCEVNGRLYREGETFQPHCSIRCRCEDGGFTCVPLCSEDVRLPSWDCPHPRRVEVLGKCCPEWVCGQGGGLGTQPLPAQGPQFSGLVSSLPPGVPCPEWSTAWGPCSTTCGLGMATRVSNQNRFCRLETQRRLCLSRPCPPSRGRSPQNSAF

SEQ ID NO: 14265 - protein, 250 aa, Homo Sapiens; identical to SEQ ID NO: 14264

SEQ ID NO: 14266 - protein, 321 aa, Homo Sapiens [sequence omitted]

SEQ ID NO: 14267 - protein, 130 aa, Homo Sapiens
MGISNRVTNENSNCEMRKEKRLCYIQPCDSNILKTIKIPKGKTCQPTFQLSKAEKFVFSGCSSTQSYKPTFCGICLDKRCCIPNKSKMITIQFDCPNEGSFKWKMLWITSCVCQRNCREPGDIFSELKIL

SEQ ID NO: 14268 - protein, 372 aa, Homo Sapiens
MNKRRLLYPSGWLHGPSDMQGLLFSTLLLAGLAQFCCRVQGTGPLDTTPEGRPGEVSDAPQRKQFCHWPCKCPQQKPRCPPGVSLVRDGCGCCKICAKQPGEICNEADLCDPHKGLYCDYSVDRPRYETGVCAYLVAVGCEFNQVHYHNGQVFQPNPLFSCLCVSGAIGCTPLFIPKLAGSHCSGAKGGKKSDQSNCSLEPLLQQLSTSYKTMPAYRNLPLIWKKKCLVQATKWTPCSRTCGMGISNRVTNENSNCEMRKEKRLCYIQPCDSNILKTIKIPKGKTCQPTFQLSKAEKFVFSGCSSTQSYKPTFCGICLDKRCCIPNKSKMITIQFDCPNEGSFKWKMLWITSCVCQRNCREPGDIFSELKIL

SEQ ID NO: 14269 - protein, 237 aa, Homo Sapiens
MNKRRLLYPSGWLHGPSDMQGLLFSTLLLAGLAQFCCRVQGTGPLDTTPEGRPGEVSDAPQRKQFCHWPCKCPQQKPRCPPGVSLVRDGCGCCKICAKQPGEICNEADLCDPHKGLYCDYSVDRPRYETGVCAYLVAVGCEFNQVHYHNGQVFQPNPLFSCLCVSGAIGCTPLFIPKLAGSHCSGAKGGKKSDQSNCSLEPLLQQLSTSYKTMPDVCQASNLLPALRSLNCCLPSSL

SEQ ID NO: 14270 - protein, 354 aa, Homo Sapiens
MQGLLFSTLLLAGLAQFCCRVQGTGPLDTTPEGRPGEVSDAPQRKQFCHWPCKCPQQKPRCPPGVSLVRDGCGCCKICAKQPGEICNEADLCDPHKGLYCDYSVDRPRYETGVCAYLVAVGCEFNQVHYHNGQVFQPNPLFSCLCVSGAIGCTPLFIPKLAGSHCSGAKGGKKSDQSNCSLEPLLQQLSTSYKTMPAYRNLPLIWKKKCLVQATKWTPCSRTCGMGISNRVTNENSNCEMRKEKRLCYIQPCDSNILKTIKIPKGKTCQPTFQLSKAEKFVFSGCSSTQSYKPTFCGICLDKRCCIPNKSKMITIQFDCPNEGSFKWKMLWITSCVCQRNCREPGDIFSELKIL

SEQ ID NO: 14271 - protein, 354 aa, Homo Sapiens; identical to SEQ ID NO: 14270

SEQ ID NO: 14272 - protein, 354 aa, Homo Sapiens; identical to SEQ ID NO: 14270

SEQ ID NO: 14273 - protein, 219 aa, Homo Sapiens
MQGLLFSTLLLAGLAQFCCRVQGTGPLDTTPEGRPGEVSDAPQRKQFCHWPCKCPQQKPRCPPGVSLVRDGCGCCKICAKQPGEICNEADLCDPHKGLYCDYSVDRPRYETGVCAYLVAVGCEFNQVHYHNGQVFQPNPLFSCLCVSGAIGCTPLFIPKLAGSHCSGAKGGKKSDQSNCSLEPLLQQLSTSYKTMPDVCQASNLLPALRSLNCCLPSSL

SEQ ID NO: 14274 - protein, 2382 aa, Homo Sapiens
MSGGAAEKQSSTPGSLFLSPPAPAPKNGSSSDSSVGEKLGAAAADAVTGRTEEYRRRRHTMDKDSRGAAATTTTTEHRFFRRSVICDSNATALELPGLPLSLPQPSIPAAVPQSAPPEPHREETVTATATSQVAQQPPAAAAPGEQAVAGPAPSTVPSSTSKDRPVSQPSLVGSKEEPPPARSGSGGGSAKEPQEERSQQQDDIEELETKAVGMSNDGRFLKFDIEIGRGSFKTVYKGLDTETTVEVAWCELQDRKLTKSERQRFKEEAEMLKGLQHPNIVRFYDSWESTVKGKKCIVLVTELMTSGTLKTYLKRFKVMKIKVLRSWCRQILKGLQFLHTRTPPIIHRDLKCDNIFITGPTGSVKIGDLGLATLKRASFAKSVIGTPEFMAPEMYEEKYDESVDVYAFGMCMLEMATSEYPYSECQNAAQIYRRVTSGVKPASFDKVAIPEVKEIIEGCIRQNKDERYSIKDLLNHAFFQEETGVRVELAEEDDGEKIAIKLWLRIEDIKKLKGKYKDNEAIEFSFDLERDVPEDVAQEMVESGYVCEGDHKTMAKAIKDRVSLIKRKREQRQLVREEQEKKKQEESSLKQQVEQSSASQTGIKQLPSASTGIPTASTTSASVSTQVEPEEPEADQHQQLQYQQPSISVLSDGTVDSGQGSSVFTESRVSSQQTVSYGSQHEQAHSTGTVPGHIPSTVQAQSQPHGVYPPSSVAQGQSQGQPSSSSLTGVSSSQPIQHPQQQQGIQQTAPPQQTVQYSLSQTSTSSEATTAQPVSQPQAPQVLPQVSAGKQLPVSQPVPTIQGEPQIPVATQPSVVPVHSGAHFLPVGQPLPTPLLPQYPVSQIPISTPHVSTAQTGFSSLPITMAAGITQPLLTLASSATTAAIPGVSTVVPSQLPTLLQPVTQLPSQVHPQLLQPAVQSMGIPANLGQAAEVPLSSGDVLYQGFPPRLPPQYPGDSNIAPSSNVASVCIHSTVLSPPMPTEVLATPGYFPTVVQPYVESNLLVPMGGVGGQVQVSQPGGSLAQAPTTSSQQAVLESTQGVSQVAPAEPVAVAQTQATQPTTLASSVDSAHSDVASGMSDGNENVPSSSGRHEGRTTKRHYRKSVRSRSRHEKTSRPKLRILNVSNKGDRVVECQLETHNRKMVTFKFDLDGDNPEEIATIMVNNDFILAIERESFVDQVREIIEKADEMLSEDVSVEPEGDQGLESLQGKDDYGFSGSQKLEGEFKQPIPASSMPQQIGIPTSSLTQVVHSAGRRFIVSPVPESRLRESKVFPSEITDTVAASTAQSPGMNLSHSASSLSLQQAFSELRRAQMTEGPNTAPPNFSHTGPTFPVVPPFLSSIAGVPTTAAATAPVPATSSPPNDISTSVIQSEVTVPTEEGIAGVATSTGVVTSGGLPIPPVSESPVLSSVVSSITIPAVVSISTTSPSLQVPTSTSEIVVSSTALYPSVTVSATSASAGGSTATPGPKPPAVVSQQAAGSTTVGATLTSVSTTTSFPSTASQLCIQLSSSTSTPTLAETVVVSAHSLDKTSHSSTTGLAFSLSAPSSSSSPGAGVSSYISQPGGLHPLVIPSVIASTPILPQAAGPTSTPLLPQVPSIPPLVQPVANVPAVQQTLIHSQPQPALLPNQPHTHCPEVDSDTQPKAPGIDDIKTLEEKLRSLFSEHSSSGAQHASVSLETSLVIESTVTPGIPTTAVAPSKLLTSTTSTCLPPTNLPLGTVALPVTPVVTPGQVSTPVSTTTSGVKPGTAPSKPPLTKAPVLPVGTELPAGTLPSEQLPPFPGPSLTQSQQPLEDLDAQLRRTLSPEMITVTSAVGPVSMAAPTAITEAGTQPQKGVSQVKEGPVLATSSGAGVFKMGRFQVSVAADGAQKEGKNKSEDAKSVHFESSTSESSVLSSSSPESTLVKPEPNGITIPGISSDVPESAHKTTASEAKSDTGQPTKVGRFQVTTTANKVGRFSVSKTEDKITDTKKEGPVASPPFMDLEQAVLPAVIPKKEKPELSEPSHLNGPSSDPEAAFLSRDVDDGSGSPHSPHQLSSKSLPSQNLSQSLSNSFNSSYMSSDNESDIEDEDLKLELRRLRDKHLKEIQDLQSRQKHEIESLYTKLGKVPPAVIIPPAAPLSGRRRRPTKSKGSKSSRSSSLGNKSPQLSGNLSGQSAASVLHPQQTLHPPGNIPESGQNQLLQPLKPSPSSDNLYSAFTSDGAISVPSLSAPGQGTSSTNTVGATVNSQAAQAQPPAMTSSRKGTFTDDLHKLVDNWARDAMNLSGRRGSKGHMNYEGPGMARKFSAPGQLCISMTSNLGGSAPISAASATSLGHFTKSMCPPQQYGFPATPFGAQWSGTGGPAPQPLGQFQPVGTASLQNFNISNLQKSISNPPGSNLRTT

SEQ ID NO: 14275 - protein, 2634 aa, Homo Sapiens
MSGGAAEKQSSTPGSLFLSPPAPAPKNGSSSDSSVGEKLGAAAADAVTGRTEEYRRRRHTMDKDSRGAAATTTTTEHRFFRRSVICDSNATALELPGLPLSLPQPSIPAAVPQSAPPEPHREETVTATATSQVAQQPPAAAAPGEQAVAGPAPSTVPSSTSKDRPVSQPSLVGSKEEPPPARSGSGGGSAKEPQEERSQQQDDIEELETKAVGMSNDGRFLKFDIEIGRGSFKTVYKGLDTETTVEVAWCELQDRKLTKSERQRFKEEAEMLKGLQHPNIVRFYDSWESTVKGKKCIVLVTELMTSGTLKTYLKRFKVMKIKVLRSWCRQILKGLQFLHTRTPPIIHRDLKCDNIFITGPTGSVKIGDLGLATLKRASFAKSVIGTPEFMAPEMYEEKYDESVDVYAFGMCMLEMATSEYPYSECQNAAQIYRRVTSGVKPASFDKVAIPEVKEIIEGCIRQNKDERYSIKDLLNHAFFQEETGVRVELAEEDDGEKIAIKLWLRIEDIKKLKGKYKDNEAIEFSFDLERDVPEDVAQEMVESGYVCEGDHKTMAKAIKDRVSLIKRKREQRQLVREEQEKKKQEESSLKQQVEQSSASQTGIKQLPSASTGIPTASTTSASVSTQVEPEEPEADQHQQLQYQQPSISVLSDGTVDSGQGSSVFTESRVSSQQTVSYGSQHEQAHSTGTVPGHIPSTVQAQSQPHGVYPPSSVPRRGRSMSVCVPIFLLLPLCPASLPVLFHPTASTVCTSFSFPPPDCPEETFAEKLSKALESVLPMHSASQRKHRRSSLPSLFVSTPQSMAHPCGGTPTYPESQIFFPTIHERPVSFSPPPTCPPKVAISQRRKSTSFLEAQTHHFQPLLRTVGQSLLPPGGSPTNWTPEAVVMLGTTASRVTGESCEIQVHPMFEPSQVYSDYRPGLVLPEEAHYFIPQEAVYVAGVHYQARVAEQYEGIPYNSSVLSSPMKQIPEQKPVQGGPTSSSVFEFPSGQAFLVGHLQNLRLDSGLGPGSPLSSISAPISTDATRLKFHPVFVPHSAPAVLTHNNESRSNCVFEFHVHTPSSSSGEGGGILPQRVYRNRQVAVDLNQEELPPQSVGLHGYLQPVTEEKHNYHAPELTVSVVEPIGQNWPIGSPEYSSDSSQITSSDPSDFQSPPPTGGAAAPFGSDVSMPFIHLPQTVLQESPLFFCFPQGTTSQQVLTASFSSGGSALHPQAQGQSQGQPSSSSLTGVSSSQPIQHPQQQQGIQQTAPPQQTVQYSLSQTSTSSEATTAQPVSQPQAPQVLPQVSAGKQSTQGVSQVAPAEPVAVAQTQATQPTTLASSVDSAHSDVASGMSDGNENVPSSSGRHEGRTTKRHYRKSVRSRSRHEKTSRPKLRILNVSNKGDRVVECQLETHNRKMVTFKFDLDGDNPEEIATIMVNNDFILAIERESFVDQVREIIEKADEMLSEDVSVEPEGDQGLESLQGKDDYGFSGSQKLEGEFKQPIPASSMPQQIGIPTSSLTQVVHSAGRRFIVSPVPESRLRESKVFPSEITDTVAASTAQSPGMNLSHSASSLSLQQAFSELRRAQMTEGPNTAPPNFSHTGPTFPVVPPFLSSIAGVPTTAAATAPVPATSSPPNDISTSVIQSEVTVPTEEGIAGVATSTGVVTSGGLPIPPVSESPVLSSVVSSITIPAVVSISTTSPSLQVPTSTSEIVVSSTALYPSVTVSATSASAGGSTATPGPKPPAVVSQQAAGSTTVGATLTSVSTTTSFPSTASQLCIQLSSSTSTPTLAETVVVSAHSLDKTSHSSTTGLAFSLSAPSSSSSPGAGVSSYISQPGGLHPLVIPSVIASTPILPQAAGPTSTPLLPQVPSIPPLVQPVANVPAVQQTLIHSQPQPALLPNQPHTHCPEVDSDTQPKAPGIDDIKTLEEKLRSLFSEHSSSGAQHASVSLETSLVIESTVTPGIPTTAVAPSKLLTSTTSTCLPPTNLPLGTVALPVTPVVTPGQVSTPVSTTTSGVKPGTAPSKPPLTKAPVLPVGTELPAGTLPSEQLPPFPGPSLTQSQQPLEDLDAQLRRTLSPEMITVTSAVGPVSMAAPTAITEAGTQPQKGVSQVKEGPVLATSSGAGVFKMGRFQVSVAADGAQKEGKNKSEDAKSVHFESSTSESSVLSSSSPESTLVKPEPNGITIPGISSDVPESAHKTTASEAKSDTGQPTKVGRFQVTTTANKVGRFSVSKTEDKITDTKKEGPVASPPFMDLEQAVLPAVIPKKEKPELSEPSHLNGPSSDPEAAFLSRDVDDGSGSPHSPHQLSSKSLPSQNLSQSLSNSFNSSYMSSDNESDIEDEDLKLELRRLRDKHLKEIQDLQSRQKHEIESLYTKLGKVPPAVIIPPAAPLSGRRRRPTKSKGSKSSRSSSLGNKSPQLSGNLSGQSAASVLHPQQTLHPPGNIPESGQNQLLQPLKPSPSSDNLYSAFTSDGAISVPSLSAPGQGTSSTNTVGATVNSQAAQAQPPAMTSSRKGTFTDDLHKLVDNWARDAMNLSGRRGSKGHMNYEGPGMARKFSAPGQLCISMTSNLGGSAPISAASATSLGHFTKSMCPPQQYGFPATPFGAQWSGTGGPAPQPLGQFQPVGTASLQNFNISNLQKSISNPPGSNLRTT

SEQ ID NO: 14276 - protein, 393 aa, Homo Sapiens
MSGGAAEKQSSTPGSLFLSPPAPAPKNGSSSDSSVGEKLGAAAADAVTGRTEEYRRRRHTMDKDSRGAAATTTTTEHRFFRRSVICDSNATALELPGLPLSLPQPSIPAAVPQSAPPEPHREETVTATATSQVAQQPPAAAAPGEQAVAGPAPSTVPSSTSKDRPVSQPSLVGSKEEPPPARSGSGGGSAKEPQEERSQQQDDIEELETKAVGMSNDGRFLKFDIEIGRGSFKTVYKGLDTETTVEVAWCELQDRKLTKSERQRFKEEAEMLKGLQHPNIVRFYDSWESTVKGKKCIVLVTELMTSGTLKTYLKRFKVMKIKVLRSWCRQILKGLQFLHTRTPPIIHRDLKCDNIFITGPTGSVKIGDLGLATLKRASFAKSVIGMFQVYLGA

SEQ ID NO: 14277 - protein, 2134 aa, Homo Sapiens
MSGGAAEKQSSTPGSLFLSPPAPAPKNGSSSDSSVGEKLGAAAADAVTGRTEEYRRRRHTMDKDSRGAAATTTTTEHRFFRRSVICDSNATALELPGLPLSLPQPSIPAAVPQSAPPEPHREETVTATATSQVAQQPPAAAAPGEQAVAGPAPSTVPSSTSKDRPVSQPSLVGSKEEPPPARSGSGGGSAKEPQEERSQQQDDIEELETKAVGMSNDGRFLKFDIEIGRGSFKTVYKGLDTETTVEVAWCELQDRKLTKSERQRFKEEAEMLKGLQHPNIVRFYDSWESTVKGKKCIVLVTELMTSGTLKTYLKRFKVMKIKVLRSWCRQILKGLQFLHTRTPPIIHRDLKCDNIFITGPTGSVKIGDLGLATLKRASFAKSVIGTPEFMAPEMYEEKYDESVDVYAFGMCMLEMATSEYPYSECQNAAQIYRRVTSGVKPASFDKVAIPEVKEIIEGCIRQNKDERYSIKDLLNHAFFQEETGVRVELAEEDDGEKIAIKLWLRIEDIKKLKGKYKDNEAIEFSFDLERDVPEDVAQEMVESGYVCEGDHKTMAKAIKDRVSLIKRKREQRQLVREEQEKKKQEESSLKQQVEQSSASQTGIKQLPSASTGIPTASTTSASVSTQVEPEEPEADQHQQLQYQQPSISVLSDGTVDSGQGSSVFTESRVSSQQTVSYGSQHEQAHSTGTVPGHIPSTVQAQSQPHGVYPPSSVAQGQSQGQPSSSSLTGVSSSQPIQHPQQQGIQQTAPPQQTVQYSLSQTSTSSEATTAQPVSQPQAPQVLPQVSAGKQSTQGVSQVAPAEPVAVAQTQATQPTTLASSVDSAHSDVASGMSDGNENVPSSSGRHEGRTTKRHYRKSVRSRSRHEKTSRPKLRILNVSNKGDRVVECQLETHNRKMVTFKFDLDGDNPEEIATIMVNNDFILAIERESFVDQVREIIEKADEMLSEDVSVEPEGDQGLESLQGKDDYGFSGSQKLEGEFKQPIPASSMPQQIGIPTSSLTQVVHSAGRRFIVSPVPESRLRESKVFPSEITDTVAASTAQSPGMNLSHSASSLSLQQAFSELRRAQMTEGPNTAPPNFSHTGPTFPVVPPFLSSIAGVPTTAAATAPVPATSSPPNDISTSVIQSEVTVPTEEGIAGVATSTGVVTSGGLPIPPVSESPVLSSVVSSITIPAVVSISTTSPSLQVPTSTSEIVVSSTALYPSVTVSATSASAGGSTATPGPKPPAVVSQQAAGSTTVGATLTSVSTTTSFPSTASQLCIQLSSSTSTPTLAETVVVSAHSLDKTSHSSTTGLAFSLSAPSSSSSPGAGVSSYISQPGGLHPLVIPSVIASTPILPQAAGPTSTPLLPQVPSIPPLVQPVANVPAVQQTLIHSQPQPALLPNQPHTHCPEVDSDTQPKAPGIDDIKTLEEKLRSLFSEHSSSGAQHASVSLETSLVIESTVTPGIPTTAVAPSKLLTSTTSTCLPPTNLPLGTVALPVTPVVTPGQVSTPVSTTTSGVKPGTAPSKPPLTKAPVLPVGTELPAGTLPSEQLPPFPGPSLTQSQQPLEDLDAQLRRTLSPEMITVTSAVGPVSMAAPTAITEAGTQPQKVSQVKEGPVLATSSGAGVFKMGRFQVSVAADGAQKEGKNKSEDAKSVHFESSTSESSVLSSSSPESTLVKPEPNGITIPGISSDVPESAHKTTASEAKSDTGQPTKVGRFQVTTTANKVGRFSVSKTEDKITDTKKEGPVASPPFMDLEQAVLPAVIPKKEKPELSEPSHLNGPSSDPEAAFLSRDVDDGSGSPHSPHQLSSKSLPSQNLSQSLSNSFNSSYMSSDNESDIEDEDLKLELRRLRDKHLKEIQDLQSRQKHEIESLYTKLGKVPPAVIIPPAAPLSGRRRRPTKSKGSKSSRSSSLGNKSPQLSGNLSGQSAASVLHPQQTLHPPGNIPESGQNQLLQPLKPSPSSDNLYSAFTSDGAISVPSLSAPGQGTSSTNTVGATVNSQAAQAQPPAMTSSRKGTFTDDLHKLVDNWARDAMNLSGRRGSKGHMNYEGPGMARKFSAPGQLCISMTSNLGGSAPISAASATSLGHFTKSMCPPQQYGFPATPFGAQWSGTGGPAPQPLGQFQPVGTASLQNFNISNLQKSISNPPGSNLRTT

SEQ ID NO: 14278 - protein, 2833 aa, Homo Sapiens
MSGGAAEKQSSTPGSLFLSPPAPAPKNGSSSDSSVGEKLGAAAADAVTGRTEEYRRRRHTMDKDSRGAAATTTTTEHRFFRRSVICDSNATALELPGLPLSLPQPSIPAAVPQSAPPEPHREETVTATATSQVAQQPPAAAAPGEQAVAGPAPSTVPSSTSKDRPVSQPSLVGSKEEPPPARSGSGGGSAKEPQEERSQQQDDIEELETKAVGMSNDGRFLKFDIEIGRGSFKTVYKGLDTETTVEVAWCELQDRKLTKSERQRFKEEAEMLKGLQHPNIVRFYDSWESTVKGKKCIVLVTELMTSGTLKTYLKRFKVMKIKVLRSWCRQILKGLQFLHTRTPPIIHRDLKCDNIFITGPTGSVKIGDLGLATLKRASFAKSVIGTPEFMAPEMYEEKYDESVDVYAFGMCMLEMATSEYPYSECQNAAQIYRRVTSGVKPASFDKVAIPEVKEIIEGCIRQNKDERYSIKDLLNHAFFQEETGVRVELAEEDDGEKIAIKLWLRIEDIKKLKGKYKDNEAIEFSFDLERDVPEDVAQEMVESGYVCEGDHKTMAKAIKDRVSLIKRKREQRQLVREEQEKKKQEESSLKQQVEQSSASQTGIKQLPSASTGIPTASTTSASVSTQVEPEEPEADQHQQLQYQQPSISVLSDGTVDSGQGSSVFTESRVSSQQTVSYGSQHEQAHSTGTVPGHIPSTVQAQSQPHGVYPPSSVPQSMAHPCGGTPTYPESQIFFPTIHERPVSFSPPPTCPPKVAISQRRKSTSFLEAQTHHFQPLLRTVGQSLLPPGGSPTNWTPEAVVMLGTTASRVTGESCEIQVHPMFEPSQVYSDYRPGLVLPEEAHYFIPQEAVYVAGVHYQARVAEQYEGIPYNSSVLSSPMKQIPEQKPVQGGPTSSSVFEFPSGQAFLVGHLQNLRLDSGLGPGSPLSSISAPISTDATRLKFHPVFVPHSAPAVLTHNNESRSNCVFEFHVHTPSSSSGEGGGILPQRVYRNRQVAVDLNQEELPPQSVGLHGYLQPVTEEKHNYHAPELTVSVVEPIGQNWPIGSPEYSSDSSQITSSDPSDFQSPPPTGGAAAPFGSDVSMPFIHLPQTVLQESPLFFCFPQGTTSQQVLTASFSSGGSALHPQAQGQSQGQPSSSSLTGVSSSQPIQHPQQQQGIQQTAPPQQTVQYSLSQTSTSSEATTAQPVSQPQAPQVLPQVSAGKQLPVSQPVPTIQGEPQIPVATQPSVVPVHSGAHFLPVGQPLPTPLLPQYPVSQIPISTPHVSTAQTGFSSLPITMAAGITQPLLTLASSATTAAIPGVSTVVPSQLPTLLQPVTQLPSQVHPQLLQPAVQSMGIPANLGQAAEVPLSSGDVLYQGFPPRLPPQYPGDSNIAPSSNVASVCIHSTVLSPPMPTEVLATPGYFPTVVQPYVESNLLVPMGGVGGQVQVSQPGGSLAQAPTTSSQQAVLESTQGVSQVAPAEPVAVAQTQATQPTTLASSVDSAHSDVASGMSDGNENVPSSSGRHEGRTTKRHYRKSVRSRSRHEKTSRPKLRILNVSNKGDRVVECQLETHNRKMVTFKFDLDGDNPEEIATIMVNNDFILAIERESFVDQVREIIEKADEMLSEDVSVEPEGDQGLESLQGKDDYGFSGSQKLEGEFKQPIPASSMPQQIGIPTSSLTQVVHSAGRRFIVSPVPESRLRESKVFPSEITDTVAASTAQSPGMNLSHSASSLSLQQAFSELRRAQMTEGPNTAPPNFSHTGPTFPVVPPFLSSIAGVPTTAAATAPVPATSSPPNDISTSVIQSEVTVPTEEGIAGVATSTGVVTSGGLPIPPVSESPVLSSVVSSITIPAVVSISTTSPSLQVPTSTSEIVVSSTALYPSVTVSATSASAGGSTATPGPKPPAVVSQQAAGSTTVGATLTSVSTTTSFPSTASQLCIQLSSSTSTPTLAETVVVSAHSLDKTSHSSTTGLAFSLSAPSSSSSPGAGVSSYISQPGGLHPLVIPSVIASTPILPQAAGPTSTPLLPQVPSIPPLVQPVANVPAVQQTLIHSQPQPALLPNQPHTHCPEVDSDTQPKAPGIDDIKTLEEKLRSLFSEHSSSGAQHASVSLETSLVIESTVTPGIPTTAVAPSKLLTSTTSTCLPPTNLPLGTVALPVTPVVTPGQVSTPVSTTTSGVKPGTAPSKPPLTKAPVLPVGTELPAGTLPSEQLPPFPGPSLTQSQQPLEDLDAQLRRTLSPEMITVTSAVGPVSMAAPTAITEAGTQPQKGVSQVKEGPVLATSSGAGVFKMGRFQVSVAADGAQKEGKNKSEDAKSVHFESSTSESSVLSSSSPESTLVKPEPNGITIPGISSDVPESAHKTTASEAKSDTGQPTKVGRFQVTTTANKVGRFSVSKTEDKITDTKKEGPVASPPFMDLEQAVLPAVIPKKEKPELSEPSHLNGPSSDPEAAFLSRDVDDGSGSPHSPHQLSSKSLPSQNLSQSLSNSFNSSYMSSDNESDIEDEDLKLELRRLRDKHLKEIQDLQSRQKHEIESLYTKLGKVPPAVIIPPAAPLSGRRRRPTKSKGSKSSRSSSLGNKSPQLSGNLSGQSAASVLHPQQTLHPPGNIPESGQNQLLQPLKPSPSSDNLYSAFTSDGAISVPSLSAPGQGCAKFNCASEQVTFKPGGRRTRFLRKMVKKVCPCNQLCRTSSTNTVGATVNSQAAQAQPPAMTSSRKGTFTDDLHKLVDNWARDAMNLSGRRGSKGHMNYEGPGMARKFSAPGQLCISMTSNLGGSAPISAASATSLGHFTKSMCPPQQYGFPATPFGAQWSGTGGPAPQPLGQFQPVGTASLQNFNISNLQKSISNPPGSNLRTT

SEQ ID NO: 14279 - protein, 2642 aa, Homo Sapiens
MSGGAAEKQSSTPGSLFLSPPAPAPKNGSSSDSSVGEKLGAAAADAVTGRTEEYRRRRHTMDKDSRGAAATTTTTEHRFFRRSVICDSNATALELPGLPLSLPQPSIPAAVPQSAPPEPHREETVTATATSQVAQQPPAAAAPGEQAVAGPAPSTVPSSTSKDRPVSQPSLVGSKEEPPPARSGSGGGSAKEPQEERSQQQDDIEELETKAVGMSNDGRFLKFDIEIGRGSFKTVYKGLDTETTVEVAWCELQDRKLTKSERQRFKEEAEMLKGLQHPNIVRFYDSWESTVKGKKCIVLVTELMTSGTLKTYLKRFKVMKIKVLRSWCRQILKGLQFLHTRTPPIIHRDLKCDNIFITGPTGSVKIGDLGLATLKRASFAKSVIGTPEFMAPEMYEEKYDESVDVYAFGMCMLEMATSEYPYSECQNAAQIYRRVTSGVKPASFDKVAIPEVKEIIEGCIRQNKDERYSIKDLLNHAFFQEETGVRVELAEEDDGEKIAIKLWLRIEDIKKLKGKYKDNEAIEFSFDLERDVPEDVAQEMVESGYVCEGDHKTMAKAIKDRVSLIKRKREQRQLVREEQEKKKQEESSLKQQVEQSSASQTGIKQLPSASTGIPTASTTSASVSTQVEPEEPEADQHQQLQYQQPSISVLSDGTVDSGQGSSVFTESRVSSQQTVSYGSQHEQAHSTGTVPGHIPSTVQAQSQPHGVYPPSSVPQSMAHPCGGTPTYPESQIFFPTIHERPVSFSPPPTCPPKVAISQRRKSTSFLEAQTHHFQPLLRTVGQSLLPPGGSPTNWTPEAVVMLGTTASRVTGESCEIQVHPMFEPSQVYSDYRPGLVLPEEAHYFIPQEAVYVAGVHYQARVAEQYEGIPYNSSVLSSPMKQIPEQKPVQGGPTSSSVFEFPSGQAFLVGHLQNLRLDSGLGPGSPLSSISAPISTDATRLKFHPVFVPHSAPAVLTHNNESRSNCVFEFHVHTPSSSSGEGGGILPQRVYRNRQVAVDLNQEELPPQSVGLHGYLQPVTEEKHNYHAPELTVSVVEPIGQNWPIGSPEYSSDSSQITSSDPSDFQSPPPTGGAAAPFGSDVSMPFIHLPQTVLQESPLFFCFPQGTTSQQVLTASFSSGGSALHPQAQGQSQGQPSSSSLTGVSSSQPIQHPQQQQGIQQTAPPQQTVQYSLSQTSTSSEATTAQPVSQPQAPQVLPQVSAGKQGFPPRLPPQYPGDSNIAPSSNVASVCIHSTVLSPPMPTEVLATPGYFPTVVQPYVESNLLVPMGGVGGQVQVSQPGGSLAQAPTTSSQQAVLESTQGVSQVAPAEPVAVAQTQATQPTTLASSVDSAHSDVASGMSDGNENVPSSSGRHEGRTTKRHYRKSVRSRSRHEKTSRPKLRILNVSNKGDRVVECQLETHNRKMVTFKFDLDGDNPEEIATIMVNNDFILAIERESFVDQVREIIEKADEMLSEDVSVEPEGDQGLESLQGKDDYGFSGSQKLEGEFKQPIPASSMPQQIGIPTSSLTQVVHSAGRRFIVSPVPESRLRESKVFPSEITDTVAASTAQSPGMNLSHSASSLSLQQAFSELRRAQMTEGPNTAPPNFSHTGPTFPVVPPFLSSIAGVPTTAAATAPVPATSSPPNDISTSVIQSEVTVPTEEGIAGVATSTGVVTSGGLPIPPVSESPVLSSVVSSITIPAVVSISTTSPSLQVPTSTSEIVVSSTALYPSVTVSATSASAGGSTATPGPKPPAVVSQQAAGSTTVGATLTSVSTTTSFPSTASQLCIQLSSSTSTPTLAETVVVSAHSLDKTSHSSTTGLAFSLSAPSSSSSPGAGVSSYISQPGGLHPLVIPSVIASTPILPQAAGPTSTPLLPQVPSIPPLVQPVANVPAVQQTLIHSQPQPALLPNQPHTHCPEVDSDTQPKAPGIDDIKTLEEKLRSLFSEHSSSGAQHASVSLETSLVIESTVTPGIPTTAVAPSKLLTSTTSTCLPPTNLPLGTVALPVTPVVTPGQVSTPVSTTTSGVKPGTAPSKPPLTKAPVLPVGTELPAGTLPSEQLPPFPGPSLTQSQQPLEDLDAQLRRTLSPEMITVTSAVGPVSMAAPTAITEAGTQPQKGVSQVKEGPVLATSSGAGVFKMGRFQVSVAADGAQKEGKNKSEDAKSVHFESSTSESSVLSSSSPESTLVKPEPNGITIPGISSDVPESAHKTTASEAKSDTGQPTKVGRFQVTTTANKVGRFSVSKTEDKITDTKKEGPVASPPFMDLEQAVLPAVIPKKEKPELSEPSHLNGPSSDPEAAFLSRDVDDGSGSPHSPHQLSSKSLPSQNLSQSLSNSFNSSYMSSDNESDIEDEDLKLELRRLRDKHLKEIQDLQSRQKHEIESLYTKLGKVPPAVIIPPAAPLSGRRRRPTKSKGSKSSRSSSLGNKSPQLSGNLSGQSAASVLHPQQTLHPPGNIPESGQNQLLQPLKPSPSSDNLYSAFTSDGAISVPSLSAPGQGTSSTNTVGATVNSQAAQAQPPAMTSSRKGTFTDDLHKLVDNWARDAMNLSGRRGSKGHMNYEGPGMARKFSAPGQLCISMTSNLGGSAPISAASATSLGHFTKSMCPPQQYGFPATPFGAQWSGTGGPAPQPLGQFQPVGTASLQNFNISNLQKSISNPPGSNLRTT

SEQ ID NO: 14280 - protein, 434 aa, Homo Sapiens
MYELLVLFMLIQPQSMAHPCGGTPTYPESQIFFPTIHERPVSFSPPPTCPPKVAISQRRKSTSFLEAQTHHFQPLLRTVGQSLLPPGGSPTNWTPEAVVMLGTTASRVTGESCEIQVHPMFEPSQVYSDYRPGLVLPEEAHYFIPQEAVYVAGVHYQARVAEQYEGIPYNSSVLSSPMKQIPEQKPVQGGPTSSSVFEFPSGQAFLVGHLQNLRLDSGLGPGSPLSSISAPISTDATRLKFHPVFVPHSAPAVLTHNNESRSNCVFEFHVHTPSSSSGEGGGILPQRVYRNRQVAVDLNQEELPPQSVGLHGYLQPVTEEKHNYHAPELTVSVVEPIGQNWPIGSPEYSSDSSQITSSDPSDFQSPPPTGGAAAPFGSDVSMPFIHLPQTVLQESPLFFCFPQGTTSQQVLTASFSSGGSALHPQVIGKLPQLF

SEQ ID NO: 14281 - protein, 240 aa, Homo Sapiens
PHSAPAVLTHNNESRSNCVFEFHVHTPSSSSGEGGGILPQRVYRNRQVAVDLNQEELPPQSVGLHGYLQPVTEEKHNYHAPELTVSVVEPIGQNWPIGSPEYSSDSSQITSSDPSDFQSPPPTGGAAAPFGSDVSMPFIHLPQTVLQESPLFFCFPQGTTSQQVLTASFSSGGSALHPQAQGQSQGQPSSSSLTGVSSSQPIQHPQQQQGIQQTAPPQQTVQYSLSQTSTSSEATTAQPV

SEQ ID NO: 14282 - protein, 67 aa, Homo Sapiens
SDNLYSAFTSDGAISVPSLSAPGQGCAKFNCASEQVTFKPGGRRTRFLSTPCLALWKMVKKVCPCNQ

SEQ ID NO: 14283 - protein, 245 aa, Homo Sapiens
SQPHGVYPPSSVQGIQQTAPPQQTVQYSLSQTSTSSEATTAQPVSQPQAPQVLPQVSAGKQLPVSQPVPTIQGEPQIPVATQPSVVPVHSGAHFLPVGQPLPTPLLPQYPVSQIPISTPHVSTAQTGFSSLPITMAAGITQPLLTLASSATTAAIPGVSTVVPSQLPTLLQPVTQLPSQVHPQLLQPAVQSMGIPANLGQAAEVPLSSGDVLYQGFPPRLPPQYPGDSNIAPSSNVASVCIHSTV

SEQ ID NO: 14284 - protein, 195 aa, Homo Sapiens [sequence omitted]

SEQ ID NO: 14285 - protein, 218 aa, Homo Sapiens
  misc_feature (1)..(1): Xaa can be any naturally occurring amino acid
XADGTVDSGQGSSVFTESRVSSQQTVSYGSQHEQAHSTGTVPGHIPSTVQAQSQPHGVYPPSSVQQGIQQTAPPQQTVQYSLSQTSTSSEATTAQPVSQPQAPQVLPQVSAGKQSTQGVSQVAPAEPVAVAQTQATQPTTLASSVDSAHSDVASGMSDGNENVPSSSGRHEGRTTKRHYRKSVRSRSRHEKTSRPKLRILNVSNKGDRVVECQLETHN

SEQ ID NO: 14286 - protein, 177 aa, Homo Sapiens
  misc_feature (1)..(1): Xaa can be any naturally occurring amino acid
XEQAHSTGTVPGHIPSTVQAQSQPHGVYPPSSVAQGQSQGQPSSSSLTGVSSSQPIQHPQQQQGIQQTAPPQQTVQYSLSQTSTSSEATTAQPVSQPQAPQVLPQVSAGKQGFPPRLPPQYPGDSNIAPSSNVASVCIHSTVLSPPMPTEVLATPGYFPTVVQPYVESNLLVPMGGV

SEQ ID NO: 14287 - protein, 76 aa, Homo Sapiens
  misc_feature (1)..(1): Xaa can be any naturally occurring amino acid
XSDNLYSAFTSDGAISVPSLSAPGQGKMVKKVCPCNQLCRTSSTNTVGATVNSQAAQAQPPAMTSSRKGTFTDDLH

SEQ ID NO: 14288 - protein, 370 aa, Homo Sapiens
MGLWALLPGWVSATLLLALAALPAALAANSSGRWWGIVNVASSTNLLTDSKSLQLVLEPSLQLLSRKQRRLIRQNPGILHSVSGGLQSAVRECKWQFRNRRWNCPTAPGPHLFGKIVNRGCRETAFIFAITSAGVTHSVARSCSEGSIESCTCDYRRRGPGGPDWHWGGCSDNIDFGRLFGREFVDSGEKGRDLRFLMNLHNNEAGRTTVFSEMRQECKCHGMSGSCTVRTCWMRLPTLRAVGDVLRDRFDGASRVLYGNRGSNRASRAELLRLEPEDPAHKPPSPHDLVYFEKSPNFCTYSGRLGTAGTAGRACNSSSPALDGCELLCCGRGHRTRTQRVTERCNCTFHWCCHVSCRNCTHTRVLHECL

SEQ ID NO: 14289 - protein, 359 aa, Homo Sapiens
MGLWALLPGWVSATLLLALAALPAALAANSSGRWWGIVNVASSTNLLTDSKSLQLVLEPSLQLLSRKQRRLIRQNPGILHSVSGGLQSAVRECKWQFRNRRWNCPTAPGPHLFGKIVNRGCRETAFIFAITSAGVTHSVARSCSEGSIESCTCDYRRRGPGGPDWHWGGCSDNIDFGRLFGREFVDSGEKGRDLRFLMNLHNNEAGRTTVFSEMRQECKCHGMSGSCTVRTCWMRLPTLRAVGDVLRDRFDGASRVLYGNRGSNRASRAELLRLEPDLVYFEKSPNFCTYSGRLGTAGTAGRACNSSSPALDGCELLCCGRGHRTRTQRVTERCNCTFHWCCHVSCRNCTHTRVLHECL

SEQ ID NO: 14290 - protein, 102 aa, Homo Sapiens
MLEEPRPRPPPSGLAGLLFLALCSRALSNEILGLKLPGEPPLTANTVCLTLSGLSKRQLGLCLRNPDVTASALQGLHIAVHECQHQLRDQRWNCSALEGGGR

SEQ ID NO: 14291 - protein, 191 aa, Homo Sapiens
MLEEPRPRPPPSGLAGLLFLALCSRALSNEILGLKLPGEPPLTANTVCLTLSGLSKRQLGLCLRNPDVTASALQGLHIAVHECQHQLRDQRWNCSALEGGGRLPHHSAILKRGFRESAFSFSMLAAGVMHAVATACSLGKLVSCGCGWKGSGEQDRLRAKLLQLQALSRGKLPGTSRHECESTTTGWGARW

SEQ ID NO: 14292 - protein, 389 aa, Homo Sapiens
MLEEPRPRPPPSGLAGLLFLALCSRALSNEILGLKLPGEPPLTANTVCLTLSGLSKRQLGLCLRNPDVTASALQGLHIAVHECQHQLRDQRWNCSALEGGGRLPHHSAILKRGFRESAFSFSMLAAGVMHAVATACSLGKLVSCGCGWKGSGEQDRLRAKLLQLQALSRGKSFPHSLPSPGPGSSPSPGPQDTWEWGGCNHDMDFGEKFSRDFLDSREAPRDIQARMRIHNNRVGRQVVTENLKRKCKCHGTSGSCQFKTCWRAAPEFRAVGAALRERLGRAIFIDTHNRNSGAFQPRLRPRRLSGELVYFEKSPDFCERDPTMGSPGTRGRACNKTSRLLDGCGSLCCGRGHNVLRQTRVERCHCRFHWCCYVLCDECKVTEWVNVCK

SEQ ID NO: 14293 - protein, 173 aa, Homo Sapiens
MLEEPRPRPPPSGLAGLLFLALCSRALSNEILGLKLPGEPPLTANTVCLTLSGLSKRQLGLCLRNPDVTASALQGLHIAVHECQHQLRDQRWNCSALEGGGRLPHHSAILKRGFRESAFSFSMLAAGVMHAVATACSLGKLVSCGCGWKGSGKLPGTSRHECESTTTGWGARW

SEQ ID NO: 14294 - protein, 132 aa, Homo Sapiens
MLEEPRPRPPPSGLAGLLFLALCSRALSNEILGLKLPGEPPLTANTVCLTLSGLSKRQLGLCLRNPDVTASALQGLHIAVHECQHQLRDQRWNCSALEGGGRLPHHSAILKRGPGVGEGLDTQMVSEKVLFP

SEQ ID NO: 14295 - protein, 5 aa, Homo Sapiens
MRARP

SEQ ID NO: 14296 - protein, 354 aa, Homo Sapiens
MRARPQVCEALLFALALQTGVCYGIKWLALSKTPSALALNQTQHCKQLEGLVSAQVQLCRSNLELMHTVVHAAREVMKACRRAFADMRWNCSSIELAPNYLLDLERGTRESAFVYALSAAAISHAIARACTSGDLPGCSCGPVPGEPPGPGNRWGGCADNLSYGLLMGAKFSDAPMKVKKTGSQANKLMRLHNSEVGRQALRASLEMKCKCHGVSGSCSIRTCWKGLQELQDVAADLKTRYLSATKVVHRPMGTRKHLVPKDLDIRPVKDSELVYLQSSPDFCMKNEKVGSHGTQDRQCNKTSNGSDSCDLMCCGRGYNPYTDRVVERCHCKYHWCCYVTCRRCERTVERYVCK

SEQ ID NO: 14297 - protein, 262 aa, Homo Sapiens
MRARPQVCEALLFALALQTGVCYGIKWLALSKTPSALALNQTQHCKQLEGLVSAQVQLCRSNLELMHTVVHAAREVMKACRRAFADMRWNCSSIELAPNYLLDLERGTRESAFVYALSAAAISHAIARACTSGDLQELQDVAADLKTRYLSATKVVHRPMGTRKHLVPKDLDIRPVKDSELVYLQSSPDFCMKNEKVGSHGTQDRQCNKTSNGSDSCDLMCCGRGYNPYTDRVVERCHCKYHWCCYVTCRRCERTVERYVCK

SEQ ID NO: 14298 - protein, 365 aa, Homo Sapiens
MDRAALLGLARLCALWAALLVLFPYGAQGNWMWLGIASFGVPEKLGCANLPLNSRQKELCKRKPYLLPSIREGARLGIQECGSQFRHERWNCMITAAATTAPMGASPLFGYELSSGTKETAFIYAVMAAGLVHSVTRSCSAGNMTECSCDTTLQNGGSASEGWHWGGCSDDVQYGMWFSRKFLDFPIGNTTGKENKVLLAMNLHNNEAGRQAVAKLMSVDCRCHGVSGSCAVKTCWKTMSSFEKIGHLLKDKYENSIQISDKTKRKMRRREKDQRKIPIHKDDLLYVNKSPNYCVEDKKLGIPGTQGRECNRTSEGADGCNLLCCGRGYNTHVVRHVERCECKFIWCCYVRCRRCESMTDVHTCK

SEQ ID NO: 14299 - protein, 355 aa, Homo Sapiens
MQLTTCLRETLFTGASQKTSLWWLGIASFGVPEKLGCANLPLNSRQKELCKRKPYLLPSIREGARLGIQECGSQFRHERWNCMITAAATTAPMGASPLFGYELSSGTKETAFIYAVMAAGLVHSVTRSCSAGNMTECSCDTTLQNGGSASEGWHWGGCSDDVQYGMWFSRKFLDFPIGNTTGKENKVLLAMNLHNNEAGRQAVAKLMSVDCRCHGVSGSCAVKTCWKTMSSFEKIGHLLKDKYENSIQISDKTKRKMRRREKDQRKIPIHKDDLLYVNKSPNYCVEDKKLGIPGTQGRECNRTSEGADGCNLLCCGRGYNTHVVRHVERCECKFIWCCYVRCRRCESMTDVHTCK

SEQ ID NO: 14300 - protein, 110 aa, Homo Sapiens
MNAPLGGIWLWLPLLLTWLTPEVNSSWWYMRATGGSSRVMCDNVPGLVSSQRQLCHRHPDVMRAISQGVAEWTAECQHQFRQHRWNCNTLDRDHSLFGRVLLRRPVAKEK

SEQ ID NO: 14301 - protein, 153 aa, Homo Sapiens
MNAPLGGIWLWLPLLLTWLTPEVNSSWWYMRATGGSSRVMCDNVPGLVSSQRQLCHRHPDVMRAISQGVAEWTAECQHQFRQHRWNCNTLDRDHSLFGRVLLRSCKAVLETRVQVPRGERLMYSQDMLAGHGRLQENGRLSLEEVQWGHPGGH

SEQ ID NO: 14302 - protein, 360 aa, Homo Sapiens
MNAPLGGIWLWLPLLLTWLTPEVNSSWWYMRATGGSSRVMCDNVPGLVSSQRQLCHRHPDVMRAISQGVAEWTAECQHQFRQHRWNCNTLDRDHSLFGRVLLRSSRESAFVYAISSAGVVFAITRACSQGEVKSCSCDPKKMGSAKDSKGIFDWGGCSDNIDYGIKFARAFVDAKERKGKDARALMNLHNNRAGRKAVKRFLKQECKCHGVSGSCTLRTCWLAMADFRKTGDYLWRKYNGAIQVVMNQDGTGFTVANERFKKPTKNDLVYFENSPDYCIRDREAGSLGTAGRVCNLTSRGMDSCEVMCCGRGYDTSHVTRMTKCGCKFHWCCAVRCQDCLEALDVHTCKAPKNADWTTAT

SEQ ID NO: 14303 - protein, 355 aa, Homo Sapiens
MEPHLLGLLLGLLLGGTRVLAGYPIWWSLALGQQYTSLGSQPLLCGSIPGLVPKQLRFCRNYIEIMPSVAEGVKLGIQECQHQFRGRRWNCTTIDDSLAIFGPVLDKATRESAFVHAIASAGVAFAVTRSCAEGTSTICGCDSHHKGPPGEGWKWGGCSEDADFGVLVSREFADARENRPDARSAMNKHNNEAGRTTILDHMHLKCKCHGLSGSCEVKTCWWAQPDFRAIGDFLKDKYDSASEMVVEKHRESRGWVETLRAKYSLFKPPTERDLVYYENSPNFCEPNPETGSFGTRDRTCNVTSHGIDGCDLLCCGRGHNTRTEKRKEKCHCIFHWCCYVSCQECIRIYDVHTCK

SEQ ID NO: 14304 - protein, 352 aa, Homo Sapiens
MAPLGYFLLLCSLKQALGSYPIWWSLAVGPQYSSLGSQPILCASIPGLVPKQLRFCRNYVEIMPSVAEGIKIGIQECQHQFRGRRWNCTTVHDSLAIFGPVLDKATRESAFVHAIASAGVAFAVTRSCAEGTAAICGCSSRHQGSPGKGWKWGGCSEDIEFGGMVSREFADARENRPDARSAMNRHNNEAGRQAIASHMHLKCKCHGLSGSCEVKTCWWSQPDFRAIGDFLKDKYDSASEMVVEKHRESRGWVETLRPRYTYFKVPTERDLVYYEASPNFCEPNPETGSFGTRDRTCNVSSHGIDGCDLLCCGRGHNARAERRREKCRCVFHWCCYVSCQECTRVYDVHTCK

SEQ ID NO: 14305 - protein, 365 aa, Homo Sapiens
MAGSAMSSKFFLVALAIFFSFAQVVIEANSWWSLGMNNPVQMSEVYIIGAQPLCSQLAGLSQGQKKLCHLYQDHMQYIGEGAKTGIKECQYQFRHRRWNCSTVDNTSVFGRVMQIGSRETAFTYAVSAAGVVNAMSRACREGELSTCGCSRAARPKDLPRDWLWGGCGDNIDYGYRFAKEFVDARERERIHAKGSYESARILMNLHNNEAGRRTVYNLADVACKCHGVSGSCSLKTCWLQLADFRKVGDALKEKYDSAAAMRLNSRGKLVQVNSRFNSPTTQDLVYIDPSPDYCVRNESTGSLGTQGRLCNKTSEGMDGCELMCCGRGYDQFKTVQTERCHCKFHWCCYVKCKKCTEIVDQFVCK

SEQ ID NO: 14306 - protein, 214 aa, Homo Sapiens
MAGSAMSSKFFLVALAIFFSFAQVVIEANSWWSLGMNNPVQMSEVYIIGAQPLCSQLAGLSQGQKKLCHLYQDHMQYIGEGAKTGIKECQYQFRHRRWNCSTVDNTSVFGRVMQIGSRETAFTYAVSAAGVVNAMSRACREGELSTCGCSRAARPKDLPRDWLWGGCGDNIDYGYRFAKEFVDARERERIHAKGSYESARILMNLHNNEAGRRV

SEQ ID NO: 14307 - protein, 380 aa, Homo Sapiens
MKKSIGILSPGVALGMAGSAMSSKFFLVALAIFFSFAQVVIEANSWWSLGMNNPVQMSEVYIIGAQPLCSQLAGLSQGQKKLCHLYQDHMQYIGEGAKTGIKECQYQFRHRRWNCSTVDNTSVFGRVMQIGSRETAFTYAVSAAGVVNAMSRACREGELSTCGCSRAARPKDLPRDWLWGGCGDNIDYGYRFAKEFVDARERERIHAKGSYESARILMNLHNNEAGRRTVYNLADVACKCHGVSGSCSLKTCWLQLADFRKVGDALKEKYDSAAAMRLNSRGKLVQVNSRFNSPTTQDLVYIDPSPDYCVRNESTGSLGTQGRLCNKTSEGMDGCELMCCGRGYDQFKTVQTERCHCKFHWCCYVKCKKCTEIVDQFVCK

SEQ ID NO: 14308 - protein, 380 aa, Homo Sapiens; identical to SEQ ID NO: 14307

SEQ ID NO: 14309 - protein, 112 aa, Homo Sapiens
MPSLLLLFTAALLSSWAQLLTDANSWWSLALNPVQRPEMFIIGAQPVCSQLPGLSPGQRKLCQLYQEHMAYIGEGAKTGIKECQHQFRQRRWNCSTADNASVFGRVMQIGCV

SEQ ID NO: 14310 - protein, 118 aa, Homo Sapiens
MPSLLLLFTAALLSSWAQLLTDANSWWSLALNPVQRPEMFIIGAQPVCSQLPGLSPGQRKLCQLYQEHMAYIGEGAKTGIKECQHQFRQRRWNCSTADNASVFGRVMQIGSRETAFTH

SEQ ID NO: 14311 - protein, 157 aa, Homo Sapiens
MPSLLLLFTAALLSSWAQLLTDANSWWSLALNPVQRPEMFIIGAQPVCSQLPGLSPGQRKLCQLYQEHMAYIGEGAKTGIKECQHQFRQRRWNCSTADNASVFGRVMQIGSRETAFTHAVSAAGVVNAISRACREGELSTCGCSRTARPKDLPRDWL

SEQ ID NO: 14312 - protein, 254 aa, Homo Sapiens
MPSLLLLFTAALLSSWAQLLTDANSWWSLALNPVQRPEMFIIGAQPVCSQLPGLSPGQRKLCQLYQEHMAYIGEGAKTGIKECQHQFRQRRWNCSTADNASVFGRVMQIGSRETAFTHAVSAAGVVNAISRACREGELSTCGCSRTARPKDLPRDWLWGGCGDNVEYGYRFAKEFVDAREREKNFAKGSEEQGRVLMNLQNNEAGRRAVYKMADVACKCHGVSGSCSLKTCWLQLAEFRKVGDRLKEKYDSAAA

SEQ ID NO: 14313 - protein, 359 aa, Homo Sapiens
MPSLLLLFTAALLSSWAQLLTDANSWWSLALNPVQRPEMFIIGAQPVCSQLPGLSPGQRKLCQLYQEHMAYIGEGAKTGIKECQHQFRQRRWNCSTADNASVFGRVMQIGSRETAFTHAVSAAGVVNAISRACREGELSTCGCSRTARPKDLPRDWLWGGCGDNVEYGYRFAKEFVDAREREKNFAKGSEEQGRVLMNLQNNEAGRRAVYKMADVACKCHGVSGSCSLKTCWLQLAEFRKVGDRLKEKYDSAAAMRVTRKGRLELVNSRFTQPTPEDLVYVDPSPDYCLRNESTGSLGTQGRLCNKTSEGMDGCELMCCGRGYNQFKSVQVERCHCKFHWCCFVRCKKCTEIVDQYICK

SEQ ID NO: 14314 - protein, 359 aa, Homo Sapiens; identical to SEQ ID NO: 14313

SEQ ID NO: 14315 - protein, 359 aa, Homo Sapiens; identical to SEQ ID NO: 14313

SEQ ID NO: 14316 - protein, 365 aa, Homo Sapiens
MLPPLPSRLGLLLLLLLCPAHVGGLWWAVGSPLVMDPTSICRKARRLAGRQAELCQAEPEVVAELARGARLGVRECQFQFRFRRWNCSSHSKAFGRILQQDIRETAFVFAITAAGASHAVTQACSMGELLQCGCQAPRGRAPPRPSGLPGTPGPPGPAGSPEGSAAWEWGGCGDDVDFGDEKSRLFMDARHKRGRGDIRALVQLHNNEAGRLAVRSHTRTECKCHGLSGSCALRTCWQKLPPFREVGARLLERFHGASRVMGTNDGKALLPAVRTLKPPGRADLLYAADSPDFCAPNRRTGSPGTRGRACNSSAPDLSGCDLLCCGRGHRQESVQLEENCLCRFHWCCVVQCHRCRVRKELSLCL

SEQ ID NO: 14317 - protein, 349 aa, Homo Sapiens
MNRKARRCLGHLFLSLGMVYLRIGGFSSVVALGASIICNKIPGLAPRQRAICQSRPDAIIVIGEGSQMGLDECQFQFRNGRWNCSALGERTVFGKELKVGSREAAFTYAIIAAGVAHAITAACTQGNLSDCGCDKEKQGQYHRDEGWKWGGCSADIRYGIGFAKVFVDAREIKQNARTLMNLHNNEAGRKILEENMKLECKCHGVSGSCTTKTCWTTLPQFRELGYVLKDKYNEAVHVEPVRASRNKRPTFLKIKKPLSYRKPMDTDLVYIEKSPNYCEEDPVTGSVGTQGRACNKTAPQASGCDLMCCGRGYNTHQYARVWQCNCKFHWCCYVKCNTCSERTEMYTCK

SEQ ID NO: 14318 - protein, 57 aa, Homo Sapiens
MGINECQYQFRFGRWNCSALGEKTVFGQELRVGSREAAFTYAITAAGVAHAVTAACS

SEQ ID NO: 14319 - protein, 205 aa, Homo Sapiens
MHRNFRKWIFYVFLCFGVLYVKLGALSSVVALGANIICNKIPGLAPRQRAICQSRPDAIIVIGEGAQMGINECQYQFRFGRWNCSALGEKTVFGQELRVGSREAAFTYAITAAGVAHAVTAACSQGNLSNCGCDREKQGYYNQAEGWKWGGCSADVRYGIDFSRRFVDAREIKKNARRLMNLHNNEAGRKGLLGQPRVTSSPLFP

SEQ ID NO: 14320 - protein, 349 aa, Homo Sapiens
MHRNFRKWIFYVFLCFGVLYVKLGALSSVVALGANIICNKIPGLAPRQRAICQSRPDAIIVIGEGAQMGINECQYQFRFGRWNCSALGEKTVFGQELRVGSREAAFTYAITAAGVAHAVTAACSQGNLSNCGCDREKQGYYNQAEGWKWGGCSADVRYGIDFSRRFVDAREIKKNARRLMNLHNNEAGRKVLEDRMQLECKCHGVSGSCTTKTCWTTLPKFREVGHLLKEKYNAAVQVEVVRASRLRQPTFLRIKQLRSYQKPMETDLVYIEKSPNYCEEDAATGSVGTQGRLCNRTSPGADGCDTMCCGRGYNTHQYTKVWQCNCKFHWCCFVKCNTCSERTEVFTCK

SEQ ID NO: 14321 - protein, 353 aa, Homo Sapiens
MLLLSPRSALVSVYCPQIFLLLSSGSYLALSSVVALGANIICNKIPGLAPRQRAICQSRPDAIIVIGEGAQMGINECQYQFRFGRWNCSALGEKTVFGQELRVGSREAAFTYAITAAGVAHAVTAACSQGNLSNCGCDREKQGYYNQAEGWKWGGCSADVRYGIDFSRRFVDAREIKKNARRLMNLHNNEAGRKVLEDRMQLECKCHGVSGSCTTKTCWTTLPKFREVGHLLKEKYNAAVQVEVVRASRLRQPTFLRIKQLRSYQKPMETDLVYIEKSPNYCEEDAATGSVGTQGRLCNRTSPGADGCDTMCCGRGYNTHQYTKVWQCNCKFHWCCFVKCNTCSERTEVFTCK

SEQ ID NO: 14322 - protein, 333 aa, Homo Sapiens
MSAPPFYRALSSVVALGANIICNKIPGLAPRQRAICQSRPDAIIVIGEGAQMGINECQYQFRFGRWNCSALGEKTVFGQELRVGSREAAFTYAITAAGVAHAVTAACSQGNLSNCGCDREKQGYYNQAEGWKWGGCSADVRYGIDFSRRFVDAREIKKNARRLMNLHNNEAGRKVLEDRMQLECKCHGVSGSCTTKTCWTTLPKFREVGHLLKEKYNAAVQVEVVRASRLRQPTFLRIKQLRSYQKPMETDLVYIEKSPNYCEEDAATGSVGTQGRLCNRTSPGADGCDTMCCGRGYNTHQYTKVWQCNCKFHWCCFVKCNTCSERTEVFTCK

SEQ ID NO: 14323 - protein, 355 aa, Homo Sapiens
MGNLFMLWAALGICCAAFSASAWSVNNFLITGPKAYLTYTTSVALGAQSGIEECKFQFAWERWNCPENALQLSTHNRLRSATRETSFIHAISSAGVMYIITKNCSMGDFENCGCDGSNNGKTGGHGWIWGGCSDNVEFGERISKLFVDSLEKGKDARALMNLHNNRAGRLAVRATMKRTCKCHGISGSCSIQTCWLQLAEFREMGDYLKAKYDQALKIEMDKRQLRAGNSAEGHWVPAEAFLPSAEAELIFLEESPDYCTCNSSLGIYGTEGRECLQNSHNTSRWERRSCGRLCTECGLQVEERKTEVISSCNCKFQWCCTVKCDQCRHVVSKYYCARSPGSAQSLGRVWFGVYI

SEQ ID NO: 14324 - protein, 351 aa, Homo Sapiens
MGNLFMLWAALGICCAAFSASAWSVNNFLITGPKAYLTYTTSVALGAQSGIEECKFQFAWERWNCPENALQLSTHNRLRSATRETSFIHAISSAGVMYIITKNCSMGDFENCGCDGSNNGKTGGHGWIWGGCSDNVEFGERISKLFVDSLEKGKDARALMNLHNNRAGRLAVRATMKRTCKCHGISGSCSIQTCWLQLAEFREMGDYLKAKYDQALKIEMDKRQLRAGNSAEGHWVPAEAFLPSAEAELIFLEESPDYCTCNSSLGIYGTEGRECLQNSHNTSRWERRSCGRLCTECGLQVEERKTEVISSCNCKFQWCCTVKCDQCRHVVSKYYCARSPGSAQSLGKGSA

SEQ ID NO: 14325 - protein, 369 aa, Homo Sapiens
MLCCIQCLCLVSPFPTLTPCQGGPHCLIPIHLCLTFSLFGRSVNNFLITGPKAYLTYTTSVALGAQSGIEECKFQFAWERWNCPENALQLSTHNRLRSATRETSFIHAISSAGVMYIITKNCSMGDFENCGCDGSNNGKTGGHGWIWGGCSDNVEFGERISKLFVDSLEKGKDARALMNLHNNRAGRLAVRATMKRTCKCHGISGSCSIQTCWLQLAEFREMGDYLKAKYDQALKIEMDKRQLRAGNSAEGHWVPAEAFLPSAEAELIFLEESPDYCTCNSSLGIYGTEGRECLQNSHNTSRWERRSCGRLCTECGLQVEERKTEVISSCNCKFQWCCTVKCDQCRHVVSKYYCARSPGSAQSLGKGSA

SEQ ID NO: 14326 - protein, 360 aa, Homo Sapiens
MLCCIQCLCLVSPFPTLTPCQGGPHCLIPIHLCLTFSLFGRSVNNFLITGPKAYLTYTTSVALGAQSGIEECKFQFAWERWNCPENALQLSTHNRLRSATRETSFIHAISSAGVMYIITKNCSMGDFENCGCDGSNNGKTGGHGWIWGGCSDNVEFGERISKLFVDSLEKGKDARALMNLHNNRAGRLAVRATMKRTCKCHGISGSCSIQTCWLQLAEFREMGDYLKAKYDQALKIEMDKRQLRAGNSAEGHWVPAEAFLPSAEAELIFLEESPDYCTCNSSLGIYGTEGRECLQNSHNTSRWERRSCGRLCTECGLQVEERKTEVISSCNCKFQWCCTVKCDQCRHVTMSNPAVLLGIR

SEQ ID NO: 14327 - protein, 351 aa, Homo Sapiens
MFLSKPSVYICLFTCVLQLSHSWSVNNFLMTGPKAYLIYSSSVAAGAQSGIEECKYQFAWDRWNCPERALQLSSHGGLRSANRETAFVHAISSAGVMYTLTRNCSLGDFDNCGCDDSRNGQLGGQGWLWGGCSDNVGFGEAISKQFVDALETGQDARAAMNLHNNEAGRKAVKGTMKRTCKCHGVSGSCTTQTCWLQLPEFREVGAHLKEKYHAALKVDLLQGAGNSAAGRGAIADTFRSISTRELVHLEDSPDYCLENKTLGLLGTEGRECLRRGRALGRWERRSCRRLCGDCGLAVEERRAETVSSCNCKFHWCCAVRCEQCRRRVTKYFCSRAERPRGGAAHKPGRKP

SEQ ID NO: 14328 - protein, 365 aa, Homo Sapiens
MLDGSPLARWLAAAFGLTLLLAALRPSAAYFGLTGSEPLTILPLTLEPEAAAQAHYKACDRLKLERKQRRMCRRDPGVAETLVEAVSMSALECQFQFRFERWNCTLEGRYRASLLKRGFKETAFLYAISSAGLTHALAKACSAGRMERCTCDEAPDLENREAWQWGGCGDNLKYSSKFVKEFLGRRSSKDLRARVDFHNNLVGVKVIKAGVETTCKCHGVSGSCTVRTCWRQLAPFHEVGKHLKHKYETALKVGSTTNEAAGEAGAISPPRGRASGAGGSDPLPRTPELVHLDDSPSFCLAGRFSPGTAGRRCHREKNCESICCGRGHNTQSRVVTRPCQCQVRWCCYVECRQCTQREEVYTCKG

SEQ ID NO: 14329 - protein, 133 aa, Homo Sapiens
MKGRAVSFDPLACQGLNASPGSLTSPLRRIRSLTGREVLTPFPGLGTAAAPAQGGAHLKQCDLLKLSRRQKQLCRREPGLAETLRDAAHLGLLECQFQFRHERWNCSLEGRMGLLKRGFKETAFLYAVSSAAL

SEQ ID NO: 14330 - protein, 357 aa, Homo Sapiens
MRPPPALALAGLCLLALPAAAASYFGLTGREVLTPFPGLGTAAAPAQGGAHLKQCDLLKLSRRQKQLCRREPGLAETLRDAAHLGLLECQFQFRHERWNCSLEGRMGLLKRGFKETAFLYAVSSAALTHTLARACSAGRMERCTCDDSPGLESRQAWQWGVCGDNLKYSTKFLSNFLGSKRGNKDLRARADAHNTHVGIKAVKSGLRTTCKCHGVSGSCAVRTCWKQLSPFRETGQVLKLRYDSAVKVSSATNEALGRLELWAPARQGSLTKGLAPRSGDLVYMEDSPSFCRPSKYSPGTAGRVCSREASCSSLCCGRGYDTQSRLVAFSCHCQVQWCCYVECQQCVQEELVYTCKH

SEQ ID NO: 14331 - protein, 329 aa, Homo Sapiens
MRPPPALALAGLCLLALPAAAASYFGLTGREVLTPFPGLGTAAAPAQGGAHLKQCDLLKLSRRQKQLCRREPGLAETLRDAAHLGLLECQFQFRHERWNCSLEGRMGLLKRGFKETAFLYAVSSAALTHTLARACSAGRMERCTCDDSPGLESRQAWQWGVCGDNLKYSTKFLSNFLGSKRGNKDLRARADAHNTHVGIKAVKSGLRTTCKCHGVSGSCAVRTCWKQLSPFRETGQVLKLRYDSAVKVSSATNEALGRLELWAPARQGSLTKGLAPRSGDLVYMEDSPSFCRPSKYSPGTAGWSAVARSQLITTSTSRIQAILPSQLPE

SEQ ID NO: 14332 - protein, 78 aa, Homo Sapiens
MASFPPRVNEKEIAPAAPFDKKCGRENWTVAFAPDGSYFAWSQGHRTVKLVPWSQCLQNFLLHGTKNVTNSSSLRLPR

SEQ ID NO: 14333 - protein, 213 aa, Homo Sapiens
MASFPPRVNEKEIDGSYFAWSQGHRTVKLVPWSQCLQNFLLHGTKNVTNSSSLRLPRQNSDGGQKNKPREHIIDCGDIVWSLAFGSSVPEKQSRCVNIEWHRFRFGQDQLLLATGLNNGRIKIWDVYTGKLLLNLVDHTEVVRDLTFAPDGSLILVSASRDKTLRVWDLKDDGNMMKVLRGHQNWVYSCAFSPDSSMLCSVGASKAVVAAILV

SEQ ID NO: 14334 - protein, 143 aa, Homo Sapiens
MASFPPRVNEKEIGKLLLNLVDHTEVVRDLTFAPDGSLILVSASRDKTLRVWDLKDDGNMMKVLRGHQNWVYSCAFSPDSSMLCSVGASKAVFLWNMDKYTMIRKLEGHHHDVVACDFSPDGALLATASYDTRVYIWDPHNGD

SEQ ID NO: 14335 - protein, 275 aa, Homo Sapiens
MASFPPRVNEKEIGKLLLNLVDHTEVVRDLTFAPDGSLILVSASRDKTLRVWDLKDDGNMMKVLRGHQNWVYSCAFSPDSSMLCSVGASKAVFLWNMDKYTMIRKLEGHHHDVVACDFSPDGALLATASYDTRVYIWDPHNGDILMEFGHLFPPPTPIFAGGANDRWVRSVSFSHDGLHVASLADDKMVRFWRIDEDYPVQVAPLSNGLCCAFSTDGSVLAAGTHDGSVYFWATPRQVPSLQHLCRMSIRRVMPTQEVQELPIPSKLLEFLSYRI

SEQ ID NO: 14336 - protein, 98 aa, Homo Sapiens
MASFPPRVNEKEIGKLLLNLVDHTEVVRDLTFAPDGSLILVSASRDKTLRVWDLKDDGNMMKVLRGHQNWVYSCAFSPDSSMLCSVGASKAVVAAILV

SEQ ID NO: 14337 - protein, 54 aa, Homo Sapiens
MASFPPRVNEKEIGNMMKVLRGHQNWVYSCAFSPDSSMLCSVGASKAVVAAILV

SEQ ID NO: 14338 - protein, 207 aa, Homo Sapiens
MASFPPRVNEKEIVFLFFLLVRLRTIGELLAPAAPFDKKCGRENWTVAFAPDGSYFAWSQGHRTVKLVPWSQCLQNFLLHGTKNVTNSSSLRLPRQNSDGGQKNKPREHIIDCGDIVWSLAFGSSVPEKQSRCVNIEWHRFRFGQDQLLLATGLNNGRIKIWDVYTGKLLLNLVDHTEVVRDLTFAPDGSLILVSASRDKTLRVWDL

SEQ ID NO: 14339 - protein, 421 aa, Homo Sapiens
MASFPPRVNEKEIVRLRTIGELLAPAAPFDKKCGRENWTVAFAPDGSYFAWSQGHRTVKLVPWSQCLQNFLLHGTKNVTNSSSLRLPRQNSDGGQKNKPREHIIDCGDIVWSLAFGSSVPEKQSRCVNIEWHRFRFGQDQLLLATGLNNGRIKIWDVYTGKLLLNLVDHTEVVRDLTFAPDGSLILVSASRDKTLRVWDLKDDGNMMKVLRGHQNWVYSCAFSPDSSMLCSVGASKAVFLWNMDKYTMIRKLEGHHHDVVACDFSPDGALLATASYDTRVYIWDPHNGDILMEFGHLFPPPTPIFAGGANDRWVRSVSFSHDGLHVASLADDKMVRFWRIDEDYPVQVAPLSNGLCCAFSTDGSVLAAGTHDGSVYFWATPRQVPSLQHLCRMSIRRVMPTQEVQELPIPSKLLEFLSYRI

SEQ ID NO: 14340 - protein, 247 aa, Homo Sapiens
MASFPPRVNEKEIVRLRTIGELLAPAAPFDKKCGRENWTVAFAPDGSYFAWSQGHRTVKLVPWSQCLQNFLLHGTKNVTNSSSLRLPRQNSDGGQKNKPREHIIDCGDIVWSLAFGSSVPEKQSRCVNIEWHRFRFGQDQLLLATGLNNGRIKIWDVYTGKLLLNLVDHTEVVRDLTFAPDGSLILVSASRDKTLRVWDLKDDGNMMKVLRGHQNWVYSCAFSPDSSMLCSVGASKAVRVKVLVHSL

SEQ ID NO: 14341 - protein, 74 aa, Homo Sapiens
MASFPPRVNEKEIVRLRTIGELLAPAAPFDKKCGRENWTVAFAPDGSYFAWSQGHRTVKLVPWSQCLQNLKTPP

SEQ ID NO: 14342 - protein, 459 aa, Homo Sapiens
MAEQGRCCDLAALGEQGGAPPWEKSLGTYIGCFSDDGHERTLKGAVFYDLRKMTVSHCQDACAERSYVYAGLEAGAECYCGNRLPAVSVGLEECNHECKGEKGSVCGAVDRLSVYRVDELQPGSRKRRTATYRGCFRLPENITHAFPSSLIQANVTVGTCSGFCSQKEFPLAILRGWECYCAYPTPRFNLRDAMDSSVCGQDPEAQRLAEYCEVYQTPVQDTRCTDRRFLPNKSKVFVALSSFPGAGNTWARHLIEHATGFYTGSYYFDGTLYNKGFKGEKDHWRSRRTICVKTHESGRREIEMFDSAILLIRNPYRSLVAEFNRKCAGHLGYAADRNWKSKEWPDFVNSYASWWSSHVLDWLKYGKRLLVVHYEELRRSLVPTLREMVAFLNVSVSEERLLCVENNKEGSFRRRGRRSHDPEPFTPEMKDLINGYIRTVDQALRDHNWTGLPREYVPR

SEQ ID NO: 14343 - protein, 45 aa, Homo Sapiens
MAKPFFRLQKFLRRTQFLLFFLTAAYLMTGSLLLLQRVRVALPQG

SEQ ID NO: 14344 - protein, 87 aa, Homo Sapiens
MAKPFFRLQKFLRRTQFLLFFLTAAYLMTGSLLLLQRVRVALPQGPRAPGPLQTLPVAAVALGVGLLDSRALHDPRVSPELLLGVDM

SEQ ID NO: 14345 - protein, 181 aa, Homo Sapiens
MAKPFFRLQKFLRRTQFLLFFLTAAYLMTGSLLLLQRVRVALPQGPRAPGPLQTLPVAAVALGVGLLDSRALHDPRVSPELLLGVDMLQSPLTRPRPGPRWLRSRNSELRQLRRRWFHHFMSDSQGPPALGPEAARPAIHSRGTYIGCFSDDGHERTLKGAVFYDLRKMTVSHCQDACAER

SEQ ID NO: 14346 - protein, 575 aa, Homo Sapiens
MAKPFFRLQKFLRRTQFLLFFLTAAYLMTGSLLLLQRVRVALPQGPRAPGPLQTLPVAAVALGVGLLDSRALHDPRVSPELLLGVDMLQSPLTRPRPGPRWLRSRNSELRQLRRRWFHHFMSDSQGPPALGPEAARPAIHSRGTYIGCFSDDGHERTLKGAVFYDLRKMTVSHCQDACAERSYVYAGLEAGAECYCGNRLPAVSVGLEECNHECKGEKGSVCGAVDRLSVYRVDELQPGSRKRRTATYRGCFRLPENITHAFPSSLIQANVTVGTCSGFCSQKEFPLAILRGWECYCAYPTPRFNLRDAMDSSVCGQDPEAQRLAEYCEVYQTPVQDTRCTDRRFLPNKSKVFVALSSFPGAGNTWARHLIEHATGFYTGSYYFDGTLYNKGFKGEKDHWRSRRTICVKTHESGRREIEMFDSAILLIRNPYRSLVAEFNRKCAGHLGYAADRNWKSKEWPDFVNSYASWWSSHVLDWLKYGKRLLVVHYEELRRSLVPTLREMVAFLNVSVSEERLLCVENNKEGSFRRRGRRSHDPEPFTPEMKDLINGYIRTVDQALRDHNWTGLPREYVPR

SEQ ID NO: 14347 - protein, 575 aa, Homo Sapiens; identical to SEQ ID NO: 14346

SEQ ID NO: 14348 - protein, 575 aa, Homo Sapiens; identical to SEQ ID NO: 14346

SEQ ID NO: 14349 - protein, 575 aa, Homo Sapiens; identical to SEQ ID NO: 14346

SEQ ID NO: 14350 - protein, 26 aa, Homo Sapiens
MTVSHCQDACAERSYVYAGLEAGAEC

SEQ ID NO: 14351 - protein, 136 aa, Homo Sapiens
  misc_feature (1)..(1): Xaa can be any naturally occurring amino acid
XGSLLLLQRVRVALPQGPRAPGPLQTLPVAAVALGVGLLDSRALHDPRVSPELLLGVDMLQSPLTRPRPGPRWLRSRNSELRQLRRRWFHHFMSDSQGPPALGPEAARPAIHSRGPMSTPAWRPGRSVTAGTGCQR

SEQ ID NO: 14352 - protein, 565 aa, Homo Sapiens
MAKLWFKFQRYFRRKPVRFFTFLALYLTAGSLVFLHSGFVGQPAVSGNQANPAAAGGPAEGAELSFLGDMHLGRGFRDTGEASSIARRYGPWFKGKDGNERAKLGDYGGAWSRALKGRVVREKEEERAKYIGCYLDDTQSRALRGVSFFDYKKMTIFRCQDNCAERGYLYGGLEFGAECYCGHKIQATNVSEAECDMECKGERGSVCGGANRLSVYRLQLAQESARRYGSAVFRGCFRRPDNLSLALPVTAAMLNMSVDKCVDFCTEKEYPLAALAGTACHCGFPTTRFPLHDREDEQLCAQKCSAEEFESCGTPSYFIVYQTQVQDNRCMDRRFLPGKSKQLIALASFPGAGNTWARHLIELATGFYTGSYYFDGSLYNKGFKGERDHWRSGRTICIKTHESGQKEIEAFDAAILLIRNPYKALMAEFNRKYGGHIGFAAHAHWKGKEWPEFVRNYAPWWATHTLDWLKFGKKVLVVHFEDLKQDLFVQLGRMVSLLGVAVREDRLLCVESQKDGNFKRSGLRKLEYDPYTADMQKTISAYIKMVDAALKGRNLTGVPDDYYPR

SEQ ID NO: 14353 - protein, 565 aa, Homo Sapiens; identical to SEQ ID NO: 14352

SEQ ID NO: 14354 - protein, 585 aa, Homo Sapiens
MAKLWFKFQRYFRRKPVRFFTFLALYLTAGSLVFLHSGFVGQPAVSGNQANPAAAGGPAEGAELSFLGDMHLGRGFRDTGEASSIARRYGPWFKGKDGNERAKLGDYGGAWSRALKGRVVREKEEERAKYIGCYLDDTQSRALRGVSFFDYKKMTIFRCQDNCAERGYLYGGLEFGAECYCGHKIQATNVSEAECDMECKGERGSVCGGANRLSVYRLQLAQESARRYGSAVFRGCFRRPDNLSLALPVTAAMLNMSVDKCVDFCTEKEYPLAALAGTACHCGFPTTRFPLHDREDEQLCAQKCSAEEFESCGTPSYFIVYQTQVQDNRCMDRRFLPGKSKQLIALASFPGAGNTWARHLIELATGFYTGSYYFDGSLYNKGFKGERDHWRSGRTICIKTHESGQKEIEAFDAAILLIRNPYKALMAEFNRKYGGHIGFAAHAHWKGKGAVPGSLQILFRSICTASVGEWPEFVRNYAPWWATHTLDWLKFGKKVLVVHFEDLKQDLFVQLGRMVSLLGVAVREDRLLCVESQKDGNFKRSGLRKLEYDPYTADMQKTISAYIKMVDAALKGRNLTGVPDDYYPR

SEQ ID NO: 14355 - protein, 124 aa, Homo Sapiens
MTIFRCQDNCAERGYLYGGLEFGAECYCGHKIQATNVSEAECDMECKGERGSVCGGANRLSVYRLQLAQESARRYGSAVFRGCFRRPDNLSLALPVTAAMLNMSVDKCVDFCTEKEYPLAALAG

SEQ ID NO: 14356 - protein, 114 aa, Homo Sapiens
MRLLILALLGICSLTAYIVEGVGSEVSDKRTCVSLTTQRLPVSRIKTYTITEGSLRAVIFITKRGLKVCADPQATWVRDVVRSMDRKSNTRNNMIQTKPTGTQQSTNTAVTLTG

SEQ ID NO: 14357 - protein, 114 aa, Homo Sapiens
MRLLILALLGICSLTAYIVEGVGSEVSHRRTCVSLTTQRLPVSRIKTYTITEGSLRAVIFITKRGLKVCADPQATWVRDVVRSMDRKSNTRNNMIQTKPTGTQQSTNTAVTLTG

SEQ ID NO: 14358 - protein, 674 aa, Homo Sapiens
MARAHWGCCPWLVLLCACAWGHTKPVDLGGQDVRNCSTNPPYLPVTVVNTTMSLTALRQQMQTQNLSAYIIPGTDAHMNEYIGQHDERRAWITGFTGSAGTAVVTMKKAAVWTDSRYWTQAERQMDCNWELHKEVGTTPIVTWLLTEIPAGGRVGFDPFLLSIDTWESYDLALQGSNRQLVSITTNLVDLVWGSERPPVPNQPIYALQEAFTGSTWQEKVSGVRSQMQKHQKVPTAVLLSALEETAWLFNLRASDIPYNPFFYSYTLLTDSSIRLFANKSRFSSETLSYLNSSCTGPMCVQIEDYSQVRDSIQAYSLGDVRIWIGTSYTMYGIYEMIPKEKLVTDTYSPVMMTKAVKNSKEQALLKASHVRDAVAVIRYLVWLEKNVPKGTVDEFSGAEIVDKFRGEEQFSSGPSFETISASGLNAALAHYSPTKELNRKLSSDEMYLLDSGGQYWDGTTDITRTVHWGTPSAFQKEAYTRVLIGNIDLSRLIFPAATSGRMVEAFARRALWDAGLNYGHGTGHGIGNFLCVHEWPVGFQSNNIAMAKGMFTSIEPGYYKDGEFGIRLEDVALVVEAKTKYPGSYLTFEVVSFVPYDRNLIDVSLLSPEHLQYLNRYYQTIREKVGPELQRRQLLEEFEWLQQHTEPLAARAPDTASWASVLVVSTLAILGWSV

SEQ ID NO: 14359 - protein, 183 aa, Homo Sapiens
MARAHWGCCPWLVLLCACAWGHTKPVDLGGQDVRNCSTNPPYLPVTVVNTTMSLTALRQQMQTQNLSAYIIPGTDAHMNEYIGQHDERRAWITGFTGSAGTAVVTMKKAAVWTDSRYWTQAERQMDCNWELHKEVGTTPIVTWLLTEIPAGGRVGFDPFLLSIGMLFLQSLNLSMLTRVTQLP

SEQ ID NO: 14360 - protein, 393 aa, Homo Sapiens
MGLLRGGLPCARAMARLGAVRSHYCALLLAAALAVCAFYYLGSGRETFSSATKRLKEARAGAPAAPSPPALELARGSVAPAPGAKAKSLEGGGAGPVDYHLLMMFTKAEHNAALQAKARVALRSLLRLAKFEAHEVLNLHFVSEEASREVAKGLLRELLPPAAGFKCKVIFHDVAVLTDKLFPIVEAMQKHFSAGLGTYYSDSIFFLSVAMHQIMPKEILQIIQLDLDLKFKTNIRELFEEFDSFLPGAIIGIAREMQPVYRHTFWQFRHENPQTRVGGPPPEGLPGFNSGVMLLNLEAMRQSPLYSRLLEPAQVQQLADKYHFRGHLGDQDFFTMIGMEHPKLFHVLDCTWNRQLCTWWRDHGYSDVFEAYFRCEGHVKIYHGNCNTPIPED

SEQ ID NO: 14361 - protein, 187 aa, Homo Sapiens
MNGMSVLMKETLKSSVTPSPYEETGERQPSVNWAVSPHQTQNQWARWSWTSQPLELHTFWQFRHENPQTRVGGPPPEGLPGFNSGVMLLNLEAMRQSPLYSRLLEPAQVQQLADKYHFRGHLGDQDFFTMIGMEHPKLFHVLDCTWNRQLCTWWRDHGYSDVFEAYFRCEGHVKIYHGNCNTPIPED

SEQ ID NO: 14362 - protein, 84 aa, Homo Sapiens
MVRCVPSAVIVCFLRPPQPGRTVIFHDVAVLTDKLFPIVEAMQKHFSAGLGTYYSDSIFFLSVAMHQIMPKECTPLVQGRTSCT

SEQ ID NO: 14363 - protein, 247 aa, Homo Sapiens
MVRCVPSAVIVCFLRPPQPGRTVIFHDVAVLTDKLFPIVEAMQKHFSAGLGTYYSDSIFFLSVAMHQIMPKEILQIIQLDLDLKFKTNIRELFEEFDSFLPGAIIGIAREMQPVYRHTFWQFRHENPQTRVGGPPPEGLPGFNSGVMLLNLEAMRQSPLYSRLLEPAQVQQLADKYHFRGHLGDQDFFTMIGMEHPKLFHVLDCTWNRQLCTWWRDHGYSDVFEAYFRCEGHVKIYHGNCNTPIPED

SEQ ID NO: 14364 - protein, 190 aa, Homo Sapiens
MWPPRCKDPGRQSAEILQIIQLDLDLKFKTNIRELFEEFDSFLPGAIIGIAREMQPVYRHTFWQFRHENPQTRVGGPPPEGLPGFNSGVMLLNLEAMRQSPLYSRLLEPAQVQQLADKYHFRGHLGDQDFFTMIGMEHPKLFHVLDCTWNRQLCTWWRDHGYSDVFEAYFRCEGHVKIYHGNCNTPIPED

SEQ ID NO: 14365 - protein, 114 aa, Homo Sapiens
  misc_feature (1)..(1): Xaa can be any naturally occurring amino acid
XSPPALELARGSVAPAPGAKAKSLEGGGAGPVDYHLLMMFTKAEHNAALQAKARVALRSLLRLAKFEAHEVLNLHFVSEEASREVAKGLLRELLPPAAGFKCKFLTSEDGTGHQ

SEQ ID NO: 14366 - protein, 959 aa, Homo Sapiens
MVAAPCARRLARRSHSALLAALTVLLLQTLVVWNFSSLDSGAGERRGGAAVGGGEQPPPAPAPRRERRDLPAEPAAARGGGGGGGGGGGGRGPQARARGGGPGEPRGQQPASRGALPARALDPHPSPLITLETQDGYFSHRPKEKVRTDSNNENSVPKDFENVDNSNFAPRTQKQKHQPELAKKPPSRQKELLKRKLEQQEKGKGHTFPGKGPGEVLPPGDRAAANSSHGKDVSRPPHARKTGGSSPETKYDQPPKCDISGKEAISALSRAKSKHCRQEIGETYCRHKLGLLMPEKVTRFCPLEGKANKNVQWDEDSVEYMPANPVRIAFVLVVHGRASRQLQRMFKAIYHKDHFYYIHVDKRSNYLHRQVLQVSRQYSNVRVTPWRMATIWGGASLLSTYLQSMRDLLEMTDWPWDFFINLSAADYPIRTNDQLVAFLSRYRDMNFLKSHGRDNARFIRKQGLDRLFLECDAHMWRLGDRRIPEGIAVDGGSDWFLLNRRFVEYVTFSTDDLVTKMKQFYSYTLLPAESFFHTVLENSPHCDTMVDNNLRITNWNRKLGCKCQYKHIVDWCGCSPNDFKPQDFHRFQQTARPTFFARKFEAVVNQEIIGQLDYYLYGNYPAGTPGLRSYWENVYDEPDGIHSLSDVTLTLYHSFARLGLRRAETSLHTDGENSCRYYPMGHPASVHLYFLADRFQGFLIKHHATNLAVSKLETLETWVMPKKVFKIASPPSDFGRLQFSEVGTDWDAKERLFRNFGGLLGPMDEPVGMQKWGKGPNVTVTVIWVDPVNVIAATYDILIESTAEFTHYKPPLNLPLRPGVWTVKILHHWVPVAETKFLVAPLTFSNRQPIKPEEALKLHNGPLRNAYMEQSFQSLNPVLSLPINPAQVEQARRNAASTGTALEGWLDSLVGGMWTAMDICATGPTACPVMQTCSQTAWSSFSPDPKSELGAVKPDGRLR

SEQ ID NO: 14367 - protein, 117 aa, Homo Sapiens
CQYKHIVDWCGCSPNDFKPQDFLRLQQVSRPTFFARKFESTVNQEVLEILDFHLYGSYPPGTPALKAYWENTYDAADGPSGLSDVMLTAYTAFARLSLHHAATAAPPMGTPLCRATW

SEQ ID NO: 14368 - protein, 46 aa, Homo Sapiens
ETLEMWLMPQGSLKLLGRSDQASRLQSLEVGQVPHLLSPNPHPDLG

SEQ ID NO: 14369 - protein, 45 aa, Homo Sapiens
MVASARVQKLVRRYKLAIATALAILLLQGLKGRQRKPRPLDPGEG

SEQ ID NO: 14370 - protein, 865 aa, Homo Sapiens [sequence omitted]

SEQ ID NO: 14371 - protein, 639 aa, Homo Sapiens
MVASARVQKLVRRYKLAIATALAILLLQGLVVWSFSGLEEDEAGEKGRQRKPRPLDPGEGSKDTDSSAGRRGSTGRRHGRWRGRAESPGVPVAKVVRAVTSRQRASRRVPPAPPPEAPGRQNLSGAAAGEALVGAAGFPPHGDTGSVEGAPQPTDNGFTPKCEIVGKDALSALARASTKQCQQEIANVVCLHQAGSLMPKAVPRHCQLTGKMSPGIQWDESQAQQPMDGPPVRIAYMLVVHGRAIRQLKRLLKAVYHEQHFFYIHVDKRSDYLHREVVELAQGYDNVRVTPWRMVTIWGGASLLRMYLRSMRDLLEVPGWAWDFFINLSATDYPTRTNEELVAFLSKNRDKNFLKSHGRDNSRFIKKQGLDRLFHECDSHMWRLGERQIPAGIVVDGGSDWFVLTRSFVEYVVYTDDPLVAQLRQFYTYTLLPAESFFHTVLENSLACETLVDNNLRVTNWNRKLGCKCQYKHIVDWCGCSPNDFKPQDFLRLQQVSRPTFFARKFESTVNQEVLEILDFHLYGSYPPGTPALKAYWENTYDAADGPSGLSDVMLTAYTAFARLSLHHAATAAPPMGTPLCRLALIGTPKSVFSGTLGGYWGRWTSLWPCSAGPGAPTSQPQWSGSTQPMWWPHLMTSQ

SEQ ID NO: 14372 - protein, 676 aa, Homo Sapiens
MVASARVQKLVRRYKLAIATALAILLLQGLVVWSFSGLEEDEAGEKGRQRKPRPLDPGEGSKDTDSSAGRRGSTGRRHGRWRGRAESPGVPVAKVVRAVTSRQRASRRVPPAPPPEAPGRQNLSGAAAGEALVGAAGFPPHGDTGSVEGAPQPTDNGFTPKCEIVGKDALSALARASTKQCQQEIANVVCLHQAGSLMPKAVPRHCQLTGKMSPGIQWDESQAQQPMDGPPVRIAYMLVVHGRAIRQLKRLLKAVYHEQHFFYIHVDKRSDYLHREVVELAQGYDNVRVTPWRMVTIWGGASLLRMYLRSMRDLLEVPGWAWDFFINLSATDYPTRTNEELVAFLSKNRDKNFLKSHGRDNSRFIKKQGLDRLFHECDSHMWRLGERQIPAGIVVDGGSDWFVLTRSFVEYVVYTDDPLVAQLRQFYTYTLLPAESFFHTVLENSLACETLVDNNLRVTNWNRKLGCKCQYKHIVDWCGCSPNDFKPQDFLRLQQVSRPTFFARKFESTVNQEVLEILDFHLYGSYPPGTPALKAYWENTYDAADGPSGLSDVMLTAYTAFARLSLHHAATAAPPMGTPLCRFEPRGLPSSVHLYFYDDHFQGYLVTQAVQPSAQGPAETLEMWLMPQGSLKLLGRSDQASRLQSLENRGLSMLPRLVSNSWPQAVLPLQPPKALG

SEQ ID NO: 14373 - protein, 252 aa, Homo Sapiens
MSSEVSARRDAKKLVRSPSGLRMVPEHRAFGSPFGLEEPQWVPDKECRRCMQCDAKFDFLTRKHHCRRCGKCFCDRCCSQKVPLRRMCFVDPVRQCAECALVSLKEAEFYDKQLKVLLSGATFLVTFGNSEKPETMTCRLSNNQRYLFLDGDSHYEIEIVHISTVQILTEGFPPGEKDIHAYTSLRGSQPASEGGNARATGMFLQYTVPGTEGVTQLKLTVVEDVTVGRRQAVAWLVAMHKAAKLLYESRDQ

SEQ ID NO: 14374 - protein, 234 aa, Homo Sapiens
MSSEVSARRDAKKLVRSPSGLRMVPEHRAFGSPFGLEEPQWVPDKECRRCMQCDAKFDFLTRKHHCRRCGKCFCDRCCSQKVPLRRMCFVDPVRQCAECALVSLKEAEFYDKQLKVLLSGATFLVTFGNSEKPETMTCRLSNNQRYLFLDGDSHYEIEIVHISTVQILTEGFPPGGGNARATGMFLQYTVPGTEGVTQLKLTVVEDVTVGRRQAVAWLVAMHKAAKLLYESRDQ

SEQ ID NO: 14375 - protein, 93 aa, Homo Sapiens
MSSEVSARRDAKKLVRSPSGLRMVPEHRAFGSPFGLEEPQWVPDKECRRCMQCDAKFDFLTRKVRRIPAAWWGAQGLATGGARVQRPAQGPRV

SEQ ID NO: 14376 - protein, 62 aa, Homo Sapiens
MSSEVSARRDAKKLVRSPSGLRMVPEHRAFGSPFGLEEPQWVPDKEEPPSSSRLETQRNLKL

SEQ ID NO: 14377 - protein, 115 aa, Homo Sapiens
  misc_feature (1)..(1): Xaa can be any naturally occurring amino acid
XKVLLSGATFLVTFGNSEKPETMTCRLSNNQRYLFLDGDSHYEIEIVHISTVQILTEGFPPGEKDIHAYTSLRGSQPASEGQPLPPHRGSPHAAGPFLPSPPGFCPRGGPCQGSL

SEQ ID NO: 14378 - protein, 167 aa, Homo Sapiens
MLTVALLALLCASASGNAIQARSSSYSGEYGGGGGKRFSHSGNQLDGPITALRVRVNTYYIVGLQVRYGKVWSDYVGGRNGDLEEIFLHPGESVIQVSGKYKWYLKKLVFVTDKGRYLSFGKDSGTSFNAVPLHPNTVLRFISGRSGSLIDAIGLHWDVYPSSCSRC

SEQ ID NO: 14379 - protein, 208 aa, Homo Sapiens
MGAQGAQESIKAMWRVPGTTRRPVTGESPGMHRPEAMLLLLTLALLGGPTWAGKMYGPGGGKYFSTTEDYDHEITGLRVSVGLLLVKSVQVKLGDSWDVKLGALGGNTQEVTLQPGEYITKVFVAFQAFLRGMVMYTSKDRYFYFGKLDGQISSAYPSQEGQVLVGIYGQYQLLGIKSIGFEWNYPLEEPTTEPPVNLTYSANSPVGR

SEQ ID NO: 14380 - protein, 178 aa, Homo Sapiens
MHRPEAMLLLLTLALLGGPTWAGKMYGPGGGKYFSTTEDYDHEITGLRVSVGLLLVKSVQVKLGDSWDVKLGALGGNTQEVTLQPGEYITKVFVAFQAFLRGMVMYTSKDRYFYFGKLDGQISSAYPSQEGQVLVGIYGQYQLLGIKSIGFEWNYPLEEPTTEPPVNLTYSANSPVGR

SEQ ID NO: 14381 - protein, 95 aa, Homo Sapiens
  misc_feature (1)..(1): Xaa can be any naturally occurring amino acid
XAQGAQESIKAMWRVPGTTRRPVTGESPGMHRPEAMLLLLTLALLGGPTWAGKMYGPGGGKYFSTTEDYDHEITGLRVSVGLLLVKRFLEGVIYE

SEQ ID NO: 14382 - protein, 69 aa, Homo Sapiens
  misc_feature (1)..(1): Xaa can be any naturally occurring amino acid
XRRPVTGESPGMHRPEAMLLLLTLALLGGPTWAGKMYGPGGGKYFSTTEDYDHEITGLRVSVGLLLVKR

SEQ ID NO: 14383 - protein, 372 aa, Homo Sapiens
MNGPCQSLRKAEGLLEGCTSAVTVFRKLPLDSKAQSQKMRYKTSLVMRKRLRLYRNTLKESSSSSGHHGPQLTAASSPSVFPGLHEEPPQASPSRPLNGLLRLGLPGDMYARPEPFPPGPAARSDALAAAAALHGYGGMNLTVNLAAPHGPGAFFRYMRQPIKQELICKWLAADGTATPSLCSKTFSTMHELVTHVTVEHVGGPEQANHICFWEECPRQGKPFKAKYKLVNHIRVHTGEKPFPCPFPGCGKVFARSENLKIHKRTHTGEKPFRCEFEGCERRFANSSDRKKHSHVHTSDKPYTCKVRGCDKCYTHPSSLRKHMKVHGRSPPPSSGYDSATPSALVSPSSDCGHKSQVASSAAVAARTADLSE

SEQ ID NO: 14384 - protein, 384 aa, Homo Sapiens
MPPFCRNAKLGLLSFLICAGRSLLPLGKNAFWLERIENNNTLWEKAQSQKMRYKTSLVMRKRLRLYRNTLKESSSSSGHHGPQLTAASSPSVFPGLHEEPPQASPSRPLNGLLRLGLPGDMYARPEPFPPGPAARSDALAAAAALHGYGGMNLTVNLAAPHGPGAFFRYMRQPIKQELICKWLAADGTATPSLCSKTFSTMHELVTHVTVEHVGGPEQANHICFWEECPRQGKPFKAKYKLVNHIRVHTGEKPFPCPFPGCGKVFARSENLKIHKRTHTGEKPFRCEFEGCERRFANSSDRKKHSHVHTSDKPYTCKVRGCDKCYTHPSSLRKHMKVHGRSPPPSSGYDSATPSALVSPSSDCGHKSQVASSAAVAARTADLSE

SEQ ID NO: 14385 - protein, 128 aa, Homo Sapiens
MRYKTSLVMRKRLRLYRNTLKESSEKPFRCEFEGCERRFANSSDRKKHSHVHTSDKPYTCKVRGCDKCYTHPSSLRKHMKVHGRSPPPSSGYDSATPSALVSPSSDCGHKSQVASSAAVAARTADLSE

SEQ ID NO: 14386 - protein, 68 aa, Homo Sapiens
MRYKTSLVMRKRLRLYRNTLKESSSSSGHHGPQLTAASSPSVFPGLHEEPPQASPSRPLNGLLRLGLP

SEQ ID NO: 14387 - protein, 77 aa, Homo Sapiens
MRYKTSLVMRKRLRLYRNTLKESSSSSGHHGPQLTAASSPSVFPGLHEEPPQASPSRPLNGLLRLGLPGDMYARPEP

SEQ ID NO: 14388 - protein, 229 aa, Homo Sapiens
MRYKTSLVMRKRLRLYRNTLKESSSSSGHHGPQLTAASSPSVFPGLHEEPPQASPSRPLNGLLRLGLPGDMYARPEPFPPGPAARSDALAAAAALHGYGGMNLTVNLAAPHGPGAFFRYMRQPIKQELICKWLAADGTATPSLCSKTFSTMHELVTHVTVEHVGGPEQANHICFWEECPRQGKPFKAKYKLVNHIRVHTGEKPFPCPFPGCGKVFARSENLKIHKRTHT

SEQ ID NO: 14389 - protein, 334 aa, Homo Sapiens
MRYKTSLVMRKRLRLYRNTLKESSSSSGHHGPQLTAASSPSVFPGLHEEPPQASPSRPLNGLLRLGLPGDMYARPEPFPPGPAARSDALAAAAALHGYGGMNLTVNLAAPHGPGAFFRYMRQPIKQELICKWLAADGTATPSLCSKTFSTMHELVTHVTVEHVGGPEQANHICFWEECPRQGKPFKAKYKLVNHIRVHTGEKPFPCPFPGCGKVFARSENLKIHKRTHTGEKPFRCEFEGCERRFANSSDRKKHSHVHTSDKPYTCKVRGCDKCYTHPSSLRKHMKVHGRSPPPSSGYDSATPSALVSPSSDCGHKSQVASSAAVAARTADLSE

SEQ ID NO: 14390 - protein, 334 aa, Homo Sapiens; identical to SEQ ID NO: 14389

SEQ ID NO: 14391 - protein, 334 aa, Homo Sapiens; identical to SEQ ID NO: 14389

SEQ ID NO: 14392 - protein, 497 aa, Homo Sapiens
MAMSSLGCLCALTVLIRYCNRDFDDEKILIQHQKAKHFKCHICHKKLYTGPGLAIHCMQVHKETIDAVPNAIPGRTDIELEIYGMEGIPEKDMDERRRLLEQKTQESQKKKQQDDSDEYDDDDSAASTSFQPQPVQPQQGYIPPMAQPGLPPVPGAPGMPPGIPPLMPGVPPLMPGMPPVMPGMPPGLHHQRKYTQSFCGENIMMPMGGMMPPGPGIPPLMPGMPPGMPPPVPRPGIPPMTQAQAVSAPGILNRPPAPTATVPAPQPPVTKPLFPSAGQMGTPVTSSSTASSNSESLSASSKALFPSTAQAQAAVQGPVGTDFKPLNSTPATTTEPPKPTFPAYTQSTASTTSTTNSTAAKPAASITSKPATLTTTSATSKLIHPDEDISLEERRAQLPKYQRNLPRPGQAPIGNPPVGPIGGMMPPQPGIPQQQGMRPPMPPHGQYGGHHQGMPGYLPGAMPPYGQGPPMVPPYQGGPPRPPMGMRPPVMSQGGRY

SEQ ID NO: 14393 - protein, 494 aa, Homo Sapiens
MGRKKKKQLKPWCWYCNRDFDDEKILIQHQKAKHFKCHICHKKLYTGPGLAIHCMQVHKETIDAVPNAIPGRTDIELEIYGMEGIPEKDMDERRRLLEQKTQESQKKKQQDDSDEYDDDDSAASTSFQPQPVQPQQGYIPPMAQPGLPPVPGAPGMPPGIPPLMPGVPPLMPGMPPVMPGMPPGLHHQRKYTQSFCGENIMMPMGGMMPPGPGIPPLMPGMPPGMPPPVPRPGIPPMTQAQAVSAPGILNRPPAPTATVPAPQPPVTKPLFPSAGQMGTPVTSSSTASSNSESLSASSKALFPSTAQAQAAVQGPVGTDFKPLNSTPATTTEPPKPTFPAYTQSTASTTSTTNSTAAKPAASITSKPATLTTTSATSKLIHPDEDISLEERRAQLPKYQRNLPRPGQAPIGNPPVGPIGGMMPPQPGIPQQQGMRPPMPPHGQYGGHHQGMPGYLPGAMPPYGQGPPMVPPYQGGPPRPPMGMRPPVMSQGGRY

SEQ ID NO: 14394 - protein, 463 aa, Homo Sapiens
MGRKKKKQLKPWCWYCNRDFDDEKILIQHQKAKHFKCHICHKKLYTGPGLAIHCMQVHKETIDAVPNAIPGRTDIELEIYGMEGIPEKDMDERRRLLEQKTQESQKKKQQDDSDEYDDDDSAASTSFQPQPVQPQQGYIPPMAQPGLPPVPGAPGMPPGIPPLMPGVPPLMPGMPPVMPGMPPGLHHQRKYTQSFCGENIMMPMGGMMPPGPGIPPLMPGMPPGMPPPVPRPGIPPMTQAQAVSAPGILNRPPAPTATVPAPQPPVTKPLFPSAGQAQAAVQGPVGTDFKPLNSTPATTTEPPKPTFPAYTQSTASTTSTTNSTAAKPAASITSKPATLTTTSATSKLIHPDEDISLEERRAQLPKYQRNLPRPGQAPIGNPPVGPIGGMMPPQPGIPQQQGMRPPMPPHGQYGGHHQGMPGYLPGAMPPYGQGPPMVPPYQGGPPRPPMGMRPPVMSQGGRY

SEQ ID NO: 14395 - protein, 493 aa, Homo Sapiens
MGRKKKKQLKPWCWYCNRDFDDEKILIQHQKAKHFKCHICHKKLYTGPGLAIHCMQVHKETIDAVPNAIPGRTDIELEIYGMEGIPEKDMDERRRLLEQKTQESQKKKQQDDSDEYDDDDSAASTSFQPQPVQPQQGYIPPMAQPGLPPVPGAPGMPPGIPPLMPGVPPLMPGMPPVMPGMPPGLHHQRKYTQSFCGENIMMPMGGMMPPGPGIPPLMPGMPPGMPPPVPRPGIPPMTQAQAVSAPGILNRPPAPTATVPAPQPPVTKPLFPSAGQMGTPVTSSSTASSNSESLSASSKALFPSTAQAQAAVQGPVGTDFKPLNSTPATTTEPPKPTFPAYTQSTASTTSTTNSTAAKPAASITSKPATLTTTSATSKLIHPDEDISLEERRAQLPKYQRNLPRPGQAPIGNPPVGPIGGMMPPQPGIPQQQGMRPPMPPHGQYGGHHQGMPGYLPGAMPPYGQGPPMVPPYQGGPPRPPMGMRPPVMSQALP

SEQ ID NO: 14396 - protein, 478 aa, Homo Sapiens
MGRKKKKQLKPWCWYCNRDFDDEKILIQHQKAKHFKCHICHKKLYTGPGLAIHCMQVHKETIDAVPNAIPGRTDIELEIYGMEGIPEKDMDERRRLLEQKTQESQKKKQQDDSDEYDDDDSAASTSFQPQPVQPQQGYIPPMAQPGLPPVPGAPGMPPGIPPLMPGVPPLMPGMPPVMPGMPPGMMPMGGMMPPGPGIPPLMPGMPPGMPPPVPRPGIPPMTQAQAVSAPGILNRPPAPTATVPAPQPPVTKPLFPSAGQMGTPVTSSSTASSNSESLSASSKALFPSTAQAQAAVQGPVGTDFKPLNSTPATTTEPPKPTFPAYTQSTASTTSTTNSTAAKPAASITSKPATLTTTSATSKLIHPDEDISLEERRAQLPKYQRNLPRPGQAPIGNPPVGPIGGMMPPQPGIPQQQGMRPPMPPHGQYGGHHQGMPGYLPGAMPPYGQGPPMVPPYQGGPPRPPMGMRPPVMSQGGRY

SEQ ID NO: 14397 - protein, 46 aa, Homo Sapiens
MQVHKETIDAVPNAIPGRTDIELEIYGMEGIPEKDMDERRRLLEQK

SEQ ID NO: 14398 - protein, 74 aa, Homo Sapiens
MQVHKETIDAVPNAIPGRTDIELEIYGMEGIPEKDMDERRRLLEQKTQESQKKKQQDDSDEYDDDDSAASTSFQ

SEQ ID NO: 14399 - protein, 93 aa, Homo Sapiens
MQVHKETIDAVPNAIPGRTDIELEIYGMEGIPEKDMDERRRLLEQKTQESQKKKQQDDSDEYDDDDSAASTSFQPQPVQPQQGYIPPMAQPGL

SEQ ID NO: 14400 - protein, 96 aa, Homo Sapiens
MQVHKETIDAVPNAIPGRTDIELEIYGMEGIPEKDMDERRRLLEQKTQESQKKKQQDDSDEYDDDDSAASTSFQPQPVQPQQGYIPPMAQPGLPPV

SEQ ID NO: 14401 - protein, 198 aa, Homo Sapiens
MQVHKETIDAVPNAIPGRTDIELEIYGMEGIPEKDMDERRRLLEQKTQESQKKKQQDDSDEYDDDDSAASTSFQPQPVQPQQGYIPPMAQPGLPPVPGAPGMPPGIPPLMPGVPPLMPGMPPVMPGMPPGLHHQRKYTQSFCGENIMMPMGGMMPPGPGIPPLMPGMPPGMPPPVPRPGIPPMTQAQAVSAPGILNRP

SEQ ID NO: 14402 - protein, 341 aa, Homo Sapiens
  misc_feature (1)..(1): Xaa can be any naturally occurring amino acid
XGMPPGIPPLMPGVPPLMPGMPPVMPGMPPGLHHQRKYTQSFCGENIMMPMGGMMPPGPGIPPLMPGMPPGMPPPVPRPGIPPMTQAQAVSAPGILNRPPAPTATVPAPQPPVTKPLFPSAGQMGTPVTSSSTASSNSESLSASSKALFPSTAQAQAAVQGPVGTDFKPLNSTPATTTEPPKPTFPAYTQSTASTTSTTNSTAAKPAASITSKPATLTTTSATSKLIHPDEDISLEERRAQLPKYQRNLPRPGQAPIGNPPVGPIGGMMPPQPGIPQQQGMRPPMPPHGQYGGHHQGMPGYLPGAMPPYGQGPPMVPPYQGGPPRPPMGMRPPVMSQGGRY

SEQ ID NO: 14403 - protein, 80 aa, Homo Sapiens
MATSFRTASCWGLLSFKDISMEFTWDEWQLLDSTQKYLYRDVILENYHNLISVDGWEEWYQNNQDELESIERSYACSVLG

SEQ ID NO: 14404 - protein, 533 aa, Homo Sapiens
MATSFRTASCWGLLSFKDISMEFTWDEWQLLDSTQKYLYRDVILENYHNLISVGYHGTKPDLIFKLEQGEDPWIINAKISRQSCPDGWEEWYQNNQDELESIERSYACSVLGRLNLSKTHDSSRQRLYNTRGKSLTQNSAPSRSYLRKNPDKFHGYEEPYFLKHQRAHSIEKNCVCSECGKAFRCKSQLIVHLRIHTGERPYECSKCERAFSAKSNLNAHQRVHTGEKPYSCSECEKVFSFRSQLIVHQEIHTGGKPYGCSECGKAYSWKSQLLLHQRSHTGVKPYECSECGKAFSLKSPFVVHQRTHTGVKPHKCSECGKAFRSKSYLLVHIRMHTGEKPYQCSDCGKAFNMKTQLIVHQGVHTGNNPYQCGECGKAFGRKEQLTAHLRAHAGEKPYGCSECGKAFSSKSYLVIHRRTHTGERPYECSLCERAFCGKSQLIIHQRTHSTEKPYECNECEKAYPRKASLQIHQKTHSGEKPFKCSECGKAFTQKSSLSEHQRVHTGEKPWKCSECGKSFCWNSGLRIHRKTHK

SEQ ID NO: 14405 - protein, 153 aa, Homo Sapiens
MATSFRTASCWVVLLRRSLLMSSSVKFGNLLGVPWAQGNSALPEGLLSFKDISMEFTWDEWQLLDSTQKYLYRDVILENYHNLISVGYHGTKPDLIFKLEQGEDPWIINAKISRQSCPDGWEEWYQNNQDELESIERSYACSVLGRLNLSKTH

SEQ ID NO: 14406 - protein, 513 aa, Homo Sapiens
MEFTWDEWQLLDSTQKYLYRDVILENYHNLISVGYHGTKPDLIFKLEQGEDPWIINAKISRQSCPDGWEEWYQNNQDELESIERSYACSVLGRLNLSKTHDSSRQRLYNTRGKSLTQNSAPSRSYLRKNPDKFHGYEEPYFLKHQRAHSIEKNCVCSECGKAFRCKSQLIVHLRIHTGERPYECSKCERAFSAKSNLNAHQRVHTGEKPYSCSECEKVFSFRSQLIVHQEIHTGGKPYGCSECGKAYSWKSQLLLHQRSHTGVKPYECSECGKAFSLKSPFVVHQRTHTGVKPHKCSECGKAFRSKSYLLVHIRMHTGEKPYQCSDCGKAFNMKTQLIVHQGVHTGNNPYQCGECGKAFGRKEQLTAHLRAHAGEKPYGCSECGKAFSSKSYLVIHRRTHTGERPYECSLCERAFCGKSQLIIHQRTHSTEKPYECNECEKAYPRKASLQIHQKTHSGEKPFKCSECGKAFTQKSSLSEHQRVHTGEKPWKCSECGKSFCWNSGLRIHRKTHK

SEQ ID NO: 14407 - protein, 264 aa, Homo Sapiens
MAALFLSAPPQAEVTFEDVAVYLSREEWGRLGPAQRGLYRDVMLETYGNLVSLALGTRTEYKELTSQETFGEEDPQGSEPVEACDHISKSEGSLEKLVEQRGPRAVTLTNGESSRESGGNLRLLSRPVPDQRPHKCDICEQSFEQRSYLNNHKRVHRSKKTNTVRNSGEIFSANLVVKEDQKIPTGKKLHYCSYCGKTFRYSANLVKHQRLHTEEKPYKCDECGKAFSQSCEFINHRRMHSGEIPYRCDECGKTFTRRPNLMKH

SEQ ID NO: 14408 - protein, 539 aa, Homo Sapiens
MAALFLSAPPQAEVTFEDVAVYLSREEWGRLGPAQRGLYRDVMLETYGNLVSLGVGPAGPKPGVISQLERGDEPWVLDVQGTSGKEHLRVNSPALGTRTEYKELTSQETFGEEDPQGSEPVEACDHISKSEGSLEKLVEQRGPRAVTLTNGESSRESGGNLRLLSRPVPDQRPHKCDICEQSFEQRSYLNNHKRVHRSKKTNTVRNSGEIFSANLVVKEDQKIPTGKKLHYCSYCGKTFRYSANLVKHQRLHTEEKPYKCDECGKAFSQSCEFINHRRMHSGEIPYRCDECGKTFTRRPNLMKHQRIHTGEKPYKCGECGKHFSAYSSLIYHQRIHTGEKPYKCNDCGKAFSDGSILIRHRRTHTGEKPFECKECGKGFTQSSNLIQHQRIHTGEKPYKCNECEKAFIQKTKLVEHQRSHTGEKPYECNDCGKVFSQSTHLIQHQRIHTGEKPYKCSECGKAFHNSSRLIHHQRLHHGEKPYRCSDCKKAFSQSTYLIQHRRIHTGEKPYKCSECGKAFRHSSNMCQHQRIHLREDFSM

SEQ ID NO: 14409 - protein, 158 aa, Homo Sapiens
MLLLLSDQLLLTALRKPNPQAMAALFLSAPPQAEVTFEDVAVYLSREEWGRLGPAQRGLYRDVMLETYGNLVSLALGTRTEYKELTSQETFGEEDPQGSEPVEACDHISKSEGSLEKLVEQRGPRAVTLTNGESSRESGGNLRLLSRPVPDQRPHKCD

SEQ ID NO: 14410 - protein, 560 aa, Homo Sapiens
MLLLLSDQLLLTALRKPNPQAMAALFLSAPPQAEVTFEDVAVYLSREEWGRLGPAQRGLYRDVMLETYGNLVSLGVGPAGPKPGVISQLERGDEPWVLDVQGTSGKEHLRVNSPALGTRTEYKELTSQETFGEEDPQGSEPVEACDHISKSEGSLEKLVEQRGPRAVTLTNGESSRESGGNLRLLSRPVPDQRPHKCDICEQSFEQRSYLNNHKRVHRSKKTNTVRNSGEIFSANLVVKEDQKIPTGKKLHYCSYCGKTFRYSANLVKHQRLHTEEKPYKCDECGKAFSQSCEFINHRRMHSGEIPYRCDECGKTFTRRPNLMKHQRIHTGEKPYKCGECGKHFSAYSSLIYHQRIHTGEKPYKCNDCGKAFSDGSILIRHRRTHTGEKPFECKECGKGFTQSSNLIQHQRIHTGEKPYKCNECEKAFIQKTKLVEHQRSHTGEKPYECNDCGKVFSQSTHLIQHQRIHTGEKPYKCSECGKAFHNSSRLIHHQRLHHGEKPYRCSDCKKAFSQSTYLIQHRRIHTGEKPYKCSECGKAFRHSSNMCQHQRIHLREDFSM

SEQ ID NO: 14411 - protein, 464 aa, Homo Sapiens
MAAAALRDPAQGYVTFEDVAVYFSQEEWRLLDDAQRLLYRNVMLENFTLLASLGCWHGAEAEEAPEQIASVGLLSSNIQQHQKQHCGEKPLKRQEGRVPVLRSCKVHLSEKSLQSREVGKALLISSGVLKHQVTHTGEKSHRSSKSREAFHAGKRHYKCSECGKAFGQKYLLVQHQRLHAGKKTYECSECGKLFRDMSNLFIHQIVHTGERPYGCSNCGKSFSRNAHLIEHQRVHTGEKPFTCSECGKAFRHNSTLVQHHKIHTGVRPYECSECGKLFSFNSSLMKHQRIHTGERPYKCSECGKFYSHKSNLIKHWRVHTGERPYKCSDCGKFFTQCSSLMQHQKVHTGEKPFKCNECGRFFRENSTLVRHQRVHTGAKPYECRECGKFFSQSSTLMQHRKVHIGEKPFKCNECGRLFRENSSLVKHQRVHTGAKPYECRECGKFFRHNSSLFKHRRIHTGEMQ

SEQ ID NO: 14412 - protein, 113 aa, Homo Sapiens
MAAAALRDPAQGYVTFEDVAVYFSQEEWRLLDDAQRLLYRNVMLENFTLLASLGKVLTPHPSILSWARLFLLFLGRGLFFPKLNCGHSFLLQYPEVAIVIGLGCVYYHLLSPS

SEQ ID NO: 14413 - protein, 497 aa, Homo Sapiens
MAAAALRDPAQGYVTFEDVAVYFSQEEWRLLDDAQRLLYRNVMLENFTLLASLGLASSKTHEITQLESWEEPFMPAWEVVTSAIPRGCWHGAEAEEAPEQIASVGLLSSNIQQHQKQHCGEKPLKRQEGRVPVLRSCKVHLSEKSLQSREVGKALLISSGVLKHQVTHTGEKSHRSSKSREAFHAGKRHYKCSECGKAFGQKYLLVQHQRLHAGKKTYECSECGKLFRDMSNLFIHQIVHTGERPYGCSNCGKSFSRNAHLIEHQRVHTGEKPFTCSECGKAFRHNSTLVQHHKIHTGVRPYECSECGKLFSFNSSLMKHQRIHTGERPYKCSECGKFYSHKSNLIKHWRVHTGERPYKCSDCGKFFTQCSSLMQHQKVHTGEKPFKCNECGRFFRENSTLVRHQRVHTGAKPYECRECGKFFSQSSTLMQHRKVHIGEKPFKCNECGRLFRENSSLVKHQRVHTGAKPYECRECGKFFRHNSSLFKHRRIHTGEMQ

SEQ ID NO: 14414 - protein, 121 aa, Homo Sapiens
MAAAALRDPAQQGYVTFEDVAVYFSQEEWRLLDDAQRLLYRNVMLENFTLLASLGCWHGAEAEEAPEQIASVGLLSSNIQQHQKQHCGEKPLKRQEGRVPVLRSCKVHLSEKSLQSREVGK

SEQ ID NO: 14415 - protein, 442 aa, Homo Sapiens
MAAAALRDPAQQGYVTFEDVAVYFSQEEWRLLDDAQRLLYRNVMLENFTLLASLGLASSKTHEITQLESWEEPFMPAWEVVTSAIPRGCWHGAEAEEAPEQIASVGLLSSNIQQHQKQHCGEKPLKRQEGRVPVLRSCKVHLSEKSLQSREVGKALLISSGVLKHQVTHTGEKSHRSSKSREAFHAGKRHYKCSECGKAFGQKYLLVQHQRLHAGKKTYECSECGKLFRDMSNLFIHQIVHTGERPYGCSNCGKSFSRNAHLIEHQRVHTGEKPFTCSECGKAFRHNSTLVQHHKIHTGVRPYECSECGKLFSFNSSLMKHQRIHTGERPYKCSECGKFYSHKSNLIKHWRVHTGERPYKCSDCGKFFTQCSSLMQHQKVHTGEKPFKCNECGRFFRENSSLVKHQRVHTGAKPYECRECGKFFRHNSSLFKHRRIHTGEMQ

SEQ ID NO: 14416 - protein, 498 aa, Homo Sapiens
MAAAALRDPAQQGYVTFEDVAVYFSQEEWRLLDDAQRLLYRNVMLENFTLLASLGLASSKTHEITQLESWEEPFMPAWEVVTSAIPRGCWHGAEAEEAPEQIASVGLLSSNIQQHQKQHCGEKPLKRQEGRVPVLRSCKVHLSEKSLQSREVGKALLISSGVLKHQVTHTGEKSHRSSKSREAFHAGKRHYKCSECGKAFGQKYLLVQHQRLHAGKKTYECSECGKLFRDMSNLFIHQIVHTGERPYGCSNCGKSFSRNAHLIEHQRVHTGEKPFTCSECGKAFRHNSTLVQHHKIHTGVRPYECSECGKLFSFNSSLMKHQRIHTGERPYKCSECGKFYSHKSNLIKHWRVHTGERPYKCSDCGKFFTQCSSLMQHQKVHTGEKPFKCNECGRFFRENSTLVRHQRVHTGAKPYECRECGKFFSQSSTLMQHRKVHIGEKPFKCNECGRLFRENSSLVKHQRVHTGAKPYECRECGKFFRHNSSLFKHRRIHTGEMQ

SEQ ID NO: 14417 - protein, 97 aa, Homo Sapiens
MAAAALRDPAQQGYVTFEDVAVYFSQEEWRLLDDAQRLLYRNVMLENFTLLASLGLASSKTHEITQLESWEEPFMPAWEVVTSAIPRGSWWVELREV

SEQ ID NO: 14418 - protein, 173 aa, Homo Sapiens
MAAAALRDPAQVPVAADLLTDHEEGYVTFEDVAVYFSQEEWRLLDDAQRLLYRNVMLENFTLLASLGCWHGAEAEEAPEQIASVGLLSSNIQQHQKQHCGEKPLKRQEGRVPVLRSCKVHLSEKSLQSREVGKALLISSGVLKHQVTHTGEKSHRSSKSREAFHAGKRHYKCS

SEQ ID NO: 14419 - protein, 87 aa, Homo Sapiens
MAAAALRDPAQVPVAADLLTDHEEGYVTFEDVAVYFSQEEWRLLDDAQRLLYRNVMLENFTLLASLGKVLTPHPSILSWARLFLLFL

SEQ ID NO: 14420 - protein, 510 aa, Homo Sapiens
MAAAALRDPAQVPVAADLLTDHEEGYVTFEDVAVYFSQEEWRLLDDAQRLLYRNVMLENFTLLASLGLASSKTHEITQLESWEEPFMPAWEVVTSAIPRGCWHGAEAEEAPEQIASVGLLSSNIQQHQKQHCGEKPLKRQEGRVPVLRSCKVHLSEKSLQSREVGKALLISSGVLKHQVTHTGEKSHRSSKSREAFHAGKRHYKCSECGKAFGQKYLLVQHQRLHAGKKTYECSECGKLFRDMSNLFIHQIVHTGERPYGCSNCGKSFSRNAHLIEHQRVHTGEKPFTCSECGKAFRHNSTLVQHHKIHTGVRPYECSECGKLFSFNSSLMKHQRIHTGERPYKCSECGKFYSHKSNLIKHWRVHTGERPYKCSDCGKFFTQCSSLMQHQKVHTGEKPFKCNECGRFFRENSTLVRHQRVHTGAKPYECRECGKFFSQSSTLMQHRKVHIGEKPFKCNECGRLFRENSSLVKHQRVHTGAKPYECRECGKFFRHNSSLFKHRRIHTGEMQ

SEQ ID NO: 14421 - protein, 478 aa, Homo Sapiens
MAAAALRDPAQVPVAADLLTDHEEQGYVTFEDVAVYFSQEEWRLLDDAQRLLYRNVMLENFTLLASLGCWHGAEAEEAPEQIASVGLLSSNIQQHQKQHCGEKPLKRQEGRVPVLRSCKVHLSEKSLQSREVGKALLISSGVLKHQVTHTGEKSHRSSKSREAFHAGKRHYKCSECGKAFGQKYLLVQHQRLHAGKKTYECSECGKLFRDMSNLFIHQIVHTGERPYGCSNCGKSFSRNAHLIEHQRVHTGEKPFTCSECGKAFRHNSTLVQHHKIHTGVRPYECSECGKLFSFNSSLMKHQRIHTGERPYKCSECGKFYSHKSNLIKHWRVHTGERPYKCSDCGKFFTQCSSLMQHQKVHTGEKPFKCNECGRFFRENSTLVRHQRVHTGAKPYECRECGKFFSQSSTLMQHRKVHIGEKPFKCNECGRLFRENSSLVKHQRVHTGAKPYECRECGKFFRHNSSLFKHRRIHTGEMQ

SEQ ID NO: 14422 - protein, 115 aa, Homo Sapiens [sequence omitted]

SEQ ID NO: 14423 - protein, 511 aa, Homo Sapiens
MAAAALRDPAQVPVAADLLTDHEEQGYVTFEDVAVYFSQEEWRLLDDAQRLLYRNVMLENFTLLASLGLASSKTHEITQLESWEEPFMPAWEVVTSAIPRGCWHGAEAEEAPEQIASVGLLSSNIQQHQKQHCGEKPLKRQEGRVPVLRSCKVHLSEKSLQSREVGKALLISSGVLKHQVTHTGEKSHRSSKSREAFHAGKRHYKCSECGKAFGQKYLLVQHQRLHAGKKTYECSECGKLFRDMSNLFIHQIVHTGERPYGCSNCGKSFSRNAHLIEHQRVHTGEKPFTCSECGKAFRHNSTLVQHHKIHTGVRPYECSECGKLFSFNSSLMKHQRIHTGERPYKCSECGKFYSHKSNLIKHWRVHTGERPYKCSDCGKFFTQCSSLMQHQKVHTGEKPFKCNECGRFFRENSTLVRHQRVHTGAKPYECRECGKFFSQSSTLMQHRKVHIGEKPFKCNECGRLFRENSSLVKHQRVHTGAKPYECRECGKFFRHNSSLFKHRRIHTGEMQ

SEQ ID NO: 14424 - protein, 110 aa, Homo Sapiens
MAAAALRDPAQVPVAADLLTDHEEQGYVTFEDVAVYFSQEEWRLLDDAQRLLYRNVMLENFTLLASLGLASSKTHEITQLESWEEPFMPAWEVVTSAIPRGSWWVELREV

SEQ ID NO: 14425 - protein, 50 aa, Homo Sapiens
MLENFTLLASLGCWHGAEAEEAPEQIASVGLLSSNIQQHQKQHCGEKPLK

SEQ ID NO: 14426 - protein, 77 aa, Homo Sapiens
MASFGASLWPDLGACSQHLSLYHSVTVELAASTARHPASSLQEDSVAFEDVAVTFTQEEWALLDPSQKNLCRDVMQE

SEQ ID NO: 14427 - protein, 207 aa, Homo Sapiens
MDSVAFEDVAVTFTQEEWALLDPSQKNLCRDVMQETFRNLASIGKKWKPQNIYVEYENLRRNLRIVGERLFESKEGHQHGEILTQVPDDMLKKTTTGVKSCESSVYGEVGSAHSSLNRHIRDDTGHKAYEYQEYGQKPYKCKYCKKPFNCLSSVQTHERAHSGRKLYVCEECGKTFISHSNLQRHRIMHRGDGPYKCKFCGKALMFL

SEQ ID NO: 14428 - protein, 77 aa, Homo Sapiens
MFQDSVAFEDVAVTFTQEEWALLDPSQKNLCRDVMQETFRNLASIGKKWKPQNIYVEYENLRRNLRIVGERLFESKE

SEQ ID NO: 14429 - protein, 41 aa, Homo Sapiens
MGDRNCRENHASMPGKVSGSLEVMKSMFKVLTDLVPGFSGL

SEQ ID NO: 14430 - protein, 117 aa, Homo Sapiens
MLVLSILLYTCEMFQDSVAFEDVAVTFTQEEWALLDPSQKNLCRDVMQETFRNLASIGKKWKPQNIYVEYENLRRNLRIVGERLFESKEGHQHGEILTQVPDDMLKKTTTGVKSCES

SEQ ID NO: 14431 - protein, 166 aa, Homo Sapiens
MLVLSILLYTCEMFQDSVAFEDVAVTFTQEEWALLDPSQKNLCRDVMQETFRNLASIGKKWKPQNIYVEYENLRRNLRIVGERLFESKEGHQHGEILTQVPDDMLKKTTTGVKSCESSVYGEVGSAHSSLNRHIRDDTGHKAYEYQEYGQKPYKCKYCKKPFNCLS

SEQ ID NO: 14432 - protein, 673 aa, Homo Sapiens
MMFQDSVAFEDVAVTFTQEEWALLDPSQKNLCRDVMQETFRNLASIGKKWKPQNIYVEYENLRRNLRIVGERLFESKEGHQHGEILTQVPDDMLKKTTTGVKSCESSVYGEVGSAHSSLNRHIRDDTGHKAYEYQEYGQKPYKCKYCKKPFNCLSSVQTHERAHSGRKLYVCEECGKTFISHSNLQRHRIMHRGDGPYKCKFCGKALMFLSLYLIHKRTHTGEKPYQCKQCGKAFSHSSSLRIHERTHTGEKPYKCNECGKAFHSSTCLHAHKRTHTGEKPYECKQCGKAFSSSHSFQIHERTHTGEKPYECKECGKAFKCPSSVRRHERTHSRKKPYECKHCGKVLSYLTSFQNHLGMHTGEISHKCKICGKAFYSPSSLQTHEKTHTGEKPYKCNQCGKAFNSSSSFRYHERTHTGEKPYECKQCGKAFRSASLLQTHGRTHTGEKPYACKECGKPFSNFSFFQIHERMHREEKPYECKGYGKTFSLPSLFHRHERTHTGGKTYECKQCGRSFNCSSSFRYHGRTHTGEKPYECKQCGKAFRSASQLQIHGRTHTGEKPYECKQCGKAFGSASHLQMHGRTHTGEKPYECKQCGKSFGCASRLQMHGRTHTGEKPYKCKQCGKAFGCPSNLRRHGRTHTGEKPYKCNQCGKVFRCSSQLQVHGRAHCIDTP

SEQ ID NO: 14433 - protein, 52 aa, Homo Sapiens
MQETFRNLASIGKKWKPQNIYVEYENLRRNLRIVGERLFESKEGHQHGEILT

SEQ ID NO: 14434 - protein, 119 aa, Homo Sapiens
MQETFRNLASIGKKWKPQNIYVEYENLRRNLRIVGERLFESKEGHQHGEILTQVPDDMLKKTTTGVKSCESSVYGEVGSAHSSLNRHIRDDTGHKAYEYQEYGQKPYKCKYCKKPFNCL

SEQ ID NO: 14435 - protein, 638 aa, Homo Sapiens
MQETFRNLASIGKKWKPQNIYVEYENLRRNLRIVGERLFESKEGHQHGEILTQVPDDMLKKTTTGVKSCESSVYGEVGSAHSSLNRHIRDDTGHKAYEYQEYGQKPYKCKYCKKPFNCLSSVQTHERAHSGRKLYVCEECGKTFISHSNLQRHRIMHRGDGPYKCKFCGKALMFLSLYLIHKRTHTGEKPYQCKQCGKAFSHSSSLRIHERTHTGEKPYKCNECGKAFHSSTCLHAHKRTHTGEKPYECKQCGKAFSSSHSFQIHERTHTGEKPYECKECGKAFKCPSSVRRHERTHSRKKPYECKHCGKVLSYLTSFQNHLGMHTGEISHKCKICGKAFYSPSSLQTHEKTHTGEKPYKCNQCGKAFNSSSSFRYHERTHTGEKPYECKQCGKAFRSASLLQTHGRTHTGEKPYACKECGKPFSNFSFFQIHERMHREEKPYECKGYGKTFSLPSLFHRHERTHTGGKTYECKQCGRSFNCSSSFRYHGRTHTGEKPYECKQCGKAFRSASQLQIHGRTHTGEKPYECKQCGKAFGSASHLQMHGRTHTGEKPYECKQCGKSFGCASRLQMHGRTHTGEKPYKCKQCGKAFGCPSNLRRHGRTHTGEKPYKCNQCGKVFRCSSQLQVHGRAHCIDTP

SEQ ID NO: 14436 - protein, 518 aa, Homo Sapiens
MAVALGCAIQASLNQGSVFQEYDTDCEVFRQRFRQFQYREAAGPHEAFNKLWELCCQWLKPKMRSKEQILELLVLEQFLTILPTEIETWVREHCPENRERVVSLIEDLQRELEIPEQQVDMHDMLLEELAPVGTAHIPPTMHLESPALQVMGPAQEAPVAEAWIPQAGPPELNYGATGECQNFLDPGYPLPKLDMNFSLENREEPWVKELQDSKEMKQLLDSKIGFEIGIENEEDTSKQKKMETMYPFIVTLEGNALQGPILQKDYVQLENQWETPPEDLQTDLAKLVDQQNPTLGETPENSNLEEPLNPKPHKKKSPGEKPHRCPQCGKCFARKSQLTGHQRIHSGEEPHKCPECGKRFLRSSDLYRHQRLHTGERPYECTVCKKRFTRRSHLIGHQRTHSEEETYKCLECGKSFCHGSSLKRHLKTHTGEKPHRCHNCGKSFSRLTALTLHQRTHTEERPFKCNYCGKSFRQRPSLVIHLRIHTGEKPYKCTHCSKSFRQRAGLIMHQVTHFRGLI

SEQ ID NO: 14437 - protein, 164 aa, Homo Sapiens
MAVALGCAIQASLNQGSVFQEYDTDCEVFRQRFRQFQYREAAGPHEAFNKLWELCCQWLKPKMRSKEQILELLVLEQFLTILPTEIETWVREHCPENRERVVSLIEDLQRELEIPEQQVRKECGIFVIGPKEVAEAAGTRPHICLYVIPQPQDFSRVLFLFLFC

SEQ ID NO: 14438 - protein, 233 aa, Homo Sapiens
MKDRQVDAQAQEREHDDPTGQPGAPQLTQNIPRGPAGSKVFSVWPSGARSEQRSAFSKPTKRPAERPELTSVFPAGESADALGELSGLLNTTDLACWGRLSTPKLLVGDLWNLQALPQNAPLCSTFLGAPTLWLEHTQAQVPPPSSSSTTSWALLPPTLTSLGLSTQNWCAKCNLSFRLTSDLVFHMRSHHKKEHAGPDPHSQKRREEALACPVCQEHFRERHHLSRHMTSHS

SEQ ID NO: 14439 - protein, 340 aa, Homo Sapiens
MPEWPPCLSVAPALVITMAAGKGAPLSPSAENRWRLSEPELGRGCKPVLLEKTNRLGPEAAVGRAGRDVGSAELALLVAPGKPRPGKPLPPKTRGEQRQSAFTELPRMKDRQVDAQAQEREHDDPTGQPGAPQLTQNIPRGPAGSKVFSVWPSGARSEQRSAFSKPTKRPAERPELTSVFPAGESADALGELSGLLNTTDLACWGRLSTPKLLVGDLWNLQALPQNAPLCSTFLGAPTLWLEHTQAQVPPPSSSSTTSWALLPPTLTSLGLSTQNWCAKCNLSFRLTSDLVFHMRSHHKKEHAGPDPHSQKRREEALACPVCQEHFRERHHLSRHMTSHS

SEQ ID NO: 14440 - protein, 252 aa, Homo Sapiens
MQLPPALCARLAAGPGAAEPLPVERDPAAGAAPFRFVARPVRFPREHQFFEDGDVQRHLYLQDVIMQVADVPEKPRVPAFACQVAGCCQVFDALDDYEHHYHTLHGNVCSFCKRAFPSGHLLDAHILEWHDSLFQILSERQDMYQCLVEGCTEKFKTSRDRKDHMVRMHLYPADFRFDKPKKSRSPASAEAPGDSGERSEGEAMEICSEPVAASPAPAGERRIYRHRIPSTICFGQGAARGFKSNKKKTKQC

SEQ ID NO: 14441 - protein, 262 aa, Homo Sapiens
MQLPPALCARLAAGPGAAEPLPVERDPAAGAAPFRFVARPVRFPREHQFFEDGDVQRHLYLQDVIMQVADVPEKPRVPAFACQVAGCCQVFDALDDYEHHYHTLHGNVCSFCKRAFPSGHLLDAHILEWHDSLFQILSERQDMYQCLVEGCTEKFKTSRDRKDHMVRMHLYPADFRFDKPKKSRSPASAEAPGDSGERSEGEAMEICSEPVAASPAPAGERRIYRHRSVSELFLKPVLNMCSVLRILGCTWAAALLILNSER

SEQ ID NO: 14442 - protein, 86 aa, Homo Sapiens
MAVGLLKAMYQELVTFRDVAVDFSQEEWDCLDSSQRHLYSNVMLENYRILVSLGLCFSKPSVILLLEQGKAPWMVKRELTKGLCSG

SEQ ID NO: 14443 - protein, 148 aa, Homo Sapiens
MAVGLLKAMYQELVTFRDVAVDFSQEEWDCLDSSQRHLYSNVMLENYRILVSLGLCFSKPSVILLLEQGKAPWMVKRELTKGLCSGWEPICETEELTPKQDFYEEHQSQKIIETLTSYNLEYSSLREEWKCEGYFERQPGNQKACFKE

SEQ ID NO: 14444 - protein, 536 aa, Homo Sapiens
MAVGLLKAMYQELVTFRDVAVDFSQEEWDCLDSSQRHLYSNVMLENYRILVSLGLCFSKPSVILLLEQGKAPWMVKRELTKGLCSGWEPICETEELTPKQDFYEEHQSQKIIETLTSYNLEYSSLREEWKCEGYFERQPGNQKACFKEEIITHEEPLFDEREQEYKSWGSFHQNPLLCTQKIIPKEEKVHKHDTQKRSFKKNLMAIKPKSVCAEKKLLKCNDCEKVFSQSSSLTLHQRIHTGEKPYKCIECGKAFSQRSNLVQHQRIHTGEKPYECKECRKAFSQNAHLVQHLRVHTGEKPYECKVCRKAFSQFAYLAQHQRVHTGEKPYECIECGKAFSNRSSIAQHQRVHTGEKPYECNVCGKAFSLRAYLTVHQRIHTGERPYECKECGKAFSQNSHLAQHQRIHTGEKPYKCQECRKAFSQIAYLAQHQRVHTGEKPYECIECGKAFSNDSSLTQHQRVHTGEKPYECTVCGKAFSYCGSLAQHQRIHTGERPYECKECKKTFRQHAHLAHHQRIHIGESLSPPNPVNHQVL

SEQ ID NO: 14445 - protein, 592 aa, Homo Sapiens
MCMYLFFLDFSIVGSGLRSGVWVSGSSSQAICVTPVRVESSEATAISQEKSQEEERMAVGLLKAMYQELVTFRDVAVDFSQEEWDCLDSSQRHLYSNVMLENYRILVSLGLCFSKPSVILLLEQGKAPWMVKRELTKGLCSGWEPICETEELTPKQDFYEEHQSQKIIETLTSYNLEYSSLREEWKCEGYFERQPGNQKACFKEEIITHEEPLFDEREQEYKSWGSFHQNPLLCTQKIIPKEEKVHKHDTQKRSFKKNLMAIKPKSVCAEKKLLKCNDCEKVFSQSSSLTLHQRIHTGEKPYKCIECGKAFSQRSNLVQHQRIHTGEKPYECKECRKAFSQNAHLVQHLRVHTGEKPYECKVCRKAFSQFAYLAQHQRVHTGEKPYECIECGKAFSNRSSIAQHQRVHTGEKPYECNVCGKAFSLRAYLTVHQRIHTGERPYECKECGKAFSQNSHLAQHQRIHTGEKPYKCQECRKAFSQIAYLAQHQRVHTGEKPYECIECGKAFSNDSSLTQHQRVHTGEKPYECTVCGKAFSYCGSLAQHQRIHTGERPYECKECKKTFRQHAHLAHHQRIHIGESLSPPNPVNHQVL

SEQ ID NO: 14446 - protein, 44 aa, Homo Sapiens
MCMYLFFLDFSIVSVTVLLDFMTRDRERKVVWPDRLTSKQTWPY

SEQ ID NO: 14447 - protein, 44 aa, Homo Sapiens
MLENYRILVSLGLCFSKPSVILLLEQGKAPWMVKRELTKGLCSG

SEQ ID NO: 14448 - protein, 306 aa, Homo Sapiens
MAQISSGGGGQSRCLLFALGSEMGSEKEQSPEPHLPEEGEGGKPWRVDDSEGSWIPPGEKEHGQESLSDELQETHPKKPWQKVTVRARELGDPIAHPRHEADEKPFICAQCGKTFNNTSNLRTHQRIHTGEKPYKCSECGKSFSRSSNRIRHERIHLEEKHYKCPKCQESFRRRSDLTTHQQDHLGKRPYRCDICGKSFSQSATLAVHHRTHLEPAPYICCECGKSFSNSSSFGVHHRTHTGERPYECTECGRTFSDISNFGAHQRTHRGEKPYRCTVCGKHFSRSSNLIRHQKTHLGEQAGKDSS

SEQ ID NO: 14449 - protein, 306 aa, Homo Sapiens; identical to SEQ ID NO: 14448

SEQ ID NO: 14450 - protein, 133 aa, Homo Sapiens
MAQISSGGGGQSRCLLFALVLAICVHSQGSEMGSEKEQSPEPHLPEEGEGGKPWRVDDSEGSWIPPGEKEHGQESLSDELQETHPKKPWQKVTVRARELGDPIAHPRHEADEKPFICAQCGKTFNNTSNLRTH

SEQ ID NO: 14451 - protein, 284 aa, Homo Sapiens
MGSEKEQSPEPHLPEEGEGGKPWRVDDSEGSWIPPGEKEHGQESLSDELQETHPKKPWQKVTVRARELGDPIAHPRHEADEKPFICAQCGKTFNNTSNLRTHQRIHTGEKPYKCSECGKSFSRSSNRIRHERIHLEEKHYKCPKCQESFRRRSDLTTHQQDHLGKRPYRCDICGKSFSQSATLAVHHRTHLEPAPYICCECGKSFSNSSSFGVHHRTHTGERPYECTECGRTFSDISNFGAHQRTHRGEKPYRCTVCGKHFSRSSNLIRHQKTHLGEQAGKDSS

SEQ ID NO: 14452 - protein, 284 aa, Homo Sapiens; identical to SEQ ID NO: 14451

SEQ ID NO: 14453 - protein, 284 aa, Homo Sapiens; identical to SEQ ID NO: 14451

SEQ ID NO: 14454 - protein, 315 aa, Homo Sapiens
MSLCSPTHSAEMSLFLQGPEEMLPLSSEGSEMGSEKEQSPEPHLPEEGEGGKPWRVDDSEGSWIPPGEKEHGQESLSDELQETHPKKPWQKVTVRARELGDPIAHPRHEADEKPFICAQCGKTFNNTSNLRTHQRIHTGEKPYKCSECGKSFSRSSNRIRHERIHLEEKHYKCPKCQESFRRRSDLTTHQQDHLGKRPYRCDICGKSFSQSATLAVHHRTHLEPAPYICCECGKSFSNSSSFGVHHRTHTGERPYECTECGRTFSDISNFGAHQRTHRGEKPYRCTVCGKHFSRSSNLIRHQKTHLGEQAGKDSS

SEQ ID NO: 14455 - protein, 296 aa, Homo Sapiens
MSLCSPTHSAEMSLFLQGPEEMLPLSSEGSEMGSEKEQSPEPHLPEEGEGGKPWRVDDSEGSWIPPGEKEHGQESLSDELQETHPKKPWQKVTVRARELGDPIAHPRHEADEKPFICAQCGKTFNNTSNLRTHQRIHTGEKPYKCSECGKSFSRSSNRIRHERIHLEEKHYKCPKCQESFRRRSDLTTHQQDHLGKRPYRCDICGKSFSQSATLAVHHRTHLEPAPYICCECGKSFSNSSSFGVHHRTHTGERPYECTECGRTFSDISNFGAHQRTHRGEKPYRCTVCGKHFSRSS

SEQ ID NO: 14456 - protein, 130 aa, Homo Sapiens
MLENYRNLVFVGIAASKPDLITCLEQGKEPWNVKRHEMVTEPPVVYSYFAQDLWPKQGKKNYFQKVILRTYKKCGRENLQLRKYCKSMDECKVHKECYNGLNQCLTTTQNKIFQYDKYVKVFHKFSNSNR

SEQ ID NO: 14457 - protein, 87 aa, Homo Sapiens
MPGPLGSLEMGVLTFRDVALEFSLEEWQCLDTAQQNLYRNVMLENYRNLVFVGIAASKPDLITCLEQGKEPWNVKRHEMVTEPPGLQ

SEQ ID NO: 14458 - protein, 572 aa, Homo Sapiens
MPGPLGSLEMGVLTFRDVALEFSLEEWQCLDTAQQNLYRNVMLENYRNLVFVGIAASKPDLITCLEQGKEPWNVKRHEMVTEPPVVYSYFAQDLWPKQGKKNYFQKVILRTYKKCGRENLQLRKYCKSMDECKVHKECYNGLNQCLTTTQNKIFQYDKYVKVFHKFSNSNRHKIGHTGKKSFKCKECEKSFCMLSHLAQHKRIHSGEKPYKCKECGKAYNEASNLSTHKRIHTGKKPYKCEECGKAFNRLSHLTTHKIIHTGKKPYKCEECGKAFNQSANLTTHKRIHTGEKPYKCEECGRAFSQSSTLTAHKIIHAGEKPYKCEECGKAFSQSSTLTTHKIIHTGEKFYKCEECGKAFSRLSHLTTHKRIHSGEKPYKCEECGKAFKQSSTLTTHKRIHAGEKFYKCEVCSKAFSRFSHLTTHKRIHTGEKPYKCEECGKAFNLSSQLTTHKIIHTGEKPYKCEECGKAFNQSSTLSKHKVIHTGEKPYKCEECGKAFNQSSHLTTHKMIHTGEKPYKCEECGKAFNNSSILNRHKMIHTGEKLYKPESCNNACDNIAKISKYKRNCAGEK

SEQ ID NO: 14459 - protein, 131 aa, Homo Sapiens
MSEETLQSKLAAAKKKLPWGAVQGSRAMSDLLLLLLDLTLLLLLMLLGFAGYSGQLAGVAVSAGSPPIPTSSMWSPMVRLGGFSPELQHLPQTLLHRCPLGQPCMGVLTFRDVALEFSLEEWQCLDTAQQN

SEQ ID NO: 14460 - protein, 75 aa, Homo Sapiens
MEAFALGPARRGRRRTRAAGSLLSRAAILLFISAFLVRVPSSGEGPRRPAGSAGTTAASPTLRIAFSCVTCIRFI

SEQ ID NO: 14461 - protein, 350 aa, Homo Sapiens
MEAFALGPARRGRRRTRAAGSLLSRAAILLFISAFLVRVPSSVGHLVRLPRAFRLTKDSVKIVGSTSFPVKAYVMLHQKSPHVLCVTQQLRNAELIDPSFQWYGPKGKVVSENRTAQITSTGSLVFQNFEESMSGIYTCFLEYKPTVEEIVKRLQLKYAIYAYREPHYYYQFTARYHAAPCNSIYNISFEKKLLQILSKLLLDLSCEISLLKSECHRVKMQRAGLQNELFFAFSVSSLDTEKGPKRCTDHNCEPYKRLFKAKNLIERFFNQQVEILGRRAEQLPQIYYIEGTLQMVWINRCFPGYGMNVQQHPKCPECCVICSPGSYNPRDGIHCLQCNSSLVYGAKTCL

SEQ ID NO: 14462 - protein, 351 aa, Homo Sapiens
MEAFALGPARRGRRRTRAAGSLLSRAAILLFISAFLVRVPSSVGHLVRLPRAFRLTKDSVKIVGSTSFPVKAYVMLHQKSPHVLCVTQQLRNAELIDPSFQWYGPKGKVVSVENRTAQITSTGSLVFQNFEESMSGIYTCFLEYKPTVEEIVKRLQLKYAIYAYREPHYYYQFTARYHAAPCNSIYNISFEKKLLQILSKLLLDLSCEISLLKSECHRVKMQRAGLQNELFFAFSVSSLDTEKGPKRCTDHNCEPYKRLFKAKNLIERFFNQQVEILGRRAEQLPQIYYIEGTLQMVWINRCFPGYGMNVQQHPKCPECCVICSPGSYNPRDGIHCLQCNSSLVYGAKTCL

SEQ ID NO: 14463 - protein, 72 aa, Homo Sapiens
MFLVGHLVRLPRAFRLTKDSVKIVGSTSFPVKAYVMLHQKSPHVLCVTQQLRNAELIDPSFQWYGPKGKVVS

SEQ ID NO: 14464 - protein, 218 aa, Homo Sapiens
MMRTCVLLSAVLWCLTGAYREPDYSYQMAVRFTTRSCIGRYNDVFFRVLKKILDSLISDLSCHVIEPSYKCHSVEIPEHGLIHELFIAFQVNPFAPGWKGACNGSVDCEDTTNHNILQARDRIEDFFRSQAYIFYHNFNKTLPAMHFVDHSLQVVRLDSCRPGFGKNERLHSNCASCCVVCSPATFSPDVNVTCQTCVSVLTYGAKSCPQTSNKNQQY

SEQ ID NO: 14465 - protein, 316 aa, Homo Sapiens
MMRTCVLLSAVLWCLTGDKIYVELHQNSPVLICMDFKLSKKEIVDPTYLWIGPNEKTLTGNNRINITETGQLMVKDFLEPLSGLYTCTLSYKTVKAETQEEKTVKKRYDFMVFAYREPDYSYQMAVRFTTRSCIGRYNDVFFRVLKKILDSLISDLSCHVIEPSYKCHSVEIPEHGLIHELFIAFQVNPFAPGWKGACNGSVDCEDTTNHNILQARDRIEDFFRSQAYIFYHNFNKTLPAMHFVDHSLQVVRLDSCRPGFGKNERLHSNCASCCVVCSPATFSPDVNVTCQTCVSVLTYGAKSCPQTSNKNQQYED

SEQ ID NO: 14466 - protein, 338 aa, Homo Sapiens
MMRTCVLLSAVLWCLTGVQCPRFTLFNKKGFIYGKTGQPDKIYVELHQNSPVLICMDFKLSKKEIVDPTYLWIGPNEKTLTGNNRINITETGQLMVKDFLEPLSGLYTCTLSYKTVKAETQEEKTVKKRYDFMVFAYREPDYSYQMAVRFTTRSCIGRYNDVFFRVLKKILDSLISDLSCHVIEPSYKCHSVEIPEHGLIHELFIAFQVNPFAPGWKGACNGSVDCEDTTNHNILQARDRIEDFFRSQAYIFYHNFNKTLPAMHFVDHSLQVVRLDSCRPGFGKNERLHSNCASCCVVCSPATFSPDVNVTCQTCVSVLTYGAKSCPQTSNKNQQYED

SEQ ID NO: 14467 - protein, 265 aa, Homo Sapiens
MMRTCVLLSAVLWCLTGVQCPRFTLFNKKGFIYGKTGQPDKIYVELHQNSPVLICMDFKLSKKEIVDPTYLWIGPNEKTLTGNNRINITETGQLMVKDFLEPLSGLYTCTLSYKTVKAETQEEKTVKKRYDFMVFVNPFAPGWKGACNGSVDCEDTTNHNILQARDRIEDFFRSQAYIFYHNFNKTLPAMHFVDHSLQVVRLDSCRPGFGKNERLHSNCASCCVVCSPATFSPDVNVTCQTCVSVLTYGAKSCPQTSNKNQQYED

SEQ ID NO: 14468 - protein, 330 aa, Homo Sapiens
EQCPENGEEAVTLVEDLEREPGRPRSSVTVSVKGQEVRLEKMTPPKSSQELLSVRQESVEPQPRGVPKKERARSPDLGPQEQMNPKEKLKPFQRSGLPFPKSGVVSRLEQGEPWIPDLLGSKEKELPSGSHIGDRRVHADLLPSKKDRRSWVEQDHWSFEDEKVAGVHWGYEETRTLLAILSQTEFYEALRNCHRNSQVYGAVAERLREYGFLRTLEQCRTKFKGLQKSYRKVKSGHPPETCPFFEEMEALMSAQVIALPSNGLEAAASHSGLVGSDAETEEPGQRGWQHEEGAEEAVAQESDSDDMDLEATPQDPNSAAPVVFRSPGGA

SEQ ID NO: 14469 - protein, 462 aa, Homo Sapiens
MAKSALRENGTNSETFRQRFRRFHYQEVAGPREAFSQLWELCCRWLRPEVRTKEQIVELLVLEQFLTVLPGEIQNWVQEQCPENGEEAVTLVEDLEREPGRPRSSVTVSVKGQEVRLEKMTPPKSSQELLSVRQESVEPQPRGVPKKERARSPDLGPQEQMNPKEKLKPFQRSGFEAGFENEDNSKRDISEEVQLHRTLLARSERKIPRYLHQGKGNESDCRSGRQWAKTSGEKRGKLTLPEKSLSEVLSQQRPCLGERPYKYLKYSKSFGPNSLLMHQVSHQVENPYKCADCGKSFSRSARLIRHRRIHTGEKPYKCLDCGKSFRDSSNFITHRRIHTGEKPYQCGECGKCFNQSSSLIIHQRTHTGEKPYQCEECGKSFNNSSHFSAHRRIHTGERPHVCPDCGKSFSKSSDLRAHHRTHTGEKPYGCHDCGKCFSKSSALNKHGEIHAREKLLTQSAPK

SEQ ID NO: 14470 - protein, 556 aa, Homo Sapiens
MAKSALRENGTNSETFRQRFRRFHYQEVAGPREAFSQLWELCCRWLRPEVRTKEQIVELLVLEQFLTVLPGEIQNWVQEQCPENGEEAVTLVEDLEREPGRPRSSVTVSVKGQEVRLEKMTPPKSSQELLSVRQESVEPQPRGVPKKERARSPDLGPQEQMNPKEKLKPFQRSGLPFPKSGVVSRLEQGEPWIPDLLGSKEKELPSGSHIGDRRVHADLLPSKKDRRSWVEQDHWSFEDEKVAGVHWGYEETRTLLAILSQTEFYEALRNCHRNSQVYGAVAERLREYGFLRTLEQCRTKFKGLQKSYRKVKSGHPPETCPFFEEMEALMSAQVIALPSNGLEAAASHSGLVGSDAETEEPGQRGWQHEEGAEEAVAQESDSDDMDLEATPQDPNSAAPVVFRSPGGVHWGYEETKTYLAILSETQFYEALRNCHRNSQLYGAVAERLWEYGFLRTPEQCRTKFKSLQTSYRKVKNGQAPETCPFFEEMDALVLKLDLRMKIIQNGIFLRKYNCIGHYLQDLKGKFPGIFIRVKAMRVTVDQEDSGQRPQGRKEEN

SEQ ID NO: 14471 - protein, 21 aa, Homo Sapiens
MMAKSALRENGTNSETFRQRF

SEQ ID NO: 14472 - protein, 852 aa, Homo Sapiens
MMAKSALRENGTNSETFRQRFRRFHYQEVAGPREAFSQLWELCCRWLRPEVRTKEQIVELLVLEQFLTVLPGEIQNWVQEQCPENGEEAVTLVEDLEREPGRPRSSVTVSVKGQEVRLEKMTPPKSSQELLSVRQESVEPQPRGVPKKERARSPDLGPQEQMNPKEKLKPFQRSGLPFPKSGVVSRLEQGEPWIPDLLGSKEKELPSGSHIGDRRVHADLLPSKKDRRSWVEQDHWSFEDEKVAGVHWGYEETRTLLAILSQTEFYEALRNCHRNSQVYGAVAERLREYGFLRTLEQCRTKFKGLQKSYRKVKSGHPPETCPFFEEMEALMSAQVIALPSNGLEAAASHSGLVGSDAETEEPGQRGWQHEEGAEEAVAQESDSDDMDLEATPQDPNSAAPVVFRSPGGVHWGYEETKTYLAILSETQFYEALRNCHRNSQLYGAVAERLWEYGFLRTPEQCRTKFKSLQTSYRKVKNGQAPETCPFFEEMDALVSVRVAAPPNDGQEETASCPVQGTSEAEAQKQAEEADEATEEDSDDDEEDTEIPPGAVITRAPVLFQSPRGFEAGFENEDNSKRDISEEVQLHRTLLARSERKIPRYLHQGKGNESDCRSGRQWAKTSGEKRGKLTLPEKSLSEVLSQQRPCLGERPYKYLKYSKSFGPNSLLMHQVSHQVENPYKCADCGKSFSRSARLIRHRRIHTGEKPYKCLDCGKSFRDSSNFITHRRIHTGEKPYQCGECGKCFNQSSSLIIHQRTHTGEKPYQCEECGKSFNNSSHFSAHRRIHTGERPHVCPDCGKSFSKSSDLRAHHRTHTGEKPYGCHDCGKCFSKSSALNKHGEIHAREKLLTQSAPK

SEQ ID NO: 14473 - protein, 199 aa, Homo Sapiens
MMAKSALRENGTNSETFRQRFRRFHYQEVAGPREAFSQLWELCCRWLRPEVRTKEQIVELLVLEQFLTVLPGEIQNWVQEQCPENGEEAVTLVEDLEREPGRPRSSVTVSVKGQEVRLEKMTPPKSSQELLSVRQESVEPQPRGVPKKERARSPDLGPQEQMNPKEKLKPFQRSGWSKESHGSQICWALRRKNFQVAAT

SEQ ID NO: 14474 - protein, 316 aa, Homo Sapiens
MSRKWRGGSDSRGRFRKRAWKTIFGHSLCEGAGSALGEDDTPEIITRVIKCSAGVSGTPAQGCTQEREGKKPRPGTTGADEPKGEAQTFSKERLEQGEPWIPDLLGSKEKELPSGSHIGDRRVHADLLPSKKDRRSWVEQDHWSFEDEKVAGVHWGYEETRTLLAILSQTEFYEALRNCHRNSQVYGAVAERLREYGFLRTLEQCRTKFKGLQKSYRKVKSGHPPETCPFFEEMEALMSAQVIALPSNGLEAAASHSGLVGSDAETEEPGQRGWQHEEGAEEAVAQESDSDDMDLEATPQDPNSAAPVVFRSPGGA

SEQ ID NO: 14475-14483 - skipped (9 entries)

SEQ ID NO: 14484 - protein, 594 aa, Artificial Sequence
  Synthetic Sequence
MGSSLDDEHILSALLQSDDELVGEDSDSEVSDHVSEDDVQSDTEEAFIDEVHEVQPTSSGSEILDEQNVIEQPGSSLASNRILTLPQRTIRGKNKHCWSTSKSTRRSRVSALNIVRSQRGPTRMCRNIYDPLLCFKLFFTDEIISEIVKWTNAEISLKRRESMTSATFRDTNEDEIYAFFGILVMTAVRKDNHMSTDDLFDRSLSMVYVSVMSRDRFDFLIRCLRMDDKSIRPTLRENDVFTPVRKIWDLFIHQCIQNYTPGAHLTIDEQLLGFRGRCPFRVYIPNKPSKYGIKILMMCDSGTKYMINGMPYLGRGTQTNGVPLGEYYVKELSKPVHGSCRNITCDNWFTSIPLAKNLLQEPYKLTIVGTVRSNKREIPEVLKNSRSRPVGTSMFCFDGPLTLVSYKPKPAKMVYLLSSCDEDASINESTGKPQMVMYYNQTKGGVDTLDQMCSVMTCSRKTNRWPMALLYGMINIACINSFIIYSHNVSSKGEKVQSRKKFMRNLYMSLTSSFMRKRLEAPTLKRYLRDNISNILPKEVPGTSDDSTEEPVMKKRTYCTYCPSKIRRKANASCKKCKKVICREHNIDMCQSCF

SEQ ID NO: 14485 - protein, 340 aa, Artificial Sequence
  Synthetic Sequence
MGKSKEISQDLRKKIVDLHKSGSSLGAISKRLKVPRSSVQTIVRKYKHHGTTQPSYRSGRRRVLSPRDERTLVRKVQINPRTTAKDLVKMLEETGTKVSISTVKRVLYRHNLKGRSARKKPLLQNRHKKARLRFATAHGDKDRTFWRNVLWSDETKIELFGHNDHRYVWRKKGEACKPKNTIPTVKHGGGSIMLWGCFAAGGTGALHKIDGIMRKENYVDILKQHLKTSVRKLKLGRKWVFQMDNDPKHTSKVVAKWLKDNKVKVLEWPSQSPDLNPIENLWAELKKRVRARRPTNLTQLHQLCQEEWAKIHPTYCGKLVEGYPKRLTQVKQFKGNATKY

SEQ ID NO: 14486 - protein, 340 aa, Artificial Sequence
  Synthetic Sequence
MGKSKEISQDLRKRIVDLHKSGSSLGAISKRLAVPRSSVQTIVRKYKHHGTTQPSYRSGRRRVLSPRDERTLVRKVQINPRTTAKDLVKMLEETGTKVSISTVKRVLYRHNLKGHSARKKPLLQNRHKKARLRFATAHGDKDRTFWRNVLWSDETKIELFGHNDHRYVWRKKGEACKPKNTIPTVKHGGGSIMLWGCFAAGGTGALHKIDGIMDAVQYVDILKQHLKTSVRKLKLGRKWVFQHDNDPKHTSKVVAKWLKDNKVKVLEWPSQSPDLNPIENLWAELKKRVRARRPTNLTQLHQLCQEEWAKIHPNYCGKLVEGYPKRLTQVKQFKGNATKY

SEQ ID NO: 14487 - protein, 594 aa, Artificial Sequence
  Synthetic Sequence
MGSSLDDEHILSALLQSDDELVGEDSDSEISDHVSEDDVQSDTEEAFIDEVHEVQPTSSGSEILDEQNVIEQPGSSLASNRILTLPQRTIRGKNKHCWSTSKSTRRSRVSALNIVRSQRGPTRMCRNIYDPLLCFKLFFTDEIISEIVKWTNAEISLKRRESMTGATFRDTNEDEIYAFFGILVMTAVRKDNHMSTDDLFDRSLSMVYVSVMSRDRFDFLIRCLRMDDKSIRPTLRENDVFTPVRKIWDLFIHQCIQNYTPGAHLTIDEQLLGFRGRCPFRMYIPNKPSKYGIKILMMCDSGTKYMINGMPYLGRGTQTNGVPLGEYYVKELSKPVHGSCRNITCDNWFTSIPLAKNLLQEPYKLTIVGTVRSNKREIPEVLKNSRSRPVGTSMFCFDGPLTLVSYKPKPAKMVYLLSSCDEDASINESTGKPQMVMYYNQTKGGVDTLDQMCSVMTCSRKTNRWPMALLYGMINIACINSFIIYSHNVSSKGEKVQSRKKFMRNLYMSLTSSFMRKRLEAPTLKRYLRDNISNILPNEVPGTSDDSTEEPVMKKRTYCTYCPSKIRRKANASCKKCKKVICREHNIDMCQSCF

SEQ ID NO: 14488-14499 - skipped (12 entries)

SEQ ID NO: 14500 - DNA, 30 bp, Artificial Sequence
  Synthetic Sequence
gtgcacgaatttcgtgcaccgggccactag

SEQ ID NO: 14501 - protein, 1496 aa, Artificial Sequence
  Synthetic Sequence
MSKEQLLIQRSSAAERCRRYRQKMSAEQRASDLERRRRLQQNVSEEQLLEKRRSEAEKQRRHRQKMSKDQRAFEVERRRWRRQNMSREQSSTSTTNTGRNCLLSKNGVHEDAILEHSCGGMTVRCEFCLSLNFSDEKPSDGKFTRCCSKGKVCPNDIHFPDYPAYLKRLMTNEDSDSKNFMENIRSINSSFAFASMGANIASPSGYGPYCFRIHGQVYHRTGTLHPSDGVSRKFAQLYILDTAEATSKRLAMPENQGCSERLMININNLMHEINELTKSYKMLHEVEKEAQSEAAAKGIAPTEVTMAIKYDRNSDPGRYNSPRVTEVAVIFRNEDGEPPFERDLLIHCKPDPNNPNATKMKQISILFPTLDAMTYPILFPHGEKGWGTDIALRLRDNSVIDNNTRQNVRTRVTQMQYYGFHLSVRDTFNPILNAGKLTQQFIVDSYSKMEANRINFIKANQSKLRVEKYSGLMDYLKSRSENDNVPIGKMIILPSSFEGSPRNMQQRYQDAMAIVTKYGKPDLFITMTCNPKWADITNNLQRWQKVENRPDLVARVFNIKLNALLNDICKFHLFGKVIAKIHVIEFQKRGLPHAHILLILDSESKLRSEDDIDRIVKAEIPDEDQCPRLFQIVKSNMVHGPCGIQNPNSPCMENGKCSKGYPKEFQNATIGNIDGYPKYKRRSGSTMSIGNKVVDNTWIVPYNPYLCLKYNCHINVEVCASIKSVKYLFKYIYKGHDCANIQISEKNIINHDEVQDFIDSRYVSAPEAVWRLFAMRMHDQSHAITRLAIHLPNDQNLYFHTDDFAEVLDRAKRHNSTLMAWFLLNREDSDARNYYYWEIPQHYVFNNSLWTKRRKGGNKVLGRLFTVSFREPERYYLRLLLLHVKGAISFEDLRTVGGVTYDTFHEAAKHRGLLLDDTIWKDTIDDAIILNMPKQLRQLFAYICVFGCPSAADKLWDENKSHFIEDFCWKLHRREGACVNCEMHALNEIQEVFTLHGMKCSHFKLPDYPLLMNANTCDQLYEQQQAEVLINSLNDEQLAAFQTITSAIEDQTVHPKCFFLDGPGGSGKTYLYKVLTHYIRGRGGTVLPTASTGIAANLLLGGRTFHSQYKLPIPLNETSISRLDIKSEVAKTIKKAQLLIIDECTMASSHAINAIDRLLREIMNLNVAFGGKVLLLGGDFRQCLSIVPHAMRSAIVQTSLKYCNVWGCFRKLSLKTNMRSEDSAYSEWLVKLGDGKLDSSFHLGMDIIEIPHEMICNGSIIEATFGNSISIDNIKNISKRAILCPKNEHVQKLNEEILDILDGDFHTYLSDDSIDSTDDAEKENFPIEFLNSITPSGMPCHKLKLKVGAIIMLLRNLNSKWGLCNGTRFIIKRLRPNIIEAEVLTGSAEGEVVLIPRIDLSPSDTGLPFKLIRRQFPVMPAFAMTINKSQGQTLDRVGIFLPEPVFAHGQLYVAFSRVRRACDVKVKVVNTSSQGKLVKHSESVFTLNVVYREILE

SEQ ID NO: 14502 - protein, 649 aa, Artificial Sequence
  Synthetic Sequence
MEEVCDSSAAASSTVQNQPQDQEHPWPYLREFFSLSGVNKDSFKMKCVLCLPLNKEISAFKSSPSNLRKHIERMHPNYLKNYSKLTAQKRKIGTSTHASSSKQLKVDSVFPVKHVSPVTVNKAILRYIIQGLHPFSTVDLPSFKELISTLQPGISVITRPTLRSKIAEAALIMKQKVTAAMSEVEWIATTTDCWTARRKSFIGVTAHWINPGSLERHSAALACKRLMGSHTFEVLASAMNDIHSEYEIRDKVVCTTTDSGSNFMKAFRVFGVENNDIETEARRCESDDTDSEGCGEGSDGVEFQDASRVLDQDDGFEFQLPKHQKCACHLLNLVSSVDAQKALSNEHYKKLYRSVFGKCQALWNKSSRSALAAEAVESESRLQLLRPNQTRWNSTFMAVDRILQICKEAGEGALRNICTSLEVPMFNPAEMLFLTEWANTMRPVAKVLDILQAETNTQLGWLLPSVHQLSLKLQRLHHSLRYCDPLVDALQQGIQTRFKHMFEDPEIIAAAILLPKFRTSWTNDETIIKRGMDYIRVHLEPLDHKKELANSSSDDEDFFASLKPTTHEASKELDGYLACVSDTRESLLTFPAICSLSIKTNTPLPASAACERLFSTAGLLFSPKRARLDTNNFENQLLLKLNLRFYNFE

SEQ ID NO: 14503 - skipped

SEQ ID NO: 14504 - protein, 610 aa, Bombyx mori
MDIERQEERIRAMLEEELSDYSDESSSEDETDHCSEHEVNYDTEEERIDSVDVPSNSRQEEANAIIANESDSDPDDDLPLSLVRQRASASRQVSGPFYTSKDGTKWYKNCQRPNVRLRSENIVTEQAQVKNIARDASTEYECWNIFVTSDMLQEILTHTNSSIRHRQTKTAAENSSAETSFYMQETTLCELKALIALLYLAGLIKSNRQSLKDLWRTDGTGVDIFRTTMSLQRFQFLQNNIRFDDKSTRDERKQTDNMAAFRSIFDQFVQCCQNAYSPSEFLTIDEMLLSFRGRCLFRVYIPNKPAKYGIKILALVDAKNFDVVNLEVYAGKQPSGPYAVSNRPFEVVERLIQPVARSHRNVTFDNWFTGYELMLHLLNEYRLTSVGTVRKNKRQIPESFIRTDRQPNSSVFGFQKDITLVSYAPKKNKVVVVMSTMHHDNSIDESTGEKQKPEMITFYNSTKAGVDVVDELSANYNVSRNSKRWPMTLFYGVLNMAAINACIIYRANKNVTIKRTEFIRSLGLSMIYEHLHSRNKKKNIPTYLRQRIEKQLGEPSPRHVNVPGRYVRCQDCPYKKDRKTKHSCNACAKPICMEHAKFLCENCAELDSSL

SEQ ID NO: 14505 - DNA, 412 bp, Bombyx mori
  misc_feature (24)..(24): n is a, c, g, or t
  misc_feature (35)..(35): n is a, c, g, or t
  misc_feature (39)..(39): n is a, c, g, or t
  misc_feature (42)..(42): n is a, c, g, or t
  misc_feature (73)..(73): n is a, c, g, or t
  misc_feature (76)..(76): n is a, c, g, or t
  misc_feature (81)..(81): n is a, c, g, or t
  misc_feature (87)..(87): n is a, c, g, or t
  misc_feature (97)..(97): n is a, c, g, or t
  misc_feature (106)..(106): n is a, c, g, or t
  misc_feature (117)..(117): n is a, c, g, or t
  misc_feature (136)..(136): n is a, c, g, or t
  misc_feature (156)..(157): n is a, c, g, or t
  misc_feature (170)..(170): n is a, c, g, or t
  misc_feature (180)..(180): n is a, c, g, or t
  misc_feature (196)..(196): n is a, c, g, or t
  misc_feature (208)..(208): n is a, c, g, or t
  misc_feature (212)..(212): n is a, c, g, or t
  misc_feature (224)..(224): n is a, c, g, or t
  misc_feature (235)..(235): n is a, c, g, or t
  misc_feature (239)..(239): n is a, c, g, or t
  misc_feature (246)..(246): n is a, c, g, or t
  misc_feature (257)..(257): n is a, c, g, or t
  misc_feature (265)..(265): n is a, c, g, or t
  misc_feature (279)..(279): n is a, c, g, or t
  misc_feature (292)..(292): n is a, c, g, or t
  misc_feature (303)..(303): n is a, c, g, or t
  misc_feature (316)..(316): n is a, c, g, or t
  misc_feature (318)..(318): n is a, c, g, or t
  misc_feature (322)..(322): n is a, c, g, or t
  misc_feature (332)..(332): n is a, c, g, or t
  misc_feature (336)..(336): n is a, c, g, or t
  misc_feature (342)..(342): n is a, c, g, or t
  misc_feature (344)..(344): n is a, c, g, or t
  misc_feature (360)..(360): n is a, c, g, or t
  misc_feature (364)..(364): n is a, c, g, or t
  misc_feature (375)..(375): n is a, c, g, or t
  misc_feature (396)..(396): n is a, c, g, or t
  misc_feature (407)..(407): n is a, c, g, or t
mdrrramsdysdsssdtdhcshvnydtrdsvdvsnsranaansdsddddsvrrasasrvsgytskdgtkwykncrnvrrsnvtavknardastycwnvtsdmthtnssrhrtktaanssatsymttckaayagksnrskdwrtdgtgvdrttmsrnnrddkstrdrktdnmaarsdvccnaysstdmsrgrcrvynkakygkavdaknyvvnvyagksgyavsnrvvrvarshrnvtdnwtgymhnyrtsvgtvrknkrsrtdrnssvgkdtvsyakknkvvvvmstmhhdnsdstgkkmtynstkagvdvvdcanynvsrnskrwmtygvnmaanacyrtnknvtkrtrsgsmyhhsrnkkkntyrrkgsrhvnvgryvrcdcykkdrktkrscnacakcmhakcncadss

SEQ ID NO: 14506 - DNA, 375 bp, Bombyx mori
ttatcccggcgagcatgaggcagggtatctcataccctggtaaaattttaaagttgtgtattttataaaattttcgtctgacaacactagcgcgctcagtagctggaggcaggagcgtgcgggaggggatagtggcgtgatcgcagtgtggcacgggacaccggcgagatattcgtgtgcaaacctgtttcgggtatgttataccctgcctcattgttgacgtattttttttatgtaatttttccgattattaatttcaactgttttattggtatttttatgttatccattgttctttttttatgatttactgtatcggttgtctttcgttcctttagttgagtttttttttattattttcagtttttgatcaaa

SEQ ID NO: 14507 - DNA, 368 bp, Bombyx mori
tcatatttttagtttaaaaaaataattatatgttttataatgaaaagaatctcattatctttcagtattaggttgatttatattccaaagaataatatttttgttaaattgttgatttttgtaaacctctaaatgtttgttgctaaaattactgtgtttaagaaaaagattaataaataataataatttcataattaaaaacttctttcattgaatgccattaaataaaccattattttacaaaataagatcaacataattgagtaaataataataagaacaatattatagtacaacaaaatatgggtatgtcataccctgccacattcttgatgtaactttttttcacctcatgctcgccgggttat

SEQ ID NO: 14508 - DNA, 214 bp, Bombyx mori
ttatcccggcgagcatgaggcagggtatctcataccctggtaaaattttaaagttgtgtattttataaaattttcgtctgacaacactagcgcgctcagtagctggaggcaggagcgtgcgggaggggatagtggcgtgatcgcagtgtggcacgggacaccggcgagatattcgtgtgcaaacctgtttcgggtatgttataccctgcctcat

SEQ ID NO: 14509 - DNA, 195 bp, Artificial Sequence
  Synthetic Sequence
taaataataataatttcataattaaaaacttctttcattgaatgccattaaataaaccattattttacaaaataagatcaacataattgagtaaataataataagaacaatattatagtacaacaaaatatgggtatgtcataccctgccacattcttgatgtaactttttttcacctcatgctcgccgggttat

SEQ ID NO: 14510 - DNA, 16 bp, Artificial Sequence
  Synthetic Sequence
cccggcgagcatgagg

SEQ ID NO: 14511 - DNA, 20 bp, Artificial Sequence
  Synthetic Sequence
ttatcccggcgagcatgagg

SEQ ID NO: 14512 - DNA, 20 bp, Artificial Sequence
  Synthetic Sequence
cctcatgctcgccgggttat

SEQ ID NO: 14513 - DNA, 20 bp, Artificial Sequence
  Synthetic Sequence
ttaacccggcgagcatgagg

SEQ ID NO: 14514 - DNA, 20 bp, Artificial Sequence
  Synthetic Sequence
cctcatgctcgccgggttaa

SEQ ID NO: 14515 - DNA, 375 bp, Bombyx mori
ttaacccggcgagcatgaggcagggtatctcataccctggtaaaattttaaagttgtgtattttataaaattttcgtctgacaacactagcgcgctcagtagctggaggcaggagcgtgcgggaggggatagtggcgtgatcgcagtgtggcacgggacaccggcgagatattcgtgtgcaaacctgtttcgggtatgttataccctgcctcattgttgacgtattttttttatgtaatttttccgattattaatttcaactgttttattggtatttttatgttatccattgttctttttttatgatttactgtatcggttgtctttcgttcctttagttgagtttttttttattattttcagtttttgatcaaa

SEQ ID NO: 14516 - DNA, 797 bp, Bombyx mori
tcatatttttagtttaaaaaaataattatatgttttataatgaaaagaatctcattatctttcagtattaggttgatttatattccaaagaataatatttttgttaaattgttgatttttgtaaacctctaaatgtttgttgctaaaattactgtgtttaagaaaaagattaataaataataataatttcataattaaaaacttctttcattgaatgccattaaataattcattattttacaaaataagatcaacataattgagtaaataataataagaacaatattatagtacaacaaaatatgggtatgtcataccctttttttttttttttttttttttttttcgggtagagggccgaacctcctacgaggtccccgcgcaaaaggggcgcgcggggtatgtgagactcaacgatctgcatggtgttgtgagcagaccgcgggcccaaggattttagagcccacccactaaacgactcctctgcactcttacacccgacgtccgatcccctccgaggtcagaacccggatgaggtaggggggctaccgcggtcaacactacaaccagacggcgcggctcaccccaaggacgcccagccgacggagccttcgaggcgaatcgaaggctctgaaacgtcggccgtctcggtacggcagcccgtcgggccgcccagacggtgccgctggtgtcccggaataccccgctggaccagaaccagcctgccgggtcgggacgcgatacaccgtcgaccggtcgctctaatcactccacggcagcgcgctagagtgctggta

SEQ ID NO: 14517 - protein, 589 aa, Xenopus tropicalis
MAKRFYSAEEAAAHCMASSSEEFSGSDSEYVPPASESDSSTEESWCSSSTVSALEEPMEVDEDVDDLEDQEAGDRADAAAGGEPAWGPPCNFPPEIPPFTTVPGVKVDTSNFEPINFFQLFMTEAILQDMVLYTNVYAEQYLTQNPLPRYARAHAWHPTDIAEMKRFVGLTLAMGLIKANSLESYWDTTTVLSIPVFSATMSRNRYQLLLRFLHFNNNATAVPPDQPGHDRLHKLRPLIDSLSERFAAVYTPCQNICIDESLLLFKGRLQFRQYIPSKRARYGIKFYKLCESSSGYTSYFLIYEGKDSKLDPPGCPPDLTVSGKIVWELISPLLGQGFHLYVDNFYSSIPLFTALYCLDTPACGTINRNRKGLPRALLDKKLNRGETYALRKNELLAIKFFDKKNVFMLTSIHDESVIREQRVGRPPKNKPLCSKEYSKYMGGVDRTDQLQHYYNATRKTRAWYKKVGIYLIQMALRNSYIVYKAAVPGPKLSYYKYQLQILPALLFGGVEEQTVPEMPPSDNVARLIGKHFIDTLPPTPGKQRPQKGCKVCRKRGIRRDTRYYCPKCPRNPGLCFKPCFEIYHTQLHY

SEQ ID NO: 14518 - protein, 589 aa, Xenopus tropicalis
MAKRFYSAEEAAAHCMAPSSEEFSGSDSEYVPPASESDSSTEESWCSSSTVSALEEPMEVDEDVDDLEDQEAGDRADAAAGGEPAWGPPCNFPPEIPPFTTVPGVKVDTSNFEPINFFQLFMTEAILQDMVLYTNVYAEQYLTQNPLPRYARAHAWHPTDIAEMKRFVGLTLAMGLIKANSLESYWNTTTVLSIPVFSATMSRNRYQLLLRFLHFNNNATAVPPDQPDHDRLHKLRPLIDSLSERFAAVYTPCQNICIDESLLLFKGRLRFRQYIPSKRARYGIKFYKLCESSSGYTSYFLIYEGKDSKLDPPGCPPDLTVSGKIVWELISPLLGQGFHLYVDNFYSSIPLFTALYCLDTPACGTINRTRKGLPRALLDKKLNRGETYALRKNELLAIKFFDKKNVFMLTSIHDESVIREQRVGRPPKNKPLCSKEYSKYMGGVDRTDQLQHYYNATRKTSAWYKKVGIYLIQMALRNSYIVYKAAVPGPKLSYYKYQLQILPALLFGGVEEQTVPEMLPSDNVARLIGKHFIDTLPPTPGKQRPQKGCKVCRKRGIRRDTRYYCPKCPRNPGLCFKPCFEIYHTQLHY

SEQ ID NO: 14519 - DNA, 185 bp, Xenopus tropicalis
ttaacctttttactgccaatgacgcatgggatacgtcgtggcagtaaaagggcttaaatgccaacgacgcgtcccatacgttgttggcattttaagtcttctctctgcagcggcagcatgtgccgccgctgcagagagtttctagcgatgacagcccctctgggcaacgagccgggggggctgtc

SEQ ID NO: 14520 - DNA, 237 bp, Xenopus tropicalis
tttgcatttttagacatttagaagcctatatcttgttacagaattggaattacacaaaaattctaccatattttgaaagcttaggttgttctgaaaaaaacaatatattgttttcctgggtaaactaaaagtcccctcgaggaaaggcccctaaagtgaaacagtgcaaaacgttcaaaaactgtctggcaatacaagttccactttgaccaaaacggctggcagtaaaagggttaa

SEQ ID NO: 14521 - DNA, 185 bp, Xenopus tropicalis
ttaaccctttgcctgccaatcacgcatgggatacgtcgtggcagtaaaagggcttaaatgccaacgacgcgtcccatacgttgttggcattttaagtcttctctctgcagcggcagcatgtgccgccgctgcagagagtttctagcgatgacagcccctctgggcaacgagccgggggggctgtc

SEQ ID NO: 14522 - DNA, 238 bp, Xenopus tropicalis
tttgcatttttagacatttagaagcctatatcttgttacagaattggaattacacaaaaattctaccatattttgaaagcttaggttgttctgaaaaaaacaatatattgttttcctgggtaaactaaaagtcccctcgaggaaaggcccctaaagtgaaacagtgcaaaacgttcaaaaactgtctggcaatacaagttccactttgggacaaatcggctggcagtgaaagggttaa

SEQ ID NO: 14523 - DNA, 185 bp, Xenopus tropicalis
ttaacctttttactgccaatgacgcatgggatacgtcgtggcagtaaaagggcttaaatgccaacgacgcgtcccatacgttgttggcattttaattcttctctctgcagcggcagcatgtgccgccgctgcagagagtttctagcgatgacagcccctctgggcaacgagccgggggggctgtc

SEQ ID NO: 14524 - DNA, 18 bp, Artificial Sequence
  Synthetic Sequence
ttaacctttttactgcca

SEQ ID NO: 14525 - protein, 597 aa, Helicoverpa armigera
MASRQRLNHDEIATILENDDDYSPLDSESEKEDCVVEDDVWSDNEDAIVDFVEDTSAQEDPDNNIASRESPNLEVTSLTSHRIITLPQRSIRGKNNHVWSTTKGRTTGRTSAINIIRTNRGPTRMCRNIVDPLLCFQLFITDEIIHEIVKWTNVEIIVKRQNLKDISASYRDTNTMEIWALVGILTLTAVMKDNHLSTDELFDATFSGTRYVSVMSRERFEFLIRCIRMDDKTLRPTLRSDDAFLPVRKIWEIFINQCRQNHVPGSNLTVDEQLLGFRGRCPFRMYIPNKPDKYGIKFPMMCAAATKYMIDAIPYLGKSTKTNGLPLGEFYVKDLTKTVHGTNRNITCDNWFTSIPLAKNMLQAPYNLTIVGTIRSNKREMPEEIKNSRSRPVGSSMFCFDGPLTLVSYKPKPSKMVFLLSSCDENAVINESNGKPDMILFYNQTKGGVDSFDQMCKSMSANRKTNRWPMAVFYGMLNMAFVNSYIIYCHNKINKQEKPISRKEFMKKLSIQLTTPWMQERLQAPTLKRTLRDNITNVLKNVVPASSENISNEPEPKKRRYCGVCSYKKRRMTKAQCCKCKKAICGEHNIDVCQDCI

SEQ ID NO: 14526 - DNA, 18 bp, Artificial Sequence
  Synthetic Sequence
ttaaccctttgcctgcca

SEQ ID NO: 14527 - DNA, 18 bp, Artificial Sequence
  Synthetic Sequence
ttaaccyttttactgcca

SEQ ID NO: 14528 - DNA, 367 bp, Helicoverpa armigera
agactgtttttttctaagagacttctaaaatattattacgagttgatttaattttatgaaaacatttaaaactagttgattttttttataattacataattttaagaaaaagtgttagaggcttgatttttttgttgattttttctaagatttgattaaagtgccataatagtattaataaagagtattttttaacttaaaatgtattttatttattaattaaaacttcaattatgataactcatgcaaaaatatagttcattaacagaaaaaaataggaaaactttgaagttttgtttttacacgtcatttttacgtatgattgggctttatagctagttaaatatgattgggcttctagggttaa

SEQ ID NO: 14529 - DNA, 18 bp, Artificial Sequence
  Synthetic Sequence
tggcagtaaaagggttaa

SEQ ID NO: 14530 - protein, 628 aa, Pectinophora gossypiella
MDLRKQDEKIRQWLEQDIEEDSKGESDNSSSETEDIVEMEVHKNTSSESEVSSESDYEPVCPSKRQRTQIIESEESDNSESIRPSRRQTSRVIDSDETDEDVMSSTPQNIPRNPNVIQPSSRFLYGKNKHKWSSAAKPSSVRTSRRNIIHFIPGPKERAREVSEPIDIFSLFISEDMLQQVVTFTNAEMLIRKNKYKTETFTVSPTNLEEIRALLGLLFNAAAMKSNHLPTRMLFNTHRSGTIFKACMSAERLNFLIKCLRFDDKLTRNVRQRDDRFAPIRDLWQALISNFQKWYTPGSYITVDEQLVGFRGRCSFRMYIPNKPNKYGIKLVMAADVNSKYIVNAIPYLGKGTDPQNQPLATFFIKEITSTLHGTNRNITMDNWFTSVPLANELLMAPYNLTLVGTLRSNKREIPEKLKNSKSRAIGTSMFCYDGDKTLVSYKAKSNKVVFILSTIHDQPDINQETGKPEMIHFYNSTKGAVDTVDQMCSSISTNRKTQRWPLCVFYNMLNLSIINAYVVYVYNNVRNNKKPMSRRDFVIKLGDQLMEPWLRQRLQTVTLRRDIKVMIQDILGESSDLEAPVPSVSNVRKIYYLCPSKARRMTKHRCIKCKQAICGPHNIDICSRCIE

SEQ ID NO: 14531 - DNA, 18 bp, Artificial Sequence
  Synthetic Sequence
tggcagtgaaagggttaa

SEQ ID NO: 14532 - DNA, 406 bp, Artificial Sequence
  Synthetic Sequence
ttaaccctagataactaaacattcgtccgctcgacgacgcgctatgccgcgaaattgaagtttacctattattccgcgtcccccgcccccgccgctttttctagcttcctgatttgcaaaatagtgcatcgcgtgacacgctcgaggtcacacgacaattaggtcgaaagttacaggaatttcgtcgtccgctcgacgaaagtttagtaattacgtaagtttggcaaaggtaagtgaatgaagtatttttttataattattttttaattctttatagtgataacgtaaggtttatttaaatttattacttttatagttatttagccaattgttataaattccttgttattgctgaaaaatttgcctgttttagtcaaaatttattaacttttcgatcgttttttag

SEQ ID NO: 14533 - DNA, 18 bp, Artificial Sequence
  Synthetic Sequence
ttaaccytttkmctgcca

SEQ ID NO: 14534 - protein, 599 aa, Ctenoplusia agnata
MASRQHLYQDEIAAILENEDDYSPHDTDSEMEDCVTQDDVRSDVEDEMVDNIGNGTSPASRHEDPETPDPSSEASNLEVTLSSHRIIILPQRSIREKNNHIWSTTKGQSSGRTAAINIVRTNRGPTRMCRNIVDPLLCFQLFIKEEIVEEIVKWTNVEMVQKRVNLKDISASYRDTNEMEIWAIISMLTLSAVMKDNHLSTDELFNVSYGTRYVSVMSRERFEFLLRLLRMGDKLLRPNLRQEDAFTPVRKIWEIFINQCRLNYVPGTNLTVDEQLLGFRGRCPFRMYIPNKPDKYGIKFPMVCDAATKYMVDAIPYLGKSTKTQGLPLGEFYVKELTQTVHGTNRNVTCDNWFTSVPLAKSLLNSPYNLTLVGTIRSNKREIPEEVKNSRSRQVGSSMFCFDGPLTLVSYKPKPSKMVFLLSSCNEDAVVNQSNGKPDMILFYNQTKGGVDSFDQMCSSMSTNRKTNRWPMAVFYGMLNMAFVNSYIIYCHNMLAKKEKPLSRKDFMKKLSTDLTTPSMQKRLEAPTLKRSLRDNITNVLKIVPQAAIDTSFDEPEPKKRRYCGFCSYKKKRMTKTQCFKCKKPVCGEHNIDVCQDCI

SEQ ID NO: 14535 - DNA, 326 bp, Ctenoplusia agnata
ttaaccctagaagcccaatctacgtcattctgacgtgtatgtcgccgaaaatactctgtctctttctcctgcacgatcggattgccgcgaacgctcgattcaacccagttggcgccgagatctattggaggactgcggcgttgattcggtaagtcccgccattttgtcatagtaacagtattgcacgtcagcttgacgtatatttgggctttgtgttatttttgtaaattttcaacgttagtttattattgcatctttttgttacattactggtttatttgcatgtattactcaaatattatttttattttagcgtagaaaataca

SEQ ID NO: 14536 - DNA, 370 bp, Ctenoplusia agnata
agactgttttttttgtatttgcattatatattatattctaaagttgatttaattctaagaaaaacattaaaataagtttctttttgtaaaatttaattaattataagaaaaagtttaagttgatctcattttttataaaaatttgcaatgtttccaaagttattattgtaaaagaataaataaaagtaaactgagttttaattgatgttttattatatcattatactatatattacttaaataaaacaataactgaatgtatttctaaaaggaatcactagaaaatatagtgatcaaaaatttacacgtcatttttgcgtatgattgggctttataggttctaaaaatatgattgggcctctagggttaa

SEQ ID NO: 14537 - protein, 597 aa, Agrotis ipsilon
MESRQRLNQDEIATILENDDDYSPLDSDSEAEDRVVEDDVWSDNEDAMIDYVEDTSRQEDPDNNIASQESANLEVTSLTSHRIISLPQRSICGKNNHVWSTTKGRTTGRTSAINIIRTNRGPTRMCRNIVDPLLCFQLFITDEIIHEIVKWTNVEMIVKRQNLIDISASYRDTNTMEMWALVGILTLTAVMKDNHLSTDELFDATFSGTRYVSVMSRERFEFLIRCMRMDDKTLRPTLRSDDAFIPVRKLWEIFINQCRLNYVPGGNLTVDEQLLGFRGRCPFRMYIPNKPDKYGIRFPMMCDAATKYMIDAIPYLGKSTKTNGLPLGEFYVKELTKTVHGTNRNVTCDNWFTSIPLAKNMLQAPYNLTIVGTIRSNKREIPEEIKNSRSRPVGSSMFCFDGPLTLVSYKPKPSRMVFLLSSCDENAVINESNGKPDMILFYNQTKGGVDSFDQMCKSMSANRKTNRWPMAVFYGMLNMAFVNSYIIYCHNKINKQKKPINRKEFMKNLSTDLTTPWMQERLKAPTLKRTLRDNITNVLKNVVPPSPANNSEEPGPKKRSYCGFCSYKKRRMTKTQFYKCKKAICGEHNIDVCQDCV

SEQ ID NO: 14538 - DNA, 323 bp, Agrotis ipsilon
ttaaccctagaagcccaatctacgtaaatttgacgtataccgcggcgaaatatatctgtctctttcacgtttaccgtcggattcccgctaacttcggaaccaactcagtagccattgagaactcccaggacacagttgcgtcatctcggtaagtgccgccattttgttgtaatagacaggttgcacgtcattttgacgtataattgggctttgtgtaacttttgaaattatttataatttttattgatgtgatttatttgagttaatcgtattgtttcgttacatttttcatatgatattaatattttcagattgaatataaa

SEQ ID NO: 14539 - DNA, 367 bp, Agrotis ipsilon
agactgttttttttaaaaggcttataaagtattactattgcgtgatttaattttataaaaatatttaaaaccagttgatttttttaataattacctaattttaagaaaaaatgttagaagcttgatatttttgttgatttttttctaagatttgattaaaaggccataattgtattaataaagagtatttttaacttcaaatttattttatttattaattaaaacttcaattatgataatacatgcaaaaatatagttcatcaacagaaaaatataggaaaactctaatagttttatttttacacgtcatttttacgtatgattgggctttatagctagtcaaatatgattgggcttctagggttaa

SEQ ID NO: 14540 - protein, 520 aa, Megachile rotundata
MNGKDSLGEFYLDDLSDCLDCRSASSTDDESDSSNIAIRKRCPIPLIYSDSEDEDMNNNVEDNNHFVKESNRYHYQIVEKYKITSKTKKWKDVTVTEMKKFLGLIILMGQVKKDVLYDYWSTDPSIETPFFSKVMSRNRFLQIMQSWHFYNNNDISPNSHRLVKIQPVIDYFKEKFNNVYKSDQQLSLDECLIPWRGRLSIKTYNPAKITKYGILVRVLSEARTGYVSNFCVYAADGKKIEETVLSVIGPYKNMWHHVYQDNYYNSVNIAKIFLKNKLRVCGTIRKNRSLPQILQTVKLSRGQHQFLRNGHTLLEVWNNGKRNVNMISTIHSAQMAESRNRSRTSDCPIQKPISIIDYNKYMKGVDRADQYLSYYSIFRKTKKWTKRVVMFFINCALFNSFKVYTTLNGQKITYKNFLHKAALSLIEDCGTEEQGTDLPNSEPTTTRTTSRVDHPGRLENFGKHKLVNIVTSGQCKKPLRQCRVCASKKKLSRTGFACKYCNVPLHKGDCFERYHSLKKY

SEQ ID NO: 14541 - DNA, 246 bp, Megachile rotundata
ttaaataatgcccactctagatgaacttaacactttaccgaccggccgtcgattattcgacgtttgctccccagcgcttaccgaccggccatcgattattcgacgtttgcttcccagcgcttaccgaccggtcatcgacttttgatctttccgttagatttggttaggtcagattgacaagtagcaagcatttcgcattctttattcaaataatcggtgcttttttctaagctttagcccttagaa

SEQ ID NO: 14542 - DNA, 244 bp, Megachile rotundata
acaacttcttttttcaacaaatattgttatatggattatttatttatttatttatttatggtatattttatgtttatttatttatggttattatggtatattttatgtaaataataaactgaaaacgattgtaatagatgaaataaatattgttttaacactaatataattaaagtaaaagattttaataaatttcgttaccctacaataacacgaagcgtacaattttaccagagtttattaa

SEQ ID NO: 14543 - protein, 570 aa, Bombus impatiens
MNEKNGIGEFYLDDLSDCPDSYSRSNSGDESDGSDTIIRKRGSVLPPRYSDSEDDEINNVEDNANNVENNDDIWSTNDEAIILEPFEGSPGLKIMPSSAESVTDNVNLFFGDDFFEHLVRESNRYHYQVMEKYKIPSKAKKWTDITVPEMKKFLGLIVLMGQIKKDVLYDYWSTDPSIETPFFSQVMSRNRFVQIMQSWHFCNNDNIPHDSHRLAKIQPVIDYFRRKFNDVYKPCQQLSLDESIIPWRGRLSIKTYNPAKITKYGILVRVLSEAVTGYVCNFDVYAADGKKLEDTAVIEPYKNIWHQIYQDNYYNSVKMARILLKNKVRVCGTIRKNRGLPRSLKTIQLSRGQYEFRRNHQILLEVWNNGRRNVNMISTIHSAQLMESRSKSKRSDVPIQKPNSIIDYNKYMKGVDRADQYLAYYSIFRKTKKWTKRVVMFFINCALFNSFRVYTILNGKNITYKNFLHKVAVSWIEDGETNCTEQDDNLPNSEPTRRAPRLDHPGRLSNYGKHKLINIVTSGRSLKPQRQCRVCAVQKKRSRTCFVCKFCNVPLHKGDCFERYHTLKKY

SEQ ID NO: 14544 - DNA, 278 bp, Bombus impatiens
ttaattttttaacattttaccgaccgatagccgattaatcgggtttttgccgctgacgcttaccgaccgataacctattaatcggctttttgtcgtcgaagcttaccaacctatagcctacctatagttaatcggttgccatggcgataaacaatctttctcattatatgagcagtaatttgttatttagtactaaggtaccttgctcagttgcgtcagttgcgttgctttgtaagctcccacagttttataccaattcgaaaaacttaccgttcgcg

SEQ ID NO: 14545 - DNA, 384 bp, Bombus impatiens
actatttcacatttgaactaaaaaccgttgtaatagataaaataaatataatttagtattaatattatggaaacaaaagattttattcaatttaattatcctatagtaacaaaaagcggccaattttatctgagcatacgaaaagcacagatactcccgcccgacagtctaaaccgaaacagagccggcgccagggagaatctgcgcctgagcagccggtcggacgtgcgtttgctgttgaaccgctagtggtcagtaaaccagaaccagtcagtaagccagtaactgatcagttaactagattgtatagttcaaattgaacttaatctagtttttaagcgtttgaatgttgtctaacttcgttatatattatattctttttaa

SEQ ID NO: 14546 - protein, 345 aa, Mamestra brassicae
MFSFVPNKEQTRTVLIFCFHLKTTAAESHRPLVEAFGEQVPTVKTCERWFQRFKSGDFDVDDKEHGKPPKRYEDAELQALLDEDDAQTQKQLAEQLEVSQQAVSNRLREGGKIQKVGRWVPHELNERQRERRKNTCEILLSRYKRKSFLHRIVTGEEKWIFFVNPKRKKSYVDPGQPATSTARPNRFGKKTRLCVWWDQSGVIYYELLKPGETVNTARYQQQLINLNRALQRKRPEYQKRQHRVIFLHDNAPSHTARAVRDTLETLNWEVLPHAAYSPDLAPSDYHLFASMGHALAEQRFDSYESVEEWLDEWFAAKDDEFYWRGIHKLPERWDNCVASDGKYFE

SEQ ID NO: 14547 - DNA, 174 bp, Mamestra brassicae
ttattgggttgcccaaaaagtaattgcggatttttcatatacctgtcttttaaacgtacatagggatcgaactcagtaaaactttgaccttgtgaaataacaaacttgactgtccaaccaccatagtttggcgcgaattgagcgtcataattgttttgactttttgcagtcaac

SEQ ID NO: 14548 - DNA, 79 bp, Mamestra brassicae
atgattttttctttttaaaccaattttaattagttaattgatataaaaatccgcaattactttttgggcaacccaataa

SEQ ID NO: 14549 - protein, 347 aa, Mayetiola destructor
MENFENWRKRRHLREVLLGHFFAKKTAAESHRLLVEVYGEHALAKTQCFEWFQRFKSGDFDTEDKERPGQPKKFEDEELEALLDEDCCQTQEELAKSLGVTQQAISKRLKAAGYIQKQGNWVPHELKPRDVERRFCMSEMLLQRHKKKSFLSRIITGDEKWIHYDNSKRKKSYVKRGGRAKSTPKSNLHGAKVMLCIWWDQRGVLYYELLEPGQTITGDLYRTQLIRLKQALAEKRPEYAKRHGAVIFHHDNARPHVALPVKNYLENSGWEVLPHPPYSPDLAPSDYHLFRSMQNDLAGKRFTSEQGIRKWLDSFLAAKPAKFFEKGIHELSERWEKVIASDGQYFE

SEQ ID NO: 14550 - DNA, 267 bp, Mayetiola destructor
taagacttccaaaatttccacccgaactttaccttccccgcgcattatgtctctcttttcaccctctgatccctggtattgttgtcgagcacgatttatattgggtgtacaacttaaaaaccggaattggacgctagatgtccacactaacgaatagtgtaaaagcacaaatttcatatatacgtcattttgaaggtacatttgacagctatcaaaatcagtcaataaaactattctatctgtgtgcatcatatttttttattaact

SEQ ID NO: 14551 - DNA, 188 bp, Mayetiola destructor
tgcattcattcattttgttatcgaaataaagcattaattttcactaaaaaattccggtttttaagttgtacacccaatatcatccttagtgacaattttcaaatggctttcccattgagctgaaaccgtggctctagtaagaaaaacgcccaacccgtcatcatatgccttttttttctcaacatccg

SEQ ID NO: 14552 - protein, 342 aa, Apis mellifera
MENQKEHYRHILLFYFRKGKNASQAHKKLCAVYGDEALKERQCQNWFDKFRSGDFSLKDEKRSGRPVEVDDDLIKAIIDSDRHSTTREIAEKLHVSHTCIENHLKQLGYVQKLDTWVPHELKEKHLTQRINSCDLLKKRNENDPFLKRLITGDEKWVVYNNIKRKRSWSRPREPAQTTSKAGIHRKKVLLSVWWDYKGIVYFELLPPNRTINSVVYIEQLTKLNNAVEEKRPELTNRKGVVFHHDNARPHTSLVTRQKLLELGWDVLPHPPYSPDLAPSDYFLFRSLQNSLNGKNFNNDDDIKSYLIQFFANKNQKFYERGIMMLPERWQKVIDQNGQHITE

SEQ ID NO: 14553 - DNA, 184 bp, Apis mellifera
ttgggttggcaactaagtaattgcggatttcactcatagatggcttcagttgaatttttaggtttgctggcgtagtccaaatgtaaaacacattttgttatttgatagttggcaattcagctgtcaatcagtaaaaaaagttttttgatcggttgcgtagttttcgtttggcgttcgttgaaaa

SEQ ID NO: 14554 - DNA, 74 bp, Apis mellifera
agttatttagttccatgaaaaaattgtctttgattttctaaaaaaaatccgcaattacttagttgccaatccaa

SEQ ID NO: 14555 - protein, 345 aa, Messor bouvieri
MSSFVPENVHLRHALLFLFHQKKRAAESHRLLVETYGEHAPTIRTCETWFRQFKCGDFNVQDKERPGRPKTFEDAELQELLDEDSTQTQKQLAEKLNVSRVAICERLQAMGKIQKMGRWVPHELNDRQMENRKIVSEMLLQRYERKSFLHRIVTGDEKWIYFENPKRKKSWLSPGEAGPSTARPNRFGRKTMLCVWWDQIGVVYYELLKPGETVNTDRYRQQMINLNCALIEKRPQYAQRHDKVILQHDNAPSHTAKPVKEMLKSLGWEVLSHPPYSPDLAPSDYHLFASMGHALAEQHFADFEEVKKWLDEWFSSKEKLFFWNGIHKLSERWTKCIESNGQYFE

SEQ ID NO: 14556 - DNA, 242 bp, Messor bouvieri
agtcagaaatgacacctcgatcgacgactaatcgacgtctaatcgacgtcgattttatgtcaacatgttaccaggtgtgtcggtaattcctttccggtttttccggcagatgtcactagccataagtatgaaatgttatgatttgatacatatgtcattttattctactgacattaaccttaaaactacacaagttacgttccgccaaaataacagcgttatagatttataattttttgaaa

SEQ ID NO: 14557 - DNA, 146 bp, Messor bouvieri
ataaatttgaactatccattctaagtaacgtgttttctttaacgaaaaaaccggaaaagaattaccgacactcctggtatgtcaacatgttattttcgacattgaatcgcgtcgattcgaagtcgatcgaggtgtcatttctgact

SEQ ID NO: 14558 - protein, 594 aa, Trichoplusia ni; identical to SEQ ID NO: 14484

SEQ ID NO: 14559 - DNA, 313 bp, Trichoplusia ni
ttaaccctagaaagatagtctgcgtaaaattgacgcatgcattcttgaaatattgctctctctttctaaatagcgcgaatccgtcgctgtgcatttaggacatctcagtcgccgcttggagctcccgtgaggcgtgcttgtcaatgcggtaagtgtcactgattttgaactataacgaccgcgtgagtcaaaatgacgcatgattatcttttacgtgacttttaagatttaactcatacgataattatattgttatttcatgttctacttacgtgataacttattatatatatattttcttgttatagatatc

SEQ ID NO: 14560 - DNA, 235 bp, Trichoplusia ni
tttgttactttatagaagaaattttgagtttttgtttttttttaataaataaataaacataaataaattgtttgttgaatttattattagtatgtaagtgtaaatataataaaacttaatatctattcaaattaataaataaacctcgatatacagaccgataaaacacatgcgtcaattttacgcatgattatctttaacgtacgtcacaatatgattatctttctagggttaa

SEQ ID NO: 14561 - DNA, 309 bp, Trichoplusia ni
ccctagaaagatagtctgcgtaaaattgacgcatgcattcttgaaatattgctctctctttctaaatagcgcgaatccgtcgctgtgcatttaggacatctcagtcgccgcttggagctcccgtgaggcgtgcttgtcaatgcggtaagtgtcactgattttgaactataacgaccgcgtgagtcaaaatgacgcatgattatcttttacgtgacttttaagatttaactcatacgataattatattgttatttcatgttctacttacgtgataacttattatatatatattttcttgttatagatatc

SEQ ID NO: 14562 - DNA, 231 bp, Trichoplusia ni
tttgttactttatagaagaaattttgagtttttgtttttttttaataaataaataaacataaataaattgtttgttgaatttattattagtatgtaagtgtaaatataataaaacttaatatctattcaaattaataaataaacctcgatatacagaccgataaaacacatgcgtcaattttacgcatgattatctttaacgtacgtcacaatatgattatctttctaggg

SEQ ID NO: 14563 - DNA, 14 bp, Artificial Sequence
  Synthetic Sequence
ccytttkmctgcca

SEQ ID NO: 14564 - DNA, 17 bp, Artificial Sequence
  Synthetic Sequence
ccttccagcgggcgcgc

SEQ ID NO: 14565 - DNA, 17 bp, Artificial Sequence
  Synthetic Sequence
ccttccagcgggcgcgc

SEQ ID NO: 14566 - DNA, 13 bp, Artificial Sequence
  Synthetic Sequence
cccagattagcct

SEQ ID NO: 14567 - DNA, 16 bp, Artificial Sequence
  Synthetic Sequence
cccttaattactcgcg

SEQ ID NO: 14568 - DNA, 16 bp, Artificial Sequence
  Synthetic Sequence
ccctagataactaaac

SEQ ID NO: 14569 - DNA, 13 bp, Artificial Sequence
  Synthetic Sequence
ccctagaaagata

SEQ ID NO: 14570 - DNA, 347 bp, Helicoverpa armigera
ttaaccctagaagcccaatctacgtaaatttgacgtataccgcggcgaaatatctctgtctctttcatgtttaccgtcggatcgccgctaacttctgaaccaactcagtagccattgggacctcgcaggacacagttgcgtcatctcggtaagtgccgccattttgttgtactctctattacaacacacgtcacgtcacgtcgttgcacgtcattttgacgtataattgggctttgtgtaacttttgaatttgtttcaaattttttatgtttgtgatttatttgagttaatcgtattgtttcgttacatttttcatataataataatattttcaggttgagtacaaa

SEQ ID NO: 14571 - DNA, 179 bp, pectinophora gossypiella
tttcactaagtaattttgttcctatttagtagataagtaacacataattattgtgatattcaaaacttaagaggtttaataaataataataaaaaaaaaatggtttttatttcgtagtctgctcgacgaatgtttagttattacgtaaccgtgaatatagtttagtagtctagggttaa

SEQ ID NO: 14572 - protein, 589 aa, Artificial Sequence
  Synthetic Sequence
MAKRFYSAEEAAAHCSASSSEEFSGSDSEYVPPASESDSSTEESWCSSSTVSALEEPMEVDEDVDDLEDQEAGDRADAAAGGEPAWGPPCNFPPEIPPFTTVPGVKVDTSNFEPINFFQLFMTEAILQDMVLYTNVYAEQYLTQNPLTRGARAHAWHPTDIAEMKRFVGLTLAMGLIKANSIESYWDTTTVLSIPVFGATMSRNRYQLLLRFLHFNNNATAVPPDQPGHDRLHKLRPLIDSLSERFANVYTPCQNICIDESLMLFKGRLQFRQYIPSKRARYGIKFYKLCESSTGYTSYFLIYEGKDSKLDPPGCPPDLTVSGKIVWELISPLLGQGFHLYVDNFYSSIPLFTALYCLNTPACGTINRNRKGLPRALLDKKLNRGETYALRKNELLAIKFFDKKNVFMLTSIHDESVIREQRVGRPPKNKPLCSKEYSKYMGGVDRTDQLQHYYNATRKTRHWYKKVGIYLIQMALRNSYIVYKAAVPGPKLSYYKYQLQILPALLFGGVEEQTVPEMPDSDNVARLIGKHFIDTLPPTPGKQRPQKGCKVCRKRGIRRDTRYYCPKCPRNPGLCRKPCFEIYHTQLHY

SEQ ID NO: 14573 - DNA, 78 bp, Xenopus tropicalis
ccctttgcctgccaatcacgcatgggatacgtcgtggcagtaaaagggcttaaatgccaacgacgcgtcccatacgtt

SEQ ID NO: 14574 - DNA, 120 bp, Xenopus tropicalis
cctgggtaaactaaaagtcccctcgaggaaaggcccctaaagtgaaacagtgcaaaacgttcaaaaactgtctggcaatacaagttccactttgggacaaatcggctggcagtgaaaggg

SEQ ID NO: 14575 - DNA, 14 bp, Artificial Sequence
  Synthetic Sequence
ccytttbmctgcca

SEQ ID NO: 14576 - protein, 610 aa, Artificial Sequence
  Synthetic Sequence
MDIERQEERIRAMLEEELSDYSDESSSEDETDHCSEHEVNYDTEEERIDSVDVPSNSRQEEANAIIANESDSDPDDDLPLSLVRQRASASRQMSGPHYTSKDGTKWYKNCQRPNVRLRSENIVTEQAQVKNIARDASTEYECWNIFVTSDMLQEILTHTNSSIRWRQTKTAAENSSASTSFYMQETTLCELKALIGLLYIAGLIKSNRQSLKDLWRTDGTGVDIFRTTMSLQRFQFLQNNIRFDDKSTRDERKQTDNMAAFRSIFDQFVQSCQNAYSPSEFLTIDEMLLSFRGRCLFRVYIPNKPAKYGIKILALVDAKNFYVKNLEVYAGKQPSGPYAVSNRPFEVVERLIQPVARSHRNVTFDNWFTGYELMLHLLNEYRLTSVGTVRKNKRQIPESFIRTDRQPNSSVFGFQKDITLVSYAPKKNKVVVVMSTMHHDNSIDESTGEKQKPEMITFYNSTKAGVDVVDELCANYNVSRNSKRWPMTLFYGVLNMAAINACIIYRTNKNVTIKRTEFIRSLGLSMIYEHLHSRNKKKNIPTYLRQRIEKQLGEPSPRHVNVPGRYVRCQDCPYKKDRKTKRSCNACAKPICMEHAKFLCENCAELDSHL

SEQ ID NO: 14577 - DNA, 221 bp, Bombyx mori
cccggcgagcatgaggcagggtatctcataccctggtaaaattttaaagttgtgtattttataaaattttcgtctgacaacactagcgcgctcagtagctggaggcaggagcgtgcgggaggggatagtggcgtgatcgcagtgtggcacgggacaccggcgagatattcgtgtgcaaacctgtttcgggtatgttataccctgcctcattgttgacgtat

SEQ ID NO: 14578 - DNA, 208 bp, Bombyx mori
tttaagaaaaagattaataaataataataatttcataattaaaaacttctttcattgaatgccattaaataaaccattattttacaaaataagatcaacataattgagtaaataataataagaacaatattatagtacaacaaaatatgggtatgtcataccctgccacattcttgatgtaactttttttcacctcatgctcgccggg

SEQ ID NO: 14579 - DNA, 181 bp, Xenopus tropicalis
ccctttgcctgccaatcacgcatgggatacgtcgtggcagtaaaagggcttaaatgccaacgacgcgtcccatacgttgttggcattttaagtcttctctctgcagcggcagcatgtgccgccgctgcagagagtttctagcgatgacagcccctctgggcaacgagccgggggggctgtc

SEQ ID NO: 14580 - DNA, 181 bp, Xenopus tropicalis
cctttttactgccaatgacgcatgggatacgtcgtggcagtaaaagggcttaaatgccaacgacgcgtcccatacgttgttggcattttaattcttctctctgcagcggcagcatgtgccgccgctgcagagagtttctagcgatgacagcccctctgggcaacgagccgggggggctgtc

SEQ ID NO: 14581 - DNA, 181 bp, Xenopus tropicalis
cctttttactgccaatgacgcatgggatacgtcgtggcagtaaaagggcttaaatgccaacgacgcgtcccatacgttgttggcattttaagtcttctctctgcagcggcagcatgtgccgccgctgcagagagtttctagcgatgacagcccctctgggcaacgagccgggggggctgtc

SEQ ID NO: 14582 - DNA, 134 bp, Xenopus tropicalis
cctttttactgccaatgacgcatgggatacgtcgtggcagtaaaagggcttaaatgccaacgacgcgtcccatacgttgttggcattttaagtcttctctctgcagcggcagcatgtgccgccgctgcagagag

SEQ ID NO: 14583 - DNA, 96 bp, Xenopus tropicalis
cctttttactgccaatgacgcatgggatacgtcgtggcagtaaaagggcttaaatgccaacgacgcgtcccatacgttgttggcattttaagtctt

SEQ ID NO: 14584 - DNA, 96 bp, Xenopus tropicalis
ccctttgcctgccaatcacgcatgggatacgtcgtggcagtaaaagggcttaaatgccaacgacgcgtcccatacgttgttggcattttaagtctt

SEQ ID NO: 14585 - DNA, 185 bp, Xenopus tropicalis
ttatcctttttactgccaatgacgcatgggatacgtcgtggcagtaaaagggcttaaatgccaacgacgcgtcccatacgttgttggcattttaagtcttctctctgcagcggcagcatgtgccgccgctgcagagagtttctagcgatgacagcccctctgggcaacgagccgggggggctgtc

SEQ ID NO: 14586 - DNA, 234 bp, Xenopus tropicalis
tttgcatttttagacatttagaagcctatatcttgttacagaattggaattacacaaaaattctaccatattttgaaagcttaggttgttctgaaaaaaacaatatattgttttcctgggtaaactaaaagtcccctcgaggaaaggcccctaaagtgaaacagtgcaaaacgttcaaaaactgtctggcaatacaagttccactttgggacaaatcggctggcagtgaaaggg

SEQ ID NO: 14587 - DNA, 233 bp, Xenopus tropicalis
tttgcatttttagacatttagaagcctatatcttgttacagaattggaattacacaaaaattctaccatattttgaaagcttaggttgttctgaaaaaaacaatatattgttttcctgggtaaactaaaagtcccctcgaggaaaggcccctaaagtgaaacagtgcaaaacgttcaaaaactgtctggcaatacaagttccactttgaccaaaacggctggcagtaaaaggg

SEQ ID NO: 14588 - DNA, 148 bp, Xenopus tropicalis
ttgttctgaaaaaaacaatatattgttttcctgggtaaactaaaagtcccctcgaggaaaggcccctaaagtgaaacagtgcaaaacgttcaaaaactgtctggcaatacaagttccactttgaccaaaacggctggcagtaaaaggg

SEQ ID NO: 14589 - DNA, 237 bp, Xenopus tropicalis
tttgcatttttagacatttagaagcctatatcttgttacagaattggaattacacaaaaattctaccatattttgaaagcttaggttgttctgaaaaaaacaatatattgttttcctgggtaaactaaaagtcccctcgaggaaaggcccctaaagtgaaacagtgcaaaacgttcaaaaactgtctggcaatacaagttccactttgaccaaaacggctggcagtaaaagggttat

SEQ ID NO: 14590 - DNA, 149 bp, Xenopus tropicalis
ttgttctgaaaaaaacaatatattgttttcctgggtaaactaaaagtcccctcgaggaaaggcccctaaagtgaaacagtgcaaaacgttcaaaaactgtctggcaatacaagttccactttgggacaaatcggctggcagtgaaaggg

SEQ ID NO: 14591 - DNA, 64 bp, Artificial Sequence
  Synthetic Sequence
atcacgcatgggatacgtcgtggcagtaaaagggcttaaatgccaacgacgcgtcccatacgtt

SEQ ID NO: 14592 - DNA, 82 bp, Artificial Sequence
  Synthetic Sequence
atgacgcatgggatacgtcgtggcagtaaaagggcttaaatgccaacgacgcgtcccatacgttgttggcattttaagtctt

SEQ ID NO: 14593 - DNA, 106 bp, Artificial Sequence
  Synthetic Sequence
cctgggtaaactaaaagtcccctcgaggaaaggcccctaaagtgaaacagtgcaaaacgttcaaaaactgtctggcaatacaagttccactttgggacaaatcggc

SEQ ID NO: 14594 - DNA, 134 bp, Artificial Sequence
  Synthetic Sequence
ttgttctgaaaaaaacaatatattgttttcctgggtaaactaaaagtcccctcgaggaaaggcccctaaagtgaaacagtgcaaaacgttcaaaaactgtctggcaatacaagttccactttgaccaaaacggc

SEQ ID NO: 14595 - DNA, 371 bp, Bombyx mori
cccggcgagcatgaggcagggtatctcataccctggtaaaattttaaagttgtgtattttataaaattttcgtctgacaacactagcgcgctcagtagctggaggcaggagcgtgcgggaggggatagtggcgtgatcgcagtgtggcacgggacaccggcgagatattcgtgtgcaaacctgtttcgggtatgttataccctgcctcattgttgacgtattttttttatgtaatttttccgattattaatttcaactgttttattggtatttttatgttatccattgttctttttttatgatttactgtatcggttgtctttcgttcctttagttgagtttttttttattattttcagtttttgatcaaa

SEQ ID NO: 14596 - DNA, 364 bp, Bombyx mori
tcatatttttagtttaaaaaaataattatatgttttataatgaaaagaatctcattatctttcagtattaggttgatttatattccaaagaataatatttttgttaaattgttgatttttgtaaacctctaaatgtttgttgctaaaattactgtgtttaagaaaaagattaataaataataataatttcataattaaaaacttctttcattgaatgccattaaataaaccattattttacaaaataagatcaacataattgagtaaataataataagaacaatattatagtacaacaaaatatgggtatgtcataccctgccacattcttgatgtaactttttttcacctcatgctcgccggg

SEQ ID NO: 14597 - DNA, 301 bp, Bombyx mori
cccggcgagcatgaggcagggtatctcataccctggtaaaattttaaagttgtgtattttataaaattttcgtctgacaacactagcgcgctcagtagctggaggcaggagcgtgcgggaggggatagtggcgtgatcgcagtgtggcacgggacaccggcgagatattcgtgtgcaaacctgtttcgggtatgttataccctgcctcattgttgacgtattttttttatgtaatttttccgattattaatttcaactgttttattggtatttttatgttatccattgttctttttttatg

SEQ ID NO: 14598 - DNA, 285 bp, Bombyx mori
cagggtatctcataccctggtaaaattttaaagttgtgtattttataaaattttcgtctgacaacactagcgcgctcagtagctggaggcaggagcgtgcgggaggggatagtggcgtgatcgcagtgtggcacgggacaccggcgagatattcgtgtgcaaacctgtttcgggtatgttataccctgcctcattgttgacgtattttttttatgtaatttttccgattattaatttcaactgttttattggtatttttatgttatccattgttctttttttatg

SEQ ID NO: 14599 - DNA, 205 bp, Bombyx mori
cagggtatctcataccctggtaaaattttaaagttgtgtattttataaaattttcgtctgacaacactagcgcgctcagtagctggaggcaggagcgtgcgggaggggatagtggcgtgatcgcagtgtggcacgggacaccggcgagatattcgtgtgcaaacctgtttcgggtatgttataccctgcctcattgttgacgtat

SEQ ID NO: 14600 - DNA, 364 bp, Bombyx mori; identical to SEQ ID NO: 14596

SEQ ID NO: 14601 - DNA, 192 bp, Bombyx mori
tttaagaaaaagattaataaataataataatttcataattaaaaacttctttcattgaatgccattaaataaaccattattttacaaaataagatcaacataattgagtaaataataataagaacaatattatagtacaacaaaatatgggtatgtcataccctgccacattcttgatgtaactttttttca

SEQ ID NO: 14602 - DNA, 371 bp, Bombyx mori; identical to SEQ ID NO: 14595

SEQ ID NO: 14603 - DNA, 16 bp, Artificial Sequence
  Synthetic Sequence
cctcatgctcgccggg

SEQ ID NO: 14604 - protein, 589 aa, Artificial Sequence
  Synthetic Sequence
MAKRFYSAEEAAAHCMASSSEEFSGSDSEYVPPASESDSSTEESWCSSSTVSALEEPMEVDEDVDDLEDQEAGDRADAAAGGEPAWGPPCNFPPEIPPFTTVPGVKVDTSNFEPINFFQLFMTEAILQDMVLYTNVYAEQYLTQVPLPRYARAHAWHPTDIAEMKRFVGLTLAMGLIKANSLESYWDTTTVLNIPVFSATMSRNRYQLLLRFLEFNNEATAVPPDQPGHDRLHKLRPLIDSLSERFAAVYTPCQNICIDESLLLFKGRLQFRQYIPSKRARYGIKFYKLCESSSGYTSYFLIYEGKDSKLDPPGCPPDLTVSGKIVWELISPLLGQGFHLYVDNFYSSIPLFTALYCLDTPACGTINRNRKGLPRALLDKKLNRGETYALRKNELLAIKFFDKKNVFMLTSIHDESVIREQRVGRPPKNKPLCSKEYSKYMGGVDRTDQLQHYYNATRKTRAWYKKVGIYLIQMALRNSYIVYKAAVPGPKLSYYKYQLQILPALLFGGVEEQTVPEMPPSDNVARLIGKHFIDTLPPTPGKQRPQKGCKVCRKRGIRRDTRYYCPKCPRNPGLCFKPCFEIYHTQLHY

SEQ ID NO: 14605 - protein, 592 aa, Artificial Sequence
  Synthetic Sequence
MAKRFYSAEEAAAHCMASSSEEFSGSDSEYVPPASESDSSTEESWCSSSTVSALEEPMEVDEDVDDLEDQEAGDRVDAAAGGEPAWGPPCNFPPEIPPFTTVPGVKVDTSNFEPINFFQLFMTEAILQDMVLYTNVYAEQYLTQNPLPRYARAHAWHPTDIAEMKRFVGLTLAMGLIKANSLESYWDTTTVLSIPVFSATMSRNRYQLLLKFLHFNNEATAVPPDQPGHDRLHKLRPLIDSLSERFAAVYTPCQNICIDESLLLFKGRLQFRQYIPSKRARYGIKFYKLCESSSGYTSYFLIYEGKDSKLDPPGCPPDLTVSGKIVWELISPLLGQGFHLYVDNFYSSIPLFTALYCLDTPACGTINRNRKGLPRALLDKKLNRGETYALRKNELLAIKFFDKKNVFMLTSIHDESVIREQRVGRPPKNKPLCSKEYSKYMGGVDRTDQLQHYYNATRKTRAWYKKVGIYLIQMALRNSYIVYKAAVPGPKLSYYKYQLQILPALLFGGVEEQTVPEMPPSDNVARLIGKHFIDTLPPTPGKQRPQKGCKVCRKRGIRRDTRYYCPKCPRNPGLCFKPCFEIYHTQLHYGRR

SEQ ID NO: 14606 - protein, 610 aa, Artificial Sequence
  Synthetic Sequence
MDIERQEERIRAMLEEELSDYSDESSSEDETDHCSEHEVNYDTEEERIDSVDVPSNSRQEEANAIIANESDSDPDDDLPLSLVRQRASASRQVSGPFYTSKDGTKWYKNCQRPNVRLRSENIVTEQAQVKNIARDASTEYECWNIFVTSDMLQEILTHTNSSIRHRQTKTAAENSSAETSFYMQETTLCELKALIALLYLAGLIKSNRQSLKDLWRKDGTGVDIFRTTMSLQRFQFLLNNIRFDDISTRDERKQTDNMAAFRSIFDQFVQCCQNAYSPSEFLTIDEMLLSFRGRCLFRVYIPNKPAKYGIKILALVDAKNFYVVNLEVYAGKQPSGPYAVSNRPFEVVERLIQPVARSHRNVTFDNWFTGYELMLHLLNEYRLTSVGTVRKNKRQIPESFIRTDRQPNSSVFGFQKDITLVSYAPKKNKVVVVMSTMHHDNSIDESTGEKQKPEMITFYNSTKAGVDVVDELCANYNVSRNSKKWPMTLFYGVLNMAAINACIIYRTNKNVTIKRTEFIRSLGLSMMYEHLHSRNKKKNIPTYLRQRIEKQLGEPVPRHVNVPGRYVRCQDCPYKKDRKTKRSCNACAKPICMEHAKFLCENCAELDSSL

SEQ ID NO: 14607 - protein, 610 aa, Artificial Sequence
  Synthetic Sequence
MDIERQEERIRAMLEEELSDYSDESSSEDETDHCSEHEVNYDTEEERIDSVDVPSNSRQEEANAIIANESDSDPDDDLPLSLVRQRASASRQVSGPFYTSKDGTKWYKNCQRPNVRLRSENIVTEQAQVKNIARDASTEYECWNIFVTSDMLQEILTHTNSSIRHRQTKTAAENSSAETSFYMQETTLCELKALIGLLYLAGLIKSNRQSLKDLWRTDGTGVDIFRTTMSLQRFYFLQNNIRFDDKSTLDERKQTDNMAAFRSIFDQFVQSCQNAYSPSEFLTIDEMLLSFRGRCLFRVYIPNKPAKYGIKILALVDAKNFYVVNLEVYAGKQPSGPYAVSNRPFEVVERLIQPVARSHRNVTFDNWFTGYELMLHLLNEYRLTSVGTVRKNKRQIPESFIRTDRQPNSSVFGFQKDITLVSYAPKKNKVVVVMSTMHHDNSIDESTGEKQKPEMITFYNSTKAGVDVVDELCANYNVSRNSKRWPMTLFYGVLNMAAINACIIYRTNKNVTIKRTEFIRSLGLSMIYEHLHSRNKKKNIPTYLRQRIEKQLGEPSPRHVNYPGRYVRCQDCPYKKDRKTKRSCNACAKPICMEHAKFLCVNCAELDSSL

SEQ ID NO: 14608 - protein, 610 aa, Artificial Sequence
  Synthetic Sequence
MDIERQEERIRAMLEEELSDYSDESSSEDETDHCSEHEVNYDTEEERIDSVDVPSNSRQEEANAIIANESDSDPDDDLPLSLVRQRASASRQVSGPFYTSKDGTKWYKNCQRPNVRLRSENIVTEQAQVKNIARDASTEYECWNIFVTSDMLQEILTHTNSSIRHRQTKTAAENSSAETSFYMQETTLCELKALIALLYLAGLIKSNRQSLKDLWRKDGTGVDIFRTTMSLQRFQFLLNNIRFDDKSTRDERKQTDNMAAFRSIFDQFVQCCQNAYSPSEFLTIDEMLLSFRGRCLFRVYIPNKPAKYGIKILALVDAKNDYVVNLEVYAGKQPSGPYAVSNRPFEVVERLIQPVARSHRNVTFDNWFTGYECMLHLLNEYRLTSVGTVRKNKRQIPESFIRTDRQPNSSVFGFQKDITLVSYAPKKNKVVVVMSTMHHDNSIDESTGEKQKPEMITFYNSTKAGVDVVDELCANYNVSRNSKKWPMTLFYGVLNMAAINACIIYRTNKNVTIKRTEFIRSLGLSMIKEHLHSRNKKKNIPTYLRQRIEKQLGEPSPRHVNVPGRYVRCQDCPYKKDRKTKRSCNACAKPICMEHAKFLCENCAELDSSL

SEQ ID NO: 14609 - DNA, 249 bp, Trichoplusia ni
tctaaatagcgcgaatccgtcgctgtgcatttaggacatctcagtcgccgcttggagctcccgtgaggcgtgcttgtcaatgcggtaagtgtcactgattttgaactataacgaccgcgtgagtcaaaatgacgcatgattatcttttacgtgacttttaagatttaactcatacgataattatattgttatttcatgttctacttacgtgataacttattatatatatattttcttgttatagatatc

SEQ ID NO: 14610 - DNA, 231 bp, Trichoplusia ni; identical to SEQ ID NO: 14562

SEQ ID NO: 14611 - protein, 592 aa, Artificial Sequence
  Synthetic Sequence
MAKRFYSAEEAAAHCMASSSEEFSGSDSEYVPPASESDSSTEESWCSSSTVSALEEPMEVDEDVDDLEDQEAGDRADAAAGGEPAWGPPCNFPPEIPPFTTVPGVKVDTSNFEPINFFQLFMTEAILQDMVLYTNVYAEQYLTQNVLPRYARAHAWHPTDIAEMKRFVGLTLAMGLIKANSLESYWDTTTVLSIPVFSATMSRNRYQLLLRFLHFNNDATAVPPDQPGHDRLHKLRPLIDSLTERFAAVYTPCQNICIDESLLLFKGRLQFRQYIPSKRARYGIKFYKLCESSSGYTSYFLIYEGKDSKLDPPGCPPDLTVSGKIVWELISPLLGQGFHLYVDNFYSSIPLFTALYCLDTPACGTINRNRKGLPRALLDKKLNRGETYALRKNELLAIKFFDKKNVFMLTSIHDESVIREQRVGRPPKNKPLCSKEYSKYMGGVDRTDQLQHYYNATRKTRAWYKKVGIYLIQMALRNSYIVYKAAVPGPKLSYYKYQLQILPALLFGGVEEQTVPEMPPSDNVARLIGKHFIDTLPPTPGKQRPQKGCKVCRKRGIRRDTRYYCPKCPRNPGLCFKPCFEIYHTQLHYGRR

SEQ ID NO: 14612 - protein, 592 aa, Artificial Sequence
  Synthetic Sequence
MAKRFYSAEEAAAHCMASSSEEFSGSDSEYVPPASESDSSTEESWCSSSTVSALEEPMEVDEDVDDLEDQEAGDRADAAPGGEPAWGPPCNFPPEIPPFTTVPGVKVDTSNFEPINFFQLFMTEAILQDMVLYTNVYAEQYLTQVPLPRYARAHAWHPTDIAEMKRFVGLTLAMGLIKANSLESYWDTTTVLSIPVFSATMSRNRYQLLLRFLHFNNEATAVPPDQPGHDRLHKLRPLIDSLSERFAAVYTPCQNICIDESLLLFKGRLQFRQYIPSKRARYGIKFYKLCESSSGYTSYFLIYEGKDSKLDPPGCPPDLTVSGKIVWELISPLLGQGFHLYVDNFYSSIPLFTALYCLDTPACGTINRNRKGLPRALLDKKLNRGETYALRKNELLAIKFFDKKNVFMLTSIHDESVIREQRVGRPPKNKPLCSKEYSKYMGGVDRTDQLQHYYNATRKTRAWYKKVGIYLIQMALRNSYIVYKAAVPGPKLSYYKYQLQILPALLFGGVEEQTVPEMPPSDNVARLIGKHFIDTLPPTPGKQRPQKGCKVCRKRGIRRDTRYYCPKCPRNPGLCFKPCFEIYHTQLHYGRR

SEQ ID NO: 14613 - protein, 592 aa, Artificial Sequence
  Synthetic Sequence
MAKRFYSAEEAAAHCMASSSEEFSGSDSEYVPPASESDSSTEESWCSSSTVSALEEPMEVDEDVDDLEDQEAGDRADAAAGGEPAWGPPCNFPPEIPPFTTVPGVKVDTSNFEPINFFQLFMTEAILQDMVLYTNVYAEQYLTQVPLPRYARAHAWHPTDIAEMKRFVGLTLAMGLIKANSLESYWDTTTVLNIPVFSATMSRNRYQLLLRFLEFNNNATAVPPDQPGHDRLHKLRPLIDSLSERFAAVYTPCQNICIDESLLLFKGRLQFRQYIPSKRARYGIKFYKLCESSSGYTSYFLIYEGKDSKLDPPGCPPDLTVSGKIVWELISPLLGQGFHLYVDNFYSSIPLFTALYCLDTPACGTINRNRKGLPRALLDKKLNRGETYALRKNELLAIKFFDKKNVFMLTSIHDESVIREQRVGRPPKNKPLCSKEYSKYMGGVDRTDQLQHYYNATRKTRAWYKKVGIYLIQMALRNSYIVYKAAVPGPKLSYYKYQLQILPALLFGGVEEQTVPEMPPSDNVARLIGKHFIDTLPPTPGKQRPQKGCKVCRKRGIRRDTRYYCPKCPRNPGLCFKPCFEIYHTQLHYGRR

SEQ ID NO: 14614 - DNA, 14 bp, Artificial Sequence
  Synthetic Sequence
atgaggcagggtat

SEQ ID NO: 14615 - DNA, 14 bp, Artificial Sequence
  Synthetic Sequence
ataccctgcctcat

SEQ ID NO: 14616 - DNA, 10 bp, Artificial Sequence
  Synthetic Sequence
ggcagggtat

SEQ ID NO: 14617 - DNA, 10 bp, Artificial Sequence
  Synthetic Sequence
ataccctgcc

SEQ ID NO: 14618 - DNA, 10 bp, Artificial Sequence
  Synthetic Sequence
taaaatttta

SEQ ID NO: 14619 - DNA, 12 bp, Artificial Sequence
  Synthetic Sequence
attttataaaat

SEQ ID NO: 14620 - DNA, 10 bp, Artificial Sequence
  Synthetic Sequence
tcataccctg

SEQ ID NO: 14621 - DNA, 13 bp, Artificial Sequence
  Synthetic Sequence
taaataataataa

SEQ ID NO: 14622 - DNA, 14 bp, Artificial Sequence
  Synthetic Sequence
ccctttgcctgcca

SEQ ID NO: 14623 - DNA, 14 bp, Artificial Sequence
  Synthetic Sequence
tggcagtgaaaggg

SEQ ID NO: 14624 - protein, 589 aa, Artificial Sequence
  Synthetic Sequence
MAKRFYSAEEAAAHCMASSSEEFSGSDSEYVPPASESDSSTEESWCSSSTVSALEEPMEVDEDVDDLEDQEAGDRADAAAGGEPAWGPPCNFPPEIPPFTTVPGVKVDTSNFEPINFFQLFMTEAILQDMVLYTNVYAEQYLTQNPLTRYARAHAWHPTDIAEMKRFVGLTLAMGLIKANSLESYWDTTTVLSIPVFSATMSRNRYQLLLRFLHFNNNATAVPPDQPGHDRLHKLRPLIDSLSERFAAVYTPCQNICIDESLLLFKGRLQFRQYIPSKRARYGIKFYKLCESSSGYTSYFLIYEGKDSKLDPPGCPPDLTVSGKIVWELISPLLGQGFHLYVDNFYSSIPLFTALYCLNTPACGTINRNRKGLPRALLDKKLNRGETYALRKNELLAIKFFDKKNVFMLTSIHDESVIREQRVGRPPKNKPLCSKEYSKYMGGVDRTDQLQHYYNATRKTRHWYKKVGIYLIQMALRNSYIVYKAAVPGPKLSYYKYQLQILPALLFGGVEEQTVPEMPPSDNVARLIGKHFIDTLPPTPGKQRPQKGCKVCRKRGIRRDTRYYCPKCPRNPGLCRKPCFEIYHTQLHY

SEQ ID NO: 14625 - protein, 589 aa, Artificial Sequence
  Synthetic Sequence
MAKRFYSAEEAAAHCMASSSEEFSGSDSEYVPPASESDSSTEESWCSSSTVSALEEPMEVDEDVDDLEDQEAGDRADAAAGGEPAWGPPCNFPPEIPPFTTVPGVKVDTSNFEPINFFQLFMTEAILQDMVLYTNVYAEQYLTQNPLPRYARAHAWHPTDIAEMKRFVGLTLAMGLIKANSLESYWDTTTVLKIPVFSATMSRNRYQLLLRFLHFNNNATAVPPDQPGHDRLHKLRPLIDSLSERFAAVYTPCQNICIDESLLLFKGRLQFRQYIPSKRARYGIKFYKLCESSSGYTSYFLIYEGKDSKLDPPGCPPDLTVSGKIVWELISPLLGQGFHLYVDNFYSSIPLFTALYCLNTPACGTINRNRKGLPRALLDKKLNRGETYALRKNELLAIKFFDKKNVFMLTSIHDESVIREQRVGRPPKNKPLCSKEYSKYMGGVDRTDQLQHYYNATRKTRHWYKKVGIYLIQMALRNSYIVYKAAVPGPKLSYYKYQLQILPALLFGGVEEQTVPEMPPSDNVARLIGKHFIDTLPPTPGKQRPQKGCKVCRKRGIRRDTRYYCPKCPRNPGLCFKPCFEIYHTQLHY

SEQ ID NO: 14626 - protein, 1794 aa, Artificial Sequence
  Synthetic Sequence
ATGGCACCCAAAAAGAAACGTAAAGTGATGGCCAAAAGATTTTACAGCGCCGAAGAAGCAGCAGCACATTGCATGGCATCGTCATCCGAAGAATTCTCGGGGAGCGATTCCGAATATGTCCCACCGGCCTCGGAAAGCGATTCGAGCACTGAGGAGTCGTGGTGTTCCTCCTCAACTGTCTCGGCTCTTGAGGAGCCGATGGAAGTGGATGAGGATGTGGACGACTTGGAGGACCAGGAAGCCGGAGACAGGGCCGACGCTGCCGCGGGAGGGGAGCCGGCGTGGGGACCTCCATGCAATTTTCCTCCCGAAATCCCACCGTTCACTACTGTGCCGGGAGTGAAGGTCGACACGTCCAACTTCGAACCGATCAATTTCTTTCAACTCTTCATGACTGAAGCGATCCTGCAAGATATGGTGCTCTACACTAATGTGTACGCCGAGCAGTACCTGACTCAAAACCCGCTGCCTCGCTACGCGAGAGCGCATGCGTGGCACCCGACCGATATCGCGGAGATGAAGCGGTTCGTGGGACTGACCCTCGCAATGGGCCTGATCAAGGCCAACAGCCTCGAGTCATACTGGGATACCACGACTGTGCTTAGCATTCCGGTGTTCTCCGCTACCATGTCCCGTAACCGCTACCAACTCCTGCTGCGGTTCCTCCACTTCAACAACAATGCGACCGCTGTGCCACCTGACCAGCCAGGACACGACAGACTCCACAAGCTGCGGCCATTGATCGACTCGCTGAGCGAGCGATTCGCCGCGGTGTACACCCCTTGCCAAAACATTTGCATCGACGAGTCGCTTCTGCTGTTTAAAGGCCGGCTTCAGTTCCGCCAGTACATCCCATCGAAGCGCGCTCGCTATGGTATCAAATTCTACAAACTCTGCGAGTCGTCCAGCGGCTACACGTCATACTTCTTGATCTACGAGGGGAAGGACTCTAAGCTGGACCCACCGGGGTGTCCACCGGATCTTACTGTCTCCGGAAAAATCGTGTGGGAACTCATCTCACCTCTCCTCGGACAAGGCTTTCATCTCTACGTCGACAATTTCTACTCATCGATCCCTCTGTTCACCGCCCTCTACTGCCTGGATACTCCAGCCTGTGGGACCATTAACAGAAACCGGAAGGGTCTGCCGAGAGCACTGCTGGATAAGAAGTTGAACAGGGGAGAGACTTACGCGCTGAGAAAGAACGAACTCCTCGCCATCAAATTCTTCGACAAGAAAAATGTGTTTATGCTCACCTCCATCCACGACGAATCCGTCATCCGGGAGCAGCGCGTGGGCAGGCCGCCGAAAAACAAGCCGCTGTGCTCTAAGGAATACTCCAAGTACATGGGGGGTGTCGACCGGACCGATCAGCTGCAGCATTACTACAACGCCACTAGAAAGACCCGGGCCTGGTACAAGAAAGTCGGCATCTACCTGATCCAAATGGCACTGAGGAATTCGTATATTGTCTACAAGGCTGCCGTTCCGGGCCCGAAACTGTCATACTACAAGTACCAGCTTCAAATCCTGCCGGCGCTGCTGTTCGGTGGAGTGGAAGAACAGACTGTGCCCGAGATGCCGCCATCCGACAACGTGGCCCGGTTGATCGGAAAGCACTTCATTGATACCCTGCCTCCGACGCCTGGAAAGCAGCGGCCACAGAAGGGATGCAAAGTTTGCCGCAAGCGCGGAATACGGCGCGATACCCGCTACTATTGCCCGAAGTGCCCCCGCAATCCCGGACTGTGTTTCAAGCCCTGTTTTGAAATCTACCACACCCAGTTGCATTAC

SEQ ID NO: 14627 - protein, 589 aa, Artificial Sequence
  Synthetic Sequence
MAKRFYSAEEAAAHCMASSSEQTSGSDSEYVPPASESDSSTEESWCSSSTVSALEEPMEVDEDVDDLEDQEAGDRADAAAGGEPAWGPPCNFPPEIPPFTTVPGVKVDTSNFEPINFFQLFMTEAILQDMVLYTNVYAEQYLTQNPLTRYARAHAWHPTDIAEMKRFVGLTLAMGLIKANSIESYWDTTTVLSIPVFGATMSRNRYQLLLRFLHFNNNATAVPPDQPGHDRLHKLRPLIDSLSERFANVYTPCQNICIDESLLLFKGRLQFRQYIPSKRARYGIKFYKLCESSSGYTSYFLIYEGKDSKLDPPGCPPDLTVSGKIVWELISPLLGQGFHLYVDNFYSSIPLFTALYCLNTPACGTINRNRKGLPRALLDKKLNRGETYALRKNELLAIKFFDKKNVFMLTSIHDESVIREQRVGRKPKNKPLCSKEYSKYMGGVDRTDQLQHYYNATRKTRHWYKKVGIYLIQMALRNSYIVYKAAVPGPKLSYYKYQLQILPALLFGGVEEQTVPEMPPSDNVARLIGKHFIDTLPPTPGKQRPQKGCKVCRKRGIRRDTRYYCPKCPRNPGLCRKPCFEIYHTQLHY

SEQ ID NO: 14628 - protein, 589 aa, Artificial Sequence
  Synthetic Sequence
MAKRFYSAEEAAAHCSASSSEEFSGSDSEYVPPASESDSSTEESWCSSSTVSALEEPMEVDEDVDDLEDQEAGDRADAAAGGEPAWGPPCNFPPEIPPFTTVPGVKVDTSNFEPINFFQLFMTEAILQDMVLYTNVYAEQYLTQNPLTRGARAHAWHPTDIAEMKRFVGLTLAMGLIKANSLESYWDTTTVLSIPVFGATMSRNRYQLLLRFLHFNNNATAVPPDQPGHDRLHKLRPLIDSLSERFANVYTPCQNICIDESLMLFKGRLQFRQYIPSKRARYGIKFYKLCESSTGYTSYFLIYEGKDSKLDPPGCPPDLTVSGKIVWELISPLLGQGFHLYVDNFYSSIPLFTALYCLNTPACGTINRNRKGLPRALLDKKLNRGETYALRKNELLAIKFFDKKNVFMLTSIHDESVIREQRVGRPPKNKPLCSKEYSKYMGGVDRTDQLQHYYNATRKTRHWYKKVGIYLIQMALRNSYIVYKAAVPGPKLSYYKYQLQILPALLFGGVEEQTVPEMPPSDNVARLIGKHFIDTLPPTPGKQRPQKGCKVCRKRGIRRDTRYYCPKCPRNPGLCRKPCFEIYHTQLHY

SEQ ID NO: 14629 - DNA, 1857 bp, Artificial Sequence
  Synthetic Sequence
atggcacccaaaaagaaacgtaaagtgatggacattgaaagacaggaagaaagaatcagggcgatgctcgaagaagaactgagcgactactccgacgaatcgtcatcagaggatgaaaccgaccactgtagcgagcatgaggttaactacgacaccgaggaggagagaatcgactctgtggatgtgccctccaactcacgccaagaagaggccaatgcaattatcgcaaacgaatcggacagcgatccagacgatgatctgccactgtccctcgtgcgccagcgggccagcgcttcgagacaagtgtcaggtccattctacacttcgaaggacggcactaagtggtacaagaattgccagcgacctaacgtcagactccgctccgagaatatcgtgaccgaacaggctcaggtcaagaatatcgcccgcgacgcctcgactgagtacgagtgttggaatatcttcgtgacttcggacatgctgcaagaaattctgacgcacaccaacagctcgattaggcatcgccagaccaagactgcagcggagaactcatcggccgaaacctccttctatatgcaagagactactctgtgcgaactgaaggcgctgattgcactgctgtacttggccggcctcatcaaatcaaataggcagagcctcaaagatctctggagaacggatggaactggagtggatatctttcggacgactatgagcttgcagcggttccagtttctgcaaaacaatatcagattcgacgacaagtccacccgggacgaaaggaaacagactgacaacatggctgcgttccggtcaatattcgatcagtttgtgcagtgctgccaaaacgcttatagcccatcggaattcctgaccatcgacgaaatgcttctctccttccgggggcgctgcctgttccgagtgtacatcccgaacaagccggctaaatacggaatcaaaatcctggccctggtggacgccaagaatttctacgtcgtgaatctcgaagtgtacgcaggaaagcaaccgtcgggaccgtacgctgtttcgaaccgcccgtttgaagtcgtcgagcggcttattcagccggtggccagatcccaccgcaatgttaccttcgacaattggttcaccggctacgagctgatgcttcaccttctgaacgagtaccggctcactagcgtggggactgtcaggaagaacaagcggcagatcccagaatccttcatccgcaccgaccgccagcctaactcgtccgtgttcggatttcaaaaggatatcacgcttgtctcgtacgcccccaagaaaaacaaggtcgtggtcgtgatgagcaccatgcatcacgacaacagcatcgacgagtcaaccggagaaaagcaaaagcccgagatgatcaccttctacaattcaactaaggccggcgtcgacgtcgtggatgaactgtgcgcgaactataacgtgtcccggaactctaagcggtggcctatgactctcttctacggagtgctgaatatggccgcaatcaacgcgtgcatcatctaccgcaccaacaagaacgtgaccatcaagcgcaccgagttcatcagatcgctgggtttgagcatgatctacgagcacctccattcacggaacaagaagaagaatatccctacttacctgaggcagcgtatcgagaagcagttgggagaaccaagcccgcgccacgtgaacgtgccggggcgctacgtgcggtgccaagattgcccgtacaaaaaggaccgcaaaaccaaaagatcgtgtaacgcgtgcgccaaacctatctgcatggagcatgccaaatttctgtgtgaaaattgtgctgaactcgattcctccctg

SEQ ID NO: 14630 - protein, 608 aa, Artificial Sequence
  Synthetic Sequence
MDIERQEERIRAMLEEELSDYSDESSSEDETDHCSEHEVNYDTEEERIDSVDVPSNSRQEEANAIIANESDSDPDDDLPLSLVRQRASASRQVSGPFYTSKDGTKWYKNCQRPNVRLRSENIVTEQAQVKNIARDASTEYECWNIFVTSDMLQEILTHTNSSIRWRQTKTAAENSSAETSFYMQETTLCELKALIGLLYIAGLIKSNRQSLKDLWRTDGTGVDIFRTTMSLQRFQFLLNNIRFDDKSTRDERKQTDNMAAFRSIFDQFVQSCQNAYSPSEFLTIDEMLLSFRGRCLFRVYIPNKPAKYGIKILALVDAKNFYVHNLEVYAGKQPSGPYAVSNRPFEVVERLIQPVARSHRNVTFDNWFTGYEVMLHLLNEYRLTSVGTVRKNKRQIPESFIRTDRQPNSSVFGFQKDITLVSYAPKKNKVVVVMSTMHHDNSIDESTGEKQKPEMITFYNSTKAGVDVVDELCANYNVSRNSKRWPMTLFYGVLNMAAINACIIYRTNKNVTIKRTEFIRSLGLSMIYEHLHSRNKKKNIPTYLRQRIEKQLGEPSPRHVNVPGRYVRCQDCPYKKDRKTKRSCNACAKPICMEHAKFLCENCAHLDS

SEQ ID NO: 14631 - protein, 610 aa, Artificial Sequence
  Synthetic Sequence
MDIERQEERIRAMLEEELSDYSDESSSEDETDHCSEHEVNYDTEEERIDSVDVPSNSRQEEANAIIANESDSDPDDDLPLSLVRQRASASRQVSGPFYTSKDGTKWYKNCQRPNVRLRSENIVTEQAQVKNIARDASTEYECWNIFVTSDMLQEILTHTNSSIRWRQTKTAAENSSASTSFYMQETTLCELKALIGLLYIAGLIKSNRQSLKDLWRTDGTGVDIFRTTMSLQRFQFLLNNIRFDDKSTRDERKQTDNMAAFRSIFDQFVQSCQNAYSPSEFLTIDEMLLSFRGRCLFRVYIPNKPAKYGIKILALVDAKNFYVKNLEVYAGKQPSGPYAVSNRPFEVVERLIQPVARSHRNVTFDNWFTGYELMLHLLNEYRLTSVGTVRKNKRQIPESFIRTDRQPNSSVFGFQKDITLVSYAPKKNKVVVVMSTMHHDNSIDESTGEKQKPEMITFYNSTKAGVDVVDELCANYNVSRNSKRWPMTLFYGVLNMAAINACIIYRTNKNVTIKRTEFIRSLGLSMIYEHLHSRNKKKNIPTYLRQRIAMQLGEPSPRHVNVPGRYVRCQDCPYKKDRKTKRSCNACAKPICMEHAKFLCENCAELDSSL

SEQ ID NO: 14632 - protein, 610 aa, Artificial Sequence
  Synthetic Sequence
MDIERQEERIRAMLEEELSDYSDESSSEDETDHCSEHEVNYDTEEERIDSVDVPSNSRQEEANAIIANESDSDPDDDLPLSLVRQRASASRQVSGPFYTSKDGTKWYKNCQRPNVRLRSENIVTEQAQVKNIARDASTEYECWNIFVTSDMLQEILTHTNSSIRWRQTKTAAENSSAETSFYMQETTLCELKALIGLLYIAGLIKSNRQSLKDLWRTDGTGVDIFRTTMSLQRFQFLLNNIRFDDKSTRDERKQTDNMAAFRSIFDQFVQSCQNAYSPSEFLTIDEMLLSFRGRCLFRVYIPNKPAKYGIKILALVDAKNFYVKNLEVYAGKQPSGPYAVSNRPFEVVERLIQPVARSHRNVTFDNWFTGYELMLHLLNEYRLTSVGTVRKNKTQIPENFIRTDRQPNSSVFGFQKDITLVSYAPKKNKVVVVMSTMHHDNSIDESTGEKQKPEMITFYNSTKAGVDVVDELQANYNVSRNSKRWPMTLFYGVLNMAAINACIIYRTNKNVTIKRTEFIRSLGLSMIYEHLHSRNKKKNIPTYLRQRIEKQLGEPSPRHVNVPGRYVRCQDCPYKKDRKTKRSCNACAKPICMEHAKFLCENCAELDSSL

SEQ ID NO: 14633 - protein, 610 aa, Artificial Sequence
  Synthetic Sequence
MDIERQEERIRAMLEEELSDYSDESSSEDETDHCSEHEVNYDTEEERIDSVDVPSNSRQEEANAIIANESDSDPDDDLPLSLVRQRASASRQVSGPFYTSKDGTKWYKNCQRPNVRLRSENIVTEQAQVKNIARDASTEYECWNIFVTSDMLQEILTHTNSSIRWRQTKTAAENSSAETSFYMQETTLCELKALIGLLYIAGLIKSNRQSLKDLWRTDGTGVDIFRTTMSLQRFQFLQNNIRFDDKSTRDERKQTDNMAAFRSIFDQFVQSCQNAYSPSEFLTIDEMLLSFRGRCLFRVYIPNKPAKYGIKILALVDAKNFYVKNLEVYAGKQPSGPYAVSNRPFEVVERLIQPVARSHRNVTFDNWFTGYELMLHLLNEYRLTSVGTVRKNKRQIPESFIRTDRQPNSSVFGFQKDITLVSYAPKKNKVVVVMSTMHHDNSIDESTGEKQKPEMITFYNSTKAGVDVVDELCANYNVSRNSKRWPMTLFYGVLNMAAINACIIYRTNKNVTIKRTEFIRSLGLSMIYEHLHSRNKKKNIPTYLRQRIEKQLGEPSPRHVNVPGRYVRCQDCPYKKDRKTKRSCNACAKPICMEHAKFLCENCAELDSSL

SEQ ID NO: 14634 - protein, 610 aa, Artificial Sequence
  Synthetic Sequence
MDIERQEERIRAMLEEELSDYSDESSSEDETDHCSEHEVNYDTEEERIDSVDVPSNSRQEEANAIIANESDSDPDDDLPLSLVRQRASASRQVSGPFYTSKDGTKWYKNCQRPNVRLRSENIVTEQAQVKNIARDASTEYECWNIFVTSDMLQEILTHTNSSIRHRQTKTAAENSSAETSFYMQETTLCELKALIALLYLAGLIKSNRQSLKDLWRTDGTGVDIFRTTMSLQRFQFLQNNIRFDDKSTRDERKQTDNMAAFRSIFDQFVQCCQNAYSPSEFLTIDEMLLSFRGRCLFRVYIPNKPAKYGIKILALVDAKNDYVVNLEVYAGKQPSGPYAVSNRPFEVVERLIQPVARSHRNVTFDNWFTGYELMLHLLNEYRLTSVGTVRKNKRQIPESFIRTDRQPNSSVFGFQKDITLVSYAPKKNKVVVVMSTMHHDNSIDESTGEKQKPEMITFYNSTKAGVDVVDELCANYNVSRNSKRWPMTLFYGVLNMAAINACIIYRTNKNVTIKRTEFIRSLGLSMIYEHLHSRNKKKNIPTYLRQRIEKQLGEPSSRHVNVKGRYVRCQDCPYKKDRKTKRSCNACAKPICMEHAKFLCENCAELDSSL

SEQ ID NO: 14635-14642 - skipped (8 entries)

SEQ ID NO: 14643 - protein, 288 aa, Homo Sapiens
MQIPQAPWPVVWAVLQLGWRPGWFLDSPDRPWNPPTFSPALLVVTEGDNATFTCSFSNTSESFVLNWYRMSPSNQTDKLAAFPEDRSQPGQDCRFRVTQLPNGRDFHMSVVRARRNDSGTYLCGAISLAPKAQIKESLRAELRVTERRAEVPTAHPSPSPRPAGQFQTLVVGVVGGLLGSLVLLVWVLAVICSRAARGTIGARRTGQPLKEDPSAVPVFSVDYGELDFQWREKTPEPPVPCVPEQTEYATIVFPSGMGTSSPARRGSADGPRSAQPLRPEDGHCSWPL

SEQ ID NO: 14644 - protein, 520 aa, Homo Sapiens
MGKPSSMDTKFKDDLFRKYVQFHESKVDTTTSRQRPGSDECLRVAASTLLSLHKVDPFYRFRLIQFYEVVESSLRSLSSSSLRALHGAFSMLETVGINLFLYPWKKEFRSIKTYTGPFVYYVKSTLLEEDIRAILSCMGYTPELGTAYKLRELVETLQVKMVSFELFLAKVECEQMLEIHSQVKDKGYSELDIVSERKSSAEDVRGCSDALRRRAEGREHLTASMSRVALQKSASERAAKDYYKPRVTKPSRSVDAYDSYWESRKPPLKASLSLRKEPVATDVGDDLKDEIIRPSPSLLTMASSPHGSPDVLPPASPSNGPALLRGTYFSTQDDVDLYTDSEPRATYRRQDALRPDVWLLRNDAHSLYHKRSPPAKESALSKCQSCGLSCSSSLCQRCDSLLTCPPASKPSAFPSKASTHDSLAHGASLREKYPGQTQGLDRLPHLHSKSKPSTTPTSRCGFCNRPGATNTCTQCSKVSCDACLSAYHYDPCYKKSELHKFMPNNQLNYKSTQLSHLVYR

SEQ ID NO: 14645 - protein, 503 aa, Homo Sapiens; identical to SEQ ID NO: 13181

SEQ ID NO: 14646 - protein, 567 aa, Homo Sapiens
MGRGLLRGLWPLHIVLWTRIASTIPPHVQKSVNNDMIVTDNNGAVKFPQLCKFCDVRFSTCDNQKSCMSNCSITSICEKPQEVCVAVWRKNDENITLETVCHDPKLPYHDFILEDAASPKCIMKEKKKPGETFFMCSCSSDECNDNIIFSEEYNTSNPDLLLVIFQVTGISLLPPLGVAISVIIIFYCYRVNRQQKLSSTWETGKTRKLMEFSEHCAIILEDDRSDISSTCANNINHNTELLPIELDTLVGKGRFAEVYKAKLKQNTSEQFETVAVKIFPYEEYASWKTEKDIFSDINLKHENILQFLTAEERKTELGKQYWLITAFHAKGNLQEYLTRHVISWEDLRKLGSSLARGIAHLHSDHTPCGRPKMPIVHRDLKSSNILVKNDLTCCLCDFGLSLRLDPTLSVDDLANSGQVGTARYMAPEVLESRMNLENVESFKQTDVYSMALVLWEMTSRCNAVGEVKDYEPPFGSKVREHPCVESMKDNVLRDRGRPEIPSFWLNHQGIQMVCETLTECWDHDPEARLTAQCVAERFSELEHLDRLSGRSCSEEKIPEDGSLNTTK

SEQ ID NO: 14647 - protein, 301 aa, Homo Sapiens
MFSHLPFDCVLLLLLLLLTRSSEVEYRAEVGQNAYLPCFYTPAAPGNLVPVCWGKGACPVFECGNVVLRTDERDVNYWTSRYWLNGDFRKGDVSLTIENVTLADSGIYCCRIQIPGIMNDEKFNLKLVIKPAKVTPAPTRQRDFTAAFPRMLTTRGHGPAETQTLGSLPDINLTQISTLANELRDSRLANDLRDSGATIRIGIYIGAGICAGLALALIFGALIFKWYSHSKEKIQNLSLISLANLPPSGLANAVAEGIRSEENIYTIEENVYEVEEPNEYYCYVSSRQQPSQPLGCRFAMP

SEQ ID NO: 14648 - protein, 525 aa, Homo Sapiens; identical to SEQ ID NO: 7633

SEQ ID NO: 14649 - protein, 223 aa, Homo Sapiens; identical to SEQ ID NO: 3669

SEQ ID NO: 14650 - protein, 289 aa, Homo Sapiens
MKTLPAMLGTGKLFWVFFLIPYLDIWNIHGKESCDVQLYIKRQSEHSILAGDPFELECPVKYCANRPHVTWCKLNGTTCVKLEDRQTSWKEEKNISFFILHFEPVLPNDNGSYRCSANFQSNLIESHSTTLYVTDVKSASERPSKDEMASRPWLLYRLLPLGGLPLLITTCFCLFCCLRRHQGKQNELSDTAGREINLVDAHLKSEQTEASTRQNSQVLLSETGIYDNDPDLCFRMQEGSEVYSNPCLEENKPGIVYASLNHSVIGPNSRLARNVKEAPTEYASICVRS

SEQ ID NO: 14651 - protein, 296 aa, Homo Sapiens
MTLNNVTMRQGTVGMQPQQQRWSIPADGRHLMVQKEPHQYSHRNRHSATPEDHCRRSWSSDSTDSVISSESGNTYYRVVLIGEQGVGKSTLANIFAGVHDSMDSDCEVLGEDTYERTLMVDGESATIILLDMWENKGENEWLHDHCMQVGDAYLIVYSITDRASFEKASELRIQLRRARQTEDIPIILVGNKSDLVRCREVSVSEGRACAVVFDCKFIETSAAVQHNVKELFEGIVRQVRLRRDSKEKNERRLAYQKRKESMPRKARRFWGKIVAKNNKNMAFKLKSKSCHDLSVL

SEQ ID NO: 14652 - protein, 450 aa, Homo Sapiens
MGSLQPDAGNASWNGTEAPGGGARATPYSLQVTLTLVCLAGLLMLLTVFGNVLVIIAVFTSRALKAPQNLFLVSLASADILVATLVIPFSLANEVMGYWYFGKAWCEIYLALDVLFCTSSIVHLCAISLDRYWSITQAIEYNLKRTPRRIKAIIITVWVISAVISFPPLISIEKKGGGGGPQPAEPRCEINDQKWYVISSCIGSFFAPCLIMILVYVRIYQIAKRRTRVPPSRRGPDAVAAPPGGTERRPNGLGPERSAGPGGAEAEPLPTQLNGAPGEPAPAGPRDTDALDLEESSSSDHAERPPGPRRPERGPRGKGKARASQVKPGDSLPRRGPGATGIGTPAAGPGEERVGAAKASRWRGRQNREKRFTFVLAVVIGVFVVCWFPFFFTYTLTAVGCSVPRTLFKFFFWFGYCNSSLNPVIYTIFNHDFRRAFKKILCRGDRKRIV

SEQ ID NO: 14653 - protein, 311 aa, Homo Sapiens
MGVPTALEAGSWRWGSLLFALFLAASLGPVAAFKVATPYSLYVCPEGQNVTLTCRLLGPVDKGHDVTFYKTWYRSSRGEVQTCSERRPIRNLTFQDLHLHHGGHQAANTSHDLAQRHGLESASDHHGNFSITMRNLTLLDSGLYCCLVVEIRHHHSEHRVHGAMELQVQTGKDAPSNCVVYPSSSQDSENITAAALATGACIVGILCLPLILLLVYKQRQAASNRRAQELVRMDSNIQGIENPGFEASPPAQGIPEAKVRHPLSYVAQRQPSESGRHLLSEPSTPLSPPGPGDVFFPSLDPVPDSPNFEVI

SEQ ID NO: 14654 - protein, 244 aa, Homo Sapiens
MRWCLLLIWAQGLRQAPLASGMMTGTIETTGNISAEKGGSIILQCHLSSTTAQVTQVNWEQQDQLLAICNADLGWHISPSFKDRVAPGPGLGLTLQSLTVNDTGEYFCIYHTYPDGTYTGRIFLEVLESSVAEHGARFQIPLLGAMAATLVVICTAVIVVVALTRKKKALRIHSVEGDLRRKSAGQEEWSPSAPSPPGSCVQAEAAPAGLCGEQRGEDCAELHDYFNVLSYRSLGNCSFFTETG

SEQ ID NO: 14655 - protein, 290 aa, Homo Sapiens
MRIFAVFIFMTYWHLLNAFTVTVPKDLYVVEYGSNMTIECKFPVEKQLDLAALIVYWEMEDKNIIQFVHGEEDLKVQHSSYRQRARLLKDQLSLGNAALQITDVKLQDAGVYRCMISYGGADYKRITVKVNAPYNKINQRILVVDPVTSEHELTCQAEGYPKAEVIWTSSDHQVLSGKTTTTNSKREEKLFNVTSTLRINTTTNEIFYCTFRRLDPEENHTAELVIPELPLAHPPNERTHLVILGAILLCLGVALTFIFRLRKGRMMDVKKCGIQDTNSKKQSDTHLEET

SEQ ID NO: 14656 - protein, 273 aa, Homo Sapiens
MIFLLLMLSLELQLHQIAALFTVTVPKELYIIEHGSNVTLECNFDTGSHVNLGAITASLQKVENDTSPHRERATLLEEQLPLGKASFHIPQVQVRDEGQYQCIIIYGVAWDYKYLTLKVKASYRKINTHILKVPETDEVELTCQATGYPLAEVSWPNVSVPANTSHSRTPEGLYQVTSVLRLKPPPGRNFSCVFWNTHVRELTLASIDLQSQMEPRTHPTWLLHIFIPFCIIAFIFIATVIALRKQLCQKLYSSKDTTKRPVTTTKREVNSAI

SEQ ID NO: 14657 - protein, 288 aa, Homo Sapiens; identical to SEQ ID NO: 2417

SEQ ID NO: 14658 - protein, 329 aa, Homo Sapiens; identical to SEQ ID NO: 2420

SEQ ID NO: 14659 - protein, 181 aa, Homo Sapiens; identical to SEQ ID NO: 2218

SEQ ID NO: 14660 - protein, 287 aa, Homo Sapiens
MSPHPTALLGLVLCLAQTIHTQEEDLPRPSISAEPGTVIPLGSHVTFVCRGPVGVQTFRLERESRSTYNDTEDVSQASPSESEARFRIDSVSEGNAGPYRCIYYKPPKWSEQSDYLELLVKETSGGPDSPDTEPGSSAGPTQRPSDNSHNEHAPASQGLKAEHLYILIGVSVVFLFCLLLLVLFCLHRQNQIKQGPPRSKDEEQKPQQRPDLAVDVLERTADKATVNGLPEKDRETDTSALAAGSSQEVTYAQLDHWALTQRTARAVSPQSTKPMAESITYAAVARH

SEQ ID NO: 14661 - protein, 378 aa, Homo Sapiens
MSKEPLILWLMIEFWWLYLTPVTSETVVTEVLGHRVTLPCLYSSWSHNSNSMCWGKDQCPYSGCKEALIRTDGMRVTSRKSAKYRLQGTIPRGDVSLTILNPSESDSGVYCCRIEVPGWFNDVKINVRLNLQRASTTTHRTATTTTRRTTTTSPTTTRQMTTTPAALPTTVVTTPDLTTGTPLQMTTIAVFTTANTCLSLTPSTLPEEATGLLTPEPSKEGPILTAESETVLPSDSWSSVESTSADTVLLTSKESKVWDLPSTSHVSMWKTSDSVSSPQPGASDTAVPEQNKTTKTGQMDGIPMSMKNEMPISQLLMIIAPSLGFVLFALFVAFLLRGKLMETYCSQKHTRLDYIGDSKNVLNDVQHGREDEDGLFTL

SEQ ID NO: 14662 - protein, 370 aa, Homo Sapiens
MLGQVVTLILLLLLKVYQGKGCQGSADHVVSISGVPLQLQPNSIQTKVDSIAWKKLLPSQNGFHHILKWENGSLPSNTSNDRFSFIVKNLSLLIKAAQQQDSGLYCLEVTSISGKVQTATFQVFVFESLLPDKVEKPRLQGQGKILDRGRCQVALSCLVSRDGNVSYAWYRGSKLIQTAGNLTYLDEEVDINGTHTYTCNVSNPVSWESHTLNLTQDCQNAHQEFRFWPFLVIIVILSALFLGTLACFCVWRRKRKEKQSETSPKEFLTIYEDVKDLKTRRNHEQEQTFPGGGSTIYSMIQSQSSAPTSQEPAYTLYSLIQPSRKSGSRKRNHSPSFNSTIYEVIGKSQPKAQNPARLSRKELENFDVYS

SEQ ID NO: 14663 - protein, 341 aa, Homo Sapiens; identical to SEQ ID NO: 8852

SEQ ID NO: 14664 - protein, 1068 aa, Homo Sapiens
MPPRPSSGELWGIHLMPPRILVECLLPNGMIVTLECLREATLITIKHELFKEARKYPLHQLLQDESSYIFVSVTQEAEREEFFDETRRLCDLRLFQPFLKVIEPVGNREEKILNREIGFAIGMPVCEFDMVKDPEVQDFRRNILNVCKEAVDLRDLNSPHSRAMYVYPPNVESSPELPKHIYNKLDKGQIIVVIWVIVSPNNDKQKYTLKINHDCVPEQVIAEAIRKKTRSMLLSSEQLKLCVLEYQGKYILKVCGCDEYFLEKYPLSQYKYIRSCIMLGRMPNLMLMAKESLYSQLPMDCFTMPSYSRRISTATPYMNGETSTKSLWVINSALRIKILCATYVNVNIRDIDKIYVRTGIYHGGEPLCDNVNTQRVPCSNPRWNEWLNYDIYIPDLPRAARLCLSICSVKGRKGAKEEHCPLAWGNINLFDYTDTLVSGKMALNLWPVPHGLEDLLNPIGVTGSNPNKETPCLELEFDWFSSVVKFPDMSVIEEHANWSVSREAGFSYSHAGLSNRLARDNELRENDKEQLKAISTRDPLSEITEQEKDFLWSHRHYCVTIPEILPKLLLSVKWNSRDEVAQMYCLVKDWPPIKPEQAMELLDCNYPDPMVRGFAVRCLEKYLTDDKLSQYLIQLVQVLKYEQYLDNLLVRFLLKKALTNQRIGHFFFWHLKSEMHNKTVSQRFGLLLESYCRACGMYLKHLNRQVEAMEKLINLTDILKQEKKDETQKVQMKFLVEQMRRPDFMDALQGFLSPLNPAHQLGNLRLEECRIMSSAKRPLWLNWENPDIMSELLFQNNEIIFKNGDDLRQDMLTLQIIRIMENIWQNQGLDLRMLPYGCLSIGDCVGLIEVVRNSHTIMQIQCKGGLKGALQFNSHTLHQWLKDKNKGEIYDAAIDLFTRSCAGYCVATFILGIGDRHNSNIMVKDDGQLFHIDFGHFLDHKKKKFGYKRERVPFVLTQDFLIVISKGAQECTKTREFERFQEMCYKAYLAIRQHANLFINLFSMMLGSGMPELQSFDDIAYIRKTLALDKTEQEALEYFMKQMNDAHHGGWTTKMDWIFHTIKQHALN

SEQ ID NO: 14665 - protein, 1102 aa, Homo Sapiens
MELENYKQPVVLREDNCRRRRRMKPRSAAASLSSMELIPIEFVLPTSQRKCKSPETALLHVAGHGNVEQMKAQVWLRALETSVAADFYHRLGPHHFLLLYQKKGQWYEIYDKYQVVQTLDCLRYWKATHRSPGQIHLVQRHPPSEESQAFQRQLTALIGYDVTDVSNVHDDELEFTRRGLVTPRMAEVASRDPKLYAMHPWVTSKPLPEYLWKKIANNCIFIVIHRSTTSQTIKVSPDDTPGAILQSFFTKMAKKKSLMDIPESQSEQDFVLRVCGRDEYLVGETPIKNFQWVRHCLKNGEEIHVVLDTPPDPALDEVRKEEWPLVDDCTGVTGYHEQLTIHGKDHESVFTVSLWDCDRKFRVKIRGIDIPVLPRNTDLTVFVEANIQHGQQVLCQRRTSPKPFTEEVLWNVWLEFSIKIKDLPKGALLNLQIYCGKAPALSSKASAESPSSESKGKVQLLYYVNLLLIDHRFLLRRGEYVLHMWQISGKGEDQGSFNADKLTSATNPDKENSMSISILLDNYCHPIALPKHQPTPDPEGDRVRAEMPNQLRKQLEAIIATDPLNPLTAEDKELLWHFRYESLKHPKAYPKLFSSVKWGQQEIVAKTYQLLARREVWDQSALDVGLTMQLLDCNFSDENVRAIAVQKLESLEDDDVLHYLLQLVQAVKFEPYHDSALARFLLKRGLRNKRIGHFLFWFLRSEIAQSRHYQQRFAVILEAYLRGCGTAMLHDFTQQVQVIEMLQKVTLDIKSLSAEKYDVSSQVISQLKQKLENLQNSQLPESFRVPYDPGLKAGALAIEKCKVMASKKKPLWLEFKCADPTALSNETIGIIFKHGDDLRQDMLILQILRIMESIWETESLDLCLLPYGCISTGDKIGMIEIVKDATTIAKIQQSTVGNTGAFKDEVLNHWLKEKSPTEEKFQAAVERFVYSCAGYCVATFVLGIGDRHNDNIMITETGNLFHIDFGHILGNYKSFLGINKERVPFVLTPDFLFVMGTSGKKTSPHFQKFQDICVKAYLALRHHTNLLIILFSMMLMTGMPQLTSKEDIEYIRDALTVGKNEEDAKKYFLDQIEVCRDKGWTVQFNWFLHLVLGIKQGEKHSA

SEQ ID NO: 14666 - protein, 597 aa, Homo Sapiens
MTSRRWFHPNITGVEAENLLLTRGVDGSFLARPSKSNPGDFTLSVRRNGAVTHIKIQNTGDYYDLYGGEKFATLAELVQYYMEHHGQLKEKNGDVIELKYPLNCADPTSERWFHGHLSGKEAEKLLTEKGKHGSFLVRESQSHPGDFVLSVRTGDDKGESNDGKSKVTHVMIRCQELKYDVGGGERFDSLTDLVEHYKKNPMVETLGTVLQLKQPLNTTRINAAEIESRVRELSKLAETTDKVKQGFWEEFETLQQQECKLLYSRKEGQRQENKNKNRYKNILPFDHTRVVLHDGDPNEPVSDYINANIIMPEFETKCNNSKPKKSYIATQGCLQNTVNDFWRMVFQENSRVIVMTTKEVERGKSKCVKYWPDEYALKEYGVMRVRNVKESAAHDYTLRELKLSKVGQALLQGNTERTVWQYHFRTWPDHGVPSDPGGVLDFLEEVHHKQESIMDAGPVVVHCSAGIGRTGTFIVIDILIDIIREKGVDCDIDVPKTIQMVRSQRSGMVQTEAQYRFIYMAVQHYIETLQRRIEEEQKSKRKGHEYTNIKYSLADQTSGDQSPLPPCTPTPPCAEMREDSARVYENVGLMQQQKSFR

SEQ ID NO: 14667 - protein, 524 aa, Homo Sapiens
MLTCNKAGSRMVVDAANSNGPFQPVVLLHIRDVPPADQEKLFIQKLRQCCVLFDFVSDPLSDLKWKEVKRAALSEMVEYITHNRNVITEPIYPEVVHMFAVNMFRTLPPSSNPTGAEFDPEEDEPTLEAAWPHLQLVYEFFLRFLESPDFQPNIAKKYIDQKFVLQLLELFDSEDPRERDFLKTTLHRIYGKFLGLRAYIRKQINNIFYRFIYETEHHNGIAELLEILGSIINGFALPLKEEHKIFLLKVLLPLHKVKSLSVYHPQLAYCVVQFLEKDSTLTEPVVMALLKYWPKTHSPKEVMFLNELEEILDVIEPSEFVKIMEPLFRQLAKCVSSPHFQVAERALYYWNNEYIMSLISDNAAKILPIMFPSLYRNSKTHWNKTIHGLIYNALKLFMEMNQKLFDDCTQQFKAEKLKEKLKMKEREEAWVKIENLAKANPQYTVYSQASTMSIPVAMETDGPLFEDVQMLRKTVKDEAHQAQKDPKKDRPLARRKSELPQDPHTKKALEAHCRADELASQDGR

SEQ ID NO: 14668 - protein, 497 aa, Homo Sapiens
METKLPPASTPTSPSSPGLSPVPPPDKVDGFSRRSLRRARPRRSHSSSQFRYQSNQQELTPLPLLKDVPASELHELLSRKLAQCGVMFDFLDCVADLKGKEVKRAALNELVECVGSTRGVLIEPVYPDIIRMISVNIFRTLPPSENPEFDPEEDEPNLEPSWPHLQLVYEFFLRFLESPDFQPSVAKRYVDQKFVLMLLELFDSEDPREREYLKTILHRVYGKFLGLRAYIRKQCNHIFLRFIYEFEHFNGVAELLEILGSIINGFALPLKTEHKQFLVRVLIPLHSVKSLSVFHAQLAYCVVQFLEKDATLTEHVIRGLLKYWPKTCTQKEVMFLGEMEEILDVIEPSQFVKIQEPLFKQVARCVSSPHFQVAERALYFWNNEYILSLIEDNCHTVLPAVFGTLYQVSKEHWNQTIVSLIYNVLKTFMEMNGKLFDELTASYKLEKQQEQQKAQERQELWQGLEELRLRRLQGTQGAKEAPLQRLTPQVAASGGQS

SEQ ID NO: 14669 - protein, 602 aa, Homo Sapiens
MPYKLKKEKEPPKVAKCTAKPSSSGKDGGGENTEEAQPQPQPQPQPQAQSQPPSSNKRPSNSTPPPTQLSKIKYSGGPQIVKKERRQSSSRFNLSKNRELQKLPALKDSPTQEREELFIQKLRQCCVLFDFVSDPLSDLKFKEVKRAGLNEMVEYITHSRDVVTEAIYPEAVTMFSVNLFRTLPPSSNPTGAEFDPEEDEPTLEAAWPHLQLVYEFFLRFLESPDFQPNIAKKYIDQKFVLALLDLFDSEDPRERDFLKTILHRIYGKFLGLRAYIRRQINHIFYRFIYETEHHNGIAELLEILGSIINGFALPLKEEHKMFLIRVLLPLHKVKSLSVYHPQLAYCVVQFLEKESSLTEPVIVGLLKFWPKTHSPKEVMFLNELEEILDVIEPSEFSKVMEPLFRQLAKCVSSPHFQVAERALYYWNNEYIMSLISDNAARVLPIMFPALYRNSKSHWNKTIHGLIYNALKLFMEMNQKLFDDCTQQYKAEKQKGRFRMKEREEMWQKIEELARLNPQYPMFRAPPPLPPVYSMETETPTAEDIQLLKRTVETEAVQMLKDIKKEKVLLRRKSELPQDVYTIKALEAHKRAEEFLTASQEAL

SEQ ID NO: 14670 - protein, 467 aa, Homo Sapiens
MSSAPTTPPSVDKVDGFSRKSVRKARQKRSQSSSQFRSQGKPIELTPLPLLKDVPSSEQPELFLKKLQQCCVIFDFMDTLSDLKMKEYKRSTLNELVDYITISRGCLTEQTYPEVVRMVSCNIFRTLPPSDSNEFDPEEDEPTLEASWPHLQLVYEFFIRFLESQEFQPSIAKKYIDQKFVLQLLELFDSEDPRERDYLKTVLHRIYGKFLGLRAFIRKQINNIFLRFVYETEHFNGVAELLEILGSIINGFALPLKAEHKQFLVKVLIPLHTVRSLSLFHAQLAYCIVQFLEKDPSLTEPVIRGLMKFWPKTCSQKEVMFLGELEEILDVIEPSQFVKIQEPLFKQIAKCVSSPHFQVAERALYYWNNEYIMSLIEENSNVILPIMFSSLYRISKEHWNPAIVALVYNVLKAFMEMNSTMFDELTATYKSDRQREKKKEKEREELWKKLEDLELKRGLRRDGIIPT

SEQ ID NO: 14671 - protein, 486 aa, Homo Sapiens
MSSSSPPAGAASAAISASEKVDGFTRKSVRKAQRQKRSQGSSQFRSQGSQAELHPLPQLKDATSNEQQELFCQKLQQCCILFDFMDSVSDLKSKEIKRATLNELVEYVSTNRGVIVESAYSDIVKMISANIFRTLPPSDNPDFDPEEDEPTLEASWPHIQLVYEFFLRFLESPDFQPSIAKRYIDQKFVQQLLELFDSEDPRERDFLKTVLHRIYGKFLGLRAFIRKQINNIFLRFIYETEHFNGVAELLEILGSIINGFALPLKAEHKQFLMKVLIPMHTAKGLALFHAQLAYCVVQFLEKDTTLTEPVIRGLLKFWPKTCSQKEVMFLGEIEEILDVIEPTQFKKIEEPLFKQISKCVSSSHFQVAERALYFWNNEYILSLIEENIDKILPIMFASLYKISKEHWNPTIVALVYNVLKTLMEMNGKLFDDLTSSYKAERQREKKKELEREELWKKLEELKLKKALEKQNSAYNMHSILSNTSAE

SEQ ID NO: 14672 - protein, 140 aa, Homo Sapiens
IQNPDPAVYQLRDSKSSDKSVCLFTDFDSQTNVSQSKDSDVYITDKTVLDMRSMDFKSNSAVAWSNKSDFACANAFNNSIIPEDTFFPSPESSCDVKLVEKSFETDTNLNFQNLSVIGFRILLLKVAGFNLLMTLRLWSS

SEQ ID NO: 14673 - protein, 176 aa, Homo Sapiens
DLNKVFPPEVAVFEPSEAEISHTQKATLVCLATGFFPDHVELSWWVNGKEVHSGVSTDPQPLKEQPALNDSRYCLSSRLRVSATFWQNPRNHFRCQVQFYGLSENDEWTQDRAKPVTQIVSAEAWGRADCGFTSVSYQQGVLSATILYEILLGKATLYAVLVSALVLMAMVKRKDF

SEQ ID NO: 14674 - protein, 164 aa, Homo Sapiens
MKWKALFTAAILQAQLPITEAQSFGLLDPKLCYLLDGILFIYGVILTALFLRVKFSRSADAPAYQQGQNQLYNELNLGRREEYDVLDKRRGRDPEMGGKPQRRKNPQEGLYNELQKDKMAEAYSEIGMKGERRRGKGHDGLYQGLSTATKDTYDALHMQALPPR

SEQ ID NO: 14675 - protein, 207 aa, Homo Sapiens
MQSGTHWRVLGLCLLSVGVWGQDGNEEMGGITQTPYKVSISGTTVILTCPQYPGSEILWQHNDKNIGGDEDDKNIGSDEDHLSLKEFSELEQSGYYVCYPRGSKPEDANFYLYLRARVCENCMEMDVMSVATIVIVDICITGGLLLLVYYWSKNRKAKAKPVTRGAGAGGRQRGQNKERPPPVPNPDYEPIRKGQRDLYSGLNQRRI

SEQ ID NO: 14676 - protein, 182 aa, Homo Sapiens
MEQGKGLAVLILAIILLQGTLAQSIKGNHLVKVYDYQEDGSVLLTCDAEAKNITWFKDGKMIGFLTEDKKKWNLGSNAKDPRGMYQCKGSQNKSKPLQVYYRMCQNCIELNAATISGFLFAEIVSIFVLAVGVYFIAGQDGVRQSRASDKQTLLPNDQLYQPLKDREDDQYSHLQGNQLRRN

SEQ ID NO: 14677 - protein, 171 aa, Homo Sapiens; identical to SEQ ID NO: 2330

SEQ ID NO: 14678 - protein, 220 aa, Homo Sapiens
MLRLLLALNLFPSIQVTGNKILVKQSPMLVAYDNAVNLSCKYSYNLFSREFRASLHKGLDSAVEVCVVYGNYSQQLQVYSKTGFNCDGKLGNESVTFYLQNLYVNQTDIYFCKIEVMYPPPYLDNEKSNGTIIHVKGKHLCPSPLFPGPSKPFWVLVVVGGVLACYSLLVTVAFIIFWVRSKRSRLLHSDYMNMTPRRPGPTRKHYQPYAPPRDFAAYRS

SEQ ID NO: 14679 - protein, 355 aa, Homo Sapiens
MAFSGSQAPYLSPAVPFSGTIQGGLQDGLQITVNGTVLSSSGTRFAVNFQTGFSGNDIAFHFNPRFEDGGYVVCNTRQNGSWGPEERKTHMPFQKGMPFDLCFLVQSSDFKVMVNGILFVQYFHRVPFHRVDTISVNGSVQLSYISFQNPRTVPVQPAFSTVPFSQPVCFPPRPRGRRQKPPGVWPANPAPITQTVIHTVQSAPGQMFSTPAIPPMMYPHPAYPMPFITTILGGLYPSKSILLSGTVLPSAQRFHINLCSGNHIAFHLNPRFDENAVVRNTQIDNSWGSEERSLPRKMPFVRGQSFSVWILCEAHCLKVAVDGQHLFEYYHRLRNLPTINRLEVGGDIQLTHVQT

SEQ ID NO: 14680 - protein, 215 aa, Homo Sapiens
MGKGDPKKPRGKMSSYAFFVQTCREEHKKKHPDASVNFSEFSKKCSERWKTMSAKEKGKFEDMAKADKARYEREMKTYIPPKGETKKKFKDPNAPKRPPSAFFLFCSEYRPKIKGEHPGLSIGDVAKKLGEMWNNTAADDKQPYEKKAAKLKEKYEKDIAAYRAKGKPDAAKKGVVKAEKSKKKKEEEEDEEDEEDEEEEEDEEDEDEEEDDDDE

SEQ ID NO: 14681 - protein, 322 aa, Homo Sapiens
MSAKSRTIGIIGAPFSKGQPRGGVEEGPTVLRKAGLLEKLKEQECDVKDYGDLPFADIPNDSPFQIVKNPRSVGKASEQLAGKVAEVKKNGRISLVLGGDHSLAIGSISGHARVHPDLGVIWVDAHTDINTPLTTTSGNLHGQPVSFLLKELKGKIPDVPGFSWVTPCISAKDIVYIGLRDVDPGEHYILKTLGIKYFSMTEVDRLGIGKVMEETLSYLLGRKKRPIHLSFDVDGLDPSFTPATGTPVVGGLTYREGLYITEEIYKTGLLSGLDIMEVNPSLGKTPEEVTRTVNTAVAITLACFGLAREGNHKPIDYLNPPK

SEQ ID NO: 14682 - protein, 599 aa, Homo Sapiens; identical to SEQ ID NO: 11057

SEQ ID NO: 14683 - protein, 604 aa, Homo Sapiens; identical to SEQ ID NO: 11060

SEQ ID NO: 14684 - protein, 1255 aa, Homo Sapiens
MTPGTQSPFFLLLLLTVLTVVTGSGHASSTPGGEKETSATQRSSVPSSTEKNAVSMTSSVLSSHSPGSGSSTTQGQDVTLAPATEPASGSAATWGQDVTSVPVTRPALGSTTPPAHDVTSAPDNKPAPGSTAPPAHGVTSAPDTRPAPGSTAPPAHGVTSAPDTRPAPGSTAPPAHGVTSAPDTRPAPGSTAPPAHGVTSAPDTRPAPGSTAPPAHGVTSAPDTRPAPGSTAPPAHGVTSAPDTRPAPGSTAPPAHGVTSAPDTRPAPGSTAPPAHGVTSAPDTRPAPGSTAPPAHGVTSAPDTRPAPGSTAPPAHGVTSAPDTRPAPGSTAPPAHGVTSAPDTRPAPGSTAPPAHGVTSAPDTRPAPGSTAPPAHGVTSAPDTRPAPGSTAPPAHGVTSAPDTRPAPGSTAPPAHGVTSAPDTRPAPGSTAPPAHGVTSAPDTRPAPGSTAPPAHGVTSAPDTRPAPGSTAPPAHGVTSAPDTRPAPGSTAPPAHGVTSAPDTRPAPGSTAPPAHGVTSAPDTRPAPGSTAPPAHGVTSAPDTRPAPGSTAPPAHGVTSAPDTRPAPGSTAPPAHGVTSAPDTRPAPGSTAPPAHGVTSAPDTRPAPGSTAPPAHGVTSAPDTRPAPGSTAPPAHGVTSAPDTRPAPGSTAPPAHGVTSAPDTRPAPGSTAPPAHGVTSAPDTRPAPGSTAPPAHGVTSAPDTRPAPGSTAPPAHGVTSAPDTRPAPGSTAPPAHGVTSAPDTRPAPGSTAPPAHGVTSAPDTRPAPGSTAPPAHGVTSAPDTRPAPGSTAPPAHGVTSAPDTRPAPGSTAPPAHGVTSAPDTRPAPGSTAPPAHGVTSAPDTRPAPGSTAPPAHGVTSAPDTRPAPGSTAPPAHGVTSAPDTRPAPGSTAPPAHGVTSAPDTRPAPGSTAPPAHGVTSAPDTRPAPGSTAPPAHGVTSAPDNRPALGSTAPPVHNVTSASGSASGSASTLVHNGTSARATTTPASKSTPFSIPSHHSDTPTTLASHSTKTDASSTHHSSVPPLTSSNHSTSPQLSTGVSFFFLSFHISNLQFNSSLEDPSTDYYQELQRDISEMFLQIYKQGGFLGLSNIKFRPGSVVVQLTLAFREGTINVHDVETQFNQYKTEAASRYNLTISDVSVSDVPFPFSAQSGAGVPGWGIALLVLVCVLVALAIVYLIALAVCQCRRKNYGQLDIFPARDTYHPMSEYPTYHTHGRYVPPSSTDRSPYEKVSAGNGGSSLSYTNPAVAATSANL

SEQ ID NO: 14685 - protein, 5179 aa, Homo Sapiens
MGLPLARLAAVCLALSLAGGSELQTEGRTRYHGRNVCSTWGNFHYKTFDGDVFRFPGLCDYNFASDCRGSYKEFAVHLKRGPGQAEAPAGVESILLTIKDDTIYLTRHLAVLNGAVVSTPHYSPGLLIEKSDAYTKVYSRAGLTLMWNREDALMLELDTKFRNHTCGLCGDYNGLQSYSEFLSDGVLFSPLEFGNMQKINQPDVVCEDPEEEVAPASCSEHRAECERLLTAEAFADCQDLVPLEPYLRACQQDRCRCPGGDTCVCSTVAEFSRQCSHAGGRPGNWRTATLCPKTCPGNLVYLESGSPCMDTCSHLEVSSLCEEHRMDGCFCPEGTVYDDIGDSGCVPVSQCHCRLHGHLYTPGQEITNDCEQCVCNAGRWVCKDLPCPGTCALEGGSHITTFDGKTYTFHGDCYYVLAKGDHNDSYALLGELAPCGSTDKQTCLKTVVLLADKKKNAVVFKSDGSVLLNQLQVNLPHVTASFSVFRPSSYHIMVSMAIGVRLQVQLAPVMQLFVTLDQASQGQVQGLCGNFNGLEGDDFKTASGLVEATGAGFANTWKAQSTCHDKLDWLDDPCSLNIESANYAEHWCSLLKKTETPFGRCHSAVDPAEYYKRCKYDTCNCQNNEDCLCAALSSYARACTAKGVMLWGWREHVCNKDVGSCPNSQVFLYNLTTCQQTCRSLSEADSHCLEGFAPVDGCGCPDHTFLDEKGRCVPLAKCSCYHRGLYLEAGDVVVRQEERCVCRDGRLHCRQIRLIGQSCTAPKIHMDCSNLTALATSKPRALSCQTLAAGYYHTECVSGCVCPDGLMDDGRGGCVVEKECPCVHNNDLYSSGAKIKVDCNTCTCKRGRWVCTQAVCHGTCSIYGSGHYITFDGKYYDFDGHCSYVAVQDYCGQNSSLGSFSIITENVPCGTTGVTCSKAIKIFMGRTELKLEDKHRVVIQRDEGHHVAYTTREVGQYLVVESSTGIIVIWDKRTTVFIKLAPSYKGTVCGLCGNFDHRSNNDFTTRDHMVVSSELDFGNSWKEAPTCPDVSTNPEPCSLNPHRRSWAEKQCSILKSSVFSICHSKVDPKPFYEACVHDSCSCDTGGDCECFCSAVASYAQECTKEGACVFWRTPDLCPIFCDYYNPPHECEWHYEPCGNRSFETCRTINGIHSNISVSYLEGCYPRCPKDRPIYEEDLKKCVTADKCGCYVEDTHYPPGASVPTEETCKSCVCTNSSQVVCRPEEGKILNQTQDGAFCYWEICGPNGTVEKHFNICSITTRPSTLTTFTTITLPTTPTSFTTTTTTTTPTSSTVLSTTPKLCCLWSDWINEDHPSSGSDDGDREPFDGVCGAPEDIECRSVKDPHLSLEQHGQKVQCDVSVGFICKNEDQFGNGPFGLCYDYKIRVNCCWPMDKCITTPSPPTTTPSPPPTTTTTLPPTTTPSPPTTTTTTPPPTTTPSPPITTTTTPLPTTTPSPPISTTTTPPPTTTPSPPTTTPSPPTTTPSPPTTTTTTPPPTTTPSPPMTTPITPPASTTTLPPTTTPSPPTTTTTTPPPTTTPSPPTTTPITPPTSTTTLPPTTTPSPPPTTTTTPPPTTTPSPPTTTTPSPPTITTTTPPPTTTPSPPTTTTTTPPPTTTPSPPTTTPITPPTSTTTLPPTTTPSPPPTTTTTPPPTTTPSPPTTTTPSPPITTTTTPPPTTTPSSPITTTPSPPTTTMTTPSPTTTPSSPITTTTTPSSTTTPSPPPTTMTTPSPTTTPSPPTTTMTTLPPTTTSSPLTTTPLPPSITPPTFSPFSTTTPTTPCVPLCNWTGWLDSGKPNFHKPGGDTELIGDVCGPGWAANISCRATMYPDVPIGQLGQTVVCDVSVGLICKNEDQKPGGVIPMAFCLNYEINVQCCECVTQPTTMTTTTTENPTPPTTTPITTTTTVTPTPTPTGTQTPTTTPITTTTTVTPTPTPTGTQTPTTTPITTTTTVTPTPTPTGTQTPTTTPITTTTTVTPTPTPTGTQTPTTTPITTTTTVTPTPTPTGTQTPTTTPITTTTTVTPTPTPTGTQTPTTTPITTTTTVTPTPTPTGTQTPTTTPITTTTTVTPTPTPTGTQTPTTTPITTTTTVTPTPTPTGTQTPTTTPITTTTTVTPTPTPTGTQTPTTTPITTTTTVTPTPTPTGTQTPTTTPITTTTTVTPTPTPTGTQTPTTTPITTTTTVTPTPTPTGTQTPTTTPITTTTTVTPTPTPTGTQTPTTTPITTTTTVTPTPTPTGTQTPTTTPITTTTTVTPTPTPTGTQTPTTTPITTTTTVTPTPTPTGTQTPTTTPITTTTTVTPTPTPTGTQTPTTTPITTTTTVTPTPTPTGTQTPTTTPITTTTTVTPTPTPTGTQTPTTTPITTTTTVTPTPTPTGTQTPTTTPITTTTTVTPTPTPTGTQTPTTTPITTTTTVTPTPTPTGTQTPTTTPITTTTTVTPTPTPTGTQTPTTTPITTTTTVTPTPTPTGTQTPTTTPITTTTTVTPTPTPTGTQTPTTTPITTTTTVTPTPTPTGTQTPTTTPITTTTTVTPTPTPTGTQTPTTTPITTTTTVTPTPTPTGTQTPTTTPITTTTTVTPTPTPTGTQTPTTTPITTTTTVTPTPTPTGTQTPTTTPITTTTTVTPTPTPTGTQTPTTTPITTTTTVTPTPTPTGTQTPTTTPITTTTTVTPTPTPTGTQTPTTTPITTTTTVTPTPTPTGTQTPTTTPITTTTTVTPTPTPTGTQTPTTTPITTTTTVTPTPTPTGTQTPTTTPITTTTTVTPTPTPTGTQTPTTTPITTTTTVTPTPTPTGTQTPTTTPITTTTTVTPTPTPTGTQTPTTTPITTTTTVTPTPTPTGTQTPTTTPITTTTTVTPTPTPTGTQTPTTTPITTTTTVTPTPTPTGTQTPTTTPITTTTTVTPTPTPTGTQTPTTTPITTTTTVTPTPTPTGTQTPTTTPITTTTTVTPTPTPTGTQTPTTTPITTTTTVTPTPTPTGTQTPTTTPITTTTTVTPTPTPTGTQTPTTTPITTTTTVTPTPTPTGTQTPTTTPITTTTTVTPTPTPTGTQTPTTTPITTTTTVTPTPTPTGTQTPTTTPITTTTTVTPTPTPTGTQTPTTTPITTTTTVTPTPTPTGTQTPTTTPITTTTTVTPTPTPTGTQTPTTTPITTTTTVTPTPTPTGTQTPTTTPITTTTTVTPTPTPTGTQTPTTTPITTTTTVTPTPTPTGTQTPTTTPITTTTTVTPTPTPTGTQTPTTTPITTTTTVTPTPTPTGTQTPTTTPITTTTTVTPTPTPTGTQTPTTTPITTTTTVTPTPTPTGTQTPTTTPITTTTTVTPTPTPTGTQTPTTTPITTTTTVTPTPTPTGTQTPTTTPITTTTTVTPTPTPTGTQTPTTTPITTTTTVTPTPTPTGTQTPTTTPITTTTTVTPTPTPTGTQTPTTTPITTTTTVTPTPTPTGTQTPTTTPITTTTTVTPTPTPTGTQTPTTTPITTTTTVTPTPTPTGTQTPTTTPITTTTTVTPTPTPTGTQTPTTTPITTTTTVTPTPTPTGTQTPTTTPITTTTTVTPTPTPTGTQTPTTTPITTTTTVTPTPTPTGTQTPTTTPITTTTTVTPTPTPTGTQTPTTTPITTTTTVTPTPTPTGTQTPTTTPITTTTTVTPTPTPTGTQTPTTTPITTTTTVTPTPTPTGTQTPTTTPITTTTTVTPTPTPTGTQTPTTTPITTTTTVTPTPTPTGTQTPTTTPITTTTTVTPTPTPTGTQTPTTTPITTTTTVTPTPTPTGTQTPTTTPITTTTTVTPTPTPTGTQTPTTTPITTTTTVTPTPTPTGTQTPTTTPITTTTTVTPTPTPTGTQTPTTTPITTTTTVTPTPTPTGTQTPTTTPITTTTTVTPTPTPTGTQTPTTTPITTTTTVTPTPTPTGTQTPTTTPITTTTTVTPTPTPTGTQTPTTTPITTTTTVTPTPTPTGTQTPTTTPITTTTTVTPTPTPTGTQTPTTTPITTTTTVTPTPTPTGTQTPTTTPITTTTTVTPTPTPTGTQTPTTTPITTTTTVTPTPTPTGTQTPTTTPITTTTTVTPTPTPTGTQTPTTTPITTTTTVTPTPTPTGTQTPTTTPITTTTTVTPTPTPTGTQTPTTTPITTTTTVTPTPTPTGTQTPTTTPITTTTTVTPTPTPTGTQTPTTTPITTTTTVTPTPTPTGTQTPTTTPITTTTTVTPTPTPTGTQTGPPTHTSTAPIAELTTSNPPPESSTPQTSRSTSSPLTESTTLLSTLPPAIEMTSTAPPSTPTAPTTTSGGHTLSPPPSTTTSPPGTPTRGTTTGSSSAPTPSTVQTTTTSAWTPTPTPLSTPSIIRTTGLRPYPSSVLICCVLNDTYYAPGEEVYNGTYGDTCYFVNCSLSCTLEFYNWSCPSTPSPTPTPSKSTPTPSKPSSTPSKPTPGTKPPECPDFDPPRQENETWWLCDCFMATCKYNNTVEIVKVECEPPPMPTCSNGLQPVRVEDPDGCCWHWECDCYCTGWGDPHYVTFDGLYYSYQGNCTYVLVEEISPSVDNFGVYIDNYHCDPNDKVSCPRTLIVRHETQEVLIKTVHMMPMQVQVQVNRQAVALPYKKYGLEVYQSGINYVVDIPELGVLVSYNGLSFSVRLPYHRFGNNTKGQCGTCTNTTSDDCILPSGEIVSNCEAAADQWLVNDPSKPHCPHSSSTTKRPAVTVPGGGKTTPHKDCTPSPLCQLIKDSLFAQCHALVPPQHYYDACVFDSCFMPGSSLECASLQAYAALCAQQNICLDWRNHTHGACLVECPSHREYQACGPAEEPTCKSSSSQQNNTVLVEGCFCPEGTMNYAPGFDVCVKTCGCVGPDNVPREFGEHFEFDCKNCVCLEGGSGIICQPKRCSQKPVTHCVEDGTYLATEVNPADTCCNITVCKCNTSLCKEKPSVCPLGFEVKSKMVPGRCCPFYWCESKGVCVHGNAEYQPGSPVYSSKCQDCVCTDKVDNNTLLNVIACTHVPCNTSCSPGFELMEAPGECCKKCEQTHCIIKRPDNQHVILKPGDFKSDPKNNCTFFSCVKIHNQLISSVSNITCPNFDASICIPGSITFMPNGCCKTCTPRNETRVPCSTVPVTTEVSYAGCTKTVLMNHCSGSCGTFVMYSAKAQALDHSCSCCKEEKTSQREVVLSCPNGGSLTHTYTHIESCQCQDTVCGLPTGTSRRARRSPRHLGSG

SEQ ID NO: 14686 - protein, 3323 aa, Homo Sapiens; identical to SEQ ID NO: 9102

SEQ ID NO: 14687 - protein, 1237 aa, Homo Sapiens
MQLLGLLSILWMLKSSPGATGTLSTATSTSHVTFPRAEATRTALSNSPHSRYLAEWPQGVPQLASPAPGHRENAPMTLTTSPHDTLISETLLSSLVSSNTSTTPTSKFAFKVETTPPTVLVYSATTECVYPTSFIITISHSTSICVTTTQVTFTSSYTPTPVTQKPVTTVTRTYPMTTTEKGTSAMISSPSTTTARETPIVTVTPSSSVSATDTTFHTTISSTTRTTERTPLPTGSIHTTMSPTPVFTTLKTAVTSTSPITSTITSTNTVTSMTTTTSRPTATNTLSSLTSSILSSTPAPNTEVITSHTTTTTPPSTLVTTLPTAIARSTPTSETTPSFMSSIITTETTSHSTPSFSSSTIHSTVSSSTTAITSPFTTAETGVTSTPSSPSSLSTDIPTTSLRTLTPLSLSTSTSLTTTTDLPSIPTDISSLPTPIHIISSSPSIQSTETSSLVGTTSPTMSTVRATLRSTENTPISSFSTSIVVTPETPTTQAPPVLMSATGTQTSPVPTTVTFGSMDSSTSTLHTLTPSTALSKIMSTSQFPIPSTHSSTLQTTPSIPSLQTSLTSTSEFTTESFTRGSTSTNAILTSFSTIIWSSTPTIIMSSSPSSASITPVFATTIHSVPSSPYIFSTENVGSASITAFPSLSSSSTTSTSPTSSSLTTALTEITPFSYISLPSTTPCPGTITITIVPASPTDPCVEMDPSTEATSPPTTPLTVFPFTTEMVTCPSSISMQTTLATHMDTSSMTPESESSIIPNASSSTGTGTVPTNTVFTSTRLPTSETWLSNNSVIPTPLPGVSTIPLTMKPSSSLPTILRTSSKSTHPSPPTARTSQTSVATTQTPTTLTTCRTTPITSWMTTQSTLTTTAGTCDNGGTWEQGQCACLPGFSGDRCQLQTRCQNGGQWDGLKCQCPSTFYGSSCEFAVEQVDLDVVETEVGMEVSVDQQFSPDLNDNTSQAYRDFNKTFWNQMQKIFADMQGFTFKGVEILSLRNGSIVVDYLVLLEMPFSPQLESEYEQVKTTLKEGLQNASQDANSCQDSQALCFKPDSIKVNNNSKTELTPEAICRRAAPTGYEEFYFPLVEATRLRCVTKCTSGLDNAIDCHQGQCVLETSGPACRCYSTDTHWFSGPRCEVTVHWRALVGGLTAGAALLVLLLLALGVRAVRSEWWGRQRRGRSWDQDRKWFETWDEEVVGTFSNWGFEDDGTDKDTNFHVALENVDTTMKVHIKRPEMTSSSV

SEQ ID NO: 14688 - protein, 2169 aa, Homo Sapiens
MKGARWRRVPWVSLSCLCLCLLPHVVPGTTEDTLITGSKTAAPVTSTGSTTATLEGQSTAASSRTSNQDISASSQNHQTKSTETTSKAQTDTLTQMMTSTLFSSPSVHNVMETVTQETAPPDEMTTSFPSSVTNTLMMTSKTITMTTSTDSTLGNTEETSTAGTESSTPVTSAVSITAGQEGQSRTTSWRTSIQDTSASSQNHWTRSTQTTRESQTSTLTHRTTSTPSFSPSVHNVTGTVSQKTSPSGETATSSLCSVTNTSMMTSEKITVTTSTGSTLGNPGETSSVPVTGSLMPVTSAALVTVDPEGQSPATFSRTSTQDTTAFSKNHQTQSVETTRVSQINTLNTLTPVTTSTVLSSPSGFNPSGTVSQETFPSGETTISSPSSVSNTFLVTSKVFRMPISRDSTLGNTEETSLSVSGTISAITSKVSTIWWSDTLSTALSPSSLPPKISTAFHTQQSEGAETTGRPHERSSFSPGVSQEIFTLHETTTWPSSFSSKGHTTWSQTELPSTSTGAATRLVTGNPSTRAAGTIPRVPSKVSAIGEPGEPTTYSSHSTTLPKTTGAGAQTQWTQETGTTGEALLSSPSYSVIQMIKTATSPSSSPMLDRHTSQQITTAPSTNHSTIHSTSTSPQESPAVSQRGHTRAPQTTQESQTTRSVSPMTDTKTVTTPGSSFTASGHSPSEIVPQDAPTISAATTFAPAPTGNGHTTQAPTTALQAAPSSHDATLGPSGGTSLSKTGALTLANSVVSTPGGPEGQWTSASASTSPDTAAAMTHTHQAESTEASGQTQTSEPASSGSRTTSAGTATPSSSGASGTTPSGSEGISTSGETTRFSSNPSRDSHTTQSTTELLSASASHGAIPVSTGMASSIVPGTFHPTLSEASTAGRPTGQSSPTSPSASPQETAAISRMAQTQRTGTSRGSDTISLASQATDTFSTVPPTPPSITSSGLTSPQTQTHTLSPSGSGKTFTTALISNATPLPVTSTSSASTGHATPLAVSSATSASTVSSDSPLKMETSGMTTPSLKTDGGRRTATSPPPTTSQTIISTIPSTAMHTRSTAAPIPILPERGVSLFPYGAGAGDLEFVRRTVDFTSPLFKPATGFPLGSSLRDSLYFTDNGQIIFPESDYQIFSYPNPLPTGFTGRDPVALVAPFWDDADFSTGRGTTFYQEYETFYGEHSLLVQQAESWIRKMTNNGGYKARWALKVTWVNAHAYPAQWTLGSNTYQAILSTDGSRSYALFLYQSGGMQWDVAQRSGNPVLMGFSSGDGYFENSPLMSQPVWERYRPDRFLNSNSGLQGLQFYRLHREERPNYRLECLQWLKSQPRWPSWGWNQVSCPCSWQQGRRDLRFQPVSIGRWGLGSRQLCSFTSWRGGVCCSYGPWGEFREGWHVQRPWQLAQELEPQSWCCRWNDKPYLCALYQQRRPHVGCATYRPPQPAWMFGDPHITTLDGVSYTFNGLGDFLLVGAQDGNSSFLLQGRTAQTGSAQATNFIAFAAQYRSSSLGPVTVQWLLEPHDAIRVLLDNQTVTFQPDHEDGGGQETFNATGVLLSRNGSEVSASFDGWATVSVIALSNILHASASLPPEYQNRTEGLLGVWNNNPEDDFRMPNGSTIPPGSPEEMLFHFGMTWQINGTGLLGKRNDQLPSNFTPVFYSQLQKNSSWAEHLISNCDGDSSCIYDTLALRNASIGLHTREVSKNYEQANATLNQYPPSINGGRVIEAYKGQTTLIQYTSNAEDANFTLRDSCTDLELFENGTLLWTPKSLEPFTLEILARSAKIGLASALQPRTVVCHCNAESQCLYNQTSRVGNSSLEVAGCKCDGGTFGRYCEGSEDACEEPCFPSVHCVPGKGCEACPPNLTGDGRHCAALGSSFLCQNQSCPVNYCYNQGHCYISQTLGCQPMCTCPPAFTDSRCFLAGNNFSPTVNLELPLRVIQLLLSEEENASMAEVNASVAYRLGTLDMRAFLRNSQVERIDSAAPASGSPIQHWMVISEFQYRPRGPVIDFLNNQLLAAVVEAFLYHVPRRSEEPRNDVVFQPISGEDVRDVTALNVSTLKAYFRCDGYKGYDLVYSPQSGFTCVSPCSRGYCDHGGQCQHLPSGPRCSCVSFSIYTAWGEHCEHLSMKLDAFFGIFFGALGGLLLLGVGTFVVLRFWGCSGARFSYFLNSAEALP

SEQ ID NO: 14689 - protein, 5654 aa, Homo Sapiens; identical to SEQ ID NO: 9105

SEQ ID NO: 14690 - protein, 5762 aa, Homo Sapiens; identical to SEQ ID NO: 9106

SEQ ID NO: 14691 - protein, 2439 aa, Homo Sapiens; identical to SEQ ID NO: 9109

SEQ ID NO: 14692 - protein, 377 aa, Homo Sapiens; identical to SEQ ID NO: 9113

SEQ ID NO: 14693 - protein, 5478 aa, Homo Sapiens
MLVIWILTLALRLCASVTTVTPEGSAVHKAISQQGTLWTGEVLEKQTVEQGKSTLRRQKNHFHRSAGELRCRNALKDEGASAGWSVMFAGESVVVLVHLWMTGARVKNLGLVEFASPGDDGDGRAEGFSLGLPLSEQARAAGAREKERQETVINHSTFSGFSQITGSTVNTSIGGNTTSASTPSSSDPFTTFSDYGVSVTFITGSTATKHFLDSSTNSGHSEESTVSHSGPGATGTTLFPSHSATSVFVGEPKTSPITSASMETTALPGSTTTAGLSEKSTTFYSSPRSPDRTLSPARTTSSGVSEKSTTSHSRPGPTHTIAFPDSTTMPGVSQESTASHSIPGSTDTTLSPGTTTPSSLGPESTTFHSSPGYTKTTRLPDNTTTSGLLEASTPVHSSTGSPHTTLSPSSSTTHEGEPTTFQSWPSSKDTSPAPSGTTSAFVKLSTTYHSSPSSTPTTHFSASSTTLGHSEESTPVHSSPVATATTPPPARSATSGHVEESTAYHRSPGSTQTMHFPESSTTSGHSEESATFHGSTTHTKSSTPSTTAALAHTSYHSSLGSTETTHFRDSSTISGRSEESKASHSSPDAMATTVLPAGSTPSVLVGDSTPSPISSGSMETTALPGSTTKPGLSEKSTTFYSSPRSPDTTHLPASMTSSGVSEESTTSHSRPGSTHTTAFPGSTTMPGLSQESTASHSSPGPTDTTLSPGSTTASSLGPEYTTFHSRPGSTETTLLPDNTTASGLLEASMPVHSSTRSPHTTLSPAGSTTRQGESTTFHSWPSSKDTRPAPPTTTSAFVEPSTTSHGSPSSIPTTHISARSTTSGLVEESTTYHSSPGSTQTMHFPESDTTSGRGEESTTSHSSTTHTISSAPSTTSALVEEPTSYHSSPGSTATTHFPDSSTTSGRSEESTASHSSQDATGTIVLPARSTTSVLLGESTTSPISSGSMETTALPGSTTTPGLSERSTTFHSSPRSPATTLSPASTTSSGVSEESTTSRSRPGSTHTTAFPDSTTTPGLSRHSTTSHSSPGSTDTTLLPASTTTSGPSQESTTSHSSSGSTDTALSPGSTTALSFGQESTTFHSNPGSTHTTLFPDSTTSSGIVEASTRVHSSTGSPRTTLSPASSTSPGLQGESTAFQTHPASTHTTPSPPSTATAPVEESTTYHRSPGSTPTTHFPASSTTSGHSEKSTIFHSSPDASGTTPSSAHSTTSGRGESTTSRISPGSTEITTLPGSTTTPGLSEASTTFYSSPRSPTTTLSPASMTSLGVGEESTTSRSQPGSTHSTVSPASTTTPGLSEESTTVYSSSRGSTETTVFPHSTTTSVHGEEPTTFHSRPASTHTTLFTEDSTTSGLTEESTAFPGSPASTQTGLPATLTTADLGEESTTFPSSSGSTGTKLSPARSTTSGLVGESTPSRLSPSSTETTTLPGSPTTPSLSEKSTTFYTSPRSPDATLSPATTTSSGVSEESSTSHSQPGSTHTTAFPDSTTTSDLSQEPTTSHSSQGSTEATLSPGSTTASSLGQQSTTFHSSPGDTETTLLPDDTITSGLVEASTPTHSSTGSLHTTLTPASSTSAGLQEESTTFQSWPSSSDTTPSPPGTTAAPVEVSTTYHSRPSSTPTTHFSASSTTLGRSEESTTVHSSPGATGTALFPTRSATSVLVGEPTTSPISSGSTETTALPGSTTTAGLSEKSTTFYSSPRSPDTTLSPASTTSSGVSEESTTSHSRPGSTHTTAFPGSTTMPGVSQESTASHSSPGSTDTTLSPGSTTASSLGPESTTFHSSPGSTETTLLPDNTTASGLLEASTPVHSSTGSPHTTLSPAGSTTRQGESTTFQSWPSSKDTMPAPPTTTSAFVELSTTSHGSPSSTPTTHFSASSTTLGRSEESTTVHSSPVATATTPSPARSTTSGLVEESTAYHSSPGSTQTMHFPESSTASGRSEESRTSHSSTTHTISSPPSTTSALVEEPTSYHSSPGSTATTHFPDSSTTSGRSEESTASHSSQDATGTIVLPARSTTSVLLGESTTSPISSGSMETTALPGSTTTPGLSEKSTTFHSSPRSPATTLSPASTTSSGVSEESTTSHSRPGSTHTTAFPDSTTTPGLSRHSTTSHSSPGSTDTTLLPASTTTSGPSQESTTSHSSPGSTDTALSPGSTTALSFGQESTTFHSSPGSTHTTLFPDSTTSSGIVEASTRVHSSTGSPRTTLSPASSTSPGLQGESTAFQTHPASTHTTPSPPSTATAPVEESTTYHRSPGSTPTTHFPASSTTSGHSEKSTIFHSSPDASGTTPSSAHSTTSGRGESTTSRISPGSTEITTLPGSTTTPGLSEASTTFYSSPRSPTTTLSPASMTSLGVGEESTTSRSQPGSTHSTVSPASTTTPGLSEESTTVYSSSPGSTETTVFPRTPTTSVRGEEPTTFHSRPASTHTTLFTEDSTTSGLTEESTAFPGSPASTQTGLPATLTTADLGEESTTFPSSSGSTGTTLSPARSTTSGLVGESTPSRLSPSSTETTTLPGSPTTPSLSEKSTTFYTSPRSPDATLSPATTTSSGVSEESSTSHSQPGSTHTTAFPDSTTTPGLSRHSTTSHSSPGSTDTTLLPASTTTSGPSQESTTSHSSPGSTDTALSPGSTTALSFGQESTTFHSSPGSTHTTLFPDSTTSSGIVEASTRVHSSTGSPRTTLSPASSTSPGLQGESTTFQTHPASTHTTPSPPSTATAPVEESTTYHRSPGSTPTTHFPASSTTSGHSEKSTIFHSSPDASGTTPSSAHSTTSGRGESTTSRISPGSTEITTLPGSTTTPGLSEASTTFYSSPRSPTTTLSPASMTSLGVGEESTTSRSQPGSTHSTVSPASTTTPGLSEESTTVYSSSPGSTETTVFPRSTTTSVRGEEPTTFHSRPASTHTTLFTEDSTTSGLTEESTAFPGSPASTQTGLPATLTTADLGEESTTFPSSSGSTGTTLSPARSTTSGLVGESTPSRLSPSSTETTTLPGSPTTPSLSEKSTTFYTSPRSPDATLSPATTTSSGVSEESSTSHSQPGSTHTTAFPDSTTTSGLSQEPTASHSSQGSTEATLSPGSTTASSLGQQSTTFHSSPGDTETTLLPDDTITSGLVEASTPTHSSTGSLHTTLTPASSTSAGLQEESTTFQSWPSSSDTTPSPPGTTAAPVEVSTTYHSRPSSTPTTHFSASSTTLGRSEESTTVHSSPGATGTALFPTRSATSVLVGEPTTSPISSGSTETTALPGSTTTAGLSEKSTTFYSSPRSPDTTLSPASTTSSGVSEESTTSHSRPGSTHTTAFPGSTTMPGVSQESTASHSSPGSTDTTLSPGSTTASSLGPESTTFHSGPGSTETTLLPDNTTASGLLEASTPVHSSTGSPHTTLSPAGSTTRQGESTTFQSWPNSKDTTPAPPTTTSAFVELSTTSHGSPSSTPTTHFSASSTTLGRSEESTTVHSSPVATATTPSPARSTTSGLVEESTTYHSSPGSTQTMHFPESDTTSGRGEESTTSHSSTTHTISSAPSTTSALVEEPTSYHSSPGSTATTHFPDSSTTSGRSEESTASHSSQDATGTIVLPARSTTSVLLGESTTSPISSGSMETTALPGSTTTPGLSEKSTTFHSSPRSPATTLSPASTTSSGVSEESTTSHSRPGSTHTTAFPDSTTTPGLSRHSTTSHSSPGSTDTTLLPASTTTSGSSQESTTSHSSSGSTDTALSPGSTTALSFGQESTTFHSSPGSTHTTLFPDSTTSSGIVEASTRVHSSTGSPRTTLSPASSTSPGLQGESTAFQTHPASTHTTPSPPSTATAPVEESTTYHRSPGSTPTTHFPASSTTSGHSEKSTIFHSSPDASGTTPSSAHSTTSGRGESTTSRISPGSTEITTLPGSTTTPGLSEASTTFYSSPRSPTTTLSPASMTSLGVGEESTTSRSQPGSTHSTVSPASTTTPGLSEESTTVYSSSPGSTETTVFPRSTTTSVRREEPTTFHSRPASTHTTLFTEDSTTSGLTEESTAFPGSPASTQTGLPATLTTADLGEESTTFPSSSGSTGTKLSPARSTTSGLVGESTPSRLSPSSTETTTLPGSPTTPSLSEKSTTFYTSPRSPDATLSPATTTSSGVSEESSTSHSQPGSTHTTAFPDSTTTSGLSQEPTTSHSSQGSTEATLSPGSTTASSLGQQSTTFHSSPGDTETTLLPDDTITSGLVEASTPTHSSTGSLHTTLTPASSTSTGLQEESTTFQSWPSSSDTTPSPPSTTAVPVEVSTTYHSRPSSTPTTHFSASSTTLGRSEESTTVHSSPGATGTALFPTRSATSVLVGEPTTSPISSGSTETTALPGSTTTAGLSEKSTTFYSSPRSPDTTLSPASTTSSGVSEESTTSHSRPGSMHTTAFPSSTTMPGVSQESTASHSSPGSTDTTLSPGSTTASSLGPESTTFHSSPGSTETTLLPDNTTASGLLEASTPVHSSTGSPHTTLSPAGSTTRQGESTTFQSWPNSKDTTPAPPTTTSAFVELSTTSHGSPSSTPTTHFSASSTTLGRSEESTTVHSSPVATATTPSPARSTTSGLVEESTTYHSSPGSTQTMHFPESNTTSGRGEESTTSHSSTTHTISSAPSTTSALVEEPTSYHSSPGSTATTHFPDSSTTSGRSEESTASHSSQDATGTIVLPARSTTSVLLGESTTSPISSGSMETTALPGSTTTPGLSEKSTTFHSSPSSTPTTHFSASSTTLGRSEESTTVHSSPVATATTPSPARSTTSGLVEESTAYHSSPGSTQTMHFPESSTASGRSEESRTSHSSTTHTISSPPSTTSALVEEPTSYHSSPGSIATTHFPESSTTSGRSEESTASHSSPDTNGITPLPAHFTTSGRIAESTTFYISPGSMETTLASTATTPGLSAKSTILYSSSRSPDQTLSPASMTSSSISGEPTSLYSQAESTHTTAFPASTTTSGLSQESTTFHSKPGSTETTLSPGSITTSSFAQEFTTPHSQPGSALSTVSPASTTVPGLSEESTTFYSSPGSTETTAFSHSNTMSIHSQQSTPFPDSPGFTHTVLPATLTTTDIGQESTAFHSSSDATGTTPLPARSTASDLVGEPTTFYISPSPTYTTLFPASSSTSGLTEESTTFHTSPSFTSTIVSTESLETLAPGLCQEGQIWNGKQCVCPQGYVGYQCLSPLESFPVETPEKLNATLGMTVKVTYRNFTEKMNDASSQEYQNFSTLFKNRMDVVLKGDNLPQYRGVNIRRLLNGSIVVKNDVILEADYTLEYEELFENLAEIVKAKIMNETRTTLLDPDSCRKAILCYSEEDTFVDSSVTPGFDFQEQCTQKAAEGYTQFYYVDVLDGKLACVNKCTKGTKSQMNCNLGTCQLQRSGPRCLCPNTNTHWYWGETCEFNIAKSLVYGIVGAVMAVLLLALIILIILFSLSQRKRHREQYDVPQEWRKEGTPGIFQKTAIWEDQNLRESRFGLENAYNNFRPTLETVDSGTELHIQRPEMVASTV

SEQ ID NO: 14694 - protein, 512 aa, Homo Sapiens; identical to SEQ ID NO: 9095

SEQ ID NO: 14695 - protein, 334 aa, Homo Sapiens
MLALAKILLISTLFYSLLSGSHGKENQDINTTQNIAEVFKTMENKPISLESEANLNSDKENITTSNLKASHSPPLNLPNNSHGITDFSSNSSAEHSLGSLKPTSTISTSPPLIHSFVSKVPWNAPIADEDLLPISAHPNATPALSSENFTWSLVNDTVKTPDNSSITVSILSSEPTSPSVTPLIVEPSGWLTTNSDSFTGFTPYQEKTTLQPTLKFTNNSKLFPNTSDPQKENRNTGIVFGAILGAILGVSLLTLVGYLLCGKRKTDSFSHRRLYDDRNEPVLRLDNAPEPYDVSFGNSSYYNPTLNDSAMPESEENARDGIPMDDIPPLRTSV

SEQ ID NO: 14696 - protein, 14507 aa, Homo Sapiens
MLKPSGLPGSSSPTRSLMTGSRSTKATPEMDSGLTGATLSPKTSTGAIVVTEHTLPFTSPDKTLASPTSSVVGRTTQSLGVMSSALPESTSRGMTHSEQRTSPSLSPQVNGTPSRNYPATSMVSGLSSPRTRTSSTEGNFTKEASTYTLTVETTSGPVTEKYTVPTETSTTEGDSTETPWDTRYIPVKITSPMKTFADSTASKENAPVSMTPAETTVTDSHTPGRTNPSFGTLYSSFLDLSPKGTPNSRGETSLELILSTTGYPFSSPEPGSAGHSRISTSAPLSSSASVLDNKISETSIFSGQSLTSPLSPGVPEARASTMPNSAIPFSMTLSNAETSAERVRSTISSLGTPSISTKQTAETILTFHAFAETMDIPSTHIAKTLASEWLGSPGTLGGTSTSALTTTSPSTTLVSEETNTHHSTSGKETEGTLNTSMTPLETSAPGEESEMTATLVPTLGFTTLDSKIRSPSQVSSSHPTRELRTTGSTSGRQSSSTAAHGSSDILRATTSSTSKASSWTSESTAQQFSEPQHTQWVETSPSMKTERPPASTSVAAPITTSVPSVVSGFTTLKTSSTKGIWLEETSADTLIGESTAGPTTHQFAVPTGISMTGGSSTRGSQGTTHLLTRATASSETSADLTLATNGVPVSVSPAVSKTAAGSSPPGGTKPSYTMVSSVIPETSSLQSSAFREGTSLGLTPLNTRHPFSSPEPDSAGHTKISTSIPLLSSASVLEDKVSATSTFSHHKATSSITTGTPEISTKTKPSSAVLSSMTLSNAATSPERVRNATSPLTHPSPSGEETAGSVLTLSTSAETTDSPNIHPTGTLTSESSESPSTLSLPSVSGVKTTFSSSTPSTHLFTSGEETEETSNPSVSQPETSVSRVRTTLASTSVPTPVFPTMDTWPTRSAQFSSSHLVSELRATSSTSVTNSTGSALPKISHLTGTATMSQTNRDTFNDSAAPQSTTWPETSPRFKTGLPSATTTVSTSATSLSATVMVSKFTSPATSSMEATSIREPSTTILTTETTNGPGSMAVASTNIPIGKGYITEGRLDTSHLPIGTTASSETSMDFTMAKESVSMSVSPSQSMDAAGSSTPGRTSQFVDTFSDDVYHLTSREITIPRDGTSSALTPQMTATHPPSPDPGSARSTWLGILSSSPSSPTPKVTMSSTFSTQRVTTSMIMDTVETSRWNMPNLPSTTSLTPSNIPTSGAIGKSTLVPLDTPSPATSLEASEGGLPTLSTYPESTNTPSIHLGAHASSESPSTIKLTMASVVKPGSYTPLTFPSIETHIHVSTARMAYSSGSSPEMTAPGETNTGSTWDPTTYITTTDPKDTSSAQVSTPHSVRTLRTTENHPKTESATPAAYSGSPKISSSPNLTSPATKAWTITDTTEHSTQLHYTKLAEKSSGFETQSAPGPVSVVIPTSPTIGSSTLELTSDVPGEPLVLAPSEQTTITLPMATWLSTSLTEEMASTDLDISSPSSPMSTFAIFPPMSTPSHELSKSEADTSAIRNTDSTTLDQHLGIRSLGRTGDLTTVPITPLTTTWTSVIEHSTQAQDTLSATMSPTHVTQSLKDQTSIPASASPSHLTEVYPELGTQGRSSSEATTFWKPSTDTLSREIETGPTNIQSTPPMDNTTTGSSSSGVTLGIAHLPIGTSSPAETSTNMALERRSSTATVSMAGTMGLLVTSAPGRSISQSLGRVSSVLSESTTEGVTDSSKGSSPRLNTQGNTALSSSLEPSYAEGSQMSTSIPLTSSPTTPDVEFIGGSTFWTKEVTTVMTSDISKSSARTESSSATLMSTALGSTENTGKEKLRTASMDLPSPTPSMEVTPWISLTLSNAPNTTDSLDLSHGVHTSSAGTLATDRSLNTGVTRASRLENGSDTSSKSLSMGNSTHTSMTYTEKSEVSSSIHPRPETSAPGAETTLTSTPGNRAISLTLPFSSIPVEEVISTGITSGPDINSAPMTHSPITPPTIVWTSTGTIEQSTQPLHAVSSEKVSVQTQSTPYVNSVAVSASPTHENSVSSGSSTSSPYSSASLESLDSTISRRNAITSWLWDLTTSLPTTTWPSTSLSEALSSGHSGVSNPSSTTTEFPLFSAASTSAAKQRNPETETHGPQNTAASTLNTDASSVTGLSETPVGASISSEVPLPMAITSRSDVSGLTSESTANPSLGTASSAGTKLTRTISLPTSESLVSFRMNKDPWTVSIPLGSHPTTNTETSIPVNSAGPPGLSTVASDVIDTPSDGAESIPTVSFSPSPDTEVTTISHFPEKTTHSFRTISSLTHELTSRVTPIPGDWMSSAMSTKPTGASPSITLGERRTITSAAPTTSPIVLTASFTETSTVSLDNETTVKTSDILDARKTNELPSDSSSSSDLINTSIASSTMDVTKTASISPTSISGMTASSSPSLFSSDRPQVPTSTTETNTATSPSVSSNTYSLDGGSNVGGTPSTLPPFTITHPVETSSALLAWSRPVRTFSTMVSTDTASGENPTSSNSVVTSVPAPGTWTSVGSTTDLPAMGFLKTSPAGEAHSLLASTIEPATAFTPHLSAAVVTGSSATSEASLLTTSESKAIHSSPQTPTTPTSGANWETSATPESLLVVTETSDTTLTSKILVTDTILFSTVSTPPSKFPSTGTLSGASFPTLLPDTPAIPLTATEPTSSLATSFDSTPLVTIASDSLGTVPETTLTMSETSNGDALVLKTVSNPDRSIPGITIQGVTESPLHPSSTSPSKIVAPRNTTYEGSITVALSTLPAGTTGSLVFSQSSENSETTALVDSSAGLERASVMPLTTGSQGMASSGGIRSGSTHSTGTKTFSSLPLTMNPGEVTAMSEITTNRLTATQSTAPKGIPVKPTSAESGLLTPVSASSSPSKAFASLTTAPPTWGIPQSTLTFEFSEVPSLDTKSASLPTPGQSLNTIPDSDASTASSSLSKSPEKNPRARMMTSTKAISASSFQSTGFTETPEGSASPSMAGHEPRVPTSGTGDPRYASESMSYPDPSKASSAMTSTSLASKLTTLFSTGQAARSGSSSSPISLSTEKETSFLSPTASTSRKTSLFLGPSMARQPNILVHLQTSALTLSPTSTLNMSQEEPPELTSSQTIAEEEGTTAETQTLTFTPSETPTSLLPVSSPTEPTARRKSSPETWASSISVPAKTSLVETTDGTLVTTIKMSSQAAQGNSTWPAPAEETGSSPAGTSPGSPEMSTTLKIMSSKEPSISPEIRSTVRNSPWKTPETTVPMETTVEPVTLQSTALGSGSTSISHLPTGTTSPTKSPTENMLATERVSLSPSPPEAWTNLYSGTPGGTRQSLATMSSVSLESPTARSITGTGQQSSPELVSKTTGMEFSMWHGSTGGTTGDTHVSLSTSSNILEDPVTSPNSVSSLTDKSKHKTETWVSTTAIPSTVLNNKIMAAEQQTSRSVDEAYSSTSSWSDQTSGSDITLGASPDVTNTLYITSTAQTTSLVSLPSGDQGITSLTNPSGGKTSSASSVTSPSIGLETLRANVSAVKSDIAPTAGHLSQTSSPAEVSILDVTTAPTPGISTTITTMGTNSISTTTPNPEVGMSTMDSTPATERRTTSTEHPSTWSSTAASDSWTVTDMTSNLKVARSPGTISTMHTTSFLASSTELDSMSTPHGRITVIGTSLVTPSSDASAVKTETSTSERTLSPSDTTASTPISTFSRVQRMSISVPDILSTSWTPSSTEAEDVPVSMVSTDHASTKTDPNTPLSTFLFDSLSTLDWDTGRSLSSATATTSAPQGATTPQELTLETMISPATSQLPFSIGHITSAVTPAAMARSSGVTFSRPDPTSKKAEQTSTQLPTTTSAHPGQVPRSAATTLDVIPHTAKTPDATFQRQGQTALTTEARATSDSWNEKEKSTPSAPWITEMMNSVSEDTIKEVTSSSSVLRTLNTLDINLESGTTSSPSWKSSPYERIAPSESTTDKEAIHPSTNTVETTGWVTSSEHASHSTIPAHSASSKLTSPVVTTSTREQAIVSMSTTTWPESTRARTEPNSFLTIELRDVSPYMDTSSTTQTSIISSPGSTAITKGPRTEITSSKRISSSFLAQSMRSSDSPSEAITRLSNFPAMTESGGMILAMQTSPPGATSLSAPTLDTSATASWTGTPLATTQRFTYSEKTTLFSKGPEDTSQPSPPSVEETSSSSSLVPIHATTSPSNILLTSQGHSPSSTPPVTSVFLSETSGLGKTTDMSRISLEPGTSLPPNLSSTAGEALSTYEASRDTKAIHHSADTAVTNMEATSSEYSPIPGHTKPSKATSPLVTSHIMGDITSSTSVFGSSETTEIETVSSVNQGLQERSTSQVASSATETSTVITHVSSGDATTHVTKTQATFSSGTSISSPHQFITSTNTFTDVSTNPSTSLIMTESSGVTITTQTGPTGAATQGPYLLDTSTMPYLTETPLAVTPDFMQSEKTTLISKGPKDVSWTSPPSVAETSYPSSLTPFLVTTIPPATSTLQGQHTSSPVSATSVLTSGLVKTTDMLNTSMEPVTNSPQNLNNPSNEILATLAATTDIETIHPSINKAVTNMGTASSAHVLHSTLPVSSEPSTATSPMVPASSMGDALASISIPGSETTDIEGEPTSSLTAGRKENSTLQEMNSTTESNIILSNVSVGAITEATKMEVPSFDATFIPTPAQSTKFPDIFSVASSRLSNSPPMTISTHMTTTQTGSSGATSKIPLALDTSTLETSAGTPSVVTEGFAHSKITTAMNNDVKDVSQTNPPFQDEASSPSSQAPVLVTTLPSSVAFTPQWHSTSSPVSMSSVLTSSLVKTAGKVDTSLETVTSSPQSMSNTLDDISVTSAATTDIETTHPSINTVVTNVGTTGSAFESHSTVSAYPEPSKVTSPNVTTSTMEDTTISRSIPKSSKTTRTETETTSSLTPKLRETSISQEITSSTETSTVPYKELTGATTEVSRTDVTSSSSTSFPGPDQSTVSLDISTETNTRLSTSPIMTESAEITITTQTGPHGATSQDTFTMDPSNTTPQAGIHSAMTHGFSQLDVTTLMSRIPQDVSWTSPPSVDKTSSPSSFLSSPAMTTPSLISSTLPEDKLSSPMTSLLTSGLVKITDILRTRLEPVTSSLPNFSSTSDKILATSKDSKDTKEIFPSINTEETNVKANNSGHESHSPALADSETPKATTQMVITTTVGDPAPSTSMPVHGSSETTNIKREPTYFLTPRLRETSTSQESSFPTDTSFLLSKVPTGTITEVSSTGVNSSSKISTPDHDKSTVPPDTFTGEIPRVFTSSIKTKSAEMTITTQASPPESASHSTLPLDTSTTLSQGGTHSTVTQGFPYSEVTTLMGMGPGNVSWMTTPPVEETSSVSSLMSSPAMTSPSPVSSTSPQSIPSSPLPVTALPTSVLVTTTDVLGTTSPESVTSSPPNLSSITHERPATYKDTAHTEAAMHHSTNTAVTNVGTSGSGHKSQSSVLADSETSKATPLMSTTSTLGDTSVSTSTPNISQTNQIQTEPTASLSPRLRESSTSEKTSSTTETNTAFSYVPTGAITQASRTEISSSRTSISDLDRPTIAPDISTGMITRLFTSPIMTKSAEMTVTTQTTTPGATSQGILPWDTSTTLFQGGTHSTVSQGFPHSEITTLRSRTPGDVSWMTTPPVEETSSGFSLMSPSMTSPSPVSSTSPESIPSSPLPVTALLTSVLVTTTNVLGTTSPEPVTSSPPNLSSPTQERLTTYKDTAHTEAMHASMHTNTAVANVGTSISGHESQSSVPADSHTSKATSPMGITFAMGDTSVSTSTPAFFETRIQTESTSSLIPGLRDTRTSEEINTVTETSTVLSEVPTTTTTEVSRTEVITSSRTTISGPDHSKMSPYISTETITRLSTFPFVTGSTEMAITNQTGPIGTISQATLTLDTSSTASWEGTHSPVTQRFPHSEETTTMSRSTKGVSWQSPPSVEETSSPSSPVPLPAITSHSSLYSAVSGSSPTSALPVTSLLTSGRRKTIDMLDTHSELVTSSLPSASSFSGEILTSEASTNTETIHFSENTAETNMGTTNSMHKLHSSVSIHSQPSGHTPPKVTGSMMEDAIVSTSTPGSPETKNVDRDSTSPLTPELKEDSTALVMNSTTESNTVFSSVSLDAATEVSRAEVTYYDPTFMPASAQSTKSPDISPEASSSHSNSPPLTISTHKTIATQTGPSGVTSLGQLTLDTSTIATSAGTPSARTQDFVDSETTSVMNNDLNDVLKTSPFSAEEANSLSSQAPLLVTTSPSPVTSTLQEHSTSSLVSVTSVPTPTLAKITDMDTNLEPVTRSPQNLRNTLATSEATTDTHTMHPSINTAVANVGTTSSPNEFYFTVSPDSDPYKATSAVVITSTSGDSIVSTSMPRSSAMKKIESETTFSLIFRLRETSTSQKIGSSSDTSTVFDKAFTAATTEVSRTELTSSSRTSIQGTEKPTMSPDTSTRSVTMLSTFAGLTKSEERTIATQTGPHRATSQGTLTWDTSITTSQAGTHSAMTHGFSQLDLSTLTSRVPEYISGTSPPSVEKTSSSSSLLSLPAITSPSPVPTTLPESRPSSPVHLTSLPTSGLVKTTDMLASVASLPPNLGSTSHKIPTTSEDIKDTEKMYPSTNIAVTNVGTTTSEKESYSSVPAYSEPPKVTSPMVTSFNIRDTIVSTSMPGSSEITRIEMESTFSLAHGLKGTSTSQDPIVSTEKSAVLHKLTTGATETSRTEVASSRRTSIPGPDHSTESPDISTEVIPSLPISLGITESSNMTIITRTGPPLGSTSQGTFTLDTPTTSSRAGTHSMATQEFPHSEMTTVMNKDPEILSWTIPPSIEKTSFSSSLMPSPAMTSPPVSSTLPKTIHTTPSPMTSLLTPSLVMTTDTLGTSPEPTTSSPPNLSSTSHEILTTDEDTTAIEAMHPSTSTAATNVETTSSGHGSQSSVLADSEKTKATAPMDTTSTMGHTTVSTSMSVSSETTKIKRESTYSLTPGLRETSISQNASFSTDTSIVLSEVPTGTTAEVSRTEVTSSGRTSIPGPSQSTVLPEISTRTMTRLFASPTMTESAEMTIPTQTGPSGSTSQDTLTLDTSTTKSQAKTHSTLTQRFPHSEMTTLMSRGPGDMSWQSSPSLENPSSLPSLLSLPATTSPPPISSTLPVTISSSPLPVTSLLTSSPVTTTDMLHTSPELVTSSPPKLSHTSDERLTTGKDTTNTEAVHPSTNTAASNVEIPSSGHESPSSALADSETSKATSPMFITSTQEDTTVAISTPHFLETSRIQKESISSLSPKLRETGSSVETSSAIETSAVLSEVSIGATTEISRTEVTSSSRTSISGSAESTMLPEISTTRKIIKFPTSPILAESSEMTIKTQTSPPGSTSESTFTLDTSTTPSLVITHSTMTQRLPHSEITTLVSRGAGDVPRPSSLPVEETSPPSSQLSLSAMISPSPVSSTLPASSHSSSASVTSLLTPGQVKTTEVLDASAEPETSSPPSLSSTSVEILATSEVTTDTEKIHPFSNTAVTKVGTSSSGHESPSSVLPDSETTKATSAMGTISIMGDTSVSTLTPALSNTRKIQSEPASSLTTRLRETSTSEETSLATEANTVLSKVSTGATTEVSRTEAISFSRTSMSGPEQSTMSQDISIGTIPRISASSVLTESAKMTITTQTGPSESTLESTLNLNTATTPSWVETHSIVIQGFPHPEMTTSMGRGPGGVSWPSPPFVKETSPPSSPLSLPAVTSPHPVSTTFLAHIPPSPLPVTSLLTSGPATTTDILGTSTEPGTSSSSSLSTTSHERLTTYKDTAHTEAVHPSTNTGGTNVATTSSGYKSQSSVLADSSPMCTTSTMGDTSVLTSTPAFLETRRIQTELASSLTPGLRESSGSEGTSSGTKMSTVLSKVPTGATTEISKEDVTSIPGPAQSTISPDISTRTVSWFSTSPVMTESAEITMNTHTSPLGATTQGTSTLDTSSTTSLTMTHSTISQGFSHSQMSTLMRRGPEDVSWMSPPLLEKTRPSFSLMSSPATTSPSPVSSTLPESISSSPLPVTSLLTSGLAKTTDMLHKSSEPVTNSPANLSSTSVEILATSEVTTDTEKTHPSSNRTVTDVGTSSSGHESTSFVLADSQTSKVTSPMVITSTMEDTSVSTSTPGFFETSRIQTEPTSSLTLGLRKTSSSEGTSLATEMSTVLSGVPTGATAEVSRTEVTSSSRTSISGFAQLTVSPETSTETITRLPTSSIMTESAEMMIKTQTDPPGSTPESTHTVDISTTPNWVETHSTVTQRFSHSEMTTLVSRSPGDMLWPSQSSVEETSSASSLLSLPATTSPSPVSSTLVEDFPSASLPVTSLLNPGLVITTDRMGISREPGTSSTSNLSSTSHERLTTLEDTVDTEDMQPSTHTAVTNVRTSISGHESQSSVLSDSETPKATSPMGTTYTMGETSVSISTSDFFETSRIQIEPTSSLTSGLRETSSSERISSATEGSTVLSEVPSGATTEVSRTEVISSRGTSMSGPDQFTISPDISTEAITRLSTSPIMTESAESAITIETGSPGATSEGTLTLDTSTTTFWSGTHSTASPGFSHSEMTTLMSRTPGDVPWPSLPSVEEASSVSSSLSSPAMTSTSFFSTLPESISSSPHPVTALLTLGPVKTTDMLRTSSEPETSSPPNLSSTSAEILATSEVTKDREKIHPSSNTPVVNVGTVIYKHLSPSSVLADLVTTKPTSPMATTSTLGNTSVSTSTPAFPETMMTQPTSSLTSGLREISTSQETSSATERSASLSGMPTGATTKVSRTEALSLGRTSTPGPAQSTISPEISTETITRISTPLTTTGSAEMTITPKTGHSGASSQGTFTLDTSSRASWPGTHSAATHRSPHSGMTTPMSRGPEDVSWPSRPSVEKTSPPSSLVSLSAVTSPSPLYSTPSESSHSSPLRVTSLFTPVMMKTTDMLDTSLEPVTTSPPSMNITSDESLATSKATMETEAIQLSENTAVTQMGTISARQEFYSSYPGLPEPSKVTSPVVTSSTIKDIVSTTIPASSEITRIEMESTSTLTPTPRETSTSQEIHSATKPSTVPYKALTSATIEDSMTQVMSSSRGPSPDQSTMSQDISTEVITRLSTSPIKTESTEMTITTQTGSPGATSRGTLTLDTSTTFMSGTHSTASQGFSHSQMTALMSRTPGDVPWLSHPSVEEASSASFSLSSPVMTSSSPVSSTLPDSIHSSSLPVTSLLTSGLVKTTELLGTSSEPETSSPPNLSSTSAEILAITEVTTDTEKLEMTNVVTSGYTHESPSSVLADSVTTKATSSMGITYPTGDTNVLTSTPAFSDTSRIQTKSKLSLTPGLMETSISEETSSATEKSTVLSSVPTGATTEVSRTEAISSSRTSIPGPAQSTMSSDTSMETITRISTPLTRKESTDMAITPKTGPSGATSQGTFTLDSSSTASWPGTHSATTQRFPQSVVTTPMSRGPEDVSWPSPLSVEKNSPPSSLVSSSSVTSPSPLYSTPSGSSHSSPVPVTSLFTSIMMKATDMLDASLEPETTSAPNMNITSDESLAASKATTETEAIHVFENTAASHVETTSATEELYSSSPGFSEPTKVISPVVTSSSIRDNMVSTTMPGSSGITRIEIESMSSLTPGLRETRTSQDITSSTETSTVLYKMPSGATPEVSRTEVMPSSRTSIPGPAQSTMSLDISDEVVTRLSTSPIMTESAEITITTQTGYSLATSQVTLPLGTSMTFLSGTHSTMSQGLSHSEMTNLMSRGPESLSWTSPRFVETTRSSSSLTSLPLTTSLSPVSSTLLDSSPSSPLPVTSLILPGLVKTTEVLDTSSEPKTSSSPNLSSTSVEIPATSEIMTDTEKIHPSSNTAVAKVRTSSSVHESHSSVLADSETTITIPSMGITSAVDDTTVFTSNPAFSETRRIPTEPTFSLTPGFRETSTSEETTSITETSAVLYGVPTSATTEVSMTEIMSSNRIHIPDSDQSTMSPDIITEVITRLSSSSMMSESTQMTITTQKSSPGATAQSTLTLATTTAPLARTHSTVPPRFLHSEMTTLMSRSPENPSWKSSLFVEKTSSSSSLLSLPVTTSPSVSSTLPQSIPSSSFSVTSLLTPGMVKTTDTSTEPGTSLSPNLSGTSVEILAASEVTTDTEKIHPSSSMAVTNVGTTSSGHELYSSVSIHSEPSKATYPVGTPSSMAETSISTSMPANFETTGFEAEPFSHLTSGFRKTNMSLDTSSVTPTNTPSSPGSTHLLQSSKTDFTSSAKTSSPDWPPASQYTEIPVDIITPFNASPSITESTGITSFPESRFTMSVTESTHHLSTDLLPSAETISTGTVMPSLSEAMTSFATTGVPRAISGSGSPFSRTESGPGDATLSTIAESLPSSTPVPFSSSTFTTTDSSTIPALHEITSSSATPYRVDTSLGTESSTTEGRLVMVSTLDTSSQPGRTSSSPILDTRMTESVELGTVTSAYQVPSLSTRLTRTDGIMEHITKIPNEAAHRGTIRPVKGPQTSTSPASPKGLHTGGTKRMETTTTALKTTTTALKTTSRATLTTSVYTPTLGTLTPLNASMQMASTIPTEMMITTPYVFPDVPETTSSLATSLGAETSTALPRTTPSVFNRESETTASLVSRSGAERSPVIQTLDVSSSEPDTTASWVIHPAETIPTVSKTTPNFFHSELDTVSSTATSHGADVSSAIPTNISPSELDALTPLVTISGTDTSTTFPTLTKSPHETETRTTWLTHPAETSSTIPRTIPNFSHHESDATPSIATSPGAETSSAIPIMTVSPGAEDLVTSQVTSSGTDRNMTIPTLTLSPGEPKTIASLVTHPEAQTSSAIPTSTISPAVSRLVTSMVTSLAAKTSTTNRALTNSPGEPATTVSLVTHPAQTSPTVPWTTSIFFHSKSDTTPSMTTSHGAESSSAVPTPTVSTEVPGVVTPLVTSSRAVISTTIPILTLSPGEPETTPSMATSHGEEASSAIPTPTVSPGVPGVVTSLVTSSRAVTSTTIPILTFSLGEPETTPSMATSHGTEAGSAVPTVLPEVPGMVTSLVASSRAVTSTTLPTLTLSPGEPETTPSMATSHGAEASSTVPTVSPEVPGVVTSLVTSSSGVNSTSIPTLILSPGELETTPSMATSHGAEASSAVPTPTVSPGVSGVVTPLVTSSRAVTSTTIPILTLSSSEPETTPSMATSHGVEASSAVLTVSPEVPGMVTSLVTSSRAVTSTTIPTLTISSDEPETTTSLVTHSEAKMISAIPTLAVSPTVQGLVTSLVTSSGSETSAFSNLTVASSQPETIDSWVAHPGTEASSVVPTLTVSTGEPFTNISLVTHPAESSSTLPRTTSRFSHSELDTMPSTVTSPEAESSSAISTTISPGIPGVLTSLVTSSGRDISATFPTVPESPHESEATASWVTHPAVTSTTVPRTTPNYSHSEPDTTPSIATSPGAEATSDFPTITVSPDVPDMVTSQVTSSGTDTSITIPTLTLSSGEPETTTSFITYSETHTSSAIPTLPVSPGASKMLTSLVISSGTDSTTTFPTLTETPYEPETTAIQLIHPAETNTMVPRTTPKFSHSKSDTTLPVAITSPGPEASSAVSTTTISPDMSDLVTSLVPSSGTDTSTTFPTLSETPYEPETTATWLTHPAETSTTVSGTIPNFSHRGSDTAPSMVTSPGVDTRSGVPTTTIPPSIPGVVTSQVTSSATDTSTAIPTLTPSPGEPETTASSATHPGTQTGFTVPIRTVPSSEPDTMASWVTHPPQTSTPVSRTTSSFSHSSPDATPVMATSPRTEASSAVLTTISPGAPEMVTSQITSSGAATSTTVPTLTHSPGMPETTALLSTHPRTETSKTFPASTVFPQVSETTASLTIRPGAETSTALPTQTTSSLFTLLVTGTSRVDLSPTASPGVSAKTAPLSTHPGTETSTMIPTSTLSLGLLETTGLLATSSSAETSTSTLTLTVSPAVSGLSSASITTDKPQTVTSWNTETSPSVTSVGPPEFSRTVTGTTMTLIPSEMPTPPKTSHGEGVSPTTILRTTMVEATNLATTGSSPTVAKTTTTFNTLAGSLFTPLTTPGMSTLASESVTSRTSYNHRSWISTTSSYNRRYWTPATSTPVTSTFSPGISTSSIPSSTAATVPFMVPFTLNFTITNLQYEEDMRHPGSRKFNATERELQGLLKPLFRNSSLEYLYSGCRLASLRPEKDSSATAVDAICTHRPDPEDLGLDRERLYWELSNLTNGIQELGPYTLDRNSLYVNGFTHRSSMPTTSTPGTSTVDVGTSGTPSSSPSPTTAGPLLMPFTLNFTITNLQYEEDMRRTGSRKFNTMESVLQGLLKPLFKNTSVGPLYSGCRLTLLRPEKDGAATGVDAICTHRLDPKSPGLNREQLYWELSKLTNDIEELGPYTLDRNSLYVNGFTHQSSVSTTSTPGTSTVDLRTSGTPSSLSSPTIMAAGPLLVPFTLNFTITNLQYGEDMGHPGSRKFNTTERVLQGLLGPIFKNTSVGPLYSGCRLTSLRSEKDGAATGVDAICIHHLDPKSPGLNRERLYWELSQLTNGIKELGPYTLDRNSLYVNGFTHRTSVPTSSTPGTSTVDLGTSGTPFSLPSPATAGPLLVLFTLNFTITNLKYEEDMHRPGSRKFNTTERVLQTLLGPMFKNTSVGLLYSGCRLTLLRSEKDGAATGVDAICTHRLDPKSPGVDREQLYWELSQLTNGIKELGPYTLDRNSLYVNGFTHWIPVPTSSTPGTSTVDLGSGTPSSLPSPTTAGPLLVPFTLNFTITNLKYEEDMHCPGSRKFNTTERVLQSLLGPMFKNTSVGPLYSGCRLTLLRSEKDGAATGVDAICTHRLDPKSPGVDREQLYWELSQLTNGIKELGPYTLDRNSLYVNGFTHQTSAPNTSTPGTSTVDLGTSGTPSSLPSPTSAGPLLVPFTLNFTITNLQYEEDMHHPGSRKFNTTERVLQGLLGPMFKNTSVGLLYSGCRLTLLRPEKNGAATGMDAICSHRLDPKSPGLNREQLYWELSQLTHGIKELGPYTLDRNSLYVNGFTHRSSVAPTSTPGTSTVDLGTSGTPSSLPSPTTAVPLLVPFTLNFTITNLQYGEDMRHPGSRKFNTTERVLQGLLGPLFKNSSVGPLYSGCRLISLRSEKDGAATGVDAICTHHLNPQSPGLDREQLYWQLSQMTNGIKELGPYTLDRNSLYVNGFTHRSSGLTTSTPWTSTVDLGTSGTPSPVPSPTTTGPLLVPFTLNFTITNLQYEENMGHPGSRKFNITESVLQGLLKPLFKSTSVGPLYSGCRLTLLRPEKDGVATRVDAICTHRPDPKIPGLDRQQLYWELSQLTHSITELGPYTLDRDSLYVNGFTQRSSVPTTSTPGTFTVQPETSETPSSLPGPTATGPVLLPFTLNFTITNLQYEEDMRRPGSRKFNTTERVLQGLLMPLFKNTSVSSLYSGCRLTLLRPEKDGAATRVDAVCTHRPDPKSPGLDRERLYWKLSQLTHGITELGPYTLDRHSLYVNGFTHQSSMTTTRTPDTSTMHLATSRTPASLSGPMTASPLLVLFTINFTITNLRYEENMHHPGSRKFNTTERVLQGLLRPVFKNTSVGPLYSGCRLTLLRPKKDGAATKVDAICTYRPDPKSPGLDREQLYWELSQLTHSITELGPYTLDRDSLYVNGFTQRSSVPTTSIPGTPTVDLGTSGTPVSKPGPSAASPLLVLFTLNFTITNLRYEENMQHPGSRKFNTTERVLQGLLRSLFKSTSVGPLYSGCRLTLLRPEKDGTATGVDAICTHHPDPKSPRLDREQLYWELSQLTHNITELGPYALDNDSLFVNGFTHRSSVSTTSTPGTPTVYLGASKTPASIFGPSAASHLLILFTLNFTITNLRYEENMWPGSRKFNTTERVLQGLLRPLFKNTSVGPLYSGCRLTLLRPEKDGEATGVDAICTHRPDPTGPGLDREQLYLELSQLTHSITELGPYTLDRDSLYVNGFTHRSSVPTTSTGVVSEEPFTLNFTINNLRYMADMGQPGSLKFNITDNVMQHLLSPLFQRSSLGARYTGCRVIALRSVKNGAETRVDLLCTYLQPLSGPGLPIKQVFHELSQQTHGITRLGPYSLDKDSLYLNGYNEPGPDEPPTTPKPATTFLPPLSEATTAMGYHLKTLTLNFTISNLQYSPDMGKGSATFNSTEGVLQHLLRPLFQKSSMGPFYLGCQLISLRPEKDGAATGVDTTCTYHPDPVGPGLDIQQLYWELSQLTHGVTQLGFYVLDRDSLFINGYAPQNLSIRGEYQINFHIVNWNLSNPDPTSSEYITLLRDIQDKVTTLYKGSQLHDTFRFCLVTNLTMDSVLVTVKALFSSNLDPSLVEQVFLDKTLNASFHWLGSTYQLVDIHVTEMESSVYQPTSSSSTQHFYLNFTITNLPYSQDKAQPGTTNYQRNKRNIEDALNQLFRNSSIKSYFSDCQVSTFRSVPNRHHTGVDSLCNFSPLARRVDRVAIYEEFLRMTRNGTQLQNFTLDRSSVLVDGYSPNRNEPLTGNSDLPFWAVILIGLAGLLGVITCLICGVLVTTRRRKKEGEYNVQQQCPGYYQSHLDLEDLQ

SEQ ID NO: 14697 - protein, 4493 aa, Homo Sapiens
MPRPGTMALCLLTLVLSLLPPQAAAEQDLSVNRAVWDGGGCISQGDVLNRQCQQLSQHVRTGSAANTATGTTSTNVVEPRMYLSCSTNPEMTSIESSVTSDTPGVSSTRMTPTESRTTSESTSDSTTLFPSSTEDTSSPTTPEGTDVPMSTPSEESISSTMAFVSTAPLPSFEAYTSLTYKVDMSTPLTTSTQASSSPTTPESTTIPKSTNSEGSTPLTSMPASTMKVASSEAITLLTTPVEISTPVTISAQASSSPTTAEGPSLSNSAPSGGSTPLTRMPLSVMLVVSSEASTLSTTPAATNIPVITSTEASSSPTTAEGTSIPTSTYTEGSTPLTSTPASTMPVATSEMSTLSITPVDTSTLVTTSTEPSSLPTTAEATSMLTSTLSEGSTPLTNMPVSTILVASSEASTTSTIPVDSKTFVTTASEASSSPTTAEDTSIATSTPSEGSTPLTSMPVSTTPVASSEASNLSTTPVDSKTQVTTSTEASSSPPTAEVNSMPTSTPSEGSTPLTSMSVSTMPVASSEASTLSTTPVDTSTPVTTSSEASSSSTTPEGTSIPTSTPSEGSTPLTNMPVSTRLVVSSEASTTSTTPADSNTFVTTSSEASSSSTTAEGTSMPTSTYSERGTTITSMSVSTTLVASSEASTLSTTPVDSNTPVTTSTEATSSSTTAEGTSMPTSTYTEGSTPLTSMPVNTTLVASSEASTLSTTPVDTSTPVTTSTEASSSPTTADGASMPTSTPSEGSTPLTSMPVSKTLLTSSEASTLSTTPLDTSTHITTSTEASCSPTTTEGTSMPISTPSEGSPLLTSIPVSITPVTSPEASTLSTTPVDSNSPVTTSTEVSSSPTPAEGTSMPTSTYSEGRTPLTSMPVSTTLVATSAISTLSTTPVDTSTPVTNSTEARSSPTTSEGTSMPTSTPGEGSTPLTSMPDSTTPVVSSEARTLSATPVDTSTPVTTSTEATSSPTTAEGTSIPTSTPSEGTTPLTSTPVSHTLVANSEASTLSTTPVDSNTPLTTSTEASSPPPTAEGTSMPTSTPSEGSTPLTRMPVSTTMVASSETSTLSTTPADTSTPVTTYSQASSSSTTADGTSMPTSTYSEGSTPLTSVPVSTRLVVSSEASTLSTTPVDTSIPVTTSTEASSSPTTAEGTSIPTSPPSEGTTPLASMPVSTTLVVSSEANTLSTTPVDSKTQVATSTEASSPPPTAEVTSMPTSTPGERSTPLTSMPVRHTPVASSEASTLSTSPVDTSTPVTTSAETSSSPTTAEGTSLPTSTTSEGSTLLTSIPVSTTLVTSPEASTLLTTPVDTKGPVVTSNEVSSSPTPAEGTSMPTSTYSEGRTPLTSIPVNTTLVASSAISILSTTPVDNSTPVTTSTEACSSPTTSEGTSMPNSNPSEGTTPLTSIPVSTTPVVSSEASTLSATPVDTSTPGTTSAEATSSPTTAEGISIPTSTPSEGKTPLKSIPVSNTPVANSEASTLSTTPVDSNSPVVTSTAVSSSPTPAEGTSIAISTPSEGSTALTSIPVSTTTVASSEINSLSTTPAVTSTPVTTYSQASSSPTTADGTSMQTSTYSEGSTPLTSLPVSTMLVVSSEANTLSTTPIDSKTQVTASTEASSSTTAEGSSMTISTPSEGSPLLTSIPVSTTPVASPEASTLSTTPVDSNSPVITSTEVSSSPTPAEGTSMPTSTYTEGRTPLTSITVRTTPVASSAISTLSTTPVDNSTPVTTSTEARSSPTTSEGTSMPNSTPSEGTTPLTSIPVSTTPVLSSEASTLSATPIDTSTPVTTSTEATSSPTTAEGTSIPTSTLSEGMTPLTSTPVSHTLVANSEASTLSTTPVDSNSPVVTSTAVSSSPTPAEGTSIATSTPSEGSTALTSIPVSTTTVASSETNTLSTTPAVTSTPVTTYAQVSSSPTTADGSSMPTSTPREGRPPLTSIPVSTTTVASSEINTLSTTLADTRTPVTTYSQASSSPTTADGTSMPTPAYSEGSTPLTSMPLSTTLVVSSEASTLSTTPVDTSTPATTSTEGSSSPTTAGGTSIQTSTPSERTTPLAGMPVSTTLVVSSEGNTLSTTPVDSKTQVTNSTEASSSATAEGSSMTISAPSEGSPLLTSIPLSTTPVASPEASTLSTTPVDSNSPVITSTEVSSSPIPTEGTSMQTSTYSDRRTPLTSMPVSTTVVASSAISTLSTTPVDTSTPVTNSTEARSSPTTSEGTSMPTSTPSEGSTPFTSMPVSTMPVVTSEASTLSATPVDTSTPVTTSTEATSSPTTAEGTSIPTSTLSEGTTPLTSIPVSHTLVANSEVSTLSTTPVDSNTPFTTSTEASSPPPTAEGTSMPTSTSSEGNTPLTRMPVSTTMVASFETSTLSTTPADTSTPVTTYSQAGSSPTTADDTSMPTSTYSEGSTPLTSVPVSTMPVVSSEASTHSTTPVDTSTPVTTSTEASSSPTTAEGTSIPTSPPSEGTTPLASMPVSTTPVVSSEAGTLSTTPVDTSTPMTTSTEASSSPTTAEDIVVPISTASEGSTLLTSIPVSTTPVASPEASTLSTTPVDSNSPVVTSTEISSSATSAEGTSMPTSTYSEGSTPLRSMPVSTKPLASSEASTLSTTPVDTSIPVTTSTETSSSPTTAKDTSMPISTPSEVSTSLTSILVSTMPVASSEASTLSTTPVDTRTLVTTSTGTSSSPTTAEGSSMPTSTPGERSTPLTNILVSTTLLANSEASTLSTTPVDTSTPVTTSAEASSSPTTAEGTSMRISTPSDGSTPLTSILVSTLPVASSEASTVSTTAVDTSIPVTTSTEASSSPTTAEVTSMPTSTPSETSTPLTSMPVNHTPVASSEAGTLSTTPVDTSTPVTTSTKASSSPTTAEGIVVPISTASEGSTLLTSIPVSTTPVASSEASTLSTTPVDTSIPVTTSTEGSSSPTTAEGTSMPISTPSEVSTPLTSILVSTVPVAGSEASTLSTTPVDTRTPVTTSAEASSSPTTAEGTSMPISTPGERRTPLTSMSVSTMPVASSEASTLSRTPADTSTPVTTSTEASSSPTTAEGTGIPISTPSEGSTPLTSIPVSTTPVAIPEASTLSTTPVDSNSPVVTSTEVSSSPTPAEGTSMPISTYSEGSTPLTGVPVSTTPVTSSAISTLSTTPVDTSTPVTTSTEAHSSPTTSEGTSMPTSTPSEGSTPLTYMPVSTMLVVSSEDSTLSATPVDTSTPVTTSTEATSSTTAEGTSIPTSTPSEGMTPLTSVPVSNTPVASSEASILSTTPVDSNTPLTTSTEASSSPPTAEGTSMPTSTPSEGSTPLTSMPVSTTTVASSETSTLSTTPADTSTPVTTYSQASSSPPIADGTSMPTSTYSEGSTPLTNMSFSTTPVVSSEASTLSTTPVDTSTPVTTSTEASLSPTTAEGTSIPTSSPSEGTTPLASMPVSTTPVVSSEVNTLSTTPVDSNTLVTTSTEASSSPTIAEGTSLPTSTTSEGSTPLSIMPLSTTPVASSEASTLSTTPVDTSTPVTTSSPTNSSPTTAEVTSMPTSTAGEGSTPLTNMPVSTTPVASSEASTLSTTPVDSNTFVTSSSQASSSPATLQVTTMRMSTPSEGSSSLTTMLLSSTYVTSSEASTPSTPSVDRSTPVTTSTQSNSTPTPPEVITLPMSTPSEVSTPLTIMPVSTTSVTISEAGTASTLPVDTSTPVITSTQVSSSPVTPEGTTMPIWTPSEGSTPLTTMPVSTTRVTSSEGSTLSTPSVVTSTPVTTSTEAISSSATLDSTTMSVSMPMEISTLGTTILVSTTPVTRFPESSTPSIPSVYTSMSMTTASEGSSSPTTLEGTTTMPMSTTSERSTLLTTVLISPISVMSPSEASTLSTPPGDTSTPLLTSTKAGSFSIPAEVTTIRISITSERSTPLTTLLVSTTLPTSFPGASIASTPPLDTSTTFTPSTDTASTPTIPVATTISVSVITEGSTPGTTIFIPSTPVTSSTADVFPATTGAVSTPVITSTELNTPSTSSSSTTTSFSTTKEFTTPAMTTAAPLTYVTMSTAPSTPRTTSRGCTTSASTLSATSTPHTSTSVTTRPVTPSSESSRPSTITSHTIPPTFPPAHSSTPPTTSASSTTVNPEAVTTMTTRTKPSTRTTSFPTVTTTAVPTNTTIKSNPTSTPTVPRTTTCFGDGCQNTASRCKNGGTWDGLKCQCPNLYYGELCEEVVSSIDIGPPETISAQMELTVTVTSVKFTEELKNHSSQEFQEFKQTFTEQMNIVYSGIPEYVGVNITKLRLGSVVVEHDVLLRTKYTPEYKTVLDNATEVVKEKITKVTTQQIMINDICSDMMCFNTTGTQVQNITVTQYDPEEDCRKMAKEYGDYFVVEYRDQKPYCISPCEPGFSVSKNCNLGKCQMSLSGPQCLCVTTETHWYSGETCNQGTQKSLVYGLVGAGVVLMLIILVALLMLVFRSKREVKRQKYRLSQLYKWQEEDSGPAPGTFQNIGFDICQDDDSIHLESIYSNFQPSLRHIDPETKIRIQRPQVMTTSF

SEQ ID NO: 14698 - protein, 8384 aa, Homo Sapiens
MKLILWYLVVALWCFFKDVEALLYRQKSDGKIAASRSGGFSYGSSSSGDLDRKKPLFSLEFGSPGETEDKSRQRQDAGSPKSEDTPAGGFFNSSSSSGDSDRTKPFFSLGLGAPGKAEDKSGDSQDAGGSKSEDTPPGGFFYGSSSSGDSDKKKPLFSFEFGATGEDEDKSRERWDAGNSRSEDSPADSTNTRYGAGFSSSGASLDVGFGWGISDEKGLEVSKADGRETRGSGSAGGETIVFGPDAGSSVGTGSSGLKLGAGKGDAAFGFEVSDSNSFGDTGISSKTVEGNQTSSSGGSVSIDLGDTSFRSENQFVGGGSLNSISNLWDSGQEGFGINEIGGNGMSGSVSAEAGFKGFGSDSSSSGDSSARNGFENSSGISEDSGVILGSSDQHEVELSRTGGNRKRSSDPDEAGNLSPGSDVSDSGGNTWSSDSGSGGGGVTSSSEYSTSGPLNTPEKGSHIPEATPKYSETNAIIGEISTWSKGAYKSFNGRIFFFESSCPYTFCRHCIESGGDFNIEIKRNNDSEIEKITVLIDNNDVSIFGDTILVNGESVQIPYNNKLIHIKKYGEHNVLNSRRGILTLMWDKNNKLSLTLHKQYPTCGLCGNFNSTPGQDINEHIANSKIPGDCPNAVGKSYEVCEDGIQHCNKIIGTYFEKCGKVAALSNDYKMICIDEYCQTRDKTSTCDTYSELSRLCASDGPGTFESWRSDSDVVCGTQRCPEQHIYKECGPSNPATCSNVAPFQDSECVSGCTCPEGYLLDDIGEKGKCVLKAECPCESSGTVYQPGEVREGPCGSQCTCQDAKWSCTEALCPGRCKVEGSSLTTFDGVKYNFPGNCHFLAVHNEDWSISVELRPCPSGQTGTCLNSVTLLLNSSVPVDKYVFNSDGTVTNDKIRNQGYYYSDKIQIFNASSSYLQVETYFHVKLQIQIVPVMQLYVSMPPNQFTDTVGLCGSYNNKAEDDFMSSQNILEKTSQAFANSWEMMSCPKGNPSSCISIEKEKFAERHCGILLDSSGPLASCHPIVNPKPYHEECKKYTCTCENSQDCLCTILGNYVKACAEKETYIVGWRTGLCEHSCPSGLVFKYNVKACNSSCRSLSERDRSCDVEDVPVDGCTCPDAMYQNNEGNCVLKSQCDCYINDEVMQPGKLIHIDDNKCVCRDGILLCQIPIDLTLQNCSGGAEYVDCSDPKAQRRTNRTCSTRNIPVFDENLPCKRGCFCPEGMVRNSKGICVFPNDCPCSFGGREYDEGSVTSVGCNECTCIKGSWSCTQNECQTICHIYGEGHVRTFDGKSYSFDGLCQYSFLEDYCGHENGTFRILTESVPCCEDGLTCSRKIIVAFQDQNIVLQDGKVTAVKSTESKKCELNANAYSIHTVGLYLILKFQNGIIVIWDKNTRLSVILDPNWNGKVCGLCGNNNGDLKDDFTTRYSSVASGALEFGNSWKTSQECSDTVAQTFPCDSNPYCKAWAVRKCEILRDSTFRDCHNKVDPSAYHDACIEEACACDMEGKYLGFCTAVAMYAEACSAVGVCVSWRKPNLCPVYCDYYNAPGECRWHYEPCGTVTAKTCKDQLVGQKFSSLLEGCYAKCPDSAPYLDENTMKCVSLSECSCFYNDVIPAGGVIEDNCGRTCYCIAGQLECSETAPTNSTFAVSTTTATTILSTGAAITLVTGGPSTAASIPAITTSSSETTGTTLGPLTEPFTTGITETSVPIISTSGNAGMTGVVSPTVTGASGMAGTTGGVDAATTGAASENTSERAGTPRVSGETPAVGGGSTPGEAGPGATVSGSTGVSAGSITASPGASATSSESSKSGTTGPSVGGKTGATSSEATSSEGMSGVTGQSLGSTAGSDSEITAKTSFTGSSPPGKLTRPSPGSPGHFSGGTTEWGNVATTGAAGENTSGALGSTEGSVEATTSAGSGNTAGTSGTGDTGPGNTAVSGTPVVSPGATPGAPGSSTPGEADIGNTSFGKSGTPTVSAASTTSSPVSKHTDAASATAVTISGSKPGTPGTPGGATSGGKITSGWSSSGTSTGASNTPGATGSSTGQTDTSGPSAKVTGNYGQSSEIPGTIKSSSDVSGTMGQSDTTSGPSVAVTRTSEQSSGVTVASEPSVGVSGTTGPLAEISGTTRPLVSGLRTTGSSAEGSGTTGPSSRESVTTRPLAEGSGTSGQSVTGSRATGLSATELGTTVSFTGGLGTSRSSARETRTTGPSADGSGTTGPSVVRSGTTRLSVGVTRATESSPGVTGTTTPSAEESRTTGPSVLVTGTTGQSGQGSGTTGKSFIESGPSVVGSGTTGPTSAGLGTTAPSTRRSSTTKPSVGRTGTTGQSGAESGTTEPSARVAGVTGTSAEVSGRIEPSATESSTSRPLGETTGTTIPSMEGSEATGPSVIGSETTRLSVIGSGTTGTSSGGSGATRSSGGGMGTTGQSTARSETTGPLFGLTGTFGQSATVTGTSSNSAGVTTPEKSPGVAMTTGLLVEGSATTQPRILESETTESSAGVIVTSGQSARVTGATGPSAGETGTTEPSTEGSVAAVLFVIGSETTRPLDIGSGTTGTLSGGSSTTRSSDGTTGTTRKSTARSETTGLSGLTGTSGQLAGVTGTSSKSAGVTVTSEKSAGVAVITGSFVERPVTTGPPLLESETTRPSGGVTVTSGQSARVTETVGASAGVTGTTGPSTEGSGATGPSVVGSGTTRPLAGESGTTESSAGVTGTRPSSSRESATTGPSDEGSGTTGLSAGVTVTSGQSVRKTGTTGAPAGVTETTRPSVVKSGTTGPSVIGTRTTGTSSGGSGATRSSGGETETTGQSAVKSGTTESFTRLTRTSGQSAGMTGTSAQSAGVALTSPFVEGLVTTGSSTVGLETTRPSAVGSGKTGPPVVKAQTTGPSAGVTVTSGQSARMTGASGPSVGVTGTTGPASKGLGTIRPSVVGLETTELSAEGSGTTGPPIVGETTVPSAGVTVTSGYSDRVTGATEPLAGVTGTIKPSVAGSVTTGPSVTGVETTAKTTSGGLSTTISSVGGTGTTGQSPERSGTTGPFTGLTGTSAQSAGVTMTSIQSAGVLVTTGLNVDGLGTTGKALIGSGTTGLSAEATGTIGPSTEGLEKTGPSITGSGTTRPLVTESWTAGTSSGGHSTTSPSVRGTETTGQSAAESVTTGPVTGYTETSGPSAGVTVTPRQSPTVTQTTGSSAAVSGTTVQSLTVSGTTRPSSGQTEITGSSVKESGTTESSAVRSGTTGPTAGVTGTNGPSSAGVTGITGSSPGVTGTTGSSPGVTGTTGSSARSGTSIPSVGKTGTTRTSVEESRTTRPSAGITGTNGLSAEVTGTTGPLAGVTGTTGPSAGVTRTTGLSAGETGTTGLSPGVTRTTRSSAGLTGKTGLSAGVTGKTGLSAEVTGTTRLSAGVTGTTGPSPGVTGTTGTPAGVTGTTELSAGVTGKTGLSSEVTETTGLSYGVKRTIGLSAGSTGTSGQSAGVAGTTTLSAEVTGTTRPSAGVTGTTGLSAEVTEITGISAVVTGTTGPSAGVTETTGSSAGVAGTTRLSAGVTGITGLSAGVTGTTGLSTEVTGTTGPSAGATGTTGLSVGVTGITGLSDVVTETTGSSARSGTGIPSVGETRTTSTSVEESRTTRPSAGIMGTNGLPAEVTGTTEPLAGGTGTTGILAGVTGTTGLSAGETGKIGSSAGVTGKTGSSARVTGKTGPSAEVTGKTGLSAGVTGTTGLSPGVTGTSGLSAEVTGTTGPSAEATGLPGVSAGVTGTTGSLAGGTGTIGLSAGVTGTTGSSAGVTGTTGLSAGVTGIAGLSAGVTGITGPSAGVTGTTTVSAGVTGTTGLSAEATEITGLSAGVTGTTGLSAGVTETIRLSAGVTGTIRSSAGVTGITGLSAGVTGTTGPSAGVTGSTGLLAGVTETTGQSAKVTGTTGQSVGVTGTTRSSGGVTGITGLSAGVTGTNGLSAVTGMTGLSAEVTGTTGLSVGVTGIAGLSAGVTGITGPSAGITGTTTISAGVTGTSGLSAEATGITGLSAGVTGKTGLSAGVTETIGLSAEATGTIGSSPGVTGTTGSSTGVTGITGLSAGVTGTTGLSTEVTGTTGPSAGVTRTTGLSAGVTGITGLSAIVTETTGSSARSGTSIPSVGETGTTRTSVEESRTTRPSAGITGTNGLSAEVTGTIGPLAGGTGTTGLSAGVTGTVGSSAVVTGTTGLSAGVTGTTGPSAEETGATGPSAEVTETTGPSAGVTGTGRLSAEVTGTTGPSAEVTGLPGESAEVTGTIGSPAGVTGTTQLSAVVTGITGLSAEVTGTTGLSAGVTGITGLSAEVTRTTGLSAGVTGTIGLSAGVTGTTRPSAGVTGTTGQSAEVTGTTEPSAGLTETTGSSTGVTGATGPLAGVTGTTGISTEVTGTTGPSARVTGTTVLSAGVTGITGLSAIVTETTGSSARSGTSTPSVGETGTTRTSVEESRATRPSAGITGTNGQSAEVTWITGPLAGVTGTTGISAGVTGTTGLSAGVTGTIGSSAVVTGINGLSAGVTGTTGPSAEETGATGPSAEVTGTTGPSAEETGATGPSAEVTGTTGPSGGVTGTNGLSAEVTGTTGPSAEVTGLPGVSAGVTGTIGSPAAVTGTIRPSAVVTGITGLSAEVTGTTGLSAWVTGIAGLSAGVTETIGSSAGVTGTNGLSAEATGTTGPSAGVTGTTGLSAGVTGTAGLSARVTESTGLSAGVTGTTGLSAGVTGTTGPSAGITGTNGLSAEVTGTTGPLAGVTGTIGLSAGVTGIAGLSAGVTESTGLSAGVTGTIRSSAVVTGINGLSAGVTGTTGPSAEETGATGPSAEVTGTTGPSGGVTGTSGISAEVTGTTGPSAEVTGLPGVSAGVTGTIGSPAAVTGTTRPSAVVTGISGLSAEVTGTTGLSAGVTETIGSSAGVTGTNGLSAEATETTGPSAGVTGTTGLSAGVTGTTGPSAGIAGTNGLSAGVTGTTGLSARVTESTGLSAGVTGTIGSSAVVTETTRLSSGVTGTIGPSAEETGATGLSAEVTGTTGSLAEVTGTTGLSAGVTGTIGSSAVVTGTTGLSAGITGTNGLSAEVTGTAGPLAGVTGTTGLSAGVTGTTGLSAGVTETTGQSAGVTESTGLSPGVTGTIGSSAVVTGIKGLSAGVTGTTGPSAEETGATGPSAEVTGTTGPSGGVTGTSVLSVEVTGTTGPSAEVTGLPGVSAGLTGTIGSPAAVRGTTWPSAVVTGISGLSGEVTGTTGLSAGVTGIGGLSAGVTGTIGSSAGVTGTNALSAEATGTTGPSAGVTGTTGLSAGVTGTTGLSAGVTGTIRSSAVVTETTGLSAGVTGTTGPSAGIAGTNGLSAEVTGTTGLSAGMTGTTGLSARVTESTGLSAGVTGTIGSSAVVTETTRLSAGVTGTIGPSAEETGATGLSAEVTRTTGSLAGVTGTTGPSAVVTGKTELSAEVTGTTELSAEVTEKTGPSAEVTGKTGLSAGVMETTGPSAEVTGTTGSSAGVTGTTGPSAGVTGTTGPSAEATGLPGVSAGVTGTIGSPAGVTGTARLSAVVTGISGLSAEVTGTTGLSTGVTGIAGHSAAVTGITRPSAGVTGTTTVSAGVTGTIGLSAEATGITLPSAGVTETTGLSAGVTETIGLSAGVTGTIGSSAGVTEITGLSAGVTGTTGPSAGVTGSTVLSAGVTATTGQSVGVTGTTGPSAGVTGTTGLSAGVTGIAGLSAGVTGITGPSAGVTGTTTVSAGVTGTTGLSAEATEITGLSAGVTGTTGLSAGVTGIAGLSAGVTETIGSSAGVTGTNGLSAEATGKTGPSAGVTGTTGLSAGVTGTTGLSAGVTETIGLSAGVTGTIGSSAGVKGTTGQSAEVTGATGQSVGVTGTTRSSGGVTGITGLSAGLRGTTVSSAKAGTSIPLTGKTGTTRTSVEESTTTGPSAGITGTNGLSAEMTGTNELSAGVTGTIGSSAGVTGTTGLSVEATVTTGLSAGVTGTTVPLAGVTWTPGPSAGVTGIAALSAGVTGKSGLSAGVTGKTGLSAGVTGTTGPSAEATGKTGLSAGVTGITGPFAEVTGTTGLSAGVIGTTGSSAEVTGITGLSAGVTGKTRSSAGVTGTTGLSAKSGTSIPSAGKTGTTKTSVEESRTTRPSAGITATTGVPAATSPGAEGESIASTSVATGAIPRSTIAPGSTTTGTTGVTTGTTLAPRSFNIGTSGGISGKTLKPGSYVSEATTATGTPGAGPSGGTTISSPEVSTISEVSNTGITGVGSETSIETGISNTATTGVAPGTTLAPGSSSTEATTSIGGSASTRGGIATEATGSTRGVRTTGSEAPEGTSGEFSGTTISSGGFHTEATTLTGGRGSIGTESRAESTTSLPQSAKTRGGILTEATSSTGRIRATGSEAPGGTSRKFSGTTISSGGSHTEATTLAGGRDSTESEFRTATIGVVPATTVAPGSSKTEATTFLGVSGTTSVGRATGATTSIAGSDTSQAEHPGGTSGEFPGTTITSGDSHTEATALTGSRGSIGTESTVETTTYIGESGTTRGGLATATTGAFSGKTLEPGNDNTEATGSTGGIRATRTEAPGGTSGEFPGTTFTSGGSHTEATTFTGGKGSTGTESRAATTRAAPGTTLVPGSSNTGATASPGGSATTRGRITTATTGAFSGKTLESENDNTEATSSTRGVRTTRSEAPGGTSGEFPGTRITSGGSYTATTRAAPGTTLAPGSSNTGATASLGGSAMTRGRITTATTGAFSGKTLEPGNNNTEATSSTRGVRTTRSEAPGEATTLTGDRSSTGSESRTATTGVAPGTTVAPGSSKTEATTFLGVSGTTNIGRATGATTSIVGSDTSQAERPGGTTVVSPGASSTSQSSRPGTSVTPDSSASESETVTTKEFSGTTAISRTSHTGTPAASGGQATGSLTATTGVAPGTTVAPGSSNTEATTSVGERETTKAEIITGDTGELSGTTIISENSTTAGITAATGKQAGTSEVAPSTTVAPGSFSTAATTSPGASGTTGVTTTTKTTTSLGGSGTTGAEIKSATTGAPGSRTGTAGVPSATTVSPGSSNSEATTSVGESGKTGAETITEATTSTEGTGTSGTGFKTGTSEVAPATTVAPGSFSTAATTSPGASGMTGVTTTTKTTTSLGGSGTTGAKIKLVGTTTTAPESRTAGVPSGTRVTPGSSNSEATTSVEESRITRAEVITEATTFSGGSGATRAGLPRGTTGEFSGTNFISGSSNTEATTSTEGTGTSGTGFKIAGITSAPGKQAGTSGVSLATTVAPGSFSTATTSSGASGITRAGPTSETTTSLGGSGTTGAEIKSAAVPSGTTVAPGSSNSEATTSVGENGKTRGEIITDTTEGTSGKVLEPGSAHTEATTFPGGSGTTRAGPPGGTTGELSRMTIIPGSSNTEATTSTKGTGTSGTGFKTGTSWVAPGTTVSPGSFSTATISPGASRTTGAAPAAETTTSLEGGGTTGAEIKSGATSGVPGSKTGTAGVPSATTIAPGSSNSEATTSLGESGKTRVETITGTTEGKTLAAGSAHTEATTFSGGSGSTRAGPLGGASGTSGGYVPGRETEPTTSIEETGTSRTIFKTVGITSAPGRQAGTSVVAPSTTVAPGSFSTAATTSPGASGMTGVRTTSKTTTSLGGTGTTRTEIKSGATTGAPGIKTDIMGESSRTTILSGSSNTEATNSIEETGTSGTGFKTAGITAAPGKQAGTSGVAPGTTVAPGSFSTAATTSPGASGVTGTGPTAETTTFLGGSSTTGAEIKSGATTGAPGSKTGTAKVLSGTTVASGSSNSEATTFSGITEAVTVPSKNGSMTTALGSQLSSSQTVIPGSSGTISHTTVAPGSSVTGTTTGASDDQVTGSKTGTTGVALSTTVAPGSSSTEATTSTGVHRTTVVGQKTGATTRGSAKQGTRSTIEATTSFRGTGTTGSGMNTGTTGVVSGNTISPSSFNTEATSGTSERPNPGSEIGTTGIVSGTTVAPGSSNTEATTSLGNGGTTEAGSKIVTTGITTGTTIVPGSFNTKATTSTDVGVATGVGMATGITNIISGRSQPTGSKTGYTVTGSGTTALPGGFRTGNTPGSTGVTSSQEGTTVVSSGITGIPETSISGPSKEASDKTTAPGPPTTVTASTGVKETSETGVQTGSTLVTAGVPTRPQVSQPETTVVATREVETENKTECLASLPPAPVCHGPLGEEKSPGDIWTANCHRGTCTDAKTIDCKPEECPSPPTCKTGEKLVKFQSNDTCCEIGYCEPRTCLFNNTDYEIGASFDDPSNPCVSYSCKDTGFAAVVQDCPKQTWCAEANRIYDSKKCCYTCKNNCRSSLVNVTVIYSGCKKRVQMAKCTGECEKTAKYNYDILLLEHSCLCCREENYELRDIVLDCPDGSTIPYQYKHITTCSCLDICQLYTTFMYS

SEQ ID NO: 14699 - protein, 709 aa, Homo Sapiens; identical to SEQ ID NO: 9097

SEQ ID NO: 14700 - protein, 566 aa, Homo Sapiens
MKMQKGNVLLMFGLLLHLEAATNSNETSTSANTGSSVISSGASTATNSGSSVTSSGVSTATISGSSVTSNGVSIVTNSEFHTTSSGISTATNSEFSTVSSGISIATNSESSTTSSGASTATNSESSTPSSGASTATNSDSSTTSSGASTATNSDSSTTSSEASTATNSESSTTSSGASTATNSESSTVSSRASTATNSESSTTSSGASTATNSESRTTSNGAGTATNSESSTTSSGASTATNSESSTPSSGAGTATNSESSTTSSGAGTATNSESSTVSSGISTVTNSESSTPSSGANTATNSESSTTSSGANTATNSDSSTTSSGASTATNSESSTTSSGASTATNSESSTTSSGASTATNSGSSTTSSGTSTATNSESSTVSSGASTATTSESSTTSSGASTATNSESSTVSSGASTATNSESSTTSSGANTATNSGSSVTSAGSGTAALTGMHTTSHSASTAVSEAKPGGSLVPWEIFLITLVSVVAAVGLFAGLFFCVRNSLSLRNTFNTAVYHPHGLNHGLGPGPGGNHGAPHRPRWSPNWFWRRPVSSIAMEMSGRNSGP

SEQ ID NO: 14701 - protein, 1773 aa, Homo Sapiens
MRRGNISPAFWFLWLLLFGLLGPSSENTTAFTKGSDTTTASITGSETTMASTMASTSALTTGSKITTDSTTGSETTSASTMASTAAFTTGSETNTASTTDSGTTIASTRTFTTGSDTTTGSTAGSETIVASTTVSGTTTTFTIASTTVPETTMASSTTSTAGSEKTMASSIISETTMASTTGSETATVSTTGSETTTTSTASSEATKVSTTGSETTTASTAGSETTTTSTSMAGSEATTTSTADSKVITASSMSSETTVAPAAGSNTTTASTTGSETTTILIKASETTTASTAGSETTTPSPTGSQTTIVSISGSEITTTSTAGSENTTVSSAGSGTTTASMAGSETTVSTAGSETTTVSITGTETTMVSAMGSETTTNSTTSSETTVTSTAGSETTTVSTVGSETTTAYTADSETTAASTTGSEMTTVFTAGSETITPSTAGSETTTVSTAGSETTTVSTTGSETTTASTAHSETTAASTMGSETTKVSTAGSETTVSTAGSETTAASTEDSETNTAFTEDSKTTTASTTGFETTAASTTGSEPTMASTMGSETTMASTIGPETTKVSTASSEVTTVFAAGSETIRASTVGSETTTVSTTGSETTTASIMGSETSTDSTTGSETTTASTEGSETTTASTEGSEATTVSTTGSETTTVSITDSETTTTCTEGSEMTAVSTTVFETTTASTEGSEITIASTSDSETTTASTEGSETTTVTTAGSETKTAYTTGSETTTASNTGLETTTVFTIGSDTTTASTEGSETTAVSATGSEMTTVSTEGSENTTVSTTGSETTTVSTTGLETTTTSTEGSEMTTVSTTGAETTTDSTEGSGTTAASTAGSETTTVSTADSENTTASTADSETTSASTTGSETTTASTTSSETTTASTEGSETTTVSTTDSETTMVSTTGSERTITSTEGSETTTVSATGSETTVSTEGSGTTTVSITGSETTKVSTTGSETTTTSTEGSEITTASITGSETTTASTEGSETTTASTEGSETTSASTTGSETTTASTTSSETTMASIMGSETTMASTIGSETTKVSTASSKMTTVFTENSETTIASTTASETTTVSTAGSETIPASTAGSETTTTTSTEGSETTTASTEGSETTTASTESSETTTATTIGSETTTASTEGSETTTTSTEGSETTTASTEGSEITTVSTTGSETTTASTEGSETTTASTEGSELTTVSTTGSETITVSAEGSETTTVTTMGSETTTASTAGSETTTVSTAGSETTTASIEGSETTTVSSTGSETTTVSTTGTETTITSTEGSETTTVTTAGSETTAVYTTGSETTTTSTEGSETTTVSTTGSETTTASTADLETTTVSTSGSGTTTASTAGSETTTVYITGSKTTTASTEGSEATTVSTTSSETTTASTTGSEMTTVFTTVSETTTVSTIGSEATTSSAAGSEATTTSTEGSETTTASTAGSETTTASTAGSETTTASTSGSETNTACTTGSETSTPSSAGSETNTAFIIGSESTIASTASLEPTATSLTGSETTTVSITASGATAASTTVSSTTFVLTKATDVSIQPITNTPMSGTRTTGTRLTASSSVTMAPGMDFTASAASHTVPGIVLNTSGLGTSTMGASSTTSAHGVRTTTGSTREPTSSTFQETGPVSMGTNTVSMSHTPTNVIKPSGYLQPWAIILISLAAVVAAVGLSVGLSFCLRNLFFPLRYCGIYYPHGHSHSLGLDLNLGLGSGTFHSLGNALVHGGELEMGHGGTHGFGYGVGHGLSHIHGDGYGVNHGGHYGHGGGH

SEQ ID NO: 14702 - protein, 403 aa, Homo Sapiens [sequence omitted]

SEQ ID NO: 14703 - protein, 420 aa, Homo Sapiens
MLHFHYYDTSNKIMEPHRPNVKTAVPLSLESYHISEEYGFLLPDSLKELPDHYRPWMEIANKLPQLIDAHQLQAHVDKMPLLSCQFLKGHREQRLAHLVLSFLTMGYVWQEGEAQPAEVLPRNLALPFVEVSRNLGLPPILVHSDLVLTNWTKKDPDGFLEIGNLETIISFPGGESLHGFILVTALVEKEAVPGIKALVQATNAILQPNQEALLQALQRLRLSIQDITKTLGQMHDYVDPDIFYAGIRIFLSGWKDNPAMPAGLMYEGVSQEPLKYSGGSAAQSTVLHAFDEFLGIRHSKESGDFLYRMRDYMPPSHKAFIEDIHSAPSLRDYILSSGQDHLLTAYNQCVQALAELRSYHITMVTKYLITAAAKAKHGKPNHLPGPPQALKDRGTGGTAVMSFLKSVRDKTLESILHPRG

SEQ ID NO: 14704 - protein, 302 aa, Homo Sapiens
MRLGSPGLLFLLFSSLRADTQEKEVRAMVGSDVELSCACPEGSRFDLNDVYVYWQTSESKTVVTYHIPQNSSLENVDSRYRNRALMSPAGMLRGDFSLRLFNVTPQDEQKFHCLVLSQSLGFQEVLSVEVTLHVAANFSVPVVSAPHSPSQDELTFTCTSINGYPRPNVYWINKTDNSLLDQALQNDTVFLNMRGLYDVVSVLRIARTPSVNIGCCIENVLLQQNLTVGSQTGNDIGERDKITENPVSTGEKNAATWSILAVLCLLVVVAVAIGWVCRDRCLQHSYAGAWAVSPETELTGHV

SEQ ID NO: 14705 - protein, 2347 aa, Homo Sapiens
MKNIYCLIPKLVNFATLGCLWISVVQCTVLNSCLKSCVTNLGQQLDLGTPHNLSEPCIQGCHFWNSVDQKNCALKCRESCEVGCSSAEGAYEEEVLENADLPTAPFASSIGSHNMTLRWKSANFSGVKYIIQWKYAQLLGSWTYTKTVSRPSYVVKPLHPFTEYIFRVVWIFTAQLQLYSPPSPSYRTHPHGVPETAPLIRNIESSSPDTVEVSWDPPQFPGGPILGYNLRLISKNQKLDAGTQRTSFQFYSTLPNTIYRFSIAAVNEVGEGPEAESSITTSSSAVQQEEQWLFLSRKTSLRKRSLKHLVDEAHCLRLDAIYHNITGISVDVHQQIVYFSEGTLIWAKKAANMSDVSDLRIFYRGSGLISSISIDWLYQRMYFIMDELVCVCDLENCSNIEEITPPSISAPQKIVADSYNGYVFYLLRDGIYRADLPVPSGRCAEAVRIVESCTLKDFAIKPQAKRIIYFNDTAQVFMSTFLDGSASHLILPRIPFADVKSFACENNDFLVTDGKVIFQQDALSFNEFIVGCDLSHIEEFGFGNLVIFGSSSQLHPLPGRPQELSVLFGSHQALVQWKPPALAIGANVILISDIIELFELGPSAWQNWTYEVKVSTQDPPEVTHIFLNISGTMLNVPELQSAMKYKVSVRASSPKRPGPWSEPSVGTTLVPASEPPFIMAVKEDGLWSKPLNSFGPGEFLSSDIGNVSDMDWYNNSLYYSDTKGDVFVWLLNGTDISENYHLPSIAGAGALAFEWLGHFLYWAGKTYVIQRQSVLTGHTDIVTHVKLLVNDMVVDSVGGYLYWTTLYSVESTRLNGESSLVLQTQPWFSGKKVIALTLDLSDGLLYWLVQDSQCIHLYTAVLRGQSTGDTTITEFAAWSTSEISQNALMYYSGRLFWINGFRIITTQEIGQKTSVSVLEPARFNQFTIIQTSLKPLPGNFSFTPKVIPDSVQESSFRIEGNASSFQILWNGPPAVDWGVVFYSVEFSAHSKFLASEQHSLPVFTVEGLEPYALFNLSVTPYTYWGKGPKTSLSLRAPETVPSAPENPRIFILPSGKCCNKNEVVVEFRWNKPKHENGVLTKFEIFYNISNQSITNKTCEDWIAVNVTPSVMSFQLEGMSPRCFIAFQVRAFTSKGPGPYADVVKSTTSEINPFPHLITLLGNKIVFLDMDQNQVVWTFSAERVISAVCYTADNEMGYYAEGDSLFLLHLHNRSSSELFQDSLVFDITVITIDWISRHLYFALKESQNGMQVFDVDLEHKVKYPREVKIHNRNSTIISFSVYPLLSRLYWTEVSNFGYQMFYYSIISHTLHRILQPTATNQQNKRNQCSCNVTEFELSGAMAIDTSNLEKPLIYFAKAQEIWAMDLEGCQCWRVITVPAMLAGKTLVSLTVDGDLIYWIITAKDSTQIYQAKKGNGAIVSQVKALRSRHILAYSSVMQPFPDKAFLSLASDTVEPTILNATNTSLTIRLPLAKTNLTWYGITSPTPTYLVYYAEVNDRKNSSDLKYRILEFQDSIALIEDLQPFSTYMIQIAVKNYYSDPLEHLPPGKEIWGKTKNGVPEAVQLINTTVRSDTSLIISWRESHKPNGPKESVRYQLAISHLALIPETPLRQSEFPNGRLTLLVTRLSGGNIYVLKVLACHSEEMWCTESHPVTVEMFNTPEKPYSLVPENTSLQFNWKAPLNVNLIRFWVELQKWKYNEFYHVKTSCSQGPAYVCNITNLQPYTSYNVRVVVVYKTGENSTSLPESFKTKAGVPNKPGIPKLLEGSKNSIQWEKAEDNGCRITYYILEIRKSTSNNLQNQNLRWKMTFNGSCSSVCTWKSKNLKGIFQFRVVAANNLGFGEYSGISENIILVGDDFWIPETSFILTIIVGIFLVVTIPLTFVWHRRLKNQKSAKEGVTVLINEDKELAELRGLAAGVGLANACYAIHTLPTQEEIENLPAFPREKLTLRLLLGSGAFGEVYEGTAVDILGVGSGEIKVAVKTLKKGSTDQEKIEFLKEAHLMSKFNHPNILKQLGVCLLNEPQYIILELMEGGDLLTYLRKARMATFYGPLLTLVDLVDLCVDISKGCVYLERMHFIHRDLAARNCLVSVKDYTSPRIVKIGDFGLARDIYKNDYYRKRGEGLLPVRWMAPESLMDGIFTTQSDVWSFGILIWEILTLGHQPYPAHSNLDVLNYVQTGGRLEPPRNCPDDLWNLMTQCWAQEPDQRPTFHRIQDQLQLFRNFFLNSIYKSRDEANNSGVINESFEGEDGDVICLNSDDIMPVALMETKNREGLNYMVLATECGQGEEKSEGPLGSQESESCGLRKEEKEPHADKDFCQEKQVAYCPSGKPEGLNYACLTHSGYGDGSD

SEQ ID NO: 14706 - protein, 255 aa, Homo Sapiens
MGNSCYNIVATLLLVLNFERTRSLQDPCSNCPAGTFCDNNRNQICSPCPPNSFSSAGGQRTCDICRQCKGVFRTRKECSSTSNAECDCTPGFHCLGAGCSMCEQDCKQGQELTKKGCKDCCFGTFNDQKRGICRPWTNCSLDGKSVLVNGTKERDVVCGPSPADLSPGASSVTPPAPAREPGHSPQIISFFLALTSTALLFLLFFLTLRFSVVKRGRKKLLYIFKQPFMRPVQTTQEEDGCSCRFPEEEEGGCEL

SEQ ID NO: 14707 - protein, 254 aa, Homo Sapiens
MEYASDASLDPEAPWPPAPRARACRVLPWALVAGLLLLLLLAAACAVFLACPWAVSGARASPGSAASPRLREGPELSPDDPAGLLDLRQGMFAQLVAQNVLLIDGPLSWYSDPGLAGVSLTGGLSYKEDTKELVVAKAGVYYVFFQLELRRVVAGEGSGSVSLALHLQPLRSAAGAAALALTVDLPPASSEARNSAFGFQGRLLHLSAGQRLGVHLHTEARARHAWQLTQGATVLGLFRVTPEIPAGLPSPRSE

SEQ ID NO: 14708 - protein, 241 aa, Homo Sapiens; identical to SEQ ID NO: 13579

SEQ ID NO: 14709 - protein, 199 aa, Homo Sapiens
MTLHPSPITCEFLFSTALISPKMCLSHLENMPLSHSRTQGAQRSSWKLWLFCSIVMLLFLCSFSWLIFIFLQLETAKEPCMAKFGPLPSKWQMASSEPPCVNKVSDWKLEILQNGLYLIYGQVAPNANYNDVAPFEVRLYKNKDMIQTLTNKSKIQNVGGTYELHVGDTIDLIFNSEHQVLKNNTYWGIILLANPQFIS

SEQ ID NO: 14710 - protein, 1068 aa, Homo Sapiens; identical to SEQ ID NO: 14664

SEQ ID NO: 14711 - protein, 1102 aa, Homo Sapiens; identical to SEQ ID NO: 14665

SEQ ID NO: 14712 - protein, 597 aa, Homo Sapiens; identical to SEQ ID NO: 14666

SEQ ID NO: 14713 - protein, 524 aa, Homo Sapiens; identical to SEQ ID NO: 14667

SEQ ID NO: 14714 - protein, 497 aa, Homo Sapiens; identical to SEQ ID NO: 14668

SEQ ID NO: 14715 - protein, 602 aa, Homo Sapiens; identical to SEQ ID NO: 14669

SEQ ID NO: 14716 - protein, 467 aa, Homo Sapiens; identical to SEQ ID NO: 14670

SEQ ID NO: 14717 - protein, 486 aa, Homo Sapiens; identical to SEQ ID NO: 14671

SEQ ID NO: 14718 - protein, 480 aa, Homo Sapiens [sequence omitted]

SEQ ID NO: 14719 - protein, 619 aa, Homo Sapiens
MPDPAAHLPFFYGSISRAEAEEHLKLAGMADGLFLLRQCLRSLGGYVLSLVHDVRFHHFPIERQLNGTYAIAGGKAHCGPAELCEFYSRDPDGLPCNLRKPCNRPSGLEPQPGVFDCLRDAMVRDYVRQTWKLEGEALEQAIISQAPQVEKLIATTAHERMPWYHSSLTREEAERKLYSGAQTDGKFLLRPRKEQGTYALSLIYGKTVYHYLISQDKAGKYCIPEGTKFDTLWQLVEYLKLKADGLIYCLKEACPNSSASNASGAAAPTLPAHPSTLTHPQRRIDTLNSDGYTPEPARITSPDKPRPMPMDTSVYESPYSDPEELKDKKLFLKRDNLLIADIELGCGNFGSVRQGVYRMRKKQIDVAIKVLKQGTEKADTEEMMREAQIMHQLDNPYIVRLIGVCQAEALMLVMEMAGGGPLHKFLVGKREEIPVSNVAELLHQVSMGMKYLEEKNFVHRDLAARNVLLVNRHYAKISDFGLSKALGADDSYYTARSAGKWPLKWYAPECINFRKFSSRSDVWSYGVTMWEALSYGQKPYKKMKGPEVMAFIEQGKRMECPPECPPELYALMSDCWIYKWEDRPDFLTVEQRMRACYYSLASKVEGPPGSTQKAEAACA

SEQ ID NO: 14720 - protein, 1132 aa, Homo Sapiens
MEPNDSTSTAVEEPDSLEVLVKTLDSQTRTFIVGAQMNVKEFKEHIAASVSIPSEKQRLIYQGRVLQDDKKLQEYNVGGKVIHLVERAPPQTHLPSGASSGTGSASATHGGGSPPGTRGPGASVHDRNANSYVMVGTFNLPSDGSAVDVHINMEQAPIQSEPRVRLVMAQHMIRDIQTLLSRMETLPYLQCRGGPQPQHSQPPPQPPAVTPEPVALSSQTSEPVESEAPPREPMEAEEVEERAPAQNPELTPGPAPAGPTPAPETNAPNHPSPAEYVEVLQELQRLESRLQPFLQRYYEVLGAAATTDYNNNHEGREEDQRLINLVGESLRLLGNTFVALSDLRCNLACTPPRHLHVVRPMSHYTTPMVLQQAAIPIQINVGTTVTMTGNGTRPPPTPNAEAPPPGPGQASSVAPSSTNVESSAEGAPPPGPAPPPATSHPRVIRISHQSVEPVVMMHMNIQDSGTQPGGVPSAPTGPLGPPGHGQTLGQQVPGFPTAPTRVVIARPTPPQARPSHPGGPPVSGTLQGAGLGTNASLAQMVSGLVGQLLMQPVLVAQGTPGMAPPPAPATASASAGTTNTATTAGPAPGGPAQPPPTPQPSMADLQFSQLLGNLLGPAGPGAGGSGVASPTITVAMPGVPAFLQGMTDFLQATQTAPPPPPPPPPPPPAPEQQTMPPPGSPSGGAGSPGGLGLESLSPEFFTSVVQGVLSSLLGSLGARAGSSESIAAFIQRLSGSSNIFEPGADGALGFFGALLSLLCQNFSMVDVVMLLHGHFQPLQRLQPQLRSFFHQHYLGGQEPTPSNIRMATHTLITGLEEYVRESFSLVQVQPGVDIIRTNLEFLQEQFNSIAAHVLHCTDSGFGARLLELCNQGLFECLALNLHCLGGQQMELAAVINGRIRRMSRGVNPSLVSWLTTMMGLRLQVVLEHMPVGPDAILRYVRRVGDPPQPLPEEPMEVQGAERASPEPQRENASPAPGTTAEEAMSRGPPPAPEGGSRDEQDGASAETEPWAAAVPPEWVPIIQQDIQSQRKVKPQPPLSDAYLSGMPAKRRKTMQGEGPQLLLSEAVSRAAKAAGARPLTSPESLSRDLEAPEVQESYRQQLRSDIQKRLQEDPNYSPQRFPNAQRAFADDP

SEQ ID NO: 14721 - protein, 233 aa, Homo Sapiens
MSQSNRELVVDFLSYKLSQKGYSWSQFSDVEENRTEAPEGTESEMETPSAINGNPSWHLADSPAVNGATGHSSSLDAREVIPMAAVKQALREAGDEFELRYRRAFSDLTSQLHITPGTAYQSFEQVVNELFRDGVNWGRIVAFFSFGGALCVESVDKEMQVLVSRIAAWMATYLNDHLEPWIQENGGWDTFVELYGNNAAAESRKGQERFNRWFLTGMTVAGVVLLGSLFSRK

SEQ ID NO: 14722 - protein, 175 aa, Homo Sapiens
MTDCEFGYIYRLAQDYLQCVLQIPQPGSGPSKTSRVLQNVAFSVQKEVEKNLKSCLDNVNVVSVDTARTLFNQVMEKEFEDGIINWGRIVTIFAFEGILIKKLLRQQIAPDVDTYKEISYFVAEFIMNNTGEWIRQNGGWENGFVKKFEPKSGWMTFLEVTGKICEMLSLLKQYC

SEQ ID NO: 14723 - protein, 1102 aa, Homo Sapiens
MFQLPVNNLGSLRKARKTVKKILSDIGLEYCKEHIEDFKQFEPNDFYLKNTTWEDVGLWDPSLTKNQDYRTKPFCCSACPFSSKFFSAYKSHFRNVHSEDFENRILLNCPYCTFNADKKTLETHIKIFHAPNASAPSSSLSTFKDKNKNDGLKPKQADSVEQAVYYCKKCTYRDPLYEIVRKHIYREHFQHVAAPYIAKAGEKSLNGAVPLGSNAREESSIHCKRCLFMPKSYEALVQHVIEDHERIGYQVTAMIGHTNVVVPRSKPLMLIAPKPQDKKSMGLPPRIGSLASGNVRSLPSQQMVNRLSIPKPNLNSTGVNMMSSVHLQQNNYGVKSVGQGYSVGQSMRLGLGGNAPVSIPQQSQSVKQLLPSGNGRSYGLGSEQRSQAPARYSLQSANASSLSSGQLKSPSLSQSQASRVLGQSSSKPAAAATGPPPGNTSSTQKWKICTICNELFPENVYSVHFEKEHKAEKVPAVANYIMKIHNFTSKCLYCNRYLPTDTLLNHMLIHGLSCPYCRSTFNDVEKMAAHMRMVHIDEEMGPKTDSTLSFDLTLQQGSHTNIHLLVTTYNLRDAPAESVAYHAQNNPPVPPKPQPKVQEKADIPVKSSPQAAVPYKKDVGKTLCPLCFSILKGPISDALAHHLRERHQVIQTVHPVEKKLTYKCIHCLGVYTSNMTASTITLHLVHCRGVGKTQNGQDKTNAPSRLNQSPSLAPVKRTYEQMEFPLLKKRKLDDDSDSPSFFEEKPEEPVVLALDPKGHEDDSYEARKSFLTKYFNKQPYPTRREIEKLAASLWLWKSDIASHFSNKRKKCVRDCEKYKPGVLLGFNMKELNKVKHEMDFDAEWLFENHDEKDSRVNASKTADKKLNLGKEDDSSSDSFENLEEESNESGSPFDPVFEVEPKISNDNPEEHVLKVIPEDASESEEKLDQKEDGSKYETIHLTEEPTKLMHNASDSEVDQDDVVEWKDGASPSESGPGSQQVSDFEDNTCEMKPGTWSDESSQSEDARSSKPAAKKKATMQGDREQLKWKNSSYGKVEGFWSKDQSQWKNASENDERLSNPQIEWQNSTIDSEDGEQFDNMTDGVAEPMHGSLAGVKLSSQQA

SEQ ID NO: 14724 - protein, 1131 aa, Homo Sapiens
MFQIPVENLDNIRKVRKKVKGILVDIGLDSCKELLKDLKGFDPGEKYFHNTSWGDVSLWEPSGKKVRYRTKPYCCGLCKYSTKVLTSFKNHLHRYHEDEIDQELVIPCPNCVFASQPKVVGRHFRMFHAPVRKVQNYTVNILGETKSSRSDVISFTCLKCNFSNTLYYSMKKHVLVAHFHYLINSYFGLRTEEMGEQPKTNDTVSIEKIPPPDKYYCKKCNANASSQDALMYHILTSDIHRDLENKLRSVISEHIKRTGLLKQTHIAPKPAAHLAAPANGSAPSAPAQPPCFHLALPQNSPSPAAGQPVTVAQGAPGSLTHSPPAAGQSHMTLVSSPLPVGQNSLTLQPPAPQPVFLSHGVPLHQSVNPPVLPLSQPVGPVNKSVGTSVLPINQTVRPGVLPLTQPVGPINRPVGPGVLPVSPSVTPGVLQAVSPGVLSVSRAVPSGVLPAGQMTPAGQMTPAGVIPGQTATSGVLPTGQMVQSGVLPVGQTAPSRVLPPGQTAPLRVISAGQVVPSGLLSPNQTVSSSAVVPVNQGVNSGVLQLSQPVVSGVLPVGQPVRPGVLQLNQTVGTNILPVNQPVRPGASQNTTFLTSGSILRQLIPTGKQVNGIPTYTLAPVSVTLPVPPGGLATVAPPQMPIQLLPSGAAAPMAGSMPGMPSPPVLVNAAQSVFVQASSSAADTNQVLKQAKQWKTCPVCNELFPSNVYQVHMEVAHKHSESKSGEKLEPEKLAACAPFLKWMREKTVRCLSCKCLVSEEELIHHLLMHGLGCLFCPCTFHDIKGLSEHSRNRHLGKKKLPMDYSNRGFQLDVDANGNLLFPHLDFITILPKEKLGEREVYLAILAGIHSKSLVPVYVKVRPQAEGTPGSTGKRVSTCPFCFGPFVTTEAYELHLKERHHIMPTVHTVLKSPAFKCIHCCGVYTGNMTLAAIAVHLVRCRSAPKDSSSDLQAQPGFIHNSELLLVSGEVMHDSSFSVKRKLPDGHLGAEDQRHGEEQPPILNADAAPGPEKVTSVVPFKRQRNESRTEGPIVKDEALQILALDPKKYEGRSYEEKKQFLKDYFHKKPYPSKKEIELLSSLFWVWKIDVASFFGKRRYICMKAIKNHKPSVLLGFDMSELKNVKHRLNFEYEP

SEQ ID NO: 14725 - protein, 1158 aa, Homo Sapiens; identical to SEQ ID NO: 574

SEQ ID NO: 14726 - protein, 517 aa, Homo Sapiens
MAAAITDMADLEELSRLSPLPPGSPGSAARGRAEPPEEEEEEEEEEEEAEAEAVAALLLNGGSGGGGGGGGGGVGGGEAETMSEPSPESASQAGEDEDEEEDDEEEEDESSSSGGGEEESSAESLVGSSGGSSSDETRSLSPGAASSSSGDGDGKEGLEEPKGPRGSQGGGGGGSSSSSVVSSGGDEGYGTGGGGSSATSGGRRGSLEMSSDGEPLSRMDSEDSISSTIMDVDSTISSGRSTPAMMNGQGSTTSSSKNIAYNCCWDQCQACFNSSPDLADHIRSIHVDGQRGGVFVCLWKGCKVYNTPSTSQSWLQRHMLTHSGDKPFKCVVGGCNASFASQGGLARHVPTHFSQQNSSKVSSQPKAKEESPSKAGMNKRRKLKNKRRRSLPRPHDFFDAQTLDAIRHRAICFNLSAHIESLGKGHSVVFHSTVIAKRKEDSGKIKLLLHWMPEDILPDVWVNESERHQLKTKVVHLSKLPKDTALLLDPNIYRTMPQKRLKRTLIRKVFNLYLSKQ

SEQ ID NO: 14727 - protein, 1210 aa, Homo Sapiens
MAAQSSLYNDDRNLLRIREKERRNQEAHQEKEAFPEKIPLFGEPYKTAKGDELSSRIQNMLGNYEEVKEFLSTKSHTHRLDASENRLGKPKYPLIPDKGSSIPSSSFHTSVHHQSIHTPASGPLSVGNISHNPKMAQPRTEPMPSLHAKSCGPPDSQHLTQDRLGQEGFGSSHHKKGDRRADGDHCASVTDSAPERELSPLISLPSPVPPLSPIHSNQQTLPRTQGSSKVHGSSNNSKGYCPAKSPKDLAVKVHDKETPQDSLVAPAQPPSQTFPPPSLPSKSVAMQQKPTAYVRPMDGQDQAPSESPELKPLPEDYRQQTFEKTDLKVPAKAKLTKLKMPSQSVEQTYSNEVHCVEEILKEMTHSWPPPLTAIHTPSTAEPSKFPFPTKDSQHVSSVTQNQKQYDTSSKTHSNSQQGTSSMLEDDLQLSDSEDSDSEQTPEKPPSSSAPPSAPQSLPEPVASAHSSSAESESTSDSDSSSDSESESSSSDSEENEPLETPAPEPEPPTTNKWQLDNWLTKVSQPAAPPEGPRSTEPPRRHPESKGSSDSATSQEHSESKDPPPKSSSKAPRAPPEAPHPGKRSCQKSPAQQEPPQRQTVGTKQPKKPVKASARAGSRTSLQGEREPGLLPYGSRDQTSKDKPKVKTKGRPRAAASNEPKPAVPPSSEKKKHKSSLPAPSKALSGPEPAKDNVEDRTPEHFALVPLTESQGPPHSGSGSRTSGCRQAVVVQEDSRKDRLPLPLRDTKLLSPLRDTPPPQSLMVKITLDLLSRIPQPPGKGSRQRKAEDKQPPAGKKHSSEKRSSDSSSKLAKKRKGEAERDCDNKKIRLEKEIKSQSSSSSSSHKESSKTKPSRPSSQSSKKEMLPPPPVSSSSQKPAKPALKRSRREADTCGQDPPKSASSTKSNHKDSSIPKQRRVEGKGSRSSSEHKGSSGDTANPFPVPSLPNGNSKPGKPQVKFDKQQADLHMREAKKMKQKAELMTDRVGKAFKYLEAVLSFIECGIATESESQSSKSAYSVYSETVDLIKFIMSLKSFSDATAPTQEKIFAVLCMRCQSILNMAMFRCKKDIAIKYSRTLNKHFESSSKVAQAPSPCIASTGTPSPLSPMPSPASSVGSQSSAGSVGSSGVAATISTPVTIQNMTSSYVTITSHVLTAFDLWEQAEALTRKNKEFFARLSTNVCTLALNSSLVDLVHYTRQGFQQLQELTKTP

SEQ ID NO: 14728 - protein, 1311 aa, Homo Sapiens
MDLFDFFRDWDLEQQCHYEQDRSALKKREWERRNQEVQQEDDLFSSGFDLFGEPYKVAEYTNKGDALANRVQNTLGNYDEMKNLLTNHSNQNHLVGIPKNSVPQNPNNKNEPSFFPEQKNRIIPPHQDNTHPSAPMPPPSVVILNSTLIHSNRKSKPEWSRDSHNPSTVLASQASGQPNKMQTLTQDQSQAKLEDFFVYPAEQPQIGEVEESNPSAKEDSNPNSSGEDAFKEIFQSNSPEESEFAVQAPGSPLVASSLLAPSSGLSVQNFPPGLYCKTSMGQQKPTAYVRPMDGQDQAPDISPTLKPSIEFENSFGNLSFGTLLDGKPSAASSKTKLPKFTILQTSEVSLPSDPSCVEEILREMTHSWPTPLTSMHTAGHSEQSTFSIPGQESQHLTPGFTLQKWNDPTTRASTKSVSFKSMLEDDLKLSSDEDDLEPVKTLTTQCTATELYQAVEKAKPRNNPVNPPLATPQPPPAVQASGGSGSSSESESSSESDSDTESSTTDSESNEAPRVATPEPEPPSTNKWQLDKWLNKVTSQNKSFICGQNETPMETISLPPPIIQPMEVQMKVKTNASQVPAEPKERPLLSLIREKARPRPTQKIPETKALKHKLSTTSETVSQRTIGKKQPKKVEKNTSTDEFTWPKPNITSSTPKEKESVELHDPPRGRNKATAHKPAPRKEPRPNIPLAPEKKKYRGPGKIVPKSREFIETDSSTSDSNTDQEETLQIKVLPPCIISGGNTAKSKEICGASLTLSTLMSSSGSNNNLSISNEEPTFSPIPVMQTEILSPLRDHENLKNLWVKIDLDLLSRVPGHSSLHAAPAKPDHKETATKPKRQTAVTAVEKPAPKGKRKHKPIEVAEKIPEKKQRLEEATTICLLPPCISPAPPHKPPNTRENNSSRRANRRKEEKLFPPPLSPLPEDPPRRRNVSGNNGPFGQDKNIAMTGQITSTKPKRTEGKFCATFKGISVNEGDTPKKASSATITVTNTAIATATVTATAIVTTTVTATATATATTTTTTTTISTITSTITTGLMDSSHLEMTSWAALPLLSSSSTNVRRPKLTFDDSVHNADYYMQEAKKLKHKADALFEKFGKAVNYADAALSFTECGNAMERDPLEAKSPYTMYSETVELLRYAMRLKNFASPLASDGDKKLAVLCYRCLSLLYLRMFKLKKDHAMKYSRSLMEYFKQNASKVAQIPSPWVSNGKNTPSPVSLNNVSPINAMGNCNNGPVTIPQRIHHMAASHVNITSNVLRGYEHWDMADKLTRENKEFFGDLDTLMGPLTQHSSMTNLVRYVRQGLCWLRIDAHLL

SEQ ID NO: 14729 - protein, 1226 aa, Homo Sapiens
MDSFDLALLQEWDLESLCVYEPDRNALRRKERERRNQETQQDDGTFNSSYSLFSEPYKTNKGDELSNRIQNTLGNYDEMKDFLTDRSNQSHLVGVPKPGVPQTPVNKIDEHFVADSRAQNQPSSICSTTTSTPAAVPVQQSKRGTMGWQKAGHPPSDGQQRATQQGSLRTLLGDGVGRQQPRAKQVCNVEVGLQTQERPPAMAAKHSSSGHCVQNFPPSLASKPSLVQQKPTAYVRPMDGQDQAPDESPKLKSSSETSVHCTSYRGVPASKPEPARAKAKLSKFSIPKQGEESRSGETNSCVEEIIREMTWLPPLSAIQAPGKVEPTKFPFPNKDSQLVSSGHNNPKKGDAEPESPDSGTSNTSMLEDDLKLSSDEEENEQQAAQRTALRALSDSAVVQQPNCRTSVPSSKGSSSSSSSGSSSSSSDSESSSGSDSETESSSSESEGSKPPHFSSPEAEPASSNKWQLDKWLNKVNPHKPPILIQNESHGSESNQYYNPVKEDVQDCGKVPDVCQPSLREKEIKSTCKEEQRPRTANKAPGSKGVKQKSPPAAVAVAVSAAAPPPAVPCAPAENAPAPARRSAGKKPTRRTERTSAGDGANCHRPEEPAAADALGTSVVVPPEPTKTRPCGNNRASHRKELRSSVTCEKRRTRGLSRIVPKSKEFIETESSSSSSSSDSDLESEQEEYPLSKAQTVAASASSGNDQRLKEAAANGGSGPRAPVGSINARTTSDIAKELEEQFYTLVPFGRNELLSPLKDSDEIRSLWVKIDLTLLSRIPEHLPQEPGVLSAPATKDSESAPPSHTSDTPAEKALPKSKRKRKCDNEDDYREIKKSQGEKDSSSRLATSTSNTLSANHCNMNINSVAIPINKNEKMLRSPISPLSDASKHKYTSEDLTSSSRPNGNSLFTSASSSKKPKADSQLQPHGGDLTKAAHNNSENIPLHKSRPQTKPWSPGSNGHRDCKRQKLVFDDMPRSADYFMQEAKRMKHKADAMVEKFGKALNYAEAALSFIECGNAMEQGPMESKSPYTMYSETVELIRYAMRLKTHSGPNATPEDKQLAALCYRCLALLYWRMFRLKRDHAVKYSKALIDYFKNSSKAAQAPSPWGASGKSTGTPSPMSPNPSPASSVGSQGSLSNASALSPSTIVSIPQRIHQMAANHVSITNSILHSYDYWEMADNLAKENREFFNDLDLLMGPVTLHSSMEHLVQYSQQGLHWLRNSAHLS

SEQ ID NO: 14730 - protein, 1163 aa, Homo Sapiens
MNREDRNVLRMKERERRNQEIQQGEDAFPPSSPLFAEPYKVTSKEDKLSSRIQSMLGNYDEMKDFIGDRSIPKLVAIPKPTVPPSADEKSNPNFFEQRHGGSHQSSKWTPVGPAPSTSQSQKRSSGLQSGHSSQRTSAGSSSGTNSSGQRHDRESYNNSGSSSRKKGQHGSEHSKSRSSSPGKPQAVSSLNSSHSRSHGNDHHSKEHQRSKSPRDPDANWDSPSRVPFSSGQHSTQSFPPSLMSKSNSMLQKPTAYVRPMDGQESMEPKLSSEHYSSQSHGNSMTELKPSSKAHLTKLKIPSQPLDASASGDVSCVDEILKEMTHSWPPPLTAIHTPCKTEPSKFPFPTKESQQSNFGTGEQKRYNPSKTSNGHQSKSMLKDDLKLSSSEDSDGEQDCDKTMPRSTPGSNSEPSHHNSEGADNSRDDSSSHSGSESSSGSDSESESSSSDSEANEPSQSASPEPEPPPTNKWQLDNWLNKVNPHKVSPASSVDSNIPSSQGYKKEGREQGTGNSYTDTSGPKETSSATPGRDSKTIQKGSESGRGRQKSPAQSDSTTQRRTVGKKQPKKAEKAAAEEPRGGLKIESETPVDLASSMPSSRHKAATKGSRKPNIKKESKSSPRPTAEKKKYKSTSKSSQKSREIIETDTSSSDSDESESLPPSSQTPKYPESNRTPVKPSSVEEEDSFFRQRMFSPMEEKELLSPLSEPDDRYPLIVKIDLNLLTRIPGKPYKETEPPKGEKKNVPEKHTREAQKQASEKVSNKGKRKHKNEDDNRASESKKPKTEDKNSAGHKPSSNRESSKQSAAKEKDLLPSPAGPVPSKDPKTEHGSRKRTISQSSSLKSSSNSNKETSGSSKNSSSTSKQKKTEGKTSSSSKEVKEKAPSSSSNCPPSAPTLDSSKPRRTKLVFDDRNYSADHYLQEAKKLKHNADALSDRFEKAVYYLDAVVSFIECGNALEKNAQESKSPFPMYSETVDLIKYTMKLKNYLAPDATAADKRLTVLCLRCESLLYLRLFKLKKENALKYSKTLTEHLKNSYNNSQAPSPGLGSKAVGMPSPVSPKLSPGNSGNYSSGASSASASGSSVTIPQKIHQMAASYVQVTSNFLYATEIWDQAEQLSKEQKEFFAELDKVMGPLIFNASIMTDLVRYTRQGLHWLRQDAKLIS

SEQ ID NO: 14731 - protein, 2266 aa, Homo Sapiens
MRDLRAQVTSGLLPFPEVTLQALGEDEITLESVLRGKFAAGKNGLACLACGPQLEVVNSITGERLSAYRFSGVNEQPPVVLAVKEFSWQKRTGLLIGLEETEGSVLCLYDLGISKVVKAVVLPGRVTAIEPIINHGGASASTQHLHPSLRWLFGVAAVVTDVGQILLVDLCLDDLSCNQNEVEASDLEVLTGIPAEVPHIRESVMRQGRHLCFQLVSPTGTAVSTLSYISRTNQLAVGFSDGYLALWNMKSMKREYYIQLESGQVPVYAVTFQEPENDPRNCCYLWAVQSTQDSEGDVLSLHLLQLAFGNRKCLASGQILYEGLEYCEERYTLDLTGGMFPLRGQTSNTKLLGCQSIEKFRSHGDREEGVNEALSPDTSVSVFTWQVNIYGQGKPSVYLGLFDINRWYHAQMPDSLRSGEYLHNCSYFALWSLESVVSRTSPHGILDILVHERSLNRGVPPSYPPPEQFFNPSTYNFDATCLLNSGVVHLTCTGFQKETLTFLKKSGPSLNELIPDGYNRCLVAGLLSPRFVDVQPSSLSQEEQLEAILSAAIQTSSLGLLTGYIRRWITEEQPNSATNLRFVLEWTWNKVVLTKEEFDRLCVPLFDGSCHFMDPQTIQSIQQCYLLLSNLNIVLSCFASEAREITERGLIDLSNKFVVSHLICQYAQVVLWFSHSGLLPEGIDDSVQLSRLCYNYPVIQNYYTSRRQKFERLSRGKWNPDCLMIDGLVSQLGERIEKLWKRDEGGTGKYPPASLHAVLDMYLLDGVTEAAKHSITIYLLLDIMYSFPNKTDTPIESFPTVFAISWGQVKLIQGFWLIDHNDYESGLDLLFHPATAKPLSWQHSKIIQAFMSQGEHRQALRYIQTMKPTVSSGNDVILHLTVLLFNRCMVEAWNFLRQHCNRLNIEELLKHMYEVCQEMGLMEDLLKLPFTDTEQECLVKFLQSSASVQNHEFLLVHHLQRANYVPALKLNQTLKINVMNDRDPRLRERSLARNSILDQYGKILPRVHRKLAIERAKPYHLSTSSVFRLVSRPKPLSAVPKQVVTGTVLTRSVFINNVLSKIGEVWASKEPINSTTPFNSSKIEEPSPIVYSLPAPELPEAFFGTPISKASQKISRLLDLVVQPVPRPSQCSEFIQQSSMKSPLYLVSRSLPSSSQLKGSPQAISRASELHLLETPLVVKKAKSLAMSVTTSGFSEFTPQSILRSTLRSTPLASPSPSPGRSPQRLKETRISFVEEDVHPKWIPGAADDSKLEVFTTPKKCAVPVETEWLKSKDRTTSFFLNSPEKEHQEMDEGSQSLEKLDVSKGNSSVSITSDETTLEYQDAPSPEDLEETVFTASKPKSSSTALTTNVTEQTEKDGDKDVFASEVTPSDLQKQMGNLEDAETKDLLVAAEAFSELNHLSPVQGTEASLCAPSVYEGKIFTQKSKVPVLDEGLTSVETYTPAIRANDNKSMADVLGDGGNSSLTISEGPIVSERRLNQEVALNLKEDHEVEVGVLKESVDLPEEKLPISDSPPDTQEIHVIEQEKLEAQDSGEEARNLSFNELYPSGTLKLQYNFDTIDQQFCDLADNKDTAECDIAEVDGELFVAQSNFTLILEGEEGEVEPGDFASSDVLPKAANTATEEKLVCSGENDNHGQIANLPSAVTSDQKSQKVDTLPYVPEPIKVAIAENLLDVIKDTRSKEITSDTMEQSIHETIPLVSQNIMCPTKLVKSAFKTAQETSTMTMNVSQVDDVVSSKTRTRGQRIQNVNVKSAQQEASADVATPKMPGQSVRKKTRKAKEISEASENIYSDVRGLSQNQQIPQNSVTPRRGRRKKEVNQDILENTSSVEQELQITTGRESKRLKSSQLLEPAVEETTKKEVKVSSVTKRTPRRIKRSVENQESVEIINDLKVSTVTSPSRMIRKLRSTNLDASENTGNKQDDKSSDKQLRIKHVRRVRGREVSPSDVREDSNLESSQLTVQAEFDMSAIPRKRGRPRKINPSEDVGSKAVKEERSPKKKEAPSIRRRSTRNTPAKSENVDVGKPALGKSILVPNEELSMVMSSKKKLTKKTESQSQKRSLHSVSEERTDEMTHKETNEQEERLLATASFTKSSRSSRTRSSKAILLPDLSEPNNEPLFSPASEVPRKAKAKKIEVPAQLKELVSDLSSQFVISPPALRSRQKNTSNKNKLEDELKDDAQSVETLGKPKAKRIRTSKTKQASKNTEKESAWSPPPIEIRLISPLASPADGVKSKPRKTTEVTGTGLGRNRKKLSSYPKQILRRKML

SEQ ID NO: 14732 - protein, 848 aa, Homo Sapiens
MNSSSANITYASRKRRKPVQKTVKPIPAEGIKSNPSKRHRDRLNTELDRLASLLPFPQDVINKLDKLSVLRLSVSYLRAKSFFDVALKSSPTERNGGQDNCRAANFREGLNLQEGEFLLQALNGFVLVVTTDALVFYASSTIQDYLGFQQSDVIHQSVYELIHTEDRAEFQRQLHWALNPSQCTESGQGIEEATGLPQTVVCYNPDQIPPENSPLMERCFICRLRCLLDNSSGFLAMNFQGKLKYLHGQKKKGKDGSILPPQLALFAIATPLQPPSILEIRTKNFIFRTKHKLDFTPIGCDAKGRIVLGYTEAELCTRGSGYQFIHAADMLYCAESHIRMIKTGESGMIVFRLLTKNNRWTWVQSNARLLYKNGRPDYIIVTQRPLTDEEGTEHLRKRNTKLPFMFTTGEAVLYEATNPFPAIMDPLPLRTKNGTSGKDSATTSTLSKDSLNPSSLLAAMMQQDESIYLYPASSTSSTAPFENNFFNESMNECRNWQDNTAPMGNDTILKHEQIDQPQDVNSFAGGHPGLFQDSKNSDLYSIMKNLGIDFEDIRHMQNEKFFRNDFSGEVDFRDIDLTDEILTYVQDSLSKSPFIPSDYQQQQSLALNSSCMVQEHLHLEQQQQHHQKQVVVEPQQQLCQKMKHMQVNGMFENWNSNQFVPFNCPQQDPQQYNVFTDLHGISQEFPYKSEMDSMPYTQNFISCNQPVLPQHSKCTELDYPMGSFEPSPYPTTSSLEDFVTCLQLPENQKHGLNPQSAIITPQTCYAGAVSMYQCQPEPQHTHVGQMQYNPVLPGQQAFLNKFQNGVLNETYPAELNNINNTQTTTHLQPLHHPSEARPFPDLTSSGFL

SEQ ID NO: 14733 - protein, 701 aa, Homo Sapiens
MPRTMIPPGECTYAGRKRRRPLQKQRPAVGAEKSNPSKRHRDRLNAELDHLASLLPFPPDIISKLDKLSVLRLSVSYLRVKSFFQVVQEQSSRQPAAGAPSPGDSCPLAGSAVLEGRLLLESLNGFALVVSAEGTIFYASATIVDYLGFHQTDVMHQNIYDYIHVDDRQDFCRQLHWAMDPPQVVFGQPPPLETGDDAILGRLLRAQEWGTGTPTEYSAFLTRCFICRVRCLLDSTSGFLTMQFQGKLKFLFGQKKKAPSGAMLPPRLSLFCIAAPVLLPSAAEMKMRSALLRAKPRADTAATADAKVKATTSLCESELHGKPNYSAGRSSRESGVLVLREQTDAGRWAQVPARAPCLCLRGGPDLVLDPKGGSGDREEEQHRMLSRASGVTGRRETPGPTKPLPWTAGKHSEDGARPRLQPSKNDPPSLRPMPRGSCLPCPCVQGTFRNSPISHPPSPSPSAYSSRTSRPMRDVGEDQVHPPLCHFPQRSLQHQLPQPGAQRFATRGYPMEDMKLQGVPMPPGDLCGPTLLLDVSIKMEKDSGCEGAADGCVPSQVWLGASDRSHPATFPTRMHLKTEPDSRQQVYISHLGHGVRGAQPHGRATAGRSRELTPFHPAHCACLEPTDGLPQSEPPHQLCARGRGEQSCTCRAAEAAPVVKREPLDSPQWATHSQGMVPGMLPKSALATLVPPQASGCTFLP

SEQ ID NO: 14734 - protein, 545 aa, Homo Sapiens
MATDAALRRLLRLHRTEIAVAVDSAFPLLHALADHDVVPEDKFQETLHLKEKEGCPQAFHALLSWLLTQDSTAILDFWRVLFKDYNLERYGRLQPILDSFPKDVDLSQPRKGRKPPAVPKALVPPPRLPTKRKASEEARAAAPAALTPRGTASPGSQLKAKPPKKPESSAEQQRLPLGNGIQTMSASVQRAVAMSSGDVPGARGAVEGILIQQVFESGGSKKCIQVGGEFYTPSKFEDSGSGKNKARSSSGPKPLVRAKGAQGAAPGGGEARLGQQGSVPAPLALPSDPQLHQKNEDECAVCRDGGELICCDGCPRAFHLACLSPPLREIPSGTWRCSSCLQATVQEVQPRAEEPRPQEPPVETPLPPGLRSAGEEVRGPPGEPLAGMDTTLVYKHLPAPPSAAPLPGLDSSALHPLLCVGPEGQQNLAPGARCGVCGDGTDVLRCTHCAAAFHWRCHFPAGTSRPGTGLRCRSCSGDVTPAPVEGVLAPSPARLAPGPAKDDTASHEPALHRDDLESLLSEHTFDGILQWAIQSMARPAAPFPS

SEQ ID NO: 14735 - protein, 1439 aa, Homo Sapiens
MASSETEIRWAEPGLGKGPQRRRWAWAEDKRDVDRSSSQSWEEERLFPNATSPELLEDFRLAQQHLPPLEWDPHPQPDGHQDSESGETSGEEAEAEDVDSPASSHEPLAWLPQQGRQLDMTEEEPDGTLGSLEVEEAGESSSRLGYEAGLSLEGHGNTSPMALGHGQARGWVASGEQASGDKLSEHSEVNPSVELSPARSWSSGTVSLDHPSDSLDSTWEGETDGPQPTALAETLPEGPSHHLLSPDGRTGGSVARATPMEFQDSSAPPAQSPQHATDRWRRETTRFFCPQPKEHIWKQTKTSPKPLPSRFIGSISPLNPQPRPTRQGRPLPRQGATLAGRSSSNAPKYGRGQLNYPLPDFSKVGPRVRFPKDESYRPPKSRSHNRKPQAPARPLIFKSPAEIVQEVLLSSGEAALAKDTPPAHPITRVPQEFQTPEQATELVHQLQEDYHRLLTKYAEAENTIDQLRLGAKVNLFSDPPQPNHSIHTGMVPQGTKVLSFTIPQPRSAEWWPGPAEDPQASAASGWPSARGDLSPSSLTSMPTLGWLPENRDISEDQSSAEQTQALASQASQFLAKVESFERLIQAGRLMPQDQVKGFQRLKAAHAALEEEYLKACREQHPAQPLAGSKGTPGRFDPRRELEAEIYRLGSCLEELKEHIDQTQQEPEPPGSDSALDSTPALPCLHQPTHLPAPSGQAPMPAIKTSCPEPATTTAAASTGPCPLHVNVEVSSGNSEVEDRPQDPLARLRHKELQMEQVYHGLMERYLSVKSLPEAMRMEEEEEGEEEEEEEGGGDSLEVDGVAATPGKAEATRVLPRQCPVQAEKSHGAPLEEATEKMVSMKPPGFQASLARDGHMSGLGKAEAAPPGPGVPPHPPGTKSAASHQSSMTSLEGSGISERLPQKPLHRGGGPHLEETWMASPETDSGFVGSETSRVSPLTQTPEHRLSHISTAGTLAQPFAASVPRDGASYPKARGSLIPRRATEPSTPRSQAQRYLSSPSGPLRQRAPNFSLERTLAAEMAVPGSEFEGHKRISEQPLPNKTISPPPAPAPAAAPLPCGPTETIPSFLLTRAGRDQAICELQEEVSRLRLRLEDSLHQPLQGSPTRPASAFDRPARTRGRPADSPATWGSHYGSKSTERLPGEPRGEEQIVPPGRQRARSSSVPREVLRLSLSSESELPSLPLFSEKSKTTKDSPQAARDGKRGVGSAGWPDRVTFRGQYTGHEYHVLSPKAVPKGNGTVSCPHCRPIRTQDAGGAVTGDPLGPPPADTLQCPLCGQVGSPPEADGPGSATSGAEKATTRRKASSTPSPKQRSKQAGSSPRPPPGLWYLATAPPAPAPPAFAYISSVPIMPYPPAAVYYAPAGPTSAQPAAKWPPTASPPPARRHRHSIQLDLGDLEELNKALSRAVQAAESVRSTTRQMRSSLSADLRQAHSLRGSCLF

SEQ ID NO: 14736 - protein, 326 aa, Homo Sapiens
MEFLSEKFALKSPPSKNSDFYMGAGGPLEHVMETLDNESFYSKASAGKCVQAFGPLPRAEHHVRLERTSPCQDSSVNYGITKVEGQPLHTELNRAMDNCNSLRMSPVKGMQEKGELDELGDKCDSNVSSSKKRRHRTTFTSLQLEELEKVFQKTHYPDVYVREQLALRTELTEARVQVWFQNRRAKWRKRERYGQIQQAKSHFAATYDISVLPRTDSYPQIQNNLWAGNASGGSVVTSCMLPRDTSSCMTPYSHSPRTDSSYTGFSNHQNQFSHVPLNNFFTDSLLTGATNGHAFETKPEFERRSSSIAVLRMKAKEHTANISWAM

SEQ ID NO: 14737 - protein, 343 aa, Homo Sapiens
MDPEHCAPFRVGPAPGPYVASGDEPPGPQGTPAAAPHLHPAPPRGPRLTRFPACGPLEPYLPEPAKPPAKYLQDLGPGPALNGGHFYEGPAEAEEKTSKAASFPQLPLDCRGGPRDGPSNLQGSPGPCLASLHLPLSPGLPDSMELAKNKSKKRRNRTTFSTFQLEELEKVFQKTHYPDVYAREQLALRTDLTEARVQVWFQNRRAKWRKRERYGKIQEGRNPFTAAYDISVLPRTDSHPQLQNSLWASPGSGSPGGPCLVSPEGIPSPCMSPYSHPHGSVAGFMGVPAPSAAHPGIYSIHGFPPTLGGHSFEPSSDGDYKSPSLVSLRVKPKEPPGLLNWTT

SEQ ID NO: 14738 - protein, 411 aa, Homo Sapiens
MNAETCVSYCESPAAAMDAYYSPVSQSREGSSPFRAFPGGDKFGTTFLSAAAKAQGFGDAKSRARYGAGQQDLATPLESGAGARGSFNKFQPQPSTPQPQPPPQPQPQQQQPQPQPPAQPHLYLQRGACKTPPDGSLKLQEGSSGHSAALQVPCYAKESSLGEPELPPDSDTVGMDSSYLSVKEAGVKGPQDRASSDLPSPLEKADSESNKGKKRRNRTTFTSYQLEELEKVFQKTHYPDVYAREQLAMRTDLTEARVQVWFQNRRAKWRKRERFGQMQQVRTHFSTAYELPLLTRAENYAQIQNPSWLGNNGAASPVPACVVPCDPVPACMSPHAHPPGSGASSVTDFLSVSGAGSHVGQTHMGSLFGAASLSPGLNGYELNGEPDRKTSSIAALRMKAKEHSAAISWAT

SEQ ID NO: 14739 - protein, 726 aa, Homo Sapiens
MSPAPDAAPAPASISLFDLSADAPVFQGLSLVSHAPGEALARAPRTSCSGSGERESPERKLLQGPMDISEKLFCSTCDQTFQNHQEQREHYKLDWHRFNLKQRLKDKPLLSALDFEKQSSTGDLSSISGSEDSDSASEEDLQTLDRERATFEKLSRPPGFYPHRVLFQNAQGQFLYAYRCVLGPHQDPPEEAELLLQNLQSRGPRDCVVLMAAAGHFAGAIFQGREVVTHKTFHRYTVRAKRGTAQGLRDARGGPSHSAGANLRRYNEATLYKDVRDLLAGPSWAKALEEAGTILLRAPRSGRSLFFGGKGAPLQRGDPRLWDIPLATRRPTFQELQRVLHKLTTLHVYEEDPREAVRLHSPQTHWKTVREERKKPTEEEIRKICRDEKEALGQNEESPKQGSGSEGEDGFQVELELVELTVGTLDLCESEVLPKRRRRKRNKKEKSRDQEAGAHRTLLQQTQEEEPSTQSSQAVAAPLGPLLDEAKAPGQPELWNALLAACRAGDVGVLKLQLAPSPADPRVLSLLSAPLGSGGFTLLHAAAAAGRGSVVRLLLEAGADPTVQDSRARPPYTVAADKSTRNEFRRFMEKNPDAYDYNKAQVPGPLTPEMEARQATRKREQKAARRQREEQQQRQQEQEEREREEQRRFAALSDREKRALAAERRLAAQLGAPTSPIPDSAIVNTRRCWSCGASLQGLTPFHYLDFSFCSTRCLQDHRRQAGRPSS

SEQ ID NO: 14740 - protein, 807 aa, Homo Sapiens
MFSAGAESLLHQAREIQDEELKKFCSRICKLLQAEDLGPDTLDSLQRLFLIISATKYSRRLEKTCVDLLQATLGLPACPEQLQVLCAAILREMSPSDSLSLAWDHTQNSRQLSLVASVLLAQGDRNEEVRAVGQGVLRALESRQPEGPSLRHLLPVMAKVVVLSPGTLQEDQATLLSKRLVDWLRYASLQQGLPHSGGFFSTPRARQPGPVTEVDGAVATDFFTVLSSGHRFTDDQWLNVQAFSMLRAWLLHSGPEGPGTLDTDDRSEQEGSTLSVISATSSAGRLLPPRERLREVAFEYCQRLIEQSNRRALRKGDSDLQKACLVEAVLVLDVLCRQDPSFLYRSLSCLKALHGRVRGDPASVRVLLPLAHFFLSHGEAAAVDSEAVYQHLFTRIPVEQFHSPMLAFEFIQFCRDNLHLFSGHLSTLRLSFPNLFKFLAWNSPPLTSEFVALLPALVDAGTALEMLHALLDLPCLTAVLDLQLRSAPAASERPLWDTSLRAPSCLEAFRDPQFQGLFQYLLRPKASGATERLAPLHQLLQPMAGCARVAQCAQAVPTLLQAFFSAVTQVADGSLINQLALLLLGRSDSLYPAPGYAAGVHSVLSSQFLALCTLKPSLVVELARDLLEFLGSVNGLCSRASLVTSVVWAIGEYLSVTYDRRCTVEQINKFFEALEALLFEVTQCRPSAALPRCPPQVVTVLMTTLTKLASRSQDLIPRASLLLSKMRTLAHSPATSSTHSEEGAEAIRTRATELLTLLKMPSVAQFVLTPSTEVCSPRYHRDANTALPLALRTVSRLVEREAGLMPG

SEQ ID NO: 14741 - protein, 920 aa, Homo Sapiens
MEVQLGLGRVYPRPPSKTYRGAFQNLFQSVREVIQNPGPRHPEAASAAPPGASLLLLQQQQQQQQQQQQQQQQQQQQQQQETSPRQQQQQQGEDGSPQAHRRGPTGYLVLDEEQQPSQPQSALECHPERGCVPEPGAAVAASKGLPQQLPAPPDEDDSAAPSTLSLLGPTFPGLSSCSADLKDILSEASTMQLLQQQQQEAVSEGSSSGRAREASGAPTSSKDNYLGGTSTISDNAKELCKAVSVSMGLGVEALEHLSPGEQLRGDCMYAPLLGVPPAVRPTPCAPLAECKGSLLDDSAGKSTEDTAEYSPFKGGYTKGLEGESLGCSGSAAAGSSGTLELPSTLSLYKSGALDEAAAYQSRDYYNFPLALAGPPPPPPPPHPHARIKLENPLDYGSAWAAAAAQCRYGDLASLHGAGAAGPGSGSPSAAASSSWHTLFTAEEGQLYGPCGGGGGGGGGGGGGGGGGGGGGGGEAGAVAPYGYTRPPQGLAGQESDFTAPDVWYPGGMVSRVPYPSPTCVKSEMGPWMDSYSGPYGDMRLETARDHVLPIDYYFPPQKTCLICGDEASGCHYGALTCGSCKVFFKRAAEGKQKYLCASRNDCTIDKFRRKNCPSCRLRKCYEAGMTLGARKLKKLGNLKLQEEGEASSTTSPTEETTQKLTVSHIEGYECQPIFLNVLEAIEPGVVCAGHDNNQPDSFAALLSSLNELGERQLVHVVKWAKALPGFRNLHVDDQMAVIQYSWMGLMVFAMGWRSFTNVNSRMLYFAPDLVFNEYRMHKSRMYSQCVRMRHLSQEFGWLQITPQEFLCMKALLLFSIIPVDGLKNQKFFDELRMNYIKELDRIIACKRKNPTSCSRRFYQLTKLLDSVQPIARELHQFTFDLLIKSHMVSVDFPEMMAEIISVQVPKILSGKVKPIYFHTQ

SEQ ID NO: 14742 - protein, 315 aa, Homo Sapiens
MRNRMAPENPQPDPFINRNYSNMKVIPPQDPASPSFTLLSKLECSGTVSAYCSLNLPGSTDPPTSASRVAATTAIRRRHKERTSFTHQQYEELEALFSQTMFPDRNLQEKLALRLDLPESTVKVWFRNRRFKLKKQQQQQSAKQRNQILPSKKNVPTSPRTSPSPYAFSPVISDFYSSLPSQPLDPSNWAWNSTFTESSTSDFQMQDTQWERLVASVPALYSDAYDIFQIIELYNLPDENEISSSSFHCLYQYLSPTKYQVGGQGSSLSIFAGPAVGLSPAQTWPNMTSQAFEAYSLTDSLEFQKTSNMVDLGFL

SEQ ID NO: 14743 - protein, 1499 aa, Homo Sapiens
MMMARKQDVRIPTYNISVVGLSGTEKEKGQCGIGKSCLCNRFVRPSADEFHLDHTSVLSTSDFGGRVVNNDHFLYWGEVSRSLEDCVECKMHIVEQTEFIDDQTFQPHRSTALQPYIKRAAATKLASAEKLMYFCTDQLGLEQDFEQKQMPDGKLLVDGFLLGIDVSRGMNRNFDDQLKFVSNLYNQLAKTKKPIVVVLTKCDEGVERYIRDAHTFALSKKNLQVVETSARSNVNVDLAFSTLVQLIDKSRGKTKIIPYFEALKQQSQQIATAKDKYEWLVSRIVKNHNENWLSVSRKMQASPEYQDYVYLEGTQKAKKLFLQHIHRLKHEHIERRRKLYLAALPLAFEALIPNLDEIDHLSCIKAKKLLETKPEFLKWFVVLEETPWDATSHIDNMENERIPFDLMDTVPAEQLYEAHLEKLRNERKRVEMRRAFKENLETSPFITPGKPWEEARSFIMNEDFYQWLEESVYMDIYGKHQKQIIDKAKEEFQELLLEYSELFYELELDAKPSKEKMGVIQDVLGEEQRFKALQKLQAERDALILKHIHFVYHPTKETCPSCPACVDAKIEHLISSRFIRPSDRNQKNSLSDPNIDRINLVILGKDGLARELANEIRALCTNDDKYVIDGKMYELSLRPIEGNVRLPVNSFQTPTFQPHGCLCLYNSKESLSYVVESIEKSRESTLGRRDNHLVHLPLTLILVNKRGDTSGETLHSLIQQGQQIASKLQCVFLDPASAGIGYGRNINEKQISQVLKGLLDSKRNLNLVSSTASIKDLADVDLRIVMCLMCGDPFSADDILFPVLQSQTCKSSHCGSNNSVLLELPIGLHKKRIELSVLSYHSSFSIRKSRLVHGYIVFYSAKRKASLAMLRAFLCEVQDIIPIQLVALTDGAVDVLDNDLSREQLTEGEEIAQEIDGRFTSIPCSQPQHKLEIFHPFFKDVVEKKNIIEATHMYDNAAEACSTTEEVFNSPRAGSPLCNSNLQDSEEDIEPSYSLFREDTSLPSLSKDHSKLSMELEGNDGLSFIMSNFESKLNNKVPPPVKPKPPVHFEITKGDLSYLDQGHRDGQRKSVSSSPWLPQDGFDPSDYAEPMDAVVKPRNEEENIYSVPHDSTQGKIITIRNINKAQSNGSGNGSDSEMDTSSLERGRKVSIVSKPVLYRTRCTRLGRFASYRTSFSVGSDDELGPIRKKEEDQASQGYKGDNAVIPYETDEDPRRRNILRSLRRNTKKPKPKPRPSITKATWESNYFGVPLTTVVTPEKPIPIFIERCIEYIEATGLSTEGIYRVSGNKSEMESLQRQFDQDHNLDLAEKDFTVNTVAGAMKSFFSELPDPLVPYNMQIDLVEAHKINDREQKLHALKEVLKKFPKENHEVFKYVISHLNKVSHNNKVNLMTSENLSICFWPTLMRPDFSTMDALTATRTYQTIIELFIQQCPFFFYNRPITEPPGARPSSPSAVASTVPFLTSTPVTSQPSPPQSPPPTPQSPMQPLLPSQLQAEHTL

SEQ ID NO: 14744 - protein, 2285 aa, Homo Sapiens
MAAQVAPAAASSLGNPPPPPPSELKKAEQQQREEAGGEAAAAAAAERGEMKAAAGQESEGPAVGPPQPLGKELQDGAESNGGGGGGGAGSGGGPGAEPDLKNSNGNAGPRPALNNNLTEPPGGGGGGSSDGVGAPPHSAAAALPPPAYGFGQPYGRSPSAVAAAAAAVFHQQHGGQQSPGLAALQSGGGGGLEPYAGPQQNSHDHGFPNHQYNSYYPNRSAYPPPAPAYALSSPRGGTPGSGAAAAAGSKPPPSSSASASSSSSSFAQQRFGAMGGGGPSAAGGGTPQPTATPTLNQLLTSPSSARGYQGYPGGDYSGGPQDGGAGKGPADMASQCWGAAAAAAAAAAASGGAQQRSHHAPMSPGSSGGGGQPLARTPQPSSPMDQMGKMRPQPYGGTNPYSQQQGPPSGPQQGHGYPGQPYGSQTPQRYPMTMQGRAQSAMGGLSYTQQIPPYGQQGPSGYGQQGQTPYYNQQSPHPQQQQPPYSQQPPSQTPHAQPSYQQQPQSQPPQLQSSQPPYSQQPSQPPHQQSPAPYPSQQSTTQQHPQSQPPYSQPQAQSPYQQQQPQQPAPSTLSQQAAYPQPQSQQSQQTAYSQQRFPPPQELSQDSFGSQASSAPSMTSSKGGQEDMNLSLQSRPSSLPDLSGSIDDLPMGTEGALSPGVSTSGISSSQGEQSNPAQSPFSPHTSPHLPGIRGPSPSPVGSPASVAQSRSGPLSPAAVPGNQMPPRPPSGQSDSIMHPSMNQSSIAQDRGYMQRNPQMPQYSSPQPGSALSPRQPSGGQIHTGMGSYQQNSMGSYGPQGGQYGPQGGYPRQPNYNALPNANYPSAGMAGGINPMGAGGQMHGQPGIPPYGTLPPGRMSHASMGNRPYGPNMANMPPQVGSGMCPPPGGMNRKTQETAVAMHVAANSIQNRPPGYPNMNQGGMMGTGPPYGQGINSMAGMINPQGPPYSMGGTMANNSAGMAASPEMMGLGDVKLTPATKMNNKADGTPKTESKSKKSSSSTTTNEKITKLYELGGEPERKMWVDRYLAFTEEKAMGMTNLPAVGRKPLDLYRLYVSVKEIGGLTQVNKNKKWRELATNLNVGTSSSAASSLKKQYIQCLYAFECKIERGEDPPPDIFAAADSKKSQPKIQPPSPAGSGSMQGPQTPQSTSSSMAEGGDLKPPTPASTPHSQIPPLPGMSRSNSVGIQDAFNDGSDSTFQKRNSMTPNPGYQPSMNTSDMMGRMSYEPNKDPYGSMRKAPGSDPFMSSGQGPNGGMGDPYSRAAGPGLGNVAMGPRQHYPYGGPYDRVRTEPGIGPEGNMSTGAPQPNLMPSNPDSGMYSPSRYPPQQQQQQQQRHDSYGNQFSTQGTPSGSPFPSQQTTMYQQQQQNYKRPMDGTYGPPAKRHEGEMYSVPYSTGQGQPQQQQLPPAQPQPASQQQAAQPSPQQDVYNQYGNAYPATATAATERRPAGGPQNQFPFQFGRDRVSAPPGTNAQQNMPPQMMGGPIQASAEVAQQGTMWQGRNDMTYNYANRQSTGSAPQGPAYHGVNRTDEMLHTDQRANHEGSWPSHGTRQPPYGPSAPVPPMTRPPPSNYQPPPSMQNHIPQVSSPAPLPRPMENRTSPSKSPFLHSGMKMQKAGPPVPASHIAPAPVQPPMIRRDITFPPGSVEATQPVLKQRRRLTMKDIGTPEAWRVMMSLKSGLLAESTWALDTINILLYDDNSIMTFNLSQLPGLLELLVEYFRRCLIEIFGILKEYEVGDPGQRTLLDPGRFSKVSSPAPMEGGEEEEELLGPKLEEEEEEEVVENDEEIAFSGKDKPASENSEEKLISKFDKLPVKIVQKNDPFVVDCSDKLGRVQEFDSGLLHWRIGGGDTTEHIQTHFESKTELLPSRPHAPCPPAPRKHVTTAEGTPGTTDQEGPPPDGPPEKRITATMDDMLSTRSSTLTEDGAKSSEAIKESSKFPFGISPAQSHRNIKILEDEPHSKDETPLCTLLDWQDSLAKRCVCVSNTIRSLSFVPGNDFEMSKHPGLLLILGKLILLHHKHPERKQAPLTYEKEEEQDQGVSCNKVEWWWDCLEMLRENTLVTLANISGQLDLSPYPESICLPVLDGLLHWAVCPSAEAQDPFSTLGPNAVLSPQRLVLETLSKLSIQDNNVDLILATPPFSRLEKLYSTMVRFLSDRKNPVCREMAVVLLANLAQGDSLAARAIAVQKGSIGNLLGFLEDSLAATQFQQSQASLLHMQNPPFEPTSVDMMRRAARALLALAKVDENHSEFTLYESRLLDISVSPLMNSLVSQVICDVLFLIGQS

SEQ ID NO: 14745 - protein, 2236 aa, Homo Sapiens
MAHNAGAAAAAGTHSAKSGGSEAALKEGGSAAALSSSSSSSAAAAAASSSSSSGPGSAMETGLLPNHKLKTVGEAPAAPPHQQHHHHHHAHHHHHHAHHLHHHHALQQQLNQFQQQQQQQQQQQQQQQQQQHPISNNNSLGGAGGGAPQPGPDMEQPQHGGAKDSAAGGQADPPGPPLLSKPGDEDDAPPKMGEPAGGRYEHPGLGALGTQQPPVAVPGGGGGPAAVPEFNNYYGSAAPASGGPGGRAGPCFDQHGGQQSPGMGMMHSASAAAAGAPGSMDPLQNSHEGYPNSQCNHYPGYSRPGAGGGGGGGGGGGGGSGGGGGGGGAGAGGAGAGAVAAAAAAAAAAAGGGGGGGYGGSSAGYGVLSSPRQQGGGMMMGPGGGGAASLSKAAAGSAAGGFQRFAGQNQHPSGATPTLNQLLTSPSPMMRSYGGSYPEYSSPSAPPPPPSQPQSQAAAAGAAAGGQQAAAGMGLGKDMGAQYAAASPAWAAAQQRSHPAMSPGTPGPTMGRSQGSPMDPMVMKRPQLYGMGSNPHSQPQQSSPYPGGSYGPPGPQRYPIGIQGRTPGAMAGMQYPQQQMPPQYGQQGVSGYCQQGQQPYYSQQPQPPHLPPQAQYLPSQSQQRYQPQQDMSQEGYGTRSQPPLAPGKPNHEDLNLIQQERPSSLPDLSGSIDDLPTGTEATLSSAVSASGSTSSQGDQSNPAQSPFSPHASPHLSSIPGGPSPSPVGSPVGSNQSRSGPISPASIPGSQMPPQPPGSQSESSSHPALSQSPMPQERGFMAGTQRNPQMAQYGPQQTGPSMSPHPSPGGQMHAGISSFQQSNSSGTYGPQMSQYGPQGNYSRPPAYSGVPSASYSGPGPGMGISANNQMHGQGPSQPCGAVPLGRMPSAGMQNRPFPGNMSSMTPSSPGMSQQGGPGMGPPMPTVNRKAQEAAAAVMQAAANSAQSRQGSFPGMNQSGLMASSSPYSQPMNNSSSLMNTQAPPYSMAPAMVNSSAASVGLADMMSPGESKLPLPLKADGKEEGTPQPESKSKKSSSSTTTGEKITKVYELGNEPERKLWVDRYLTFMEERGSPVSSLPAVGKKPLDLFRLYVCVKEIGGLAQVNKNKKWRELATNLNVGTSSSAASSLKKQYIQYLFAFECKIERGEEPPPEVFSTGDTKKQPKLQPPSPANSGSLQGPQTPQSTGSNSMAEVPGDLKPPTPASTPHGQMTPMQGGRSSTISVHDPFSDVSDSSFPKRNSMTPNAPYQQGMSMPDVMGRMPYEPNKDPFGGMRKVPGSSEPFMTQGQMPNSSMQDMYNQSPSGAMSNLGMGQRQQFPYGASYDRRHEPYGQQYPGQGPPSGQPPYGGHQPGLYPQQPNYKRHMDGMYGPPAKRHEGDMYNMQYSSQQQEMYNQYGGSYSGPDRRPIQGQYPYPYSRERMQGPGQIQTHGIPPQMMGGPLQSSSSEGPQQNMWAARNDMPYPYQNRQGPGGPTQAPPYPGMNRTDDMMVPDQRINHESQWPSHVSQRQPYMSSSASMQPITRPPQPSYQTPPSLPNHISRAPSPASFQRSLENRMSPSKSPFLPSMKMQKVMPTVPTSQVTGPPPQPPPIRREITFPPGSVEASQPVLKQRRKITSKDIVTPEAWRVMMSLKSGLLAESTWALDTINILLYDDSTVATFNLSQLSGFLELLVEYFRKCLIDIFGILMEYEVGDPSQKALDHNAARKDDSQSLADDSGKEEEDAECIDDDEEDEEDEEEDSEKTESDEKSSIALTAPDAAADPKEKPKQASKFDKLPIKIVKKNNLFVVDRSDKLGRVQEFNSGLLHWQLGGGDTTEHIQTHFESKMEIPPRRRPPPPLSSAGRKKEQEGKGDSEEQQEKSIIATIDDVLSARPGALPEDANPGPQTESSKFPFGIQQAKSHRNIKLLEDEPRSRDETPLCTIAHWQDSLAKRCICVSNIVRSLSFVPGNDAEMSKHPGLVLILGKLILLHHEHPERKRAPQTYEKEEDEDKGVACSKDEWWWDCLEVLRDNTLVTLANISGQLDLSAYTESICLPILDGLLHWMVCPSAEAQDPFPTVGPNSVLSPQRLVLETLCKLSIQDNNVDLILATPPFSRQEKFYATLVRYVGDRKNPVCREMSMALLSNLAQGDALAARAIAVQKGSIGNLISFLEDGVTMAQYQQSQHNLMHMQPPPLEPPSVDMMCRAAKALLAMARVDENRSEFLLHEGRLLDISISAVLNSLVASVICDVLFQIGQL

SEQ ID NO: 14746 - protein, 1835 aa, Homo Sapiens
MANSTGKAPPDERRKGLAFLDELRQFHHSRGSPFKKIPAVGGKELDLHGLYTRVTTLGGFAKVSEKNQWGEIVEEFNFPRSCSNAAFALKQYYLRYLEKYEKVHHFGEDDDEVPPGNPKPQLPIGAIPSSYNYQQHSVSDYLRQSYGLSMDFNSPNDYNKLVLSLLSGLPNEVDFAINVCTLLSNESKHVMQLEKDPKIITLLLANAGVFDDTLGSFSTVFGEEWKEKTDRDFVKFWKDIVDDNEVRDLISDRNKSHEGTSGEWIWESLFHPPRKLGINDIEGQRVLQIAVILRNLSFEEGNVKLLAANRTCLRFLLLSAHSHFISLRQLGLDTLGNIAAELLLDPVDFKTTHLMFHTVTKCLMSRDRFLKMRGMEILGNLCKAEDNGVLICEYVDQDSYREIICHLTLPDVLLVISTLEVLYMLTEMGDVACTKIAKVEKSIDMLVCLVSMDIQMFGPDALAAVKLIEHPSSSHQMLSEIRPQAIEQVQTQTHVASAPASRAVVAQHVAPPPGIVEIDSEKFACQWLNAHFEVNPDCSVSRAEMYSEYLSTCSKLARGGILTSTGFYKCLRTVFPNHTVKRVEDSSSNGQAHIHVVGVKRRAIPLPIQMYYQQQPVSTSVVRVDSVPDVSPAPSPAGIPHGSQTIGNHFQRTPVANQSSNLTATQMSFPVQGVHTVAQTVSRIPQNPSPHTHQQQNAPVTVIQSKAPIPCEVVKATVIQNSIPQTGVPVSIAVGGGPPQSSVVQNHSTGPQPVTVVNSQTLLHHPSVIPQQSPLHTVVPGQIPSGTPVTVIQQAVPQSHMFGRVQNIPACTSTVSQGQQLITTSPQPVQTSSQQTSAGSQSQDTVIIAPPQYVTTSASNIVSATSVQNFQVATGQMVTIAGVPSPQASRVGFQNIAPKPLPSQQVSSTVVQQPIQQPQQPTQQSVVIVSQPAQQGQTYAPAIHQIVLANPAALPAGQTVQLTGQPNITPSSSPSPVPATNNQVPTAMSSSSTPQSQGPPPTVSQMLSVKRQQQQQHSPAPPPQQVQVQVQQPQQVQMQVQPQQSNAGVGQPASGESSLIKQLLLPKRGPSTPGGKLILPAPQIPPPNNARAPSPQVVYQVASNQAAGFGVQGQTPAQQLLVGQQNVQLVPSAMPPSGGVQTVPISNLQILPGPLISNSPATIFQGTSGNQVTITVVPNTSFAPATVSQGNATQLIAPAGITMSGTQTGVGLPVQTLPATQASPAGQSSCTTATPPFKGDKIICQKEEEAKEATGLHVHERKIEVMENPSCRRGATNTSNGDTKENEMHVGSLLNGRKYSDSSLPPSNSGKIQSETNQCSLISNGPSLELGENGASGKQNSEQIDMQDIKSDLRKPLVNGICDFDKGDGSHLSKNIPNHKTSNHVGNGEISPMEPQGTLDITQQDTAKGDQLERISNGPVLTLGGSSVSSIQEASNAATQQFSGTDLLNGPLASSLNSDVPQQRPSVVVSPHSTTSVIQGHQIIAVPDSGSKVSHSPALSSDVRSTNGTAECKTVKRPAEDTDRETVAGIPNKVGVRIVTISDPNNAGCSATMVAVPAGADPSTVAKVAIESAVQQKQQHPPTYVQNVVPQNTPMPPSPAVQVQGQPNSSQPSPFSGSSQPGDPMRKPGQNFMCLWQSCKKWFQTPSQVFYHAATEHGGKDVYPGQCLWEGCEPFQRQRFSFITHLQDKHCSKDALLAGLKQDEPGQAGSQKSSTKQPTVGGTSSTPRAQKAIVNHPSAALMALRRGSRNLVFRDFTDEKEGPITKHIRLTAALILKNIGKYSECGRRLLKRHENNLSVLAISNMEASSTLAKCLYELNFTVQSKEQEKDSEMLQ

SEQ ID NO: 14747 - protein, 593 aa, Homo Sapiens
MKLQAVMETLLQRQQRARQELEARQQLPPDPPAAPPGRARAAPDEDREPESARMQRAQMAALAAMRAAAAGLGHPASPGGSEDGPPGSEEEDAAREGTPGSPGRGREGPGEEHFEDMASDEDMKPKWEEEEMEEDLGEDEEEEEEDYEDEEEEEDEEGLGPPGPASLGTTALFPRKAQPPQAFRGDGVPRVLGGQERPGPGPAHPGGAAHVAPQLQPPDHGDWTYEEQFKQLYELDGDPKRKEFLDDLFSFMQKRGTPVNRIPIMAKQVLDLFMLYVLVTEKGGLVEVINKKLWREITKGLNLPTSITSAAFTLRTQYMKYLYPYECEKRGLSNPNELQAAIDSNRREGRRQSFGGSLFAYSPGGAHGMLSSPKLPVSSLGLAASTNGSSITPAPKIKKEEDSAIPITVPGRLPVSLAGHPVVAAQAAAVQAAAAQAAVAAQAAALEQLREKLESAEPPEKKMALVADEQQRLMQRALQQNFLAMAAQLPMSIRINSQASESRQDSAVNLTGTNGSNSISMSVEINGIMYTGVLFAQPPAPTPTSAPNKGGGGGGGSSSNAGGRGGNTGTSGGQAGPAGLSTPSTSTSNNSLP

SEQ ID NO: 14748 - protein, 561 aa, Homo Sapiens
MEPLQQQQQQQQQQQKQPHLAPLQMDAREKQGQQMREAQFLYAQKLVTQPTLLSATAGRPSGSTPLGPLARVPPTAAVAQVFERGNMNSEPEEEDGGLEDEDGDDEVAEVAEKETQAASKYFHVQKVARQDPRVAPMSNLLPAPGLPPHGQQAKEDHTKDASKASPSVSTAGQPNWNLDEQLKQNGGLAWSDDADGGRGREISRDFAKLYELDGDPERKEFLDDLFVFMQKRGTPINRIPIMAKQILDLYMLYKLVTEKGGLVEIINKKIWREITKGLNLPTSITSAAFTLRTQYMKYLYAYECEKKALSSPAELQAAIDGNRREGRRPSYSSSLFGYSPAAATAAAAAGAPALLSPPKIRFPILGLGSSSGTNTSSPRISPATTLRKGDGAPVTTVPVPNRLAVPVTLASQQAGTRTAALEQLRERLESGEPAEKKASRLSEEEQRLVQQAFQRNFFSMARQLPMKIRINGRAEDRAEASAAALNLTTSSIGSINMSVDIDGTTYAGVLFAQKPVVHLITGSAPQSLGSSASSSSSSHCSPSPTSSRGTPSAEPSTSWSL

SEQ ID NO: 14749 - protein, 412 aa, Homo Sapiens
MEALQKQQAARLAQGVGPLAPACPLLPPQPPLPDHRTLQAPEGALGNVGAEEEEDAEEDEEKREEAGAEEEAAEESRPGAQGPSSPSSQPPGLHPHEWTYEEQFKQLYELDADPKRKEFLDDLFSFMQKRGTPVNRVPIMAKQVLDLYALFRLVTAKGGLVEVINRKVWREVTRGLSLPTTITSAAFTLRTQYMKYLYPYECETRALSSPGELQAAIDSNRREGRRQAYTATPLFGLAGPPPRGAQDPALGPGPAPPATQSSPGPAQGSTSGLPAHACAQLSPSPIKKEESGIPNPCLALPVGLALGPTREKLAPEEPPEKRAVLMGPMDPPRPCMPPSFLPRGKVPLREERLDGPLNLAGSGISSINMALEINGVVYTGVLFARRQPVPASQGPTNPAPPPSTGPPSSILP

SEQ ID NO: 14750 - protein, 1257 aa, Homo Sapiens
MKAADEPAYLTVGTDVSAKYRGAFCEAKIKTVKRLVKVKVLLKQDNTTQLVQDDQVKGPLRVGAIVETRTSDGSFQEAIISKLTDASWYTVVFDDGDERTLRRTSLCLKGERHFAESETLDQLPLTNPEHFGTPVIAKKTNRGRRSSLPVTEDEKEEESSEEEDEDKRRLNDELLGKVVSVVSATERTEWYPALVISPSCNDDITVKKDQCLVRSFIDSKFYSIARKDIKEVDILNLPESELSTKPGLQKASIFLKTRVVPDNWKMDISEILESSSSDDEDGPAEENDEEKEKEAKKTEEEVPEEELDPEERDNFLQQLYKFMEDRGTPINKPPVLGYKDLNLFKLFRLVYHQGGCDNIDSGAVWKQIYMDLGIPILNSAASYNVKTAYRKYLYGFEEYCRSANIQFRTVHHHEPKVKEEKKDLEESMEEALKLDQEMPLTEVKSEPEENIDSNSESEREEIELKSPRGRRRIARDVNSIKKEIEEEKTEDKLKDNDTENKDVDDDYETAEKKENELLLGRKNTPKQKEKKIKKQEDSDKDSDEEEEKSQEREETESKCDSEGEEDEEDMEPCLTGTKVKVKYGRGKTQKIYEASIKSTEIDDGEVLYLVHYYGWNVRYDEWVKADRIIWPLDKGGPKKKQKKKAKNKEDSEKDEKRDEERQKSKRGRPPLKSTLSSNMPYGLSKTANSEGKSDSCSSDSETEDALEKNLINEELSLKDELEKNENLNDDKLDEENPKISAHILKENDRTQMQPLETLKLEVGENEQIVQIFGNKMEKTEEVKKEAEKSPKGKGRRSKTKDLSLEIIKISSFGQNEAGSEPHIEAHSLELSSLDNKNFSSATEDEIDQCVKEKKLKRKILGQSSPEKKIRIENGMEMTNTVSQERTSDCIGSEGMKNLNFEQHFERENEGMPSLIAESNQCIQQLTSERFDSPAEETVNIPLKEDEDAMPLIGPETLVCHEVDLDDLDEKDKTSIEDVAVESSESNSLVSIPPALPPVVQHNFSVASPLTLSQDESRSVKSESDITIEVDSIAEESQEGLCERESANGFETNVASGTCSIIVQERESREKGQKRPSDGNSGLMAKKQKRTPKRTSAAAKNEKNGTGQSSDSEDLPVLDNSSKCTPVKHLNVSKPQKLARSPARISPHIKDGEKDKHREKHPNSSPRTYKWSFQLNELDNMNSTERISFLQEKLQEIRKYYMSLKSEVATIDRRRKRLKKKDREVSHAGASMSSASSDTGMSPSSSSPPQNVLAVECR

SEQ ID NO: 14751 - protein, 1312 aa, Homo Sapiens
MKALDEPPYLTVGTDVSAKYRGAFCEAKIKTAKRLVKVKVTFRHDSSTVEVQDDHIKGPLKVGAIVEVKNLDGAYQEAVINKLTDASWYTVVFDDGDEKTLRRSSLCLKGERHFAESETLDQLPLTNPEHFGTPVIGKKTNRGRRSNHIPEEESSSSSSDEDEDDRKQIDELLGKVVCVDYISLDKKKALWFPALVVCPDCSDEIAVKKDNILVRSFKDGKFTSVPRKDVHEITSDTAPKPDAVLKQAFEQALEFHKSRTIPANWKTELKEDSSSSEAEEEEEEEDDEKEKEDNSSEEEEEIEPFPEERENFLQQLYKFMEDRGTPINKRPVLGYRNLNLFKLFRLVHKLGGFDNIESGAVWKQVYQDLGIPVLNSAAGYNVKCAYKKYLYGFEEYCRSANIEFQMALPEKVVNKQCKECENVKEIKVKEENETEIKEIKMEEERNIIPREEKPIEDEIERKENIKPSLGSKKNLLESIPTHSDQEKEVNIKKPEDNENLDDKDDDTTRVDESLNIKVEAEEEKAKSGDETNKEEDEDDEEAEEEEEEEEEEEDEDDDDNNEEEEFECYPPGMKVQVRYGRGKNQKMYEASIKDSDVEGGEVLYLVHYCGWNVRYDEWIKADKIVRPADKNVPKIKHRKKIKNKLDKEKDKDEKYSPKNCKLRRLSKPPFQTNPSPEMVSKLDLTDAKNSDTAHIKSIEITSILNGLQASESSAEDSEQEDERGAQDMDNNGKEESKIDHLTNNRNDLISKEEQNSSSLLEENKVHADLVISKPVSKSPERLRKDIEVLSEDTDYEEDEVTKKRKDVKKDTTDKSSKPQIKRGKRRYCNTEECLKTGSPGKKEEKAKNKESLCMENSSNSSSDEDEEETKAKMTPTKKYNGLEEKRKSLRTTGFYSGFSEVAEKRIKLLNNSDERLQNSRAKDRKDVWSSIQGQWPKKTLKELFSDSDTEAAASPPHPAPEEGVAEESLQTVAEEESCSPSVELEKPPPVNVDSKPIEEKTVEVNDRKAEFPSSGSNSVLNTPPTTPESPSSVTVTEGSRQQSSVTVSEPLAPNQEEVRSIKSETDSTIEVDSVAGELQDLQSEGNSSPAGFDASVSSSSSNQPEPEHPEKACTGQKRVKDAQGGGSSSKKQKRSHKATVVNNKKKGKGTNSSDSEELSAGESITKSQPVKSVSTGMKSHSTKSPARTQSPGKCGKNGDKDPDLKEPSNRLPKVYKWSFQMSDLENMTSAERITILQEKLQEIRKHYLSLKSEVASIDRRRKRLKKKERESAATSSSSSSPSSSSITAAVMLTLAEPSMSSASQNGMSVECR

SEQ ID NO: 14752 - protein, 594 aa, Homo Sapiens
MAAPVKGNRKQSTEGDALDPPASPKPAGKQNGIQNPISLEDSPEAGGEREEEQEREEEQAFLVSLYKFMKERHTPIERVPHLGFKQINLWKIYKAVEKLGAYELVTGRRLWKNVYDELGGSPGSTSAATCTRRHYERLVLPYVRHLKGEDDKPLPTSKPRKQYKMAKENRGDDGATERPKKAKEERRMDQMMPGKTKADAADPAPLPSQEPPRNSTEQQGLASGSSVSFVGASGCPEAYKRLLSSFYCKGTHGIMSPLAKKKLLAQVSKVEALQCQEEGCRHGAEPQASPAVHLPESPQSPKGLTENSRHRLTPQEGLQAPGGSLREEAQAGPCPAAPIFKGCFYTHPTEVLKPVSQHPRDFFSRLKDGVLLGPPGKEGLSVKEPQLVWGGDANRPSAFHKGGSRKGILYPKPKACWVSPMAKVPAESPTLPPTFPSSPGLGSKRSLEEEGAAHSGKRLRAVSPFLKEADAKKCGAKPAGSGLVSCLLGPALGPVPPEAYRGTMLHCPLNFTGTPGPLKGQAALPFSPLVIPAFPAHFLATAGPSPMAAGLMHFPPTSFDSALRHRLCPASSAWHAPPVTTYAAPHFFHLNTKL

SEQ ID NO: 14753 - protein, 1188 aa, Homo Sapiens
MEPNSLQWVGSPCGLHGPYIFYKAFQFHLEGKPRILSLGDFFFVRCTPKDPICIAELQLLWEERTSRQLLSSSKLYFLPEDTPQGRNSDHGEDEVIAVSEKVIVKLEDLVKWVHSDFSKWRCGFHAGPVKTEALGRNGQKEALLKYRQSTLNSGLNFKDVLKEKADLGEDEEETNVIVLSYPQYCRYRSMLKRIQDKPSSILTDQFALALGGIAVVSRNPQILYCRDTFDHPTLIENESICDEFAPNLKGRPRKKKPCPQRRDSFSGVKDSNNNSDGKAVAKVKCEARSALTKPKNNHNCKKVSNEEKPKVAIGEECRADEQAFLVALYKYMKERKTPIERIPYLGFKQINLWTMFQAAQKLGGYETITARRQWKHIYDELGGNPGSTSAATCTRRHYERLILPYERFIKGEEDKPLPPIKPRKQENSSQENENKTKVSGTKRIKHEIPKSKKEKENAPKPQDAAEVSSEQEKEQETLISQKSIPEPLPAADMKKKIEGYQEFSAKPLASRVDPEKDNETDQGSNSEKVAEEAGEKGPTPPLPSAPLAPEKDSALVPGASKQPLTSPSALVDSKQESKLCCFTESPESEPQEASFPSFPTTQPPLANQNETEDDKLPAMADYIANCTVKVDQLGSDDIHNALKQTPKVLVVQSFDMFKDKDLTGPMNENHGLNYTPLLYSRGNPGIMSPLAKKKLLSQVSGASLSSSYPYGSPPPLISKKKLIARDDLCSSLSQTHHGQSTDHMAVSRPSVIQHVQSFRSKPSEERKTINDIFKHEKLSRSDPHRCSFSKHHLNPLADSYVLKQEIQEGKDKLLEKRALPHSHMPSFLADFYSSPHLHSLYRHTEHHLHNEQTSKYPSRDMYRESENSSFPSHRHQEKLHVNYLTSLHLQDKKSAAAEAPTDDQPTDLSLPKNPHKPTGKVLGLAHSTTGPQESKGISQFQVLGSQSRDCHPKACRVSPMTMSGPKKYPESLSRSGKPHHVRLENFRKMEGMVHPILHRKMSPQNIGAARPIKRSLEDLDLVIAGKKARAVSPLDPSKEVSGKEKASEQESEGSKAAHGGHSGGGSEGHKLPLSSPIFPGLYSGSLCNSGLNSRLPAGYSHSLQYLKNQTVLSPLMQPLAFHSLVMQRGIFTSPTNSQQLYRHLAAATPVGSSYGDLLHNSIYPLAAINPQAAFPSSQLSSVHPSTKL

SEQ ID NO: 14754 - protein, 789 aa, Homo Sapiens
MAATTANPEMTSDVPSLGPAIASGNSGPGIQGGGAIVQRAIKRRPGLDFDDDGEGNSKFLRCDDDQMSNDKERFARSDDEQSSADKERLARENHSEIERRRRNKMTAYITELSDMVPTCSALARKPDKLTILRMAVSHMKSLRGTGNTSTDGSYKPSFLTDQELKHLILEAADGFLFIVSCETGRVVYVSDSVTPVLNQPQSEWFGSTLYDQVHPDDVDKLREQLSTSENALTGRILDLKTGTVKKEGQQSSMRMCMGSRRSFICRMRCGSSSVDPVSVNRLSFVRNRCRNGLGSVKDGEPHFVVVHCTGYIKAWPPAGVSLPDDDPEAGQGSKFCLVAIGRLQVTSSPNCTDMSNVCQPTEFISRHNIEGIFTFVDHRCVATVGYQPQELLGKNIVEFCHPEDQQLLRDSFQQVVKLKGQVLSVMFRFRSKNQEWLWMRTSSFTFQNPYSDEIEYIICTNTNVKNSSQEPRPTLSNTIQRPQLGPTANLPLEMGSGQLAPRQQQQQTELDMVPGRDGLASYNHSQVVQPVTTTGPEHSKPLEKSDGLFAQDRDPRFSEIYHNINADQSKGISSSTVPATQQLFSQGNTFPPTPRPAENFRNSGLAPPVTIVQPSASAGQMLAQISRHSNPTQGATPTWTPTTRSGFSAQQVATQATAKTRTSQFGVGSFQTPSSFSSMSLPGAPTASPGAAAYPSLTNRGSNFAPETGQTAGQFQTRTAEGVGVWPQWQGQQPHHRSSSSEQHVQQPPAQQPGQPEVFQEMLSMLGDQSNSYNNEEFPDLTMFPPFSE

SEQ ID NO: 14755 - protein, 717 aa, Homo Sapiens
MATPAAVNPPEMASDIPGSVTLPVAPMAATGQVRMAGAMPARGGKRRSGMDFDDEDGEGPSKFSRENHSEIERRRRNKMTQYITELSDMVPTCSALARKPDKLTILRMAVSHMKSMRGTGNKSTDGAYKPSFLTEQELKHLILEAADGFLFVVAAETGRVIYVSDSVTPVLNQPQSEWFGSTLYEQVHPDDVEKLREQLCTSENSMTGRILDLKTGTVKKEGQQSSMRMCMGSRRSFICRMRCGNAPLDHLPLNRITTMRKRFRNGLGPVKEGEAQYAVVHCTGYIKAWPPAGMTIPEEDADVGQGSKYCLVAIGRLQVTSSPVCMDMNGMSVPTEFLSRHNSDGIITFVDPRCISVIGYQPQDLLGKDILEFCHPEDQSHLRESFQQVVKLKGQVLSVMYRFRTKNREWMLIRTSSFTFQNPYSDEIEYIICTNTNVKQLQQQQAELEVHQRDGLSSYDLSQVPVPNLPAGVHEAGKSVEKADAIFSQERDPRFAEMFAGISASEKKMMSSASAAGTQQIYSQGSPFPSGHSGKAFSSSVVHVPGVNDIQSSSSTGQNMSQISRQLNQSQVAWTGSRPPFPGQQIPSQSSKTQSSPFGIGTSHTYPADPSSYSPLSSPATSSPSGNAYSSLANRTPGFAESGQSSGQFQGRPSEVWSQWQSQHHGQQSGEQHSHQQPGQTEVFQDMLPMPGDPTQGTGNYNIEDFADLGMFPPFSE

SEQ ID NO: 14756 - protein, 626 aa, Homo Sapiens; identical to SEQ ID NO: 1081

SEQ ID NO: 14757 - protein, 636 aa, Homo Sapiens
MAAEEEAAAGGKVLREENQCIAPVVSSRVSPGTRPTAMGSFSSHMTEFPRKRKGSDSDPSQSGIMTEKVVEKLSQNPLTYLLSTRIEISASSGSRVEDGEHQVKMKAFREAHSQTEKRRRDKMNNLIEELSAMIPQCNPMARKLDKLTVLRMAVQHLRSLKGLTNSYVGSNYRPSFLQDNELRHLILKTAEGFLFVVGCERGKILFVSKSVSKILNYDQASLTGQSLFDFLHPKDVAKVKEQLSSFDISPREKLIDAKTGLQVHSNLHAGRTRVYSGSRRSFFCRIKSCKISVKEEHGCLPNSKKKEHRKFYTIHCTGYLRSWPPNIVGMEEERNSKKDNSNFTCLVAIGRLQPYIVPQNSGEINVKPTEFITRFAVNGKFVYVDQRATAILGYLPQELLGTSCYEYFHQDDHNNLTDKHKAVLQSKEKILTDSYKFRAKDGSFVTLKSQWFSFTNPWTKELEYIVSVNTLVLGHSEPGEASFLPCSSQSSEESSRQSCMSVPGMSTGTVLGAGSIGTDIANEILDLQRLQSSSYLDDSSPTGLMKDTHTVNCRSMSNKELFPPSPSEMGELEATRQNQSTVAVHSHEPLLSDGAQLDFDALCDNDDTAMAAFMNYLEAEGGLGDPGDFSDIQWTL

SEQ ID NO: 14758 - protein, 562 aa, Homo Sapiens
MSNQYQEEGCSERPECKSKSPTLLSSYCIDSILGRRSPCKMRLLGAAQSLPAPLTSRADPEKAVQGSPKSSSAPFEAELHLPPKLRRLYGPGGGRLLQGAAAAAAAAAAAAAAAATATAGPRGEAPPPPPPTARPGERPDGAGAAAAAAAAAAAAWDTLKISQAPQVSISRSKSYRENGAPFVPPPPALDELGGPGGVTHPEERLGVAGGPGSAPAAGGGTGTEDDEEELLEDEEDEDEEEELLEDDEEELLEDDARALLKEPRRCPVAATGAVAAAAAAAVATEGGELSPKEELLLHPEDAEGKDGEDSVCLSAGSDSEEGLLKRKQRRYRTTFTSYQLEELERAFQKTHYPDVFTREELAMRLDLTEARVQVWFQNRRAKWRKREKAGAQTHPPGLPFPGPLSATHPLSPYLDASPFPPHHPALDSAWTAAAAAAAAAFPSLPPPPGSASLPPSGAPLGLSTFLGAAVFRHPAFISPAFGRLFSTMAPLTSASTAAALLRQPTPAVEGAVASGALADPATAAADRRASSIAALRLKAKEHAAQLTQLNILPGTSTGKEVC

SEQ ID NO: 14759 - protein, 236 aa, Homo Sapiens; identical to SEQ ID NO: 1202

SEQ ID NO: 14760 - protein, 193 aa, Homo Sapiens
MDGGTLPRSAPPAPPVPVGCAARRRPASPELLRCSRRRRPATAETGGGAAAVARRNERERNRVKLVNLGFQALRQHVPHGGASKKLSKVETLRSAVEYIRALQRLLAEHDAVRNALAGGLRPQAVRPSAPRGPPGTTPVAASPSRASSSPGRGGSSEPGSPRSAYSSDDSGCEGALSPAERELLDFSSWLGGY

SEQ ID NO: 14761 - protein, 180 aa, Homo Sapiens [sequence omitted]

SEQ ID NO: 14762 - protein, 172 aa, Homo Sapiens
METRKPAERLALPYSLRTAPLGVPGTLPGLPRRDPLRVALRLDAACWEWARSGCARGWQYLPVPLDSAFEPAFLRKRNERERQRVRCVNEGYARLRDHLPRELADKRLSKVETLRAAIDYIKHLQELLERQAWGLEGAAGAVPQRRAECNSDGESKASSAPSPSSEPEEGGS

SEQ ID NO: 14763 - protein, 278 aa, Homo Sapiens
MPMGAAERGAGPQSSAAPWAGSEKAAKRGPSKSWYPRAAASDVTCPTGGDGADPKPGPFGGGLALGPAPRGTMNNNFCRALVDRRPLGPPSCMQLGVMPPPRQAPLPPAEPLGNVPFLLYPGPAEPPYYDAYAGVFPYVPFPGAFGVYEYPFEPAFIQKRNERERQRVKCVNEGYARLRGHLPGALAEKRLSKVETLRAAIRYIKYLQELLSSAPDGSTPPASRGLPGTGPCPAPPATPRPDRPGDGEARAPSSLVPESSESSCFSPSPFLESEESWH

SEQ ID NO: 14764 - protein, 2969 aa, Homo Sapiens
MDPRNTAMLGLGSDSEGFSRKSPSAISTGTLVSKREVELEKNTKEEEDLRKRNRERNIEAGKDDGLTDAQQQFSVKETNFSEGNLKLKIGLQAKRTKKPPKNLENYVCRPAIKTTIKHPRKALKSGKMTDEKNEHCPSKRDPSKLYKKADDVAAIECQSEEVIRLHSQGENNPLSKKLSPVHSEMADYINATPSTLLGSRDPDLKDRALLNGGTSVTEKLAQLIATCPPSKSSKTKPKKLGTGTTAGLVSKDLIRKAGVGSVAGIIHKDLIKKPTISTAVGLVTKDPGKKPVFNAAVGLVNKDSVKKLGTGTTAVFINKNLGKKPGTITTVGLLSKDSGKKLGIGIVPGLVHKESGKKLGLGTVVGLVNKDLGKKLGSTVGLVAKDCAKKIVASSAMGLVNKDIGKKLMSCPLAGLISKDAINLKAEALLPTQEPLKASCSTNINNQESQELSESLKDSATSKTFEKNVVRQNKESILEKFSVRKEIINLEKEMFNEGTCIQQDSFSSSEKGSYETSKHEKQPPVYCTSPDFKMGGASDVSTAKSPFSAVGESNLPSPSPTVSVNPLTRSPPETSSQLAPNPLLLSSTTELIEEISESVGKNQFTSESTHLNVGHRSVGHSISIECKGIDKEVNDSKTTHIDIPRISSSLGKKPSLTSESSIHTITPSVVNFTSLFSNKPFLKLGAVSASDKHCQVAESLSTSLQSKPLKKRKGRKPRWTKVVARSTCRSPKGLELERSELFKNVSCSSLSNSNSEPAKFMKNIGPPSFVDHDFLKRRLPKLSKSTAPSLALLADSEKPSHKSFATHKLSSSMCVSSDLLSDIYKPKRGRPKSKEMPQLEGPPKRTLKIPASKVFSLQSKEEQEPPILQPEIEIPSFKQGLSVSPFPKKRGRPKRQMRSPVKMKPPVLSVAPFVATESPSKLESESDNHRSSSDFFESEDQLQDPDDLDDSHRPSVCSMSDLEMEPDKKITKRNNGQLMKTIIRKINKMKTLKRKKLLNQILSSSVESSNKGKVQSKLHNTVSSLAATFGSKLGQQINVSKKGTIYIGKRRGRKPKTVLNGILSGSPTSLAVLEQTAQQAAGSALGQILPPLLPSSASSSEILPSPICSQSSGTSGGQSPVSSDAGFVEPSSVPYLHLHSRQGSMIQTLAMKKASKGRRRLSPPTLLPNSPSHLSELTSLKEATPSPISESHSDETIPSDSGIGTDNNSTSDRAEKFCGQKKRRHSFEHVSLIPPETSTVLSSLKEKHKHKCKRRNHDYLSYDKMKRQKRKRKKKYPQLRNRQDPDFIAELEELISRLSEIRITHRSHHFIPRDLLPTIFRINFNSFYTHPSFPLDPLHYIRKPDLKKKRGRPPKMREAMAEMPFMHSLSFPLSSTGFYPSYGMPYSPSPLTAAPIGLGYYGRYPPTLYPPPPSPSFTTPLPPPSYMHAGHLLLNPAKYHKKKHKLLRQEAFLTTSRTPLLSMSTYPSVPPEMAYGWMVEHKHRHRHKHREHRSSEQPQVSMDTGSSRSVLESLKRYRFGKDAVGERYKHKEKHRCHMSCPHLSPSKSLINREEQWVHREPSESSPLALGLQTPLQIDCSESSPSLSLGGFTPNSEPASSDEHTNLFTSAIGSCRVSNPNSSGRKKLTDSPGLFSAQDTSLNRLHRKESLPSNERAVQTLAGSQPTSDKPSQRPSESTNCSPTRKRSSSESTSSTVNGVPSRSPRLVASGDDSVDSLLQRMVQNEDQEPMEKSIDAVIATASAPPSSSPGRSHSKDRTLGKPDSLLVPAVTSDSCNNSISLLSEKLTSSCSPHHIKRSVVEAMQRQARKMCNYDKILATKKNLDHVNKILKAKKLQRQARTGNNFVKRRPGRPRKCPLQAVVSMQAFQAAQFVNPELNRDEEGAALHLSPDTVTDVIEAVVQSVNLNPEHKKGLKRKGWLLEEQTRKKQKPLPEEEEQENNKSFNEAPVEIPSPSETPAKPSEPESTLQPVLSLIPREKKPPRPPKKKYQKAGLYSDVYKTTDPKSRLIQLKKEKLEYTPGEHEYGLFPAPIHVVFFVSGKYLRQKRIDFQLPYDILWQWKHNQLYKKPDVPLYKKIRSNVYVDVKPLSGYEATTCNCKKPDDDTRKGCVDDCLNRMIFAECSPNTCPCGEQCCNQRIQRHEWVQCLERFRAEEKGWGIRTKEPLKAGQFIIEYLGEVVSEQEFRNRMIEQYHNHSDHYCLNLDSGMVIDSYRMGNEARFINHSCDPNCEMQKWSVNGVYRIGLYALKDMPAGTELTYDYNFHSFNVEKQQLCKCGFEKCRGIIGGKSQRVNGLTSSKNSQPMATHKKSGRSKEKRKSKHKLKKRRGHLSEEPSENINTPTRLTPQLQMKPMSNRERNFVLKHHVFLVRNWEKIRQKQEEVKHTSDNIHSASLYTRWNGICRDDGNIKSDVFMTQFSALQTARSVRTRRLAAAEENIEVARAARLAQIFKEICDGIISYKDSSRQALAAPLLNLPPKKKNADYYEKISDPLDLITIEKQILTGYYKTVEAFDADMLKVFRNAEKYYGRKSPVGRDVCRLRKAYYNARHEASAQIDEIVGETASEADSSETSVSEKENGHEKDDDVIRCICGLYKDEGLMIQCDKCMVWQHCDCMGVNSDVEHYLCEQCDPRPVDREVPMIPRPHYAQPGCVYFICLLRDDLLLRQGDCVYLMRDSRRTPDGHPVRQSYRLLSHINRDKLDIFRIEKLWKNEKEERFAFGHHYFRPHETHHSPSRRFYHNELFRVPLYEIIPLEAVVGTCCVLDLYTYCKGRPKGVKEQDVYICDYRLDKSAHLFYKIHRNRYPVCTKPYAFDHFPKKLTPKKDFSPHYVPDNYKRNGGRSSWKSERSKPPLKDLGQEDDALPLIEEVLASQEQAANEIPSLEEPEREGATANVSEGEKKTEESSQEPQSTCTPEERRHNQRERLNQILLNLLEKIPGKNAIDVTYLLEEGSGRKLRRRTLFIPENSFRK

SEQ ID NO: 14765 - protein, 628 aa, Homo Sapiens
MAAAGAGPGQEAGAGPGPGAVANATGAEEGEMKPVAAGAAAPPGEGISAAPTVEPSSGEAEGGEANLVDVSGGLETESSNGKDTLEGAGDTSEVMDTQAGSVDEENGRQLGEVELQCGICTKWFTADTFGIDTSSCLPFMTNYSFHCNVCHHSGNTYFLRKQANLKEMCLSALANLTWQSRTQDEHPKTMFSKDKDIIPFIDKYWECMTTRQRPGKMTWPNNIVKTMSKERDVFLVKEHPDPGSKDPEEDYPKFGLLDQDLSNIGPAYDNQKQSSAVSTSGNLNGGIAAGSSGKGRGAKRKQQDGGTTGTTKKARSDPLFSAQRLPPHGYPLEHPFNKDGYRYILAEPDPHAPDPEKLELDCWAGKPIPGDLYRACLYERVLLALHDRAPQLKISDDRLTVVGEKGYSMVRASHGVRKGAWYFEITVDEMPPDTAARLGWSQPLGNLQAPLGYDKFSYSWRSKKGTKFHQSIGKHYSSGYGQGDVLGFYINLPEDTETAKSLPDTYKDKALIKFKSYLYFEEKDFVDKAEKSLKQTPHSEIIFYKNGVNQGVAYKDIFEGVYFPAISLYKSCTVSINFGPCFKYPPKDLTYRPMSDMGWGAVVEHTLADVLYHVETEVDGRRSPPWEP

SEQ ID NO: 14766 - protein, 271 aa, Homo Sapiens
MEDSHKSTTSETAPQPGSAVQGAHISHIAQQVSSLSESEESQDSSDSIGSSQKAHGILARRPSYRKILKDLSSEDTRGRKGDGENSGVSAAVTSMSVPTPIYQTSSGQYIAIAPNGALQLASPGTDGVQGLQTLTMTNSGSTQQGTTILQYAQTSDGQQILVPSNQVVVQTASGDMQTYQIRTTPSATSLPQTVVMTSPVTLTSQTTKTDDPQLKREIRLMKNREAARECRRKKKEYVKCLENRVAVLENQNKTLIEELKTLKDLYSNKSV

SEQ ID NO: 14767 - protein, 505 aa, Homo Sapiens
MKFKLHVNSARQYKDLWNMSDDKPFLCTAPGCGQRFTNEDHLAVHKHKHEMTLKFGPARNDSVIVADQTPTPTRFLKNCEEVGLFNELASPFENEFKKASEDDIKKMPLDLSPLATPIIRSKIEEPSVVETTHQDSPLPHPESTTSDEKEVPLAQTAQPTSAIVRPASLQVPNVLLTSSDSSVIIQQAVPSPTSSTVITQAPSSNRPIVPVPGPFPLLLHLPNGQTMPVAIPASITSSNVHVPAAVPLVRPVTMVPSVPGIPGPSSPQPVQSEAKMRLKAALTQQHPPVTNGDTVKGHGSGLVRTQSEESRPQSLQQPATSTTETPASPAHTTPQTQSTSGRRRRAANEDPDEKRRKFLERNRAAASRCRQKRKVWVQSLEKKAEDLSSLNGQLQSEVTLLRNEVAQLKQLLLAHKDCPVTAMQKKSGYHTADKDDSSEDISVPSSPHTEAIQHSSVSTSNGVSSTSKAEAVATSVLTQMADQSTEPALSQIVMAPSSQSQPSGS

SEQ ID NO: 14768 - protein, 181 aa, Homo Sapiens
MMLQHPGQVSASEVSASAIVPCLSPPGSLVFEDFANLTPFVKEELRFAIQNKHLCHRMSSALESVTVSDRPLGVSITKAEVAPEEDERKKRRRERNKIAAAKCRNKKKEKTECLQKESEKLESVNAELKAQIEELKNEKQHLIYMLNLHRPTCIVRAQNGRTPEDERNLFIQQIKEGTLQS

SEQ ID NO: 14769 - protein, 351 aa, Homo Sapiens
MTEMSFLSSEVLVGDLMSPFDQSGLGAEESLGLLDDYLEVAKHFKPHGFSSDKAKAGSSEWLAVDGLVSPSNNSKEDAFSGTDWMLEKMDLKEFDLDALLGIDDLETMPDDLLTTLDDTCDLFAPLVQETNKQPPQTVNPIGHLPESLTKPDQVAPFTFLQPLPLSPGVLSSTPDHSFSLELGSEVDITEGDRKPDYTAYVAMIPQCIKEEDTPSDNDSGICMSPESYLGSPQHSPSTRGSPNRSLPSPGVLCGSARPKPYDPPGEKMVAAKVKGEKLDKKLKKMEQNKTAATRYRQKKRAEQEALTGECKELEKKNEALKERADSLAKEIQYLKDLIEEVRKARGKKRVP

SEQ ID NO: 14770 - protein, 282 aa, Homo Sapiens
MSLLATLGLELDRALLPASGLGWLVDYGKLPPAPAPLAPYEVLGGALEGGLPVGGEPLAGDGFSDWMTERVDFTALLPLEPPLPPGTLPQPSPTPPDLEAMASLLKKELEQMEDFFLDAPPLPPPSPPPLPPPPLPPAPSLPLSLPSFDLPQPPVLDTLDLLAIYCRNEAGQEEVGMPPLPPPQQPPPPSPPQPSRLAPYPHPATTRGDRKQKKRDQNKSAALRYRQRKRAEGEALEGECQGLEARNRELKERAESVEREIQYVKDLLIEVYKARSQRTRSC

SEQ ID NO: 14771 - protein, 670 aa, Homo Sapiens
MGEPAGVAGTMESPFSPGLFHRLDEDWDSALFAELGYFTDTDELQLEAANETYENNFDNLDFDLDLMPWESDIWDINNQICTVKDIKAEPQPLSPASSSYSVSSPRSVDSYSSTQHVPEELDLSSSSQMSPLSLYGENSNSLSSAEPLKEDKPVTGPRNKTENGLTPKKKIQVNSKPSIQPKPLLLPAAPKTQTNSSVPAKTIIIQTVPTLMPLAKQQPIISLQPAPTKGQTVLLSQPTVVQLQAPGVLPSAQPVLAVAGGVTQLPNHVVNVVPAPSANSPVNGKLSVTKPVLQSTMRNVGSDIAVLRRQQRMIKNRESACQSRKKKKEYMLGLEARLKAALSENEQLKKENGTLKRQLDEVVSENQRLKVPSPKRRVVCVMIVLAFIILNYGPMSMLEQDSRRMNPSVSPANQRRHLLGFSAKEAQDTSDGIIQKNSYRYDHSVSNDKALMVLTEEPLLYIPPPPCQPLINTTESLRLNHELRGWVHRHEVERTKSRRMTNNQQKTRILQGALEQGSNSQLMAVQYTETTSSISRNSGSELQVYYASPRSYQDFFEAIRRRGDTFYVVSFRRDHLLLPATTHNKTTRPKMSIVLPAININENVINGQDYEVMMQIDCQVMDTRILHIKSSSVPPYLRDQQRNQTNTFFGSPPAATEATHVVSTIPESLQ

SEQ ID NO: 14772 - protein, 703 aa, Homo Sapiens
MAELMLLSEIADPTRFFTDNLLSPEDWGLQNSTLYSGLDEVAEEQTQLFRCPEQDVPFDGSSLDVGMDVSPSEPPWELLPIFPDLQVKSEPSSPCSSSSLSSESSRLSTEPSSEALGVGEVLHVKTESLAPPLCLLGDDPTSSFETVQINVIPTSDDSSDVQTKIEPVSPCSSVNSEASLLSADSSSQAFIGEEVLEVKTESLSPSGCLLWDVPAPSLGAVQISMGPSLDGSSGKALPTRKPPLQPKPVVLTTVPMPSRAVPPSTTVLLQSLVQPPPVSPVVLIQGAIRVQPEGPAPSLPRPERKSIVPAPMPGNSCPPEVDAKLLKRQQRMIKNRESACQSRRKKKEYLQGLEARLQAVLADNQQLRRENAALRRRLEALLAENSELKLGSGNRKVVCIMVFLLFIAFNFGPVSISEPPSAPISPRMNKGEPQPRRHLLGFSEQEPVQGVEPLQGSSQGPKEPQPSPTDQPSFSNLTAFPGGAKELLLRDLDQLFLSSDCRHFNRTESLRLADELSGWVQRHQRGRRKIPQRAQERQKSQPRKKSPPVKAVPIQPPGPPERDSVGQLQLYRHPDRSQPAFLDAIDRREDTFYVVSFRRDHLLLPAISHNKTSRPKMSLVMPAMAPNETLSGRGAPGDYEEMMQIECEVMDTRVIHIKTSTVPPSLRKQPSPTPGNATGGPLPVSAASQAHQASHQPLYLNHP

SEQ ID NO: 14773 - protein, 494 aa, Homo Sapiens
MGDDRPFVCNAPGCGQRFTNEDHLAVHKHKHEMTLKFGPARTDSVIIADQTPTPTRFLKNCEEVGLFNELASSFEHEFKKAADEDEKKARSRTVAKKLVAAAGPLDMSLPSTPDIKIKEEEPVEVDSSPPDSPASSPCSPPLKEKEVTPKPVLISTPTPTIVRPGSLPLHLGYDPLHPTLPSPTSVITQAPPSNRQMGSPTGSLPLVMHLANGQTMPVLPGPPVQMPSVISLARPVSMVPNIPGIPGPPVNSSGSISPSGHPIPSEAKMRLKATLTHQVSSINGGCGMVVGTASTMVTARPEQSQILIQHPDAPSPAQPQVSPAQPTPSTGGRRRRTVDEDPDERRQRFLERNRAAASRCRQKRKLWVSSLEKKAEELTSQNIQLSNEVTLLRNEVAQLKQLLLAHKDCPVTALQKKTQGYLESPKESSEPTGSPAPVIQHSSATAPSNGLSVRSAAEAVATSVLTQMASQRTELSMPIQSHVIMTPQSQSAGR

SEQ ID NO: 14774 - protein, 354 aa, Homo Sapiens
MSRLLHAEEWAEVKELGDHHRQPQPHHLPQPPPPPQPPATLQAREHPVYPPELSLLDSTDPRAWLAPTLQGICTARAAQYLLHSPELGASEAAAPRDEVDGRGELVRRSSGGASSSKSPGPVKVREQLCKLKGGVVVDELGCSRQRAPSSKQVNGVQKQRRLAANARERRRMHGLNHAFDQLRNVIPSFNNDKKLSKYETLQMAQIYINALSELLQTPSGGEQPPPPPASCKSDHHHLRTAASYEGGAGNATAAGAQQASGGSQRPTPPGSCRTRFSAPASAGGYSVQLDALHFSTFEDSALTAMMAQKNLSPSLPGSILQPVQEENSKTSPRSHRSDGEFSPHSHYSDSDEAS

SEQ ID NO: 14775 - protein, 152 aa, Homo Sapiens
MKSCKPSGPPAGARVAPPCAGGTECAGTCAGAGRLESAARRRLAANARERRRMQGLNTAFDRLRRVVPQWGQDKKLSKYETLQMALSYIMALTRILAEAERFGSERDWVGLHCEHFGRDHYLPFPGAKLPGESELYSQRLFGFQPEPFQMAT

SEQ ID NO: 14776 - protein, 321 aa, Homo Sapiens
MKHIPVLEDGPWKTVCVKELNGLKKLKRKGKEPARRANGYKTFRLDLEAPEPRAVATNGLRDRTHRLQPVPVPVPVPVPVAPAVPPRGGTDTAGERGGSRAPEVSDARKRCFALGAVGPGLPTPPPPPPPAPQSQAPGGPEAQPFREPGLRPRILLCAPPARPAPSAPPAPPAPPESTVRPAPPTRPGESSYSSISHVIYNNHQDSSASPRKRPGEATAASSEIKALQQTRRLLANARERTRVHTISAAFEALRKQVPCYSYGQKLSKLAILRIACNYILSLARLADLDYSADHSNLSFSECVQRCTRTLQAEGRAKKRKE

SEQ ID NO: 14777 - protein, 2492 aa, Homo Sapiens
MTAEPMSESKLNTLVQKLHDFLAHSSEESEETSSPPRLAMNQNTDKISGSGSNSDMMENSKEEGTSSSEKSKSSGSSRSKRKPSIVTKYVESDDEKPLDDETVNEDASNENSENDITMQSLPKGTVIVQPEPVLNEDKDDFKGPEFRSRSKMKTENLKKRGEDGLHGIVSCTACGQQVNHFQKDSIYRHPSLQVLICKNCFKYYMSDDISRDSDGMDEQCRWCAEGGNLICCDFCHNAFCKKCILRNLGRKELSTIMDENNQWYCYICHPEPLLDLVTACNSVFENLEQLLQQNKKKIKVDSEKSNKVYEHTSRFSPKKTSSNCNGEEKKLDDSCSGSVTYSYSALIVPKEMIKKAKKLIETTANMNSSYVKFLKQATDNSEISSATKLRQLKAFKSVLADIKKAHLALEEDLNSEFRAMDAVNKEKNTKEHKVIDAKFETKARKGEKPCALEKKDISKSEAKLSRKQVDSEHMHQNVPTEEQRTNKSTGGEHKKSDRKEEPQYEPANTSEDLDMDIVSVPSSVPEDIFENLETAMEVQSSVDHQGDGSSGTEQEVESSSVKLNISSKDNRGGIKSKTTAKVTKELYVKLTPVSLSNSPIKGADCQEVPQDKDGYKSCGLNPKLEKCGLGQENSDNEHLVENEVSLLLEESDLRRSPRVKTTPLRRPTETNPVTSNSDEECNETVKEKQKLSVPVRKKDKRNSSDSAIDNPKPNKLPKSKQSETVDQNSDSDEMLAILKEVSRMSHSSSSDTDINEIHTNHKTLYDLKTQAGKDDKGKRKRKSSTSGSDFDTKKGKSAKSSIISKKKRQTQSESSNYDSELEKEIKSMSKIGAARTTKKRIPNTKDFDSSEDEKHSKKGMDNQGHKNLKTSQEGSSDDAERKQERETFSSAEGTVDKDTTIMELRDRLPKKQQASASTDGVDKLSGKEQSFTSLEVRKVAETKEKSKHLKTKTCKKVQDGLSDIAEKFLKKDQSDETSEDDKKQSKKGTEEKKKPSDFKKKVIKMEQQYESSSDGTEKLPEREEICHFPKGIKQIKNGTTDGEKKSKKIRDKTSKKKDELSDYAEKSTGKGDSCDSSEDKKSKNGAYGREKKRCKLLGKSSRKRQDCSSSDTEKYSMKEDGCNSSDKRLKRIELRERRNLSSKRNTKEIQSGSSSSDAEESSEDNKKKKQRTSSKKKAVIVKEKKRNSLRTSTKRKQADITSSSSSDIEDDDQNSIGEGSSDEQKIKPVTENLVLSSHTGFCQSSGDEALSKSVPVTVDDDDDDNDPENRIAKKMLLEEIKANLSSDEDGSSDDEPEEGKKRTGKQNEENPGDEEAKNQVNSESDSDSEESKKPRYRHRLLRHKLTVSDGESGEEKKTKPKEHKEVKGRNRRKVSSEDSEDSDFQESGVSEEVSESEDEQRPRTRSAKKAELEENQRSYKQKKKRRRIKVQEDSSSENKSNSEEEEEEKEEEEEEEEEEEEEEEDENDDSKSPGKGRKKIRKILKDDKLRTETQNALKEEEERRKRIAEREREREKLREVIEIEDASPTKCPITTKLVLDEDEETKEPLVQVHRNMVIKLKPHQVDGVQFMWDCCCESVKKTKKSPGSGCILAHCMGLGKTLQVVSFLHTVLLCDKLDFSTALVVCPLNTALNWMNEFEKWQEGLKDDEKLEVSELATVKRPQERSYMLQRWQEDGGVMIIGYEMYRNLAQGRNVKSRKLKEIFNKALVDPGPDFVVCDEGHILKNEASAVSKAMNSIRSRRRIILTGTPLQNNLIEYHCMVNFIKENLLGSIKEFRNRFINPIQNGQCADSTMVDVRVMKKRAHILYEMLAGCVQRKDYTALTKFLPPKHEYVLAVRMTSIQCKLYQYYLDHLTGVGNNSEGGRGKAGAKLFQDFQMLSRIWTHPWCLQLDYISKENKGYFDEDSMDEFIASDSDETSMSLSSDDYTKKKKKGKKGKKDSSSSGSGSDNDVEVIKVWNSRSRGGGEGNVDETGNNPSVSLKLEESKATSSSNPSSPAPDWYKDFVTDADAEVLEHSGKMVLLFEILRMAEEIGDKVLVFSQSLISLDLIEDFLELASREKTEDKDKPLIYKGEGKWLRNIDYYRLDGSTTAQSRKKWAEEFNDETNVRGRLFIISTKAGSLGINLVAANRVIIFDASWNPSYDIQSIFRVYRFGQTKPVYVYRFLAQGTMEDKIYDRQVTKQSLSFRVVDQQQVERHFTMNELTELYTFEPDLLDDPNSEKKKKRDTPMLPKDTILAELLQIHKEHIVGYHEHDSLLDHKEEEELTEEERKAAWAEYEAEKKGLTMRFNIPTGTNLPPVSFNSQTPYIPFNLGALSAMSNQQLEDLINQGREKVVEATNSVTAVRIQPLEDIISAVWKENMNLSEAQVQALALSRQASQELDVKRREAIYNDVLTKQQMLISCVQRILMNRRLQQQYNQQQQQQMTYQQATLGHLMMPKPPNLIMNPSNYQQIDMRGMYQPVAGGMQPPPLQRAPPPMRSKNPGPSQGKSM

SEQ ID NO: 14778 - protein, 892 aa, Homo Sapiens
MSERAADDVRGEPRRAAAAAGGAAAAAARQQQQQQQQQQPPPPQPQRQQHPPPPPRRTRPEDGGPGAASTSAAAMATVGERRPLPSPEVMLGQSWNLWVEASKLPGKDGTELDESFKEFGKNREVMGLCREDMPIFGFCPAHDDFYLVVCNDCNQVVKPQAFQSHYERRHSSSSKPPLAVPPTSVFSFFPSLSKSKGGSASGSNRSSSGGVLSASSSSSKLLKSPKEKLQLRGNTRPMHPIQQSRVPHGRIMTPSVKVEKIHPKMDGTLLKSAVGPTCPATVSSLVKPGLNCPSIPKPTLPSPGQILNGKGLPAPPTLEKKPEDNSNNRKFLNKRLSEREFDPDIHCGVIDLDTKKPCTRSLTCKTHSLTQRRAVQGRRKRFDVLLAEHKNKTREKELIRHPDSQQPPQPLRDPHPAPPRTSQEPHQNPHGVIPSESKPFVASKPKPHTPSLPRPPGCPAQQGGSAPIDPPPVHESPHPPLPATEPASRLSSEEGEGDDKEESVEKLDCHYSGHHPQPASFCTFGSRQIGRGYYVFDSRWNRLRCALNLMVEKHLNAQLWKKIPPVPSTTSPISTRIPHRTNSVPTSQCGVSYLAAATVSTSPVLLSSTCISPNSKSVPAHGTTLNAQPAASGAMDPVCSMQSRQVSSSSSSPSTPSGLSSVPSSPMSRKPQKLKSSKSLRPKESSGNSTNCQNASSSTSGGSGKKRKNSSPLLVHSSSSSSSSSSSSHSMESFRKNCVAHSGPPYPSTVTSSHSIGLNCVTNKANAVNVRHDQSGRGPPTGSPAESIKRMSVMVNSSDSTLSLGPFIHQSNELPVNSHGSFSHSHTPLDKLIGKKRKCSPSSSSINNSSSKPTKVAKVPAVNNVHMKHTGTIPGAQGLMNSSLLHQPKARP

SEQ ID NO: 14779 - protein, 736 aa, Homo Sapiens
MSLSENSVFAYESSVHSTNVLLSLNDQRKKDVLCDVTIFVEGQRFRAHRSVLAACSSYFHSRIVGQADGELNITLPEEVTVKGFEPLIQFAYTAKLILSKENVDEVCKCVEFLSVHNIEESCFQFLKFKFLDSTADQQECPRKKCFSSHCQKTDLKLSLLDQRDLETDEVEEFLENKNVQTPQCKLRRYQGNAKASPPLQDSASQTYESMCLEKDAALALPSLCPKYRKFQKAFGTDRVRTGESSVKDIHASVQPNERSENECLGGVPECRDLQVMLKCDESKLAMEPEETKKDPASQCPTEKSEVTPFPHNSSIDPHGLYSLSLLHTYDQYGDLNFAGMQNTTVLTEKPLSGTDVQEKTFGESQDLPLKSDLGTREDSSVASSDRSSVEREVAEHLAKGFWSDICSTDTPCQMQLSPAVAKDGSEQISQKRSECPWLGIRISESPEPGQRTFTTLSSVNCPFISTLSTEGCSSNLEIGNDDYVSEPQQEPCPYACVISLGDDSETDTEGDSESCSAREQECEVKLPFNAQRIISLSRNDFQSLLKMHKLTPEQLDCIHDIRRRSKNRIAAQRCRKRKLDCIQNLESEIEKLQSEKESLLKERDHILSTLGETKQNLTGLCQKVCKEAALSQEQIQILAKYSAADCPLSFLISEKDKSTPDGELALPSIFSLSDRPPAVLPPCARGNSEPGYARGQESQQMSTATSEQAGPAEQCRQSGGISDFCQQMTDKCTTDE

SEQ ID NO: 14780 - protein, 1249 aa, Homo Sapiens
MSSMWSEYTIGGVKIYFPYKAYPSQLAMMNSILRGLNSKQHCLLESPTGSGKSLALLCSALAWQQSLSGKPADEGVSEKAEVQLSCCCACHSKDFTNNDMNQGTSRHFNYPSTPPSERNGTSSTCQDSPEKTTLAAKLSAKKQASIYRDENDDFQVEKKRIRPLETTQQIRKRHCFGTEVHNLDAKVDSGKTVKLNSPLEKINSFSPQKPPGHCSRCCCSTKQGNSQESSNTIKKDHTGKSKIPKIYFGTRTHKQIAQITRELRRTAYSGVPMTILSSRDHTCVHPEVVGNFNRNEKCMELLDGKNGKSCYFYHGVHKISDQHTLQTFQGMCKAWDIEELVSLGKKLKACPYYTARELIQDADIIFCPYNYLLDAQIRESMDLNLKEQVVILDEAHNIEDCARESASYSVTEVQLRFARDELDSMVNNNIRKKDHEPLRAVCCSLINWLEANAEYLVERDYESACKIWSGNEMLLTLHKMGITTATFPILQGHFSAVLQKEEKISPIYGKEEAREVPVISASTQIMLKGLFMVLDYLFRQNSRFADDYKIAIQQTYSWTNQIDISDKNGLLVLPKNKKRSRQKTAVHVLNFWCLNPAVAFSDINGKVQTIVLTSGTLSPMKSFSSELGVTFTIQLEANHIIKNSQVWVGTIGSGPKGRNLCATFQNTETFEFQDEVGALLLSVCQTVSQGILCFLPSYKLLEKLKERWLSTGLWHNLELVKTVIVEPQGGEKTNFDELLQVYYDAIKYKGEKDGALLVAVCRGKVSEGLDFSDDNARAVITIGIPFPNVKDLQVELKRQYNDHHSKLRGLLPGRQWYEIQAYRALNQALGRCIRHRNDWGALILVDDRFRNNPSRYISGLSKWVRQQIQHHSTFESALESLAEFSKKHQKVLNVSIKDRTNIQDNESTLEVTSLKYSTPPYLLEAASHLSPENFVEDEAKICVQELQCPKIITKNSPLPSSIISRKEKNDPVFLEEAGKAEKIVISRSTSPTFNKQTKRVSWSSFNSLGQYFTGKIPKATPELGSSENSASSPPRFKTEKMESKTVLPFTDKCESSNLTVNTSFGSCPQSETIISSLKIDATLTRKNHSEHPLCSEEALDPDIELSLVSEEDKQSTSNRDFETEAEDESIYFTPELYDPEDTDEEKNDLAETDRGNRLANNSDCILAKDLFEIRTIKEVDSAREVKAEDCIDTKLNGILHIEESKIDDIDGNVKTTWINELELGKTHEIEIKNFKPSPSKNKGMFPGFK

SEQ ID NO: 14781 - protein, 841 aa, Homo Sapiens
MSVDEKPDSPMYVYESTVHCTNILLGLNDQRKKDILCDVTLIVERKEFRAHRAVLAACSEYFWQALVGQTKNDLVVSLPEEVTARGFGPLLQFAYTAKLLLSRENIREVIRCAEFLRMHNLEDSCFSFLQTQLLNSEDGLFVCRKDAACQRPHEDCENSAGEEEDEEEETMDSETAKMACPRDQMLPEPISFEAAAIPVAEKEEALLPEPDVPTDTKESSEKDALTQYPRYKKYQLACTKNVYNASSHSTSGFASTFREDNSSNSLKPGLARGQIKSEPPSEENEEESITLCLSGDEPDAKDRAGDVEMDRKQPSPAPTPTAPAGAACLERSRSVASPSCLRSLFSITKSVELSGLPSTSQQHFARSPACPFDKGITQGDLKTDYTPFTGNYGQPHVGQKEVSNFTMGSPLRGPGLEALCKQEGELDRRSVIFSSSACDQVSTSVHSYSGVSSLDKDLSEPVPKGLWVGAGQSLPSSQAYSHGGLMADHLPGRMRPNTSCPVPIKVCPRSPPLETRTRTSSSCSSYSYAEDGSGGSPCSLPLCEFSSSPCSQGARFLATEHQEPGLMGDGMYNQVRPQIKCEQSYGTNSSDESGSFSEADSESCPVQDRGQEVKLPFPVDQITDLPRNDFQMMIKMHKLTSEQLEFIHDVRRRSKNRIAAQRCRKRKLDCIQNLECEIRKLVCEKEKLLSERNQLKACMGELLDNFSCLSQEVCRDIQSPEQIQALHRYCPVLRPMDLPTASSINPAPLGAEQNIAASQCAVGENVPCCLEPGAAPPGPPWAPSNTSENCTSGRRLEGTDPGTFSERGPPLEPRSQTVTVDFCQEMTDKCTTDEQPRKDYT

SEQ ID NO: 14782 - protein, 327 aa, Homo Sapiens
MEGSNGFGIDSILSHRAGSPALPKGDPLLGDCRSPLELSPRSESSSDCSSPASPGRDCLETGTPRPGGASGPGLDSHLQPGQLSAPAQSRTVTSSFLIRDILADCKPLAACAPYSSSGQPAAPEPGGRLAAKAAEDFRDKLDKSGSNASSDSEYKVKEEGDREISSSRDSPPVRLKKPRKARTAFTDHQLAQLERSFERQKYLSVQDRMELAASLNLTDTQVKTWYQNRRTKWKRQTAVGLELLAEAGNYSALQRMFPSPYFYPQSLVSNLDPGAALYLYRGPSAPPPALQRPLVPRILIHGLQGASEPPPPLPPLAGVLPRAAQPR

SEQ ID NO: 14783 - protein, 387 aa, Homo Sapiens
MTMEGASGSSFGIDTILSSASSGSPGMMNGDFRPLGEARTADFRSQATPSPCSEIDTVGTAPSSPISVTMEPPEPHLVADATQHHHHLHHSQQPPPPAAAPTQSLQPLPQQQQPLPPQQPPPPPPQQLGSAASAPRTSTSSFLIKDILGDSKPLAACAPYSTSVSSPHHTPKQESNAVHESFRPKLEQEDSKTKLDKREDSQSDIKCHGTKEEGDREITSSRESPPVRAKKPRKARTAFSDHQLNQLERSFERQKYLSVQDRMDLAAALNLTDTQVKTWYQNRRTKWKRQTAVGLELLAEAGNYSALQRMFPSPYFYHPSLLGSMDSTTAAAAAAAMYSSMYRTPPAPHPQLQRPLVPRVLIHGLGPGGQPALNPLSSPIPGTPHPR

SEQ ID NO: 14784 - protein, 254 aa, Homo Sapiens
MQRPGEPGAARFGPPEGCADHRPHRYRSFMIEEILTEPPGPKGAAPAAAAAAAGELLKFGVQALLAARPFHSHLAVLKAEQAAVFKFPLAPLGCSGLSSALLAAGPGLPGAAGAPHLPLELQLRGKLEAAGPGEPGTKAKKGRRSRTVFTELQLMGLEKRFEKQKYLSTPDRIDLAESLGLSQLQVKTWYQNRRMKWKKIVLQGGGLESPTKPKGRPKKNSIPTSEQLTEQERAKDAEKPAEVPGEPSDRSRED

SEQ ID NO: 14785 - protein, 279 aa, Homo Sapiens
MHCHAELRLSSPGQLKAARRRYKTFMIDEILSKETCDYFEKLSLYSVCPSLVVRPKPLHSCTGSPSLRAYPLLSVITRQPTVISHLVPATPGIAQALSCHQVTEAVSAEAPGGEALASSESETEQPTPRQKKPRRSRTIFTELQLMGLEKKFQKQKYLSTPDRLDLAQSLGLTQLQVKTWYQNRRMKWKKMVLKGGQEAPTKPKGRPKKNSIPTSEEIEAEEKMNSQAQGQEQLEPSQGQEELCEAQEPKARDVPLEMAEPPDPPQELPIPSSEPPPLS

SEQ ID NO: 14786 - protein, 125 aa, Homo Sapiens
MPHSSDSSDSSFSRSPPPGKQDSSDDVRRVQRREKNRIAAQKSRQRQTQKADTLHLESEDLEKQNAALRKEIKQLTEELKYFTSVLNSHEPLCSVLAASTPSPPEVVYSAHAFHQPHVSSPRFQP

SEQ ID NO: 14787 - protein, 274 aa, Homo Sapiens
MHLCGGNGLLTQTDPKEQQRQLKKQKNRAAAQRSRQKHTDKADALHQQHESLEKDNLALRKEIQSLQAELAWWSRTLHVHERLCPMDCASCSAPGLLGCWDQAEGLLGPGPQGQHGCREQLELFQTPGSCYPAQPLSPGPQPHDSPSLLQCPLPSLSLGPAVVAEPPVQLSPSPLLFASHTGSSLQGSSSKLSALQPSLTAQTAPPQPLELEHPTRGKLGSSPDNPSSALGLARLQSREHKPALSAATWQGLVVDPSPHPLLAFPLLSSAQVHF

SEQ ID NO: 14788 - protein, 127 aa, Homo Sapiens
MSQGLPAAGSVLQRSVAAPGNQPQPQPQQQSPEDDDRKVRRREKNRVAAQRSRKKQTQKADKLHEEYESLEQENTMLRREIGKLTEELKHLTEALKEHEKMCPLLLCPMNFVPVPPRPDPVAGCLPR

SEQ ID NO: 14789 - protein, 941 aa, Homo Sapiens
MKGSNRNKDHSAEGEGVGKRPKRKCLQWHPLLAKKLLDFSEEEEEEDEEEDIDKVQLLGADGLEQDVGETEDDESPEQRARRPMNAFLLFCKRHRSLVRQEHPRLDNRGATKILADWWAVLDPKEKQKYTDMAKEYKDAFMKANPGYKWCPTTNKPVKSPTPTVNPRKKLWAFPSDSSRDLPSPKKAKTEEMPQLNFGMADPTQMGGLSMLLLAGEHALGTPEVSSGTCRPDVSESPELRQKSPLFQFAEISSSTSHSDASTKQCQTSALFQFAEISSNTSQLGGAEPVKRCGKSALFQLAEMCLASEGMKMEESKLIKAKESDGGRIKELEKGKEEKEIKMEKTDETRLQKEAEFEKSAKENLRDSKELRNFEALQIDDIMAIKMEDPKEIRKEELEEDHKCSHFPDFSYSASSKIIISDVPSRKDHMCHPHGIMIIEDPAALNKPEKLKKKKKKSKMDRHGNDKSTPKKTCKKRQSSESDIESVIYTIEAVAKGDWGIEKLGDTPRKKVRTSSSGKGSILDAKPPKKKVKSREKKMSKEKSSDTTKESRPPDFISISASKNISGETPEGIKAEPLTPMEDALPPSLSGQAKPEDSDCHRKIETCGSRKSERSCKGALYKTLVSEGMLTSLRANVDRGKRSSGKGNSSDHEGCWNEESWTFSQSGTSGSKKFKKTKPKEDCLLGSAKLDEEFEKKFNSLPQYSPVTFDRKCVPVPRKKKKTGNVSSEPTKTSKGPFQSQKKNLFHKIVSKYKHKKEKPNVPEKGSGDKWSNKQLFLDAIHPTEAIFSEDRNTMEPVHKVKNIPSIFNTPEPTTTQEPLVGSQKRKARKTKITHLVRTADGRVSPAGGTLDDKPKEQLQRSLPKATETDCNDKCSHNTEVGETRSSTPEMPAVSAFFSLAALAEVAAMENVHRGQRSTPLTHDGQPKEMPQAPVLISCADQ

SEQ ID NO: 14790 - protein, 835 aa, Homo Sapiens
MSRRKQGKPQHLSKREFSPEPLEAILTDDEPDHGPLGAPEGDHDLLTCGQCQMNFPLGDILIFIEHKRKQCNGSLCLEKAVDKPPSPSPIEMKKASNPVEVGIQVTPEDDDCLSTSSRGICPKQEHIADKLLHWRGLSSPRSAHGALIPTPGMSAEYAPQGICKDEPSSYTCTTCKQPFTSAWFLLQHAQNTHGLRIYLESEHGSPLTPRVGIPSGLGAECPSQPPLHGIHIADNNPFNLLRIPGSVSREASGLAEGRFPPTPPLFSPPPRHHLDPHRIERLGAEEMALATHHPSAFDRVLRLNPMAMEPPAMDFSRRLRELAGNTSSPPLSPGRPSPMQRLLQPFQPGSKPPFLATPPLPPLQSAPPPSQPPVKSKSCEFCGKTFKFQSNLVVHRRSHTGEKPYKCNLCDHACTQASKLKRHMKTHMHKSSPMTVKSDDGLSTASSPEPGTSDLVGSASSALKSVVAKFKSENDPNLIPENGDEEEEEDDEEEEEEEEEEEEELTESERVDYGFGLSLEAARHHENSSRGAVVGVGDESRALPDVMQGMVLSSMQHFSEAFHQVLGEKHKRGHLAEAEGHRDTCDEDSVAGESDRIDDGTVNGRGCSPGESASGGLSKKLLLGSPSSLSPFSKRIKLEKEFDLPPAAMPNTENVYSQWLAGYAASRQLKDPFLSFGDSRQSPFASSSEHSSENGSLRFSTPPGELDGGISGRSGTGSGGSTPHISGPGPGRPSSKEGRRSDTCEYCGKVFKNCSNLTVHRRSHTGERPYKCELCNYACAQSSKLTRHMKTHGQVGKDVYKCEICKMPFSVYSTLEKHMKKWHSDRVLNNDIKTE

SEQ ID NO: 14791 - protein, 894 aa, Homo Sapiens
MSRRKQGNPQHLSQRELITPEADHVEAAILEEDEGLEIEEPSGLGLMVGGPDPDLLTCGQCQMNFPLGDILVFIEHKRKQCGGSLGACYDKALDKDSPPPSSRSELRKVSEPVEIGIQVTPDEDDHLLSPTKGICPKQENIAGPCRPAQLPAVAPIAASSHPHSSVITSPLRALGALPPCLPLPCCSARPVSGDGTQGEGQTEAPFGCQCQLSGKDEPSSYICTTCKQPFNSAWFLLQHAQNTHGFRIYLEPGPASSSLTPRLTIPPPLGPEAVAQSPLMNFLGDSNPFNLLRMTGPILRDHPGFGEGRLPGTPPLFSPPPRHHLDPHRLSAEEMGLVAQHPSAFDRVMRLNPMAIDSPAMDFSRRLRELAGNSSTPPPVSPGRGNPMHRLLNPFQPSPKSPFLSTPPLPPMPPGGTPPPQPPAKSKSCEFCGKTFKFQSNLIVHRRSHTGEKPYKCQLCDHACSQASKLKRHMKTHMHKAGSLAGRSDDGLSAASSPEPGTSELAGEGLKAADGDFRHHESDPSLGHEPEEEDEEEEEEEEELLLENESRPESSFSMDSELSRNRENGGGGVPGVPGAGGGAAKALADEKALVLGKVMENVGLGALPQYGELLADKQKRGAFLKRAAGGGDAGDDDDAGGCGDAGAGGAVNGRGGGFAPGTEPFPGLFPRKPAPLPSPGLNSAAKRIKVEKDLELPPAALIPSENVYSQWLVGYAASRHFMKDPFLGFTDARQSPFATSSEHSSENGSLRFSTPPGDLLDGGLSGRSGTASGGSTPHLGGPGPGRPSSKEGRRSDTCEYCGKVFKNCSNLTVHRRSHTGERPYKCELCNYACAQSSKLTRHMKTHGQIGKEVYRCDICQMPFSVYSTLEKHMKKWHGEHLLTNDVKIEQAERS

SEQ ID NO: 14792 - protein, 454 aa, Homo Sapiens
MPRCPAGAMDEGPVDLRTRPKAAGLPGAALPLRKRPLRAPSPEPAAPRGAAGLVVPLDPLRGGCDLPAVPGPPHGLARPEALYYPGALLPLYPTRAMGSPFPLVNLPTPLYPMMCPMEHPLSADIAMATRADEDGDTPLHIAVVQGNLPAVHRLVNLFQQGGRELDIYNNLRQTPLHLAVITTLPSVVRLLVTAGASPMALDRHGQTAAHLACEHRSPTCLRALLDSAAPGTLDLEARNYDGLTALHVAVNTECQETVQLLLERGADIDAVDIKSGRSPLIHAVENNSLSMVQLLLQHGANVNAQMYSGSSALHSASGRGLLPLVRTLVRSGADSSLKNCHNDTPLMVARSRRVIDILRGKATRPASTSQPDPSPDRSANTSPESSSRLSSNGLLSASPSSSPSQSPPRDPPGFPMAPPNFFLPSPSPPAFLPFAGVLRGPGRPVPPSPAPGGS

SEQ ID NO: 14793 - protein, 706 aa, Homo Sapiens
MASPADSCIQFTRHASDVLLNLNRLRSRDILTDVVIVVSREQFRAHKTVLMACSGLFYSIFTDQLKCNLSVINLDPEINPEGFCILLDFMYTSRLNLREGNIMAVMATAMYLQMEHVVDTCRKFIKASEAEMVSAIKPPREEFLNSRMLMPQDIMAYRGREVVENNLPLRSAPGCESRAFAPSLYSGLSTPPASYSMYSHLPVSSLLFSDEEFRDVRMPVANPFPKERALPCDSARPVPGEYSRPTLEVSPNVCHSNIYSPKETIPEEARSDMHYSVAEGLKPAAPSARNAPYFPCDKASKEEERPSSEDEIALHFEPPNAPLNRKGLVSPQSPQKSDCQPNSPTESCSSKNACILQASGSPPAKSPTDPKACNWKKYKFIVLNSLNQNAKPEGPEQAELGRLSPRAYTAPPACQPPMEPENLDLQSPTKLSASGEDSTIPQASRLNNIVNRSMTGSPRSSSESHSPLYMHPPKCTSCGSQSPQHAEMCLHTAGPTFPEEMGETQSEYSDSSCENGAFFCNECDCRFSEEASLKRHTLQTHSDKPYKCDRCQASFRYKGNLASHKTVHTGEKPYRCNICGAQFNRPANLKTHTRIHSGEKPYKCETCGARFVQVAHLRAHVLIHTGEKPYPCEICGTRFRHLQTLKSHLRIHTGEKPYHCEKCNLHFRHKSQLRLHLRQKHGAITNTKVQYRVSATDLPPELPKAC

SEQ ID NO: 14794 - protein, 479 aa, Homo Sapiens
MGSPAAPEGALGYVREFTRHSSDVLGNLNELRLRGILTDVTLLVGGQPLRAHKAVLIACSGFFYSIFRGRAGVGVDVLSLPGGPEARGFAPLLDFMYTSRLRLSPATAPAVLAAATYLQMEHVVQACHRFIQASYEPLGISLRPLEAEPPTPPTAPPPGSPRRSEGHPDPPTESRSCSQGPPSPASPDPKACNWKKYKYIVLNSQASQAGSLVGERSSGQPCPQARLPSGDEASSSSSSSSSSSEEGPIPGPQSRLSPTAATVQFKCGAPASTPYLLTSQAQDTSGSPSERARPLPGSEFFSCQNCEAVAGCSSGLDSLVPGDEDKPYKCQLCRSSFRYKGNLASHRTVHTGEKPYHCSICGARFNRPANLKTHSRIHSGEKPYKCETCGSRFVQVAHLRAHVLIHTGEKPYPCPTCGTRFRHLQTLKSHVRIHTGEKPYHCDPCGLHFRHKSQLRLHLRQKHGAATNTKVHYHILGGP

SEQ ID NO: 14795 - protein, 920 aa, Homo Sapiens
MGRSNSRSHSSRSKSRSQSSSRSRSRSHSRKKRYSSRSRSRTYSRSRSRDRMYSRDYRRDYRNNRGMRRPYGYRGRGRGYYQGGGGRYHRGGYRPVWNRRHSRSPRRGRSRSRSPKRRSVSSQRSRSRSRRSYRSSRSPRSSSSRSSSPYSKSPVSKRRGSQEKQTKKAEGEPQEESPLKSKSQEEPKDTFEHDPSESIDEFNKSSATSGDIWPGLSAYDNSPRSPHSPSPIATPPSQSSSCSDAPMLSTVHSAKNTPSQHSHSIQHSPERSGSGSVGNGSSRYSPSQNSPIHHIPSRRSPAKTIAPQNAPRDESRGRSSFYPDGGDQETAKTGKFLKRFTDEESRVFLLDRGNTRDKEASKEKGSEKGRAEGEWEDQEALDYFSDKESGKQKFNDSEGDDTEETEDYRQFRKSVLADQGKSFATASHRNTEEEGLKYKSKVSLKGNRESDGFREEKNYKLKETGYVVERPSTTKDKHKEEDKNSERITVKKETQSPEQVKSEKLKDLFDYSPPLHKNLDAREKSTFREESPLRIKMIASDSHRPEVKLKMAPVPLDDSNRPASLTKDRLLASTLVHSVKKEQEFRSIFDHIKLPQASKSTSESFIQHIVSLVHHVKEQYFKSAAMTLNERFTSYQKATEEHSTRQKSPEIHRRIDISPSTLRKHTRLAGEERVFKEENQKGDKKLRCDSADLRHDIDRRRKERSKERGDSKGSRESSGSRKQEKTPKDYKEYKSYKDDSKHKREQDHSRSSSSSASPSSPSSREEKESKKEREEEFKTHHEMKEYSGFAGVSRPRGTFFRIRGRGRARGVFAGTNTGPNNSNTTFQKRPKEEEWDPEYTPKSKKYFLHDDRDDGVDYWAKRGRGRGTFQRGRGRFNFKKSGSSPKWTHDKYQGDGIVEDEEETMENNEEKKDRRKEEKE

SEQ ID NO: 14796 - protein, 189 aa, Homo Sapiens
MKTKNRPPRRRAPVQDTEATPGEGTPDGSLPNPGPEPAKGLRSRPARAAARAPGEGRRRRPGPSGPGGRRDSSIQRRLESNERERQRMHKLNNAFQALREVIPHVRADKKLSKIETLTLAKNYIKSLTATILTMSSSRLPGLEGPGPKLYQHYQQQQQVAGGALGATEAQPQGHLQRYSTQIHSFREGT

SEQ ID NO: 14797 - protein, 235 aa, Homo Sapiens
MLRGAPGLGLTARKGAEDSAEDLGGPCPEPGGDSGVLGANGASCSRGEAEEPAGRRRARPVRSKARRMAANVRERKRILDYNEAFNALRRALRHDLGGKRLSKIATLRRAIHRIAALSLVLRASPAPRGPCGHLECHGPAARGDTGDTGASPPPPAGPSLARPDAARPSVPSAPRCASCPPHAPLARPSAVAEGPGLAQASGGSWRRCPGASSAGPPPWPRGYLRSAPGMGHPRS

SEQ ID NO: 14798 - protein, 547 aa, Homo Sapiens
MAGTKNKTRAQAKTEKKAAIQAKAGAEREATGVVRPVAKTRAKAKAKTGSKTDAVAEMKAVSKNKVVAETKEGALSEPKTLGKAMGDFTPKAGNESTSSTCKNEAGTDAWFWAGEEATINSWFWNGEEAGNSFSTKNDKPEIGAQVCAEELEPAAGADCKPRSGAEEEEEENVIGNWFWEGDDTSFDPNPKPVSRIVKPQPVYEINEKNRPKDWSEVTIWPNAPAVTPAVLGFRSQAPSEASPPSYIVLASAEENACSLPVATACRPSRNTRSCSQPIPECRFDSDPCIQTIDEIRRQIRIREVNGIKPFACPCKMECYMDSEEFEKLVSLLKSTTDPLIHKIARIAMGVHNVHPFAQEFINEVGVVTLIESLLSFPSPEMRKKTVITLNPPSGDERQRKIELHVKHMCKETMSFPLNSPGQQSGLKILGQLTTDFVHHYIVANYFSELFHLLSSGNCKTRNLVLKLLLNMSENPTAARDMINMKALAALKLIFNQKEAKANLVSGVAIFINIKEHIRKGSIVVVDHLSYNTLMAIFREVKEIIETM

SEQ ID NO: 14799 - protein, 381 aa, Homo Sapiens
MERGMHLGAAAAGEDDLFLHKSLSASTSKRLEAAFRSTPPGMDLSLAPPPRERPASSSSSPLGCFEPADPEGAGLLLPPPGGGGGGSAGSGGGGGGGVGVPGLLVGSAGVGGDPSLSSLPAGAALCLKYGESASRGSVAESSGGEQSPDDDSDGRCELVLRAGVADPRASPGAGGGGAKAAEGCSNAHLHGGASVPPGGLGGGGGGGSSSGSSGGGGGSGSGSGGSSSSSSSSSKKSKEQKALRLNINARERRRMHDLNDALDELRAVIPYAHSPSVRKLSKIATLLLAKNYILMQAQALEEMRRLVAYLNQGQAISAASLPSSAAAAAAAAALHPALGAYEQAAGYPFSAGLPPAASCPEKCALFNSVSSSLCKQCTEKP

SEQ ID NO: 14800 - protein, 225 aa, Homo Sapiens
MAELKSLSGDAYLALSHGYAAAAAGLAYGAAREPEAARGYGTPGPGGDLPAAPAPRAPAQAAESSGEQSGDEDDAFEQRRRRRGPGSAADGRRRPREQRSLRLSINARERRRMHDLNDALDGLRAVIPYAHSPSVRKLSKIATLLLAKNYILMQAQALDEMRRLVAFLNQGQGLAAPVNAAPLTPFGQATVCPFSAGAALGPCPDKCAAFSGTPSALCKHCHEKP

SEQ ID NO: 14801 - protein, 412 aa, Homo Sapiens
MERIPSAQPPPACLPKAPGLEHGDLPGMYPAHMYQVYKSRRGIKRSEDSKETYKLPHRLIEKKRRDRINECIAQLKDLLPEHLKLTTLGHLEKAVVLELTLKHVKALTNLIDQQQQKIIALQSGLQAGELSGRNVETGQEMFCSGFQTCAREVLQYLAKHENTRDLKSSQLVTHLHRVVSELLQGGTSRKPSDPAPKVMDFKEKPSSPAKGSEGPGKNCVPVIQRTFAHSSGEQSGSDTDTDSGYGGESEKGDLRSEQPCFKSDHGRRFTMGERIGAIKQESEEPPTKKNRMQLSDDEGHFTSSDLISSPFLGPHPHQPPFCLPFYLIPPSATAYLPMLEKCWYPTSVPVLYPGLNASAAALSSFMNPDKISAPLLMPQRLPSPLPAHPSVDSSVLLQALKPIPPLNLETKD

SEQ ID NO: 14802 - protein, 482 aa, Homo Sapiens
MDEGIPHLQERQLLEHRDFIGLDYSSLYMCKPKRSMKRDDTKDTYKLPHRLIEKKRRDRINECIAQLKDLLPEHLKLTTLGHLEKAVVLELTLKHLKALTALTEQQHQKIIALQNGERSLKSPIQSDLDAFHSGFQTCAKEVLQYLSRFESWTPREPRCVQLINHLHAVATQFLPTPQLLTQQVPLSKGTGAPSAAGSAAAPCLERAGQKLEPLAYCVPVIQRTQPSAELAAENDTDTDSGYGGEAEARPDREKGKGAGASRVTIKQEPPGEDSPAPKRMKLDSRGGGSGGGPGGGAAAAAAALLGPDPAAAAALLRPDAALLSSLVAFGGGGGAPFPQPAAAAAPFCLPFCFLSPSAAAAYVQPFLDKSGLEKYLYPAAAAAPFPLLYPGIPAPAAAAAAAAAAAAAAAAFPCLSSVLSPPPEKAGAAAATLLPHEVAPLGAPHPQHPHGRTHLPFAGPREPGNPESSAQEDPSQPGKEAP

SEQ ID NO: 14803 - protein, 825 aa, Homo Sapiens
MLDICLEKRVGTTLAAPKCNSSTVRFQGLAEGTKGTMKMDMEDADMTLWTEAEFEEKCTYIVNDHPWDSGADGGTSVQAEASLPRNLLFKYATNSEEVIGVMSKEYIPKGTRFGPLIGEIYTNDTVPKNANRKYFWRIYSRGELHHFIDGFNEEKSNWMRYVNPAHSPREQNLAACQNGMNIYFYTIKPIPANQELLVWYCRDFAERLHYPYPGELTMMNLTQTQSSLKQPSTEKNELCPKNVPKREYSVKEILKLDSNPSKGKDLYRSNISPLTSEKDLDDFRRRGSPEMPFYPRVVYPIRAPLPEDFLKASLAYGIERPTYITRSPIPSSTTPSPSARSSPDQSLKSSSPHSSPGNTVSPVGPGSQEHRDSYAYLNASYGTEGLGSYPGYAPLPHLPPAFIPSYNAHYPKFLLPPYGMNCNGLSAVSSMNGINNFGLFPRLCPVYSNLLGGGSLPHPMLNPTSLPSSLPSDGARRLLQPEHPREVLVPAPHSAFSFTGAAASMKDKACSPTSGSPTAGTAATAEHVVQPKATSAAMAAPSSDEAMNLIKNKRNMTGYKTLPYPLKKQNGKIKYECNVCAKTFGQLSNLKVHLRVHSGERPFKCQTCNKGFTQLAHLQKHYLVHTGEKPHECQVCHKRFSSTSNLKTHLRLHSGEKPYQCKVCPAKFTQFVHLKLHKRLHTRERPHKCSQCHKNYIHLCSLKVHLKGNCAAAPAPGLPLEDLTRINEEIEKFDISDNADRLEDVEDDISVISVVEKEILAVVRKEKEETGLKVSLQRNMGNGLLSSGCSLYESSDLPLMKLPPSNPLPLVPVKVKQETVEPMDP

SEQ ID NO: 14804 - protein, 396 aa, Homo Sapiens; identical to SEQ ID NO: 1492

SEQ ID NO: 14805 - protein, 994 aa, Homo Sapiens; identical to SEQ ID NO: 1514

SEQ ID NO: 14806 - protein, 1099 aa, Homo Sapiens
MAHLGPTPPPHSLNYKSEDRLSEQDWPAYFKVPCCGVDTSQIESEEAEVDVRERETQRDREPKRARDLTLRDSCTDNSMQFGTRTTTAEPGFMGTWQNADTNLLFRMSQQAIRCTLVNCTCECFQPGKINLRTCDQCKHGWVAHALDKLSTQHLYHPTQVEIVQSNVVFDISSLMLYGTQAVPVRLKILLDRLFSVLKQEEVLHILHGLGWTLRDYVRGYILQDAAGKVLDRWAIMSREEEIITLQQFLRFGETKSIVELMAIQEKEGQAVAVPSSKTDSDIRTFIESNNRTRSPSLLAHLENSNPSSIHHFENIPNSLAFLLPFQYINPVSAPLLGLPPNGLLLEQPGLRLREPSLSTQNEYNESSESEVSPTPYKNDQTPNRNALTSITNVEPKTEPACVSPIQNSAPVSDLTKTEHPKSSFRIHRMRRMGSASRKGRVFCNACGKTFYDKGTLKIHYNAVHLKIKHRCTIEGCNMVFSSLRSRNRHSANPNPRLHMPMLRNNRDKDLIRATSGAATPVIASTKSNLALTSPGRPPMGFTTPPLDPVLQNPLPSQLVFSGLKTVQPVPPFYRSLLTPGEMVSPPTSLPTSPIIPTSGTIEQHPPPPSEPVVPAVMMATHEPSADLAPKKKPRKSSMPVKIEKEIIDTADEFDDEDDDPNDGGAVVNDMSHDNHCHSQEEMSPGMSVKDFSKHNRTRCISRTEIRRADSMTSEDQEPERDYENESESSEPKLGEESMEGDEHIHSEVSEKVLMNSERPDENHSEPSHQDVIKVKEEFTDPTYDMFYMSQYGLYNGGGASMAALHESFTSSLNYGSPQKFSPEGDLCSSPDPKICYVCKKSFKSSYSVKLHYRNVHLKEMHVCTVAGCNAAFPSRRSRDRHSANINLHRKLLTKELDDMGLDSSQPSLSKDLRDEFLVKIYGAQHPMGLDVREDASSPAGTEDSHLNGYGRGMAEDYMVLDLSTTSSLQSSSSIHSSRESDAGSDEGILLDDIDGASDSGESAHKAEAPALPGSLGAEVSGSLMFSSLSGSNGGIMCNICHKMYSNKGTLRVHYKTVHLREMHKCKVPGCNMMFSSVRSRNRHSQNPNLHKNIPFTSVD

SEQ ID NO: 14807 - protein, 137 aa, Homo Sapiens; identical to SEQ ID NO: 1531

SEQ ID NO: 14808 - protein, 86 aa, Homo Sapiens
MELSAEYLREKLQRDLEAEHVEVEDTTLNRCSCSFRVLVVSAKFEGKPLLQRHRLVNACLAEELPHIHAFEQKTLTPDQWARERQK

SEQ ID NO: 14809 - protein, 107 aa, Homo Sapiens
MAAWSPAAAAPLLRGIRGLPLHHRMFATQTEGELRVTQILKEKFPRATAIKVTDISGGCGAMYEIKIESEEFKEKRTVQQHQMVNQALKEEIKEMHGLRIFTSVPKR

SEQ ID NO: 14810 - protein, 3046 aa, Homo Sapiens
MRGRRGRPPKQPAAPAAERCAPAPPPPPPPPTSGPIGGLRSRHRGSSRGRWAAAQAEVAPKTRLSSPRGGSSSRRKPPPPPPAPPSTSAPGRGGRGGGGGRTGGGGGGGHLARTTAARRAVNKVVYDDHESEEEEEEEDMVSEEEEEEDGDAEETQDSEDDEEDEMEEDDDDSDYPEEMEDDDDDASYCTESSFRSHSTYSSTPGRRKPRVHRPRSPILEEKDIPPLEFPKSSEDLMVPNEHIMNVIAIYEVLRNFGTVLRLSPFRFEDFCAALVSQEQCTLMAEMHVVLLKAVLREEDTSNTTFGPADLKDSVNSTLYFIDGMTWPEVLRVYCESDKEYHHVLPYQEAEDYPYGPVENKIKVLQFLVDQFLTTNIAREELMSEGVIQYDDHCRVCHKLGDLLCCETCSAVYHLECVKPPLEEVPEDEWQCEVCVAHKVPGVTDCVAEIQKNKPYIRHEPIGYDRSRRKYWFLNRRLIIEEDTENENEKKIWYYSTKVQLAELIDCLDKDYWEAELCKILEEMREEIHRHMDITEDLTNKARGSNKSFLAAANEEILESIRAKKGDIDNVKSPEETEKDKNETENDSKDAEKNREEFEDQSLEKDSDDKTPDDDPEQGKSEEPTEVGDKGNSVSANLGDNTTNATSEETSPSEGRSPVGCLSETPDSSNMAEKKVASELPQDVPEEPNKTCESSNTSATTTSIQPNLENSNSSSELNSSQSESAKAADDPENGERESHTPVSIQEEIVGDFKSEKSNGELSESPGAGKGASGSTRIITRLRNPDSKLSQLKSQQVAAAAHEANKLFKEGKEVLVVNSQGEISRLSTKKEVIMKGNINNYFKLGQEGKYRVYHNQYSTNSFALNKHQHREDHDKRRHLAHKFCLTPAGEFKWNGSVHGSKVLTISTLRLTITQLENNIPSSFLHPNWASHRANWIKAVQMCSKPREFALALAILECAVKPVVMLPIWRESLGHTRLHRMTSIEREEKEKVKKKEKKQEEEETMQQATWVKYTFPVKHQVWKQKGEEYRVTGYGGWSWISKTHVYRFVPKLPGNTNVNYRKSLEGTKNNMDENMDESDKRKCSRSPKKIKIEPDSEKDEVKGSDAAKGADQNEMDISKITEKKDQDVKELLDSDSDKPCKEEPMEVDDDMKTESHVNCQESSQVDVVNVSEGFHLRTSYKKKTKSSKLDGLLERRIKQFTLEEKQRLEKIKLEGGIKGIGKTSTNSSKNLSESPVITKAKEGCQSDSMRQEQSPNANNDQPEDLIQGCSESDSSVLRMSDPSHTTNKLYPKDRVLDDVSIRSPETKCPKQNSIENDIEEKVSDLASRGQEPSKSKTKGNDFFIDDSKLASADDIGTLICKNKKPLIQEESDTIVSSSKSALHSSVPKSTNDRDATPLSRAMDFEGKLGCDSESNSTLENSSDTVSIQDSSEEDMIVQNSNESISEQFRTREQDVEVLEPLKCELVSGESTGNCEDRLPVKGTEANGKKPSQQKKLEERPVNKCSDQIKLKNTTDKKNNENRESEKKGQRTSTFQINGKDNKPKIYLKGECLKEISESRVVSGNVEPKVNNINKIIPENDIKSLTVKESAIRPFINGDVIMEDFNERNSSETKSHLLSSSDAEGNYRDSLETLPSTKESDSTQTTTPSASCPESNSVNQVEDMEIETSEVKKVTSSPITSEEESNLSNDFIDENGLPINKNENVNGESKRKTVITEVTTMTSTVATESKTVIKVEKGDKQTVVSSTENCAKSTVTTTTTTVTKLSTPSTGGSVDIISVKEQSKTVVTTTVTDSLTTTGGTLVTSMTVSKEYSTRDKVKLMKFSRPKKTRSGTALPSYRKFVTKSSKKSIFVLPNDDLKKLARKGGIREVPYFNYNAKPALDIWPYPSPRPTFGITWRYRLQTVKSLAGVSLMLRLLWASLRWDDMAAKAPPGGGTTRTETSETEITTTEIIKRRDVGPYGIRSEYCIRKIICPIGVPETPKETPTPQRKGLRSSALRPKRPETPKQTGPVIIETWVAEEELELWEIRAFAERVEKEKAQAVEQQAKKRLEQQKPTVIATSTTSPTSSTTSTISPAQKVMVAPISGSVTTGTKMVLTTKVGSPATVTFQQNKNFHQTFATWVKQGQSNSGVVQVQQKVLGIIPSSTGTSQQTFTSFQPRTATVTIRPNTSGSGGTTSNSQVITGPQIRPGMTVIRTPLQQSTLGKAIIRTPVMVQPGAPQQVMTQIIRGQPVSTAVSAPNTVSSTPGQKSLTSATSTSNIQSSASQPPRPQQGQVKLTMAQLTQLTQGHGGNQGLTVVIQGQGQTTGQLQLIPQGVTVLPGPGQQLMQAAMPNGTVQRFLFTPLATTATTASTTTTTVSTTAAGTGEQRQSKLSPQMQVHQDKTLPPAQSSSVGPAEAQPQTAQPSAQPQPQTQPQSPAQPEVQTQPEVQTQTTVSSHVPSEAQPTHAQSSKPQVAAQSQPQSNVQGQSPVRVQSPSQTRIRPSTPSQLSPGQQSQVQTTTSQPIPIQPHTSLQIPSQGQPQSQPQVQSSTQTLSSGQTLNQVTVSSPSRPQLQIQQPQPQVIAVPQLQQQVQVLSQIQSQVVAQIQAQQSGVPQQIKLQLPIQIQQSSAVQTHQIQNVVTVQAASVQEQLQRVQQLRDQQQKKKQQQIEIKREHTLQASNQSEIIQKQVVMKHNAVIEHLKQKKSMTPAEREENQRMIVCNQVMKYILDKIDKEEKQAAKKRKREESVEQKRSKQNATKLSALLFKHKEQLRAEILKKRALLDKDLQIEVQEELKRDLKIKKEKDLMQLAQATAVAAPCPPVTPAPPAPPAPPPSPPPPPAVQHTGLLSTPTLPAASQKRKREEEKDSSSKSKKKKMISTTSKETKKDTKLYCICKTPYDESKFYIGCDRCQNWYHGRCVGILQSEAELIDEYVCPQCQSTEDAMTVLTPLTEKDYEGLKRVLRSLQAHKMAWPFLEPVDPNDAPDYYGVIKEPMDLATMEERVQRRYYEKLTEFVADMTKIFDNCRYYNPSDSPFYQCAEVLESFFVQKLKGFKASRSHNNKLQSTAS

SEQ ID NO: 14811 - protein, 1863 aa, Homo Sapiens
MDLSALRVEEVQNVINAMQKILECPICLELIKEPVSTKCDHIFCKFCMLKLLNQKKGPSQCPLCKNDITKRSLQESTRFSQLVEELLKIICAFQLDTGLEYANSYNFAKKENNSPEHLKDEVSIIQSMGYRNRAKRLLQSEPENPSLQETSLSVQLSNLGTVRTLRTKQRIQPQKTSVYIELGSDSSEDTVNKATYCSVGDQELLQITPQGTRDEISLDSAKKAACEFSETDVTNTEHHQPSNNDLNTTEKRAAERHPEKYQGSSVSNLHVEPCGTNTHASSLQHENSSLLLTKDRMNVEKAEFCNKSKQPGLARSQHNRWAGSKETCNDRRTPSTEKKVDLNADPLCERKEWNKQKLPCSENPRDTEDVPWITLNSSIQKVNEWFSRSDELLGSDDSHDGESESNAKVADVLDVLNEVDEYSGSSEKIDLLASDPHEALICKSERVHSKSVESNIEDKIFGKTYRKKASLPNLSHVTENLIIGAFVTEPQIIQERPLTNKLKRKRRPTSGLHPEDFIKKADLAVQKTPEMINQGTNQTEQNGQVMNITNSGHENKTKGDSIQNEKNPNPIESLEKESAFKTKAEPISSSISNMELELNIHNSKAPKKNRLRRKSSTRHIHALELVVSRNLSPPNCTELQIDSCSSSEEIKKKKYNQMPVRHSRNLQLMEGKEPATGAKKSNKPNEQTSKRHDSDTFPELKLTNAPGSFTKCSNTSELKEFVNPSLPREEKEEKLETVKVSNNAEDPKDLMLSGERVLQTERSVESSSISLVPGTDYGTQESISLLEVSTLGKAKTEPNKCVSQCAAFENPKGLIHGCSKDNRNDTEGFKYPLGHEVNHSRETSIEMEESELDAQYLQNTFKVSKRQSFAPFSNPGNAEEECATFSAHSGSLKKQSPKVTFECEQKEENQGKNESNIKPVQTVNITAGFPVVGQKDKPVDNAKCSIKGGSRFCLSSQFRGNETGLITPNKHGLLQNPYRIPPLFPIKSFVKTKCKKNLLEENFEEHSMSPEREMGNENIPSTVSTISRNNIRENVFKEASSSNINEVGSSTNEVGSSINEIGSSDENIQAELGRNRGPKLNAMLRLGVLQPEVYKQSLPGSNCKHPEIKKQEYEEVVQTVNTDFSPYLISDNLEQPMGSSHASQVCSETPDDLLDDGEIKEDTSFAENDIKESSAVFSKSVQKGELSRSPSPFTHTHLAQGYRRGAKKLESSEENLSSEDEELPCFQHLLFGKVNNIPSQSTRHSTVATECLSKNTEENLLSLKNSLNDCSNQVILAKASQEHHLSEETKCSASLFSSQCSELEDLTANTNTQDPFLIGSSKQMRHQSESQGVGLSDKELVSDDEERGTGLEENNQEEQSMDSNLGEAASGCESETSVSEDCSGLSSQSDILTTQQRDTMQHNLIKLQQEMAELEAVLEQHGSQPSNSYPSIISDSSALEDLRNPEQSTSEKAVLTSQKSSEYPISQNPEGLSADKFEVSADSSTSKNKEPGVERSSPSKCPSLDDRWYMHSCSGSLQNRNYPSQEELIKVVDVEEQQLEESGPHDLTETSYLPRQDLEGTPYLESGISLFSDDPESDPSEDRAPESARVGNIPSSTSALKVPQLKVAESAQSPAAAHTTDTAGYNAMEESVSREKPELTASTERVNKRMSMVVSGLTPEEFMLVYKFARKHHITLTNLITEETTHVVMKTDAEFVCERTLKYFLGIAGGKWVVSYFWVTQSIKERKMLNEHDFEVRGDVVNGRNHQGPKRARESQDRKIFRGLEICCYGPFTNMPTDQLEWMVQLCGASVVKELSSFTLGTGVHPIVVVQPDAWTEDNGFHAIGQMCEAPVVTREWVLDSVALYQCQELDTYLIPQIPHSHY

SEQ ID NO: 14812 - protein, 233 aa, Homo Sapiens
MNLNFTSPLHPASSQRPTSFFIEDILLHKPKPLREVAPDHFASSLASRVPLLDYGYPLMPTPTLLAPHAHHPLHKGDHHHPYFLTTSGMPVPALFPHPQHAELPGKHCRRRKARTVFSDSQLSGLEKRFEIQRYLSTPERVELATALSLSETQVKTWFQNRRMKHKKQLRKSQDEPKAPDGPESPEGSPRGSEAATAAEARLSLPAGPFVLTEPEDEVDIGDEGELGSGPHVL

SEQ ID NO: 14813 - protein, 1177 aa, Homo Sapiens
MDVYPPRRQGLPRARSPGGSSRGSPSVSCSRLRQVQSILTQSSKSRPDGILCILGIDSRYNEGCRELANYLLFGLYNQNTSDFEKTGFSEEVLDDVIILIKSDSVHLYCNPVNFRYLLPYVAHWRNLHFHCMTENEYEDEEAAEEFKITSFVDMVRDCSRIGIPYSSQGHLQIFDMFVVEKWPIVQAFALEGIGGDGFFTMKYELQDVSLNLWNVYSKMDPMSLESLLSDDLVAFEHQWTSFFANFDTEIPFLLELSESQAGEPFRSYFSHGMISSHITENSPNRQPFVLFGNHSTRENLNAGNFNFPSEGHLVRSTGPGGSFAKHMVAQCVSPKGPLACSRTYFFGATHVPYLGGDSKLPKKTEQIRLLSQIYAAVIEAVLAGIACYAKTSSLTKAKEVAEQTLGSGLDSFELIPFKAALRSKMTFHIHAVNNQGRIVPLDSEDSLSFVKTACMAVYDIPDLLGGNGCLGSVVFSESFLTSQILVKEKDGTVTTETSSVVLTAAVPRFCSWLVEDNEVKLSEKTQQAVRGDESFLGTYLTGGEGAYLYSSNLQSWPEEGNVHFFSSGLLFSHCRHRSIIISKDHMNSISFYDGDSTSTVAALLIDFKSSLLPHLPVHFHGSSNFLMIALFPKSKIYQAFYSEVFSLWKQQDNSGISLKVIQEDGLSVEQKRLHSSAQKLFSALSQPAGEKRSSLKLLSAKLPELDWFLQHFAISSISQEPVMRTHLPVLLQQAEINTTHRIESDKVIISIVTGLPGCHASELCAFLVTLHKECGRWMVYRQIMDSSECFHAAHFQRYLSSALEAQQNRSARQSAYIRKKTRLLVVLQGYTDVIDVVQALQTHPDSNVKASFTIGAITACVEPMSCYMEHRFLFPKCLDQCSQGLVSNVVFTSHTTEQRHPLLVQLQSLIRAANPAAAFILAENGIVTRNEDIELILSENSFSSPEMLRSRYLMYPGWYEGKLNAGSVYPLMVQICVWFGRPLEKTRFVAKCKAIQSSIKPSPFSGNIYHILGKVKFSDSERTMEVCYNTLANSLSIMPVLEGPTPPPDSKSVSQDSSGQQECYLVFIGCSLKEDSIKDWLRQSAKQKPQRKALKTRGMLTQQEIRSIHVKRHLEPLPAGYFYNGTQFVNFFGDKTDFHPLMDQFMNDYVEEANREIEKYNQELEQQEYHDLFELKP

SEQ ID NO: 14814 - protein, 1673 aa, Homo Sapiens
MWRAEGKWLPKTSRKSVSQSVFCGTSTYCVLNTVPPIEDDHGNSNSSHVKIFLPKKLLECLPKCSSLPKERHRWNTNEEIAAYLITFEKHEEWLTTSPKTRPQNGSMILYNRKKVKYRKDGYCWKKRKDGKTTREDHMKLKVQGVECLYGCYVHSSIIPTFHRRCYWLLQNPDIVLVHYLNVPAIEDCGKPCGPILCSINTDKKEWAKWTKEELIGQLKPMFHGIKWTCSNGNSSSGFSVEQLVQQILDSHQTKPQPRTHNCLCTGSLGAGGSVHHKCNSAKHRIISPKVEPRTGGYGSHSEVQHNDVSEGKHEHSHSKGSSREKRNGKVAKPVLLHQSSTEVSSTNQVEVPDTTQSSPVSISSGLNSDPDMVDSPVVTGVSGMAVASVMGSLSQSATVFMSEVTNEAVYTMSPTAGPNHHLLSPDASQGLVLAVSSDGHKFAFPTTGSSESLSMLPTNVSEELVLSTTLDGGRKIPETTMNFDPDCFLNNPKQGQTYGGGGLKAEMVSSNIRHSPPGERSFSFTTVLTKEIKTEDTSFEQQMAKEAYSSSAAAVAASSLTLTAGSSLLPSGGGLSPSTTLEQMDFSAIDSNKDYTSSFSQTGHSPHIHQTPSPSFFLQDASKPLPVEQNTHSSLSDSGGTFVMPTVKTEASSQTSSCSGHVETRIESTSSLHLMQFQANFQAMTAEGEVTMETSQAAEGSEVLLKSGELQACSSEHYLQPETNGVIRSAGGVPILPGNVVQGLYPVAQPSLGNASNMELSLDHFDISFSNQFSDLINDFISVEGGSSTIYGHQLVSGDSTALSQSEDGARAPFTQAEMCLPCCSPQQGSLQLSSSEGGASTMAYMHVAEVVSAASAQGTLGMLQQSGRVFMVTDYSPEWSYPEGGVKVLITGPWQEASNNYSCLFDQISVPASLIQPGVLRCYCPAHDTGLVTLQVAFNNQIISNSVVFEYKARALPTLPSSQHDWLSLDDNQFRMSILERLEQMERRMAEMTGSQQHKQASGGGSSGGGSGSGNGGSQAQCASGTGALGSCFESRVVVVCEKMMSRACWAKSKHLIHSKTFRGMTLLHLAAAQGYATLIQTLIKWRTKHADSIDLELEVDPLNVDHFSCTPLMWACALGHLEAAVVLYKWDRRAISIPDSLGRLPLGIARSRGHVKLAECLEHLQRDEQAQLGQNPRIHCPASEEPSTESWMAQWHSEAISSPEIPKGVTVIASTNPELRRPRSEPSNYYSSESHKDYPAPKKHKLNPEYFQTRQEKLLPTALSLEEPNIRKQSPSSKQSVPETLSPSEGVRDFSRELSPPTPETAAFQASGSQPVGKWNSKDLYIGVSTVQVTGNPKGTSVGKEAAPSQVRPREPMSVLMMANREVVNTELGSYRDSAENEECGQPMDDIQVNMMTLAEHIIEATPDRIKQENFVPMESSGLERTDPATISSTMSWLASYLADADCLPSAAQIRSAYNEPLTPSSNTSLSPVGSPVSEIAFEKPNLPSAADWSEFLSASTSEKVENEFAQLTLSDHEQRELYEAARLVQTAFRKYKGRPLREQQEVAAAVIQRCYRKYKQYALYKKMTQAAILIQSKFRSYYEQKKFQQSRRAAVLIQKYYRSYKKCGKRRQARRTAVIVQQKLRSSLLTKKQDQAARKIMRFLRRCRHSPLVDHRLYKRSERIEKGQGT

SEQ ID NO: 14815 - protein, 1202 aa, Homo Sapiens
MNTKDTTEVAENSHHLKIFLPKKLLECLPRCPLLPPERLRWNTNEEIASYLITFEKHDEWLSCAPKTRPQNGSIILYNRKKVKYRKDGYLWKKRKDGKTTREDHMKLKVQGMECLYGCYVHSSIVPTFHRRCYWLLQNPDIVLVHYLNVPALEDCGKGCSPIFCSISSDRREWLKWSREELLGQLKPMFHGIKWSCGNGTEEFSVEHLVQQILDTHPTKPAPRTHACLCSGGLGSGSLTHKCSSTKHRIISPKVEPRALTLTSIPHAHPPEPPPLIAPLPPELPKAHTSPSSSSSSSSSGFAEPLEIRPSPPTSRGGSSRGGTAILLLTGLEQRAGGLTPTRHLAPQADPRPSMSLAVVVGTEPSAPPAPPSPAFDPDRFLNSPQRGQTYGGGQGVSPDFPEAEAAHTPCSALEPAAALEPQAAARGPPPQSVAGGRRGNCFFIQDDDSGEELKGHGAAPPIPSPPPSPPPSPAPLEPSSRVGRGEALFGGPVGASELEPFSLSSFPDLMGELISDEAPSIPAPTPQLSPALSTITDFSPEWSYPEGGVKVLITGPWTEAAEHYSCVFDHIAVPASLVQPGVLRCYCPAHEVGLVSLQVAGREGPLSASVLFEYRARRFLSLPSTQLDWLSLDDNQFRMSILERLEQMEKRMAEIAAAGQVPCQGPDAPPVQDEGQGPGFEARVVVLVESMIPRSTWKGPERLAHGSPFRGMSLLHLAAAQGYARLIETLSQWRSVETGSLDLEQEVDPLNVDHFSCTPLMWACALGHLEAAVLLFRWNRQALSIPDSLGRLPLSVAHSRGHVRLARCLEELQRQEPSVEPPFALSPPSSSPDTGLSSVSSPSELSDGTFSVTSAYSSAPDGSPPPAPLPASEMTMEDMAPGQLSSGVPEAPLLLMDYEATNSKGPLSSLPALPPASDDGAAPEDADSPQAVDVIPVDMISLAKQIIEATPERIKREDFVGLPEAGASMRERTGAVGLSETMSWLASYLENVDHFPSSTPPSELPFERGRLAVPSAPSWAEFLSASTSGKMESDFALLTLSDHEQRELYEAARVIQTAFRKYKGRRLKEQQEVAAAVIQRCYRKYKQLTWIALKFALYKKMTQAAILIQSKFRSYYEQKRFQQSRRAAVLIQQHYRSYRRRPGPPHRTSATLPARNKGSFLTKKQDQAARKIMRFLRRCRHRMRELKQNQELEGLPQPGLAT

SEQ ID NO: 14816 - protein, 147 aa, Homo Sapiens
MSSEPPPPPQPPTHQASVGLLDTPRSRERSPSPLRGNVVPSPLPTRRTRTFSATVRASQGPVYKGVCKCFCRSKGHGFITPADGGPDIFLHISDVEGEYVPVEGDEVTYKMCSIPPKNEKLQAVEVVITHLAPGTKHETWSGHVISS

SEQ ID NO: 14817 - protein, 1759 aa, Homo Sapiens
MDLGTAEGTRCTDPPAGKPAMAPKRKGGLKLNAICAKLSRQVVVEKRADAGSHTEGSPSQPRDQERSGPESGAARAPRSEEDKRRAVIEKWVNGEYSEEPAPTPVLGRIAREGLELPPEGVYMVQPQGCSDEEDHAEEPSKDGGALEEKDSDGAASKEDSGPSTRQASGEASSLRDYAASTMTEFLGMFGYDDQNTRDELARKISFEKLHAGSTPEAATSSMLPTSEDTLSKRARFSKYEEYIRKLKAGEQLSWPAPSTKTEERVGKEVVGTLPGLRLPSSTAHLETKATILPLPSHSSVQMQNLVARASKYDFFIQKLKTGENLRPQNGSTYKKPSKYDLENVKYLHLFKPGEGSPDMGGAIAFKTGKVGRPSKYDVRGIQKPGPAKVPPTPSLAPAPLASVPSAPSAPGPGPEPPASLSFNTPEYLKSTFSKTDSITTGTVSTVKNGLPTDKPAVTEDVNIYQKYIARFSGSQHCGHIHCAYQYREHYHCLDPECNYQRFTSKQDVIRHYNMHKKRDNSLQHGFMRFSPLDDCSVYYHGCHLNGKSTHYHCMQVGCNKVYTSTSDVMTHENFHKKNTQLINDGFQRFRATEDCGTADCQFYGQKTTHFHCRRPGCTFTFKNKCDIEKHKSYHIKDDAYAKDGFKKFYKYEECKYEGCVYSKATNHFHCIRAGCGFTFTSTSQMTSHKRKHERRHIRSSGALGLPPSLLGAKDTEHEESSNDDLVDFSALSSKNSSLSASPTSQQSSASLAAATAATEAGPSATKPPNSKISGLLPQGLPGSIPLALALSNSGLPTPTPYFPILAGRGSTSLPVGTPSLLGAVSSGSAASATPDTPTLVASGAGDSAPVAAASVPAPPASIMERISASKGLISPMMARLAAAALKPSATFDPGSGQQVTPARFPPAQVKPEPGESTGAPGPHEASQDRSLDLTVKEPSNESNGHAVPANSSLLSSLMNKMSQGNPGLGSLLNIKAEAEGSPAAEPSPFLGKAVKALVQEKLAEPWKVYLRRFGTKDFCDGQCDFLHKAHFHCVVEECGALFSTLDGAIKHANFHFRTEGGAAKGNTEAAFPASAAETKPPMAPSSPPVPPVTTATVSSLEGPAPSPASVPSTPTLLAWKQLASTIPQMPQIPASVPHLPASPLATTSLENAKPQVKPGFLQFQENDPCLATDCKYANKFHFHCLFGNCKYVCKTSGKAESHCLDHINPNNNLVNVRDQFAYYSLQCLCPNQHCEFRMRGHYHCLRTGCYFVTNITTKLPWHIKKHEKAERRAANGFKYFTKREECGRLGCKYNQVNSHFHCIREGCQFSFLLKHQMTSHARKHMRRMLGKNFDRVPPSQGPPGLMDAETDECMDYTGCSPGAMSSESSTMDRSCSSTPVGNESTAAGNTISMPTASGAKKRFWIIEDMSPFGKRRKTASSRKMLDEGMMLEGFRRFDLYEDCKDAACQFSLKVTHYHCTRENCGYKFCGRTHMYKHAQHHDRVDNLVLDDFKRFKASLSCHFADCPFSGTSTHFHCLRCRFRCTDSTKVTAHRKHHGKQDVISAAGFCQFSSSADCAVPDCKYKLKCSHFHCTFPGCRHTVVGMSQMDSHKRKHEKQERGEPAAEGPAPGPPISLDGSLSLGAEPGSLLFLQSAAAGLGLALGDAGDPGPPDAAAPGPREGAAAAAAAAGESSQEDEEEELELPEEEAEDDEDEDDDEDDDDEDDDEDDDDEDLRTDSEESLPEAAAEAAGAGARTPALAALAALGAPGPAPTAASSP

SEQ ID NO: 14818 - protein, 182 aa, Homo Sapiens
MPRVVPDQRSKFENEEFFRKLSRECEIKYTGFRDRPHEERQARFQNACRDGRSEIAFVATGTNLSLQFFPASWQGEQRQTPSREYVDLEREAGKVYLKAPMILNGVCVIWKGWIDLQRLDGMGCLEFDEERAQQEDALAQQAFEEARRRTREFEDRDRSHREEMEVRVSQLLAVTGKKTTRP

SEQ ID NO: 14819 - protein, 727 aa, Homo Sapiens
MESEDTKKTQEMKTDLNLLLECLKYQMDNAFSQKEALVTIHSICQQNSNASVYFREIGGLMFVKNLAKSSEHSMVKEAALYTLGAIAEKNVYCQQTLCTSELFEDLTWFLSNDSNINLKRMSVYVILVLVSNNRTGQTLVRETGCITVLSRLFRTVISKHELDLSDKNVFQSYQLWSSVCSTLCVCVNNPQNDENQMFCCSLFPHANEWLKNCTTPEIIRPICSFIGLTLANNTYVQKYFVSVGGLDVLSQVLMQLESDSHETLSSAKLAVVVTKTVDACIADNPTFGIVLSKYHIVSKLLALLLHESLDSGEKFSIMLTLGHCTEDCEENQYDLFKNNGLPLMIQALTESQNEELNKAATFVLHNCKKITEKLSLSLGEYPFDENETQQLKDISVKENNLEEHWRKAKEILHRIEQLEREGNEEEIQRENYQDNISSMNISIQNTWKHLHADRIGRGSKAEDEDKSHSRQLQSYKSHGVMSKACTNDDQMKTPLKSANPVHACYRESEQNKTLYKAKSSCNQNLHEETTFEKNFVSQSSDHVFKHPVHIAKNIKQQLPVTDPFTLCSDIINKEVVSFLATPSCSEMLTYRCSGCIAVEKSLNSRNFSKLLHSCPYQCDRHKVIVEAEDRYKSELRKSLICNKKILLTPRRRQRLSNESTTPGGIKKRRIRKNFTEEEVNYLFNGVKKMGNHWNSILWSFPFQQGRKAVDLAHKYHKLTKHPTCAAS

SEQ ID NO: 14820 - protein, 802 aa, Homo Sapiens
MPRIMIKGGVWRNTEDEILKAAVMKYGKNQWSRIASLLHRKSAKQCKARWYEWLDPSIKKTEWSREEEEKLLHLAKLMPTQWRTIAPIIGRTAAQCLEHYEFLLDKAAQRDNEEETTDDPRKLKPGEIDPNPETKPARPDPIDMDEDELEMLSEARARLANTQGKKAKRKAREKQLEEARRLAALQKRRELRAAGIEIQKKRKRKRGVDYNAEIPFEKKPALGFYDTSEENYQALDADFRKLRQQDLDGELRSEKEGRDRKKDKQHLKRKKESDLPSAILQTSGVSEFTKKRSKLVLPAPQISDAELQEVVKVGQASEIARQTAEESGITNSASSTLLSEYNVTNNSVALRTPRTPASQDRILQEAQNLMALTNVDTPLKGGLNTPLHESDFSGVTPQRQVVQTPNTVLSTPFRTPSNGAEGLTPRSGTTPKPVINSTPGRTPLRDKLNINPEDGMADYSDPSYVKQMERESREHLRLGLLGLPAPKNDFEIVLPENAEKELEEREIDDTYIEDAADVDARKQAIRDAERVKEMKRMHKAVQKDLPRPSEVNETILRPLNVEPPLTDLQKSEELIKKEMITMLHYDLLHHPYEPSGNKKGKTVGFGTNNSEHITYLEHNPYEKFSKEELKKAQDVLVQEMEVVKQGMSHGELSSEAYNQVWEECYSQVLYLPGQSRYTRANLASKKDRIESLEKRLEINRGHMTTEAKRAAKMEKKMKILLGGYQSRAMGLMKQLNDLWDQIEQAHLELRTFEELKKHEDSAIPRRLECLKEDVQRQQEREKELQHRYADLLLEKETLKSKF

SEQ ID NO: 14821 - protein, 265 aa, Homo Sapiens
MYVGYVLDKDSPVYPGPARPASLGLGPQAYGPPAPPPAPPQYPDFSSYSHVEPAPAPPTAWGAPFPAPKDDWAAAYGPGPAAPAASPASLAFGPPPDFSPVPAPPGPGPGLLAQPLGGPGTPSSPGAQRPTPYEWMRRSVAAGGGGGSGKTRTKDKYRVVYTDHQRLELEKEFHYSRYITIRRKSELAANLGLTERQVKIWFQNRRAKERKVNKKKQQQQQPPQPPMAHDITATPAGPSLGGLCPSNTSLLATSSPMPVKEEFLP

SEQ ID NO: 14822 - protein, 313 aa, Homo Sapiens
MYVSYLLDKDVSMYPSSVRHSGGLNLAPQNFVSPPQYPDYGGYHVAAAAAAAANLDSAQSPGPSWPAAYGAPLREDWNGYAPGGAAAAANAVAHGLNGGSPAAAMGYSSPADYHPHHHPHHHPHHPAAAPSCASGLLQTLNPGPPGPAATAAAEQLSPGGQRRNLCEWMRKPAQQSLGSQVKTRTKDKYRVVYTDHQRLELEKEFHYSRYITIRRKAELAATLGLSERQVKIWFQNRRAKERKINKKKLQQQQQQQPPQPPPPPPQPPQPQPGPLRSVPEPLSPVSSLQASVPGSVPGVLGPTGGVLNPTVTQ

SEQ ID NO: 14823 - protein, 284 aa, Homo Sapiens
MYGSCLLEKEAGMYPGTLMSPGGDGTAGTGGTGGGGSPMPASNFAAAPAFSHYMGYPHMPSMDPHWPSLGVWGSPYSPPREDWSVYPGPSSTMGTVPVNDVTSSPAAFCSTDYSNLGPVGGGTSGSSLPGQAGGSLVPTDAGAAKASSPSRSRHSPYAWMRKTVQVTGKTRTKEKYRVVYTDHQRLELEKEFHCNRYITIQRKSELAVNLGLSERQVKIWFQNRRAKERKMIKKKISQFENSGGSVQSDSDSISPGELPNTFFTTPSAVRGFQPIEIQQVIVSE

SEQ ID NO: 14824 - protein, 358 aa, Homo Sapiens
MESADFYEAEPRPPMSSHLQSPPHAPSSAAFGFPRGAGPAQPPAPPAAPEPLGGICEHETSIDISAYIDPAAFNDEFLADLFQHSRQQEKAKAAVGPTGGGGGGDFDYPGAPAGPGGAVMPGGAHGPPPGYGCAAAGYLDGRLEPLYERVGAPALRPLVIKQEPREEDEAKQLALAGLFPYQPPPPPPPSHPHPHPPPAHLAAPHLQFQIAHCGQTTMHLQPGHPTPPPTPVPSPHPAPALGAAGLPGPGSALKGLGAAHPDLRASGGSGAGKAKKSVDKNSNEYRVRRERNNIAVRKSRDKAKQRNVETQQKVLELTSDNDRLRKRVEQLSRELDTLRGIFRQLPESSLVKAMGNCA

SEQ ID NO: 14825 - protein, 345 aa, Homo Sapiens
MQRLVAWDPACLPLPPPPPAFKSMEVANFYYEADCLAAAYGGKAAPAAPPAARPGPRPPAGELGSIGDHERAIDFSPYLEPLGAPQAPAPATATDTFEAAPPAPAPAPASSGQHHDFLSDLFSDDYGGKNCKKPAEYGYVSLGRLGAAKGALHPGCFAPLHPPPPPPPPPAELKAEPGFEPADCKRKEEAGAPGGGAGMAAGFPYALRAYLGYQAVPSGSSGSLSTSSSSSPPGTPSPADAKAPPTACYAGAAPAPSQVKSKAKKTVDKHSDEYKIRRERNNIAVRKSRDKAKMRNLETQHKVLELTAENERLQKKVEQLSRELSTLRNLFKQLPEPLLASSGHC

SEQ ID NO: 14826 - protein, 269 aa, Homo Sapiens
MSAALFSLDGPARGAPWPAEPAPFYEPGRAGKPGRGAEPGALGEPGAAAPAMYDDESAIDFSAYIDSMAAVPTLELCHDELFADLFNSNHKAGGAGPLELLPGGPARPLGPGPAAPRLLKREPDWGDGDAPGSLLPAQVAACAQTVVSLAAAGQPTPPTSPEPPRSSPRQTPAPGPAREKSAGKRGPDRGSPEYRQRRERNNIAVRKSRDKAKRRNQEMQQKLVELSAENEKLHQRVEQLTRDLAGLRQFFKQLPSPPFLPAAGTADCR

SEQ ID NO: 14827 - protein, 281 aa, Homo Sapiens
MSHGTYYECEPRGGQQPLEFSGGRAGPGELGDMCEHEASIDLSAYIESGEEQLLSDLFAVKPAPEARGLKGPGTPAFPHYLPPDPRPFAYPPHTFGPDRKALGPGIYSSPGSYDPRAVAVKEEPRGPEGSRAASRGSYNPLQYQVAHCGQTAMHLPPTLAAPGQPLRVLKAPLATAAPPCSPLLKAPSPAGPLHKGKKAVNKDSLEYRLRRERNNIAVRKSRDKAKRRILETQQKVLEYMAENERLRSRVEQLTQELDTLRNLFRQIPEAANLIKGVGGCS

SEQ ID NO: 14828 - protein, 150 aa, Homo Sapiens
MSKISQQNSTPGVNGISVIHTQAHASGLQQVPQLVPAGPGGGGKAVAPSKQSKKSSPMDRNSDEYRQRRERNNMAVKKSRLKSKQKAQDTLQRVNQLKEENERLEAKIKLLTKELSVLKDLFLEHAHNLADNVQSISTENTTADGDNAGQ

SEQ ID NO: 14829 - protein, 1054 aa, Homo Sapiens
MAAVKEPLEFHAKRPWRPEEAVEDPDEEDEDNTSEAENGFSLEEVLRLGGTKQDYLMLATLDENEEVIDGGKKGAIDDLQQGELEAFIQNLNLAKYTKASLVEEDEPAEKENSSKKEVKIPKINNKNTAESQRTSVNKVKNKNRPEPHSDENGSTTPKVKKDKQNIFEFFERQTLLLRPGGKWYDLEYSNEYSLKPQPQDVVSKYKTLAQKLYQHEINLFKSKTNSQKGASSTWMKAIVSSGTLGDRMAAMILLIQDDAVHTLQFVETLVNLVKKKGSKQQCLMALDTFKELLITDLLPDNRKLRIFSQRPFDKLEQLSSGNKDSRDRRLILWYFEHQLKHLVAEFVQVLETLSHDTLVTTKTRALTVAHELLCNKPEEEKALLVQVVNKLGDPQNRIATKASHLLETLLCKHPNMKGVVSGEVERLLFRSNISSKAQYYAICFLNQMALSHEESELANKLITVYFCFFRTCVKKKDVESKMLSALLTGVNRAYPYSQTGDDKVREQIDTLFKVLHIVNFNTSVQALMLLFQVMNSQQTISDRYYTALYRKMLDPGLMTCSKQAMFLNLVYKSLKADIVLRRVKAFVKRLLQVTCQQMPPFICGALYLVSEILKAKPGLRSQLDDHPESDDEENFIDANDDEDMEKFTDADKETEIVKKLETEETVPETDVETKKPEVASWVHFDNLKGGKQLNKYDPFSRNPLFCGAENTSLWELKKLSVHFHPSVALFAKTILQGNYIQYSGDPLQDFTLMRFLDRFVYRNPKPHKGKENTDSVVMQPKRKHFIKDIRHLPVNSKEFLAKEESQIPVDEVFFHRYYKKVAVKEKQKRDADEESIEDVDDEEFEELIDTFEDDNCFSSGKDDMDFAGNVKKRTKGAKDNTLDEDSEGSDDELGNLDDDEVSLGSMDDEEFAEVDEDGGTFMDVLDDESESVPELEVHSKVSTKKSKRKGTDDFDFAGSFQGPRKKKRNLNDSSLFVSAEEFGHLLDENMGSKFDNIGMNAMANKDNASLKQLRWEAERDDWLHNRDAKSIIKKKKHFKKKRIKTTQKTKKQRK

SEQ ID NO: 14830 - protein, 561 aa, Homo Sapiens
MADHNPDSDSTPRTLLRRVLDTADPRTPRRPRSARAGARRALLETASPRKLSGQTRTIARGRSHGARSVGRSAHIQASGHLEEQTPRTLLKNILLTAPESSILMPESVVKPVPAPQAVQPSRQESSCGSLELQLPELEPPTTLAPGLLAPGRRKQRLRLSVFQQGVDQGLSLSQEPQGNADASSLTRSLNLTFATPLQPQSVQRPGLARRPPARRAVDVGAFLRDLRDTSLAPPNIVLEDTQPFSQPMVGSPNVYHSLPCTPHTGAEDAEQAAGRKTQSSGPGLQKNSPGKPAQFLAGEAEEVNAFALGFLSTSSGVSGEDEVEPLHDGVEEAEKKMEEEGVSVSEMEATGAQGPSRVEEAEGHTEVTEAEGSQGTAEADGPGASSGDEDASGRAASPESASSTPESLQARRHHQFLEPAPAPGAAVLSSEPAEPLLVRHPPRPRTTGPRPRQDPHKAGLSHYVKLFSFYAKMPMERKALEMVEKCLDKYFQHLCDDLEVFAAHAGRKTVKPEDLELLMRRQGLVTDQVSLHVLVERHLPLEYRQLLIPCAYSGNSVFPAQ

SEQ ID NO: 14831 - protein, 383 aa, Homo Sapiens
MFWTFKEWFWLERFWLPPTIKWSDLEDHDGLVFVKPSHLYVTIPYAFLLLIIRRVFEKFVASPLAKSFGIKETVRKVTPNTVLENFFKHSTRQPLQTDIYGLAKKCNLTERQVERWFRSRRNQERPSRLKKFQEACWRFAFYLMITVAGIAFLYDKPWLYDLWEVWNGYPKQPLLPSQYWYYILEMSFYWSLLFRLGFDVKRKDFLAHIIHHLAAISLMSFSWCANYIRSGTLVMIVHDVADIWLESAKMFSYAGWTQTCNTLFFIFSTIFFISRLIVFPFWILYCTLILPMYHLEPFFSYIFLNLQLMILQVLHLYWGYYILKMLNRCIFMKSIQDVRSDDEDYEEEEEEEEEEATKGKEMDCLKNGLRAERHLIPNGQHGH

SEQ ID NO: 14832 - protein, 384 aa, Homo Sapiens
MAGILAWFWNERFWLPHNVTWADLKNTEEATFPQAEDLYLAFPLAFCIFMVRLIFERFVAKPCAIALNIQANGPQIAPPNAILEKVFTAITKHPDEKRLEGLSKQLDWDVRSIQRWFRQRRNQEKPSTLTRFCESMWRFSFYLYVFTYGVRFLKKTPWLWNTRHCWYNYPYQPLTTDLHYYYILELSFYWSLMFSQFTDIKRKDFGIMFLHHLVSIFLITFSYVNNMARVGTLVLCLHDSADALLEAAKMANYAKFQKMCDLLFVMFAVVFITTRLGIFPLWVLNTTLFESWEIVGPYPSWWVFNLLLLLVQGLNCFWSYLIVKIACKAVSRGKVSKDDRSDIESSSDEEDSEPPGKNPHTATTTNGTSGTNGYLLTGSCSMDD

SEQ ID NO: 14833 - protein, 812 aa, Homo Sapiens
MEAFQELRKPSARLECDHCSFRGTDYENVQIHMGTIHPEFCDEMDAGGLGKMIFYQKSAKLFHCHKCFFTSKMYSNVYYHITSKHASPDKWNDKPKNQLNKETDPVKSPPLPEHQKIPCNSAEPKSIPALSMETQKLGSVLSPESPKPTPLTPLEPQKPGSVVSPELQTPLPSPEPSKPASVSSPEPPKSVPVCESQKLAPVPSPEPQKPAPVSPESVKATLSNPKPQKQSHFPETLGPPSASSPESPVLAASPEPWGPSPAASPESRKSARTTSPEPRKPSPSESPEPWKPFPAVSPEPRRPAPAVSPGSWKPGPPGSPRPWKSNPSASSGPWKPAKPAPSVSPGPWKPIPSVSPGPWKPTPSVSSASWKSSSVSPSSWKSPPASPESWKSGPPELRKTAPTLSPEHWKAVPPVSPELRKPGPPLSPEIRSPAGSPELRKPSGSPDLWKLSPDQRKTSPASLDFPESQKSSRGGSPDLWKSSFFIEPQKPVFPETRKPGPSGPSESPKAASDIWKPVLSIDTEPRKPALFPEPAKTAPPASPEARKRALFPEPRKHALFPELPKSALFSESQKAVELGDELQIDAIDDQKCDILVQEELLASPKKLLEDTLFPSSKKLKKDNQESSDAELSSSEYIKTDLDAMDIKGQESSSDQEQVDVESIDFSKENKMDMTSPEQSRNVLQFTEEKEAFISEEEIAKYMKRGKGKYYCKICCCRAMKKGAVLHHLVNKHNVHSPYKCTICGKAFLLESLLKNHVAAHGQSLLKCPRCNFESNFPRGFKKHLTHCQSRHNEEANKKLMEALEPPLEEQQI

SEQ ID NO: 14834 - protein, 1608 aa, Homo Sapiens
MYSAHRPLMPASSAASRGLGMFVWTNVEPRSVAVFPWHSLVPFLAPSQPDPSVQPSEAQQPASHPVASNQSKEPAESAAVAHERPPGGTGSADPERPPGATCPESPGPGPPHPLGVVESGKGPPPTTEEEASGPPGEPRLDSETESDHDDAFLSIMSPEIQLPLPPGKRRTQSLSALPKERDSSSEKDGRSPNKREKDHIRRPMNAFMIFSKRHRALVHQRHPNQDNRTVSKILGEWWYALGPKEKQKYHDLAFQVKEAHFKAHPDWKWCNKDRKKSSSEAKPTSLGLAGGHKETRERSMSETGTAAAPGVSSELLSVAAQTLLSSDTKAPGSSSCGAERLHTVGGPGSARPRAFSHSGVHSLDGGEVDSQALQELTQMVSGPASYSGPKPSTQYGAPGPFAAPGEGGALAATGRPPLLPTRASRSQRAASEDMTSDEERMVICEEEGDDDVIADDGFGTTDIDLKCKERVTDSESGDSSGEDPEGNKGFGRKVFSPVIRSSFTHCRPPLDPEPPGPPDPPVAFGKGYGSAPSSSASSPASSSASAATSFSLGSGTFKAQESGQGSTAGPLRPPPPGAGGPATPSKATRFLPMDPATFRRKRPESVGGLEPPGPSVIAAPPSGGGNILQTLVLPPNKEEQEGGGARVPSAPAPSLAYGAPAAPLSRPAATMVTNVVRPVSSTPVPIASKPFPTSGRAEASPNDTAGARTEMGTGSRVPGGSPLGVSLVYSDKKSAAATSPAPHLVAGPLLGTVGKAPATVTNLLVGTPGYGAPAPPAVQFIAQGAPGGGTTAGSGAGAGSGPNGPVPLGILQPGALGKAGGITQVQYILPTLPQQLQVAPAPAPAPGTKAAAPSGPAPTTSIRFTLPPGTSTNGKVLAATAPTPGIPILQSVPSAPPPKAQSVSPVQAPPPGGSAQLLPGKVLVPLAAPSMSVRGGGAGQPLPLVSPPFSVPVQNGAQPPSKIIQLTPVPVSTPSGLVPPLSPATLPGPTSQPQKVLLPSSTRITYVQSAGGHALPLGTSPASSQAGTVTSYGPTSSVALGFTSLGPSGPAFVQPLLSAGQAPLLAPGQVGVSPVPSPQLPPACAAPGGPVITAFYSGSPAPTSSAPLAQPSQAPPSLVYTVATSTTPPAATILPKGPPAPATATPAPTSPFPSATAGSMTYSLVAPKAQRPSPKAPQKVKAAIASIPVGSFEAGASGRPGPAPRQPLEPGPVREPTAPESELEGQPTPPAPPPLPETWTPTARSSPPLPPPAEERTSAKGPETMASKFPSSSSDWRVPGQGLENRGEPPTPPSPAPAPAVAPGGSSESSSGRAAGDTPERKEAAGTGKKVKVRPPPLKKTFDSVDNRVLSEVDFEERFAELPEFRPEEVLPSPTLQSLATSPRAILGSYRKKRKNSTDLDSAPEDPTSPKRKMRRRSSCSSEPNTPKSAKCEGDIFTFDRTGTEAEDVLGELEYDKVPYSSLRRTLDQRRALVMQLFQDHGFFPSAQATAAFQARYADIFPSKVCLQLKIREVRQKIMQAATPTEQPPGAEAPLPVPPPTGTAAAPAPTPSPAGGPDPTSPSSDSGTAQAAPPLPPPPESGPGQPGWEGAPQPSPPPPGPSTAATGR

SEQ ID NO: 14835 - protein, 898 aa, Homo Sapiens
MFSQQQQQQLQQQQQQLQQLQQQQLQQQQLQQQQLLQLQQLLQQSPPQAPLPMAVSRGLPPQQPQQPLLNLQGTNSASLLNGSMLQRALLLQQLQGLDQFAMPPATYDTAGLTMPTATLGNLRGYGMASPGLAAPSLTPPQLATPNLQQFFPQATRQSLLGPPPVGVPMNPSQFNLSGRNPQKQARTSSSTTPNRKDSSSQTMPVEDKSDPPEGSEEAAEPRMDTPEDQDLPPCPEDIAKEKRTPAPEPEPCEASELPAKRLRSSEEPTEKEPPGQLQVKAQPQARMTVPKQTQTPDLLPEALEAQVLPRFQPRVLQVQAQVQSQTQPRIPSTDTQVQPKLQKQAQTQTSPEHLVLQQKQVQPQLQQEAEPQKQVQPQVQPQAHSQGPRQVQLQQEAEPLKQVQPQVQPQAHSQPPRQVQLQLQKQVQTQTYPQVHTQAQPSVQPQEHPPAQVSVQPPEQTHEQPHTQPQVSLLAPEQTPVVVHVCGLEMPPDAVEAGGGMEKTLPEPVGTQVSMEEIQNESACGLDVGECENRAREMPGVWGAGGSLKVTILQSSDSRAFSTVPLTPVPRPSDSVSSTPAATSTPSKQALQFFCYICKASCSSQQEFQDHMSEPQHQQRLGEIQHMSQACLLSLLPVPRDVLETEDEEPPPRRWCNTCQLYYMGDLIQHRRTQDHKIAKQSLRPFCTVCNRYFKTPRKFVEHVKSQGHKDKAKELKSLEKEIAGQDEDHFITVDAVGCFEGDEEEEEDDEDEEEIEVEEELCKQVRSRDISREEWKGSETYSPNTAYGVDFLVPVMGYICRICHKFYHSNSGAQLSHCKSLGHFENLQKYKAAKNPSPTTRPVSRRCAINARNALTALFTSSGRPPSQPNTQDKTPSKVTARPSQPPLPRRSTRLKT

SEQ ID NO: 14836 - protein, 846 aa, Homo Sapiens
MLFTVSCSKMSSIVDRDDSSIFDGLVEEDDKDKAKRVSRNKSEKKRRDQFNVLIKELGSMLPGNARKMDKSTVLQKSIDFLRKHKEITAQSDASEIRQDWKPTFLSNEEFTQLMLEALDGFFLAIMTDGSIIYVSESVTSLLEHLPSDLVDQSIFNFIPEGEHSEVYKILSTHLLESDSLTPEYLKSKNQLEFCCHMLRGTIDPKEPSTYEYVKFIGNFKSLNSVSSSAHNGFEGTIQRTHRPSYEDRVCFVATVRLATPQFIKEMCTVEEPNEEFTSRHSLEWKFLFLDHRAPPIIGYLPFEVLGTSGYDYYHVDDLENLAKCHEHLMQYGKGKSCYYRFLTKGQQWIWLQTHYYITYHQWNSRPEFIVCTHTVVSYAEVRAERRRELGIEESLPETAADKSQDSGSDNRINTVSLKEALERFDHSPTPSASSRSSRKSSHTAVSDPSSTPTKIPTDTSTPPRQHLPAHEKMVQRRSSFSSQSINSQSVGSSLTQPVMSQATNLPIPQGMSQFQFSAQLGAMQHLKDQLEQRTRMIEANIHRQQEELRKIQEQLQMVHGQGLQMFLQQSNPGLNFGSVQLSSGNSSNIQQLAPINMQGQVVPTNQIQSGMNTGHIGTTQHMIQQQTLQSTSTQSQQNVLSGHSQQTSLPSQTQSTLTAPLYNTMVISQPAAGSMVQIPSSMPQNSTQSAAVTTFTQDRQIRFSQGQQLVTKLVTAPVACGAVMVPSTMLMGQVVTAYPTFATQQQQSQTLSVTQQQQQQSSQEQQLTSVQQPSQAQLTQPPQQFLQTSRLLHGNPSTQLILSAAFPLQQSTFPQSHHQQHQSQQQQQLSRHRTDSLPDPSKVQPQ

SEQ ID NO: 14837 - protein, 575 aa, Homo Sapiens
MSRSPDAKEDPVECPLCMEPLEIDDINFFPCTCGYQICRFCWHRIRTDENGLCPACRKPYPEDPAVYKPLSQEELQRIKNEKKQKQNERKQKISENRKHLASVRVVQKNLVFVVGLSQRLADPEVLKRPEYFGKFGKIHKVVINNSTSYAGSQGPSASAYVTYIRSEDALRAIQCVNNVVVDGRTLKASLGTTKYCSYFLKNMQCPKPDCMYLHELGDEAASFTKEEMQAGKHQEYEQKLLQELYKLNPNFLQLSTGSVDKNKNKVTPLQRYDTPIDKPSDSLSIGNGDNSQQISNSDTPSPPPGLSKSNPVIPISSSNHSARSPFEGAVTESQSLFSDNFRHPNPIPSGLPPFPSSPQTSSDWPTAPEPQSLFTSETIPVSSSTDWQAAFGFGSSKQPEDDLGFDPFDVTRKALADLIEKELSVQDQPSLSPTSLQNSSSHTTTAKGPGSGFLHPAAATNANSLNSTFSVLPQRFPQFQQHRAVYNSFSFPGQAARYPWMAFPRNSIMHLNHTANPTSNSNFLDLNLPPQHNTGLGGIPVAGEEEVKVSTMPLSTSSHSLQQGQQPTSLHTTVA

SEQ ID NO: 14838 - protein, 301 aa, Homo Sapiens
MSYPTKEGSDTAGNAHKNSENEPPNDCSTDIESPSADPNMIYQVETNPINREPGTATSQEDVVPQAAENSELETEIQKDQREEDLKEELLLLQTPIPRKLVSHKPLNDRSRSHSGKVEMKANNFPINHKTRFRLSTSWRVPFINSHEIRSMILHLLCDRYFSQAAGCQNTMWVKRKYIACLYHPNSFTHHERAITFRRPSRVHYYRPLTERMTSGKFCKSTDTKGKCRFRAIVRSVLFVSQIQIESIFNIKGFVDILTYIHTMNVMITNTNNGWKYFCPICGRLFNTYSELRQHSCSSSGN

SEQ ID NO: 14839 - protein, 1269 aa, Homo Sapiens
MTVKLGDGGSGEDGLKKLGKRAADEESLEGEGAGGADAAEESSGTKRDEKTPRAGADGPPAPPGAPQAPSPPQGSPQDQHHFLRSSVRPQSKRPRKDPPSAVGSGNAGGSGPRGKGAEGGGSSSGNVSGVAPAAPAGGSRSSSRNLGSSGGEKEEGKKVRRQWESWSTEDKNTFFEGLYEHGKDFEAIQNNIALKYKKKGKPASMVKNKEQVRHFYYRTWHKITKYIDFDHVFSRGLKKSSQELYGLICYGELRKKIGGCMDDKNATKLNELIQVGATTVRYKGRNLRIKAPMCRALKKLCDPDGLSDEEDQKPVRLPLKVPIELQPRNNHAWARVQSLAQNPRLRMIVELHRKVSSLIEFLKQKWALHEVRVRKTLEERQLQDSCSAPMQEKVTLHLFPGENCTLTPLPGVARVVHSKAFCTVHWQEGGRCKQSAKDAHVLPPAQILGIQSGQGTARGQVKCPRSGAEGKGVGRPPPAADALQSSGESSPESAPGEGAALSLSSPDAPDRPPPRHQDTGPCLEKTPAEGRDSPTREPGALPCACGQLPDLEDELSLLDPLPRYLKSCQDLIVPEQCRCADTRPGSEQPPLGGAASPEVLAPVSKEAADLAPTGPSPRPGPGLLLDVCTKDLADAPAEELQEKGSPAGPPPSQGQPAARPPKEVPASRLAQQLREEGWNLQTSESLTLAEVYLMMGKPSKLQLEYDWLGPGRQDPRPGSLPTALHKQRLLSCLLKLISTEVNPKLALEANTISTASVRPAQEEQSMTPPGKVVTVSSRSPRCPRNQASLRSSKTFPPSSAPCSSGLRNPPRPLLVPGPSSTGSNDSDGGLFAVPTTLPPNSRHGKLFSPSKEAELTFRQHLNSISMQSDFFLPKPRKLRNRHLRKPLVVQRTLLPRPSENQSHNVCSFSILSNSSVTGRGSFRPIQSSLTKAALSRPIVPKVLPPQATSHLASAIDLAATSAGILSGNPLPALDTEGLSGISPLSSDEVTGAISGQDSTGTHQDGDTLPTVGGSDPFVSIPSRPEQEPVADSFQGSSVLSLSELPKAPLQNGLSIPLSSSESSSTRLSPPDVSALLDISLPGPPEDALSQGEPATHISDSIIEIAISSGQYGEGVPLSPAKLNGSDSSKSLPSPSSSPQPHWIASPTHDPQWYPSDSTDSSLSSLFASFISPEKSRKMLPTPIGTNSGTSLLGPSLLDGNSRDSFVSRSLADVAEVVDSQLVCMMNENSIDYISRFNDLAQELSIAEPGRREALFDGGGGGPAVSDLSQ

SEQ ID NO: 14840 - protein, 341 aa, Homo Sapiens
MTMESGAENQQSGDAAVTEAENQQMTVQAQPQIATLAQVSMPAAHATSSAPTVTLVQLPNGQTVQVHGVIQAAQPSVIQSPQVQTVQSSCKDLKRLFSGTQISTIAESEDSQESVDSVTDSQKRREILSRRPSYRKILNDLSSDAPGVPRIEEEKSEEETSAPAITTVTVPTPIYQTSSGQYIAITQGGAIQLANNGTDGVQGLQTLTMTNAAATQPGTTILQYAQTTDGQQILVPSNQVVVQAASGDVQTYQIRTAPTSTIAPGVVMASSPALPTQPAEEAARKREVRLMKNREAARECRRKKKEYVKCLENRVAVLENQNKTLIEELKALKDLYCHKSD

SEQ ID NO: 14841 - protein, 371 aa, Homo Sapiens
MELELDAGDQDLLAFLLEESGDLGTAPDEAVRAPLDWALPLSEVPSDWEVDDLLCSLLSPPASLNILSSSNPCLVHHDHTYSLPRETVSMDLESESCRKEGTQMTPQHMEELAEQEIARLVLTDEEKSLLEKEGLILPETLPLTKTEEQILKRVRRKIRNKRSAQESRRKKKVYVGGLESRVLKYTAQNMELQNKVQLLEEQNLSLLDQLRKLQAMVIEISNKTSSSSTCILVLLVSFCLLLVPAMYSSDTRGSLPAEHGVLSRQLRALPSEDPYQLELPALQSEVPKDSTHQWLDGSDCVLQAPGNTSCLLHYMPQAPSAEPPLEWPFPDLFSEPLCRGPILPLQANLTRKGGWLPTGSPSVILQDRYSG

SEQ ID NO: 14842 - protein, 519 aa, Homo Sapiens
MDAVLEPFPADRLFPGSSFLDLGDLNESDFLNNAHFPEHLDHFTENMEDFSNDLFSSFFDDPVLDEKSPLLDMELDSPTPGIQAEHSYSLSGDSAPQSPLVPIKMEDTTQDAEHGAWALGHKLCSIMVKQEQSPELPVDPLAAPSAMAAAAAMATTPLLGLSPLSRLPIPHQAPGEMTQLPVIKAEPLEVNQFLKVTPEDLVQMPPTPPSSHGSDSDGSQSPRSLPPSSPVRPMARSSTAISTSPLLTAPHKLQGTSGPLLLTEEEKRTLIAEGYPIPTKLPLTKAEEKALKRVRRKIKNKISAQESRRKKKEYVECLEKKVETFTSENNELWKKVETLENANRTLLQQLQKLQTLVTNKISRPYKMAATQTGTCLMVAALCFVLVLGSLVPCLPEFSSGSQTVKEDPLAADGVYTASQMPSRSLLFYDDGAGLWEDGRSTLLPMEPPDGWEINPGGPAEQRPRDHLQHDHLDSTHETTKYLSEAWPKDGGNGTSPDFSHSKEWFHDRDLGPNTTIKLS

SEQ ID NO: 14843 - protein, 520 aa, Homo Sapiens
MEVLESGEQGVLQWDRKLSELSEPGDGEALMYHTHFSELLDEFSQNVLGQLLNDPFLSEKSVSMEVEPSPTSPAPLIQAEHSYSLCEEPRAQSPFTHITTSDSFNDDEVESEKWYLSTDFPSTSIKTEPVTDEPPPGLVPSVTLTITAISTPLEKEEPPLEMNTGVDSSCQTIIPKIKLEPHEVDQFLNFSPKEAPVDHLHLPPTPPSSHGSDSEGSLSPNPRLHPFSLPQTHSPSRAAPRAPSALSSSPLLTAPHKLQGSGPLVLTEEEKRTLIAEGYPIPTKLPLSKSEEKALKKIRRKIKNKISAQESRRKKKEYMDSLEKKVESCSTENLELRKKVEVLENTNRTLLQQLQKLQTLVMGKVSRTCKLAGTQTGTCLMVVVLCFAVAFGSFFQGYGPYPSATKMALPSQHSLQEPYTASVVRSRNLLIYEEHSPPEESSSPGSAGELGGWDRGSSLLRVSGLESRPDVDLPHFIISNETSLEKSVLLELQQHLVSAKLEGNETLKVVELDRRVNTTF

SEQ ID NO: 14844 - protein, 461 aa, Homo Sapiens
MNTDLAAGKMASAACSMDPIDSFELLDLLFDRQDGILRHVELGEGWGHVKDQQVLPNPDSDDFLSSILGSGDSLPSSPLWSPEGSDSGISEDLPSDPQDTPPRSGPATSPAGCHPAQPGKGPCLSYHPGNSCSTTTPGPVIQVPEASVTIDLEMWSPGGRICAEKPADPVDLSPRCNLTVKDLLLSGSSGDLQQHHLGASYLLRPGAGHCQELVLTEDEKKLLAKEGITLPTQLPLTKYEERVLKKIRRKIRNKQSAQESRKKKKEYIDGLETRMSACTAQNQELQRKVLHLEKQNLSLLEQLKKLQAIVVQSTSKSAQTGTCVAVLLLSFALIILPSISPFGPNKTESPGDFAPVRVFSRTLHNDAASRVAADAVPGSEAPGPRPEADTTREESPGSPGADWGFQDTANLTNSTEELDNATLVLRNATEGLGQVALLDWVAPGPSTGSGRAGLEAAGDEL

SEQ ID NO: 14845 - protein, 395 aa, Homo Sapiens
MDLGIPDLLDAWLEPPEDIFSTGSVLELGLHCPPPEVPVTRLQEQGLQGWKSGGDRGCGLQESEPEDFLKLFIDPNEVYCSEASPGSDSGISEDPCHPDSPPAPRATSSPMLYEVVYEAGALERMQGETGPNVGLISIQLDQWSPAFMVPDSCMVSELPFDAHAHILPRAGTVAPVPCTTLLPCQTLFLTDEEKRLLGQEGVSLPSHLPLTKAEERVLKKVRRKIRNKQSAQDSRRRKKEYIDGLESRVAACSAQNQELQKKVQELERHNISLVAQLRQLQTLIAQTSNKAAQTSTCVLILLFSLALIILPSFSPFQSRPEAGSEDYQPHGVTSRNILTHKDVTENLETQVVESRLREPPGAKDANGSTRTLLEKMGGKPRPSGRIRSVLHADEM

SEQ ID NO: 14846 - protein, 508 aa, Homo Sapiens
MIYEESKMNLEQERPFVCSAPGCSQRFPTEDHLMIHRHKHEMTLKFPSIKTDNMLSDQTPTPTRFLKNCEEVGLFSELDCSLEHEFRKAQEEESSKRNISMHNAVGGAMTGPGTHQLSSARLPNHDTNVVIQQAMPSPQSSSVITQAPSTNRQIGPVPGSLSSLLHLHNRQRQPMPASMPGTLPNPTMPGSSAVLMPMERQMSVNSSIMGMQGPNLSNPCASPQVQPMHSEAKMRLKAALTHHPAAMSNGNMNTMGHMMEMMGSRQDQTPHHHMHSHPHQHQTLPPHHPYPHQHQHPAHHPHPQPHHQQNHPHHHSHSHLHAHPAHHQTSPHPPLHTGNQAQVSPATQQMQPTQTIQPPQPTGGRRRRVVDEDPDERRRKFLERNRAAATRCRQKRKVWVMSLEKKAEELTQTNMQLQNEVSMLKNEVAQLKQLLLTHKDCPITAMQKESQGYLSPESSPPASPVPACSQQQVIQHNTITTSSSVSEVVGSSTLSQLTTHRTDLNPIL

SEQ ID NO: 14847 - protein, 2442 aa, Homo Sapiens
MAENLLDGPPNPKRAKLSSPGFSANDSTDFGSLFDLENDLPDELIPNGGELGLLNSGNLVPDAASKHKQLSELLRGGSGSSINPGIGNVSASSPVQQGLGGQAQGQPNSANMASLSAMGKSPLSQGDSSAPSLPKQAASTSGPTPAASQALNPQAQKQVGLATSSPATSQTGPGICMNANFNQTHPGLLNSNSGHSLINQASQGQAQVMNGSLGAAGRGRGAGMPYPTPAMQGASSSVLAETLTQVSPQMTGHAGLNTAQAGGMAKMGITGNTSPFGQPFSQAGGQPMGATGVNPQLASKQSMVNSLPTFPTDIKNTSVTNVPNMSQMQTSVGIVPTQAIATGPTADPEKRKLIQQQLVLLLHAHKCQRREQANGEVRACSLPHCRTMKNVLNHMTHCQAGKACQVAHCASSRQIISHWKNCTRHDCPVCLPLKNASDKRNQQTILGSPASGIQNTIGSVGTGQQNATSLSNPNPIDPSSMQRAYAALGLPYMNQPQTQLQPQVPGQQPAQPQTHQQMRTLNPLGNNPMNIPAGGITTDQQPPNLISESALPTSLGATNPLMNDGSNSGNIGTLSTIPTAAPPSSTGVRKGWHEHVTQDLRSHLVHKLVQAIFPTPDPAALKDRRMENLVAYAKKVEGDMYESANSRDEYYHLLAEKIYKIQKELEEKRRSRLHKQGILGNQPALPAPGAQPPVIPQAQPVRPPNGPLSLPVNRMQVSQGMNSFNPMSLGNVQLPQAPMGPRAASPMNHSVQMNSMGSVPGMAISPSRMPQPPNMMGAHTNNMMAQAPAQSQFLPQNQFPSSSGAMSVGMGQPPAQTGVSQGQVPGAALPNPLNMLGPQASQLPCPPVTQSPLHPTPPPASTAAGMPSLQHTTPPGMTPPQPAAPTQPSTPVSSSGQTPTPTPGSVPSATQTQSTPTVQAAAQAQVTPQPQTPVQPPSVATPQSSQQQPTPVHAQPPGTPLSQAAASIDNRVPTPSSVASAETNSQQPGPDVPVLEMKTETQAEDTEPDPGESKGEPRSEMMEEDLQGASQVKEETDIAEQKSEPMEVDEKKPEVKVEVKEEEESSSNGTASQSTSPSQPRKKIFKPEELRQALMPTLEALYRQDPESLPFRQPVDPQLLGIPDYFDIVKNPMDLSTIKRKLDTGQYQEPWQYVDDVWLMFNNAWLYNRKTSRVYKFCSKLAEVFEQEIDPVMQSLGYCCGRKYEFSPQTLCCYGKQLCTIPRDAAYYSYQNRYHFCEKCFTEIQGENVTLGDDPSQPQTTISKDQFEKKKNDTLDPEPFVDCKECGRKMHQICVLHYDIIWPSGFVCDNCLKKTGRPRKENKFSAKRLQTTRLGNHLEDRVNKFLRRQNHPEAGEVFVRVVASSDKTVEVKPGMKSRFVDSGEMSESFPYRTKALFAFEEIDGVDVCFFGMHVQEYGSDCPPPNTRRVYISYLDSIHFFRPRCLRTAVYHEILIGYLEYVKKLGYVTGHIWACPPSEGDDYIFHCHPPDQKIPKPKRLQEWYKKMLDKAFAERIIHDYKDIFKQATEDRLTSAKELPYFEGDFWPNVLEESIKELEQEEEERKKEESTAASETTEGSQGDSKNAKKKNNKKTNKNKSSISRANKKKPSMPNVSNDLSQKLYATMEKHKEVFFVIHLHAGPVINTLPPIVDPDPLLSCDLMDGRDAFLTLARDKHWEFSSLRRSKWSTLCMLVELHTQGQDRFVYTCNECKHHVETRWHCTVCEDYDLCINCYNTKSHAHKMVKWGLGLDDEGSSQGEPQSKSPQESRRLSIQRCIQSLVHACQCRNANCSLPSCQKMKRVVQHTKGCKRKTNGGCPVCKQLIALCCYHAKHCQENKCPVPFCLNIKHKLRQQQIQHRLQQAQLMRRRMATMNTRNVPQQSLPSPTSAPPGTPTQQPSTPQTPQPPAQPQPSPVSMSPAGFPSVARTQPPTTVSTGKPTSQVPAPPPPAQPPPAAVEAARQIEREAQQQQHLYRVNINNSMPPGRTGMGTPGSQMAPVSLNVPRPNQVSGPVMPSMPPGQWQQAPLPQQQPMPGLPRPVISMQAQAAVAGPRMPSVQPPRSISPSALQDLLRTLKSPSSPQQQQQVLNILKSNPQLMAAFIKQRTAKYVANQPGMQPQPGLQSQPGMQPQPGMHQQPSLQNLNAMQAGVPRPGVPPQQQAMGGLNPQGQALNIMNPGHNPNMASMNPQYREMLRRQLLQQQQQQQQQQQQQQQQQQGSAGMAGGMAGHGQFQQPQGPGGYPPAMQQQQRMQQHLPLQGSSMGQMAAQMGQLGQMGQPGLGADSTPNIQQALQQRILQQQQMKQQIGSPGQPNPMSPQQHMLSGQPQASHLPGQQIATSLSNQVRSPAPVQSPRPQSQPPHSSPSPRIQPQPSPHHVSPQTGSPHPGLAVTMASSIDQGHLGNPEQSAMLPQLNTPSRSALSSELSLVGDTTGDTLEKFVEGL

SEQ ID NO: 14848 - protein, 120 aa, Homo Sapiens
MDDSKVVGGKVKKPGKRGRKPAKIDLKAKLERSRQSARECRARKKLRYQYLEELVSSRERAICALREELEMYKQWCMAMDQGKIPSEIKALLTGEEQNKSQQNSSRHTKAGKTDANSNSW

SEQ ID NO: 14849 - protein, 639 aa, Homo Sapiens
MPQPSVSGMDPPFGDAFRSHTFSEQTLMSTDLLANSSDPDFMYELDREMNYQQNPRDNFLSLEDCKDIENLESFTDVLDNEGALTSNWEQWDTYCEDLTKYTKLTSCDIWGTKEVDYLGLDDFSSPYQDEEVISKTPTLAQLNSEDSQSVSDSLYYPDSLFSVKQNPLPSSFPGKKITSRAAAPVCSSKTLQAEVPLSDCVQKASKPTSSTQIMVKTNMYHNEKVNFHVECKDYVKKAKVKINPVQQSRPLLSQIHTDAAKENTCYCGAVAKRQEKKGMEPLQGHATPALPFKETQELLLSPLPQEGPGSLAAGESSSLSASTSVSDSSQKKEEHNYSLFVSDNLGEQPTKCSPEEDEEDEEDVDDEDHDEGFGSEHELSENEEEEEEEEDYEDDKDDDISDTFSEPGYENDSVEDLKEVTSISSRKRGKRRYFWEYSEQLTPSQQERMLRPSEWNRDTLPSNMYQKNGLHHGKYAVKKSRRTDVEDLTPNPKKLLQIGNELRKLNKVISDLTPVSELPLTARPRSRKEKNKLASRACRLKKKAQYEANKVKLWGLNTEYDNLLFVINSIKQEIVNRVQNPRDERGPNMGQKLEILIKDTLGLPVAGQTSEFVNQVLEKTAEGNPTGGLVGLRIPTSKV

SEQ ID NO: 14850 - protein, 354 aa, Homo Sapiens
MRHSLTKLLAASGSNSPTRSESPEPAATCSLPSDLTRAAAGEEETAAAGSPGRKQQFGDEGELEAGRGSRGGVAVRAPSPEEMEEEAIASLPGEETEDMDFLSGLELADLLDPRQPDWHLDPGLSSPGPLSSSGGGSDSGGLWRGDDDDEAAAAEMQRFSDLLQRLLNGIGGCSSSSDSGSAEKRRRKSPGGGGGGGSGNDNNQAATKSPRKAAAAAARLNRLKKKEYVMGLESRVRGLAAENQELRAENRELGKRVQALQEESRYLRAVLANETGLARLLSRLSGVGLRLTTSLFRDSPAGDHDYALPVGKQKQDLLEEDDSAGGVCLHVDKDKVSVEFCSACARKASSSLKM

SEQ ID NO: 14851 - protein, 361 aa, Homo Sapiens
MSKCARKKYIKTNPRQMTMETVESQHDGSITASLTESKSAHVQTQTGQNSIPALAQVSVAGSGTRRGSPAVTLVQLPSGQTIHVQGVIQTPQPWVIQSSEIHTVQVAAIAETDESAESEGVIDSHKRREILSRRPSYRKILNELSSDVPGVPKIEEERSEEEGTPPSIATMAVPTSIYQTSTGQYIAIAQGGTIQISNPGSDGVQGLQALTMTNSGAPPPGATIVQYAAQSADGTQQFFVPGSQVVVQDEETELAPSHMAAATGDMPTYQIRAPTAALPQGVVMAASPGSLHSPQQLAEEATRKRELRLMKNREAAKECRRRKKEYVKCLESRVAVLEVQNKKLIEELETLKDICSPKTDY

SEQ ID NO: 14852 - protein, 299 aa, Homo Sapiens [sequence omitted]

SEQ ID NO: 14853 - protein, 589 aa, Homo Sapiens
MTGLLKRKFDQLDEDNSSVSSSSSSSGCQSRSCSPSSSVSRAWDSEEEGPWDQMPLPDRDFCGPRSFTPLSILKRARRERPGRVAFDGITVFYFPRCQGFTSVPSRGGCTLGMALRHSACRRFSLAEFAQEQARARHEKLRQRLKEEKLEMLQWKLSAAGVPQAEAGLPPVVDAIDDASVEEDLAVAVAGGRLEEVSFLQPYPARRRRALLRASGVRRIDREEKRELQALRQSREDCGCHCDRICDPETCSCSLAGIKCQMDHTAFPCGCCREGCENPMGRVEFNQARVQTHFIHTLTRLQLEQEAESFRELEAPAQGSPPSPGEEALVPTFPLAKPPMNNELGDNSCSSDMTDSSTASSSASGTSEAPDCPTHPGLPGPGFQPGVDDDSLARILSFSDSDFGGEEEEEEEGSVGNLDNLSCFHPADIFGTSDPGGLASWTHSYSGCSFTSGVLDENANLDASCFLNGGLEGSREGSLPGTSVPPSMDAGRSSSVDLSLSSCDSFELLQALPDYSLGPHYTSQKVSDSLDNIEAPHFPLPGLSPPGDASSCFLESLMGFSEPAAEALDPFIDSQFEDTVPASLMEPVPV

SEQ ID NO: 14854 - protein, 543 aa, Homo Sapiens
MDAFTGSGLKRKFDDVDVGSSVSNSDDEISSSDSADSCDSLNPPTTASFTPTSILKRQKQLRRKNVRFDQVTVYYFARRQGFTSVPSQGGSSLGMAQRHNSVRSYTLCEFAQEQEVNHREILREHLKEEKLHAKKMKLTKNGTVESVEADGLTLDDVSDEDIDVENVEVDDYFFLQPLPTKRRRALLRASGVHRIDAEEKQELRAIRLSREECGCDCRLYCDPEACACSQAGIKCQVDRMSFPCGCSRDGCGNMAGRIEFNPIRVRTHYLHTIMKLELESKRQVSRPAAPDEEPSPTASCSLTGAQGSETQDFQEFIAENETAVMHLQSAEELERLKAEEDSSGSSASLDSSIESLGVCILEEPLAVPEELCPGLTAPILIQAQLPPGSSVLCFTENSDHPTASTVNSPSYLNSGPLVYYQVEQRPVLGVKGEPGTEEGSASFPKEKDLNVFSLPVTSLVACSSTDPAALCKSEVGKTPTLEALLPEDCNPEEPENEDFHPSWSPSSLPFRTDNEEGCGMVKTSQQNEDRPPEDSSLELPLAV

SEQ ID NO: 14855 - protein, 585 aa, Homo Sapiens
MSGILKRKFEEVDGSSPCSSVRESDDEVSSSESADSGDSVNPSTSSHFTPSSILKREKRLRTKNVHFSCVTVYYFTRRQGFTSVPSQGGSTLGMSSRHNSVRQYTLGEFAREQERLHREMLREHLREEKLNSLKLKMTKNGTVESEEASTLTLDDISDDDIDLDNTEVDEYFFLQPLPTKKRRALLRASGVKKIDVEEKHELRAIRLSREDCGCDCRVFCDPDTCTCSLAGIKCQVDRMSFPCGCTKEGCSNTAGRIEFNPIRVRTHFLHTIMKLELEKNREQQIPTLNGCHSEISAHSSSMGPVAHSVEYSIADSFEIETEPQAAVLHLQSAEELDCQGEEEEEEEDGSSFCSGVTDSSTQSLAPSESDEEEEEEEEEEEEEDDDDDKGDGFVEGLGTHAEVVPLPSVLCYSDGTAVHESHAKNASFYANSSTLYYQIDSHIPGTPNQISENYSERDTVKNGTLSLVPYTMTPEQFVDYARQAEEAYGASHYPAANPSVIVCCSSSENDSGVPCNSLYPEHRSNHPQVEFHSYLKGPSQEGFVSALNGDSHISEHPAENSLSLAEKSILHEECIKSPVVETVPV

SEQ ID NO: 14856 - protein, 727 aa, Homo Sapiens
MEGDAVEAIVEESETFIKGKERKTYQRRREGGQEEDACHLPQNQTDGGEVVQDVNSSVQMVMMEQLDPTLLQMKTEVMEGTVAPEAEAAVDDTQIITLQVVNMEEQPINIGELQLVQVPVPVTVPVATTSVEELQGAYENEVSKEGLAESEPMICHTLPLPEGFQVVKVGANGEVETLEQGELPPQEDPSWQKDPDYQPPAKKTKKTKKSKLRYTEEGKDVDVSVYDFEEEQQEGLLSEVNAEKVVGNMKPPKPTKIKKKGVKKTFQCELCSYTCPRRSNLDRHMKSHTDERPHKCHLCGRAFRTVTLLRNHLNTHTGTRPHKCPDCDMAFVTSGELVRHRRYKHTHEKPFKCSMCDYASVEVSKLKRHIRSHTGERPFQCSLCSYASRDTYKLKRHMRTHSGEKPYECYICHARFTQSGTMKMHILQKHTENVAKFHCPHCDTVIARKSDLGVHLRKQHSYIEQGKKCRYCDAVFHERYALIQHQKSHKNEKRFKCDQCDYACRQERHMIMHKRTHTGEKPYACSHCDKTFRQKQLLDMHFKRYHDPNFVPAAFVCSKCGKTFTRRNTMARHADNCAGPDGVEGENGGETKKSKRGRKRKMRSKKEDSSDSENAEPDLDDNEDEEEPAVEIEPEPEPQPVTPAPPPAKKRRGRPPGRTNQPKQNQPTAIIQVEDQNTGAIENIIVEVKKEPDAEPAEGEEEEAQPAATDAPNGDLTPEMILSMMDR

SEQ ID NO: 14857 - protein, 663 aa, Homo Sapiens
MAATEISVLSEQFTKIKELELMPEKGLKEEEKDGVCREKDHRSPSELEAERTSGAFQDSVLEEEVELVLAPSEESEKYILTLQTVHFTSEAVELQDMSLLSIQQQEGVQVVVQQPGPGLLWLEEGPRQSLQQCVAISIQQELYSPQEMEVLQFHALEENVMVASEDSKLAVSLAETTGLIKLEEEQEKNQLLAERTKEQLFFVETMSGDERSDEIVLTVSNSNVEEQEDQPTAGQADAEKAKSTKNQRKTKGAKGTFHCDVCMFTSSRMSSFNRHMKTHTSEKPHLCHLCLKTFRTVTLLRNHVNTHTGTRPYKCNDCNMAFVTSGELVRHRRYKHTHEKPFKCSMCKYASVEASKLKRHVRSHTGERPFQCCQCSYASRDTYKLKRHMRTHSGEKPYECHICHTRFTQSGTMKIHILQKHGENVPKYQCPHCATIIARKSDLRVHMRNLHAYSAAELKCRYCSAVFHERYALIQHQKTHKNEKRFKCKHCSYACKQERHMTAHIRTHTGEKPFTCLSCNKCFRQKQLLNAHFRKYHDANFIPTVYKCSKCGKGFSRWINLHRHSEKCGSGEAKSAASGKGRRTRKRKQTILKEATKGQKEAAKGWKEAANGDEAAAEEASTTKGEQFPGEMFPVACRETTARVKEEVDEGVTCEMLLNTMDK

SEQ ID NO: 14858 - protein, 1505 aa, Homo Sapiens
MLCVAGARLKRELDATATVLANRQDESEQSRKRLIEQSREFKKNTPEDLRKQVAPLLKSFQGEIDALSKRSKEAEAAFLNVYKRLIDVPDPVPALDLGQQLQLKVQRLHDIETENQKLRETLEEYNKEFAEVKNQEVTIKALKEKIREYEQTLKNQAETIALEKEQKLQNDFAEKERKLQETQMSTTSKLEEAEHKVQSLQTALEKTRTELFDLKTKYDEETTAKADEIEMIMTDLERANQRAEVAQREAETLREQLSSANHSLQLASQIQKAPDVEQAIEVLTRSSLEVELAAKEREIAQLVEDVQRLQASLTKLRENSASQISQLEQQLSAKNSTLKQLEEKLKGQADYEEVKKELNILKSMEFAPSEGAGTQDAAKPLEVLLLEKNRSLQSENAALRISNSDLSGSARRKGKDQPESRRPGSLPAPPPSQLPRNPGEQASNTNGTHQFSPAGLSQDFFSSSLASPSLPLASTGKFALNSLLQRQLMQSFYSKAMQEAGSTSMIFSTGPYSTNSISSQSPLQQSPDVNGMAPSPSQSESAGSVSEGEEMDTAEIARQVKEQLIKHNIGQRIFGHYVLGLSQGSVSEILARPKPWNKLTVRGKEPFHKMKQFLSDEQNILALRSIQGRQRENPGQSLNRLFQEVPKRRNGSEGNITTRIRASETGSDEAIKSILEQAKRELQVQKTAEPAQPSSASGSGNSDDAIRSILQQARREMEAQQAALDPALKQAPLSQSDITILTPKLLSTSPMPTVSSYPPLAISLKKPSAAPEAGASALPNPPALKKEAQDAPGLDPQGAADCAQGVLRQVKNEVGRSGAWKDHWWSAVQPERRNAASSEEAKAEETGGGKEKGSGGSGGGSQPRAERSQLQGPSSSEYWKEWPSAESPYSQSSELSLTGASRSETPQNSPLPSSPIVPMSKPTKPSVPPLTPEQYEVYMYQEVDTIELTRQVKEKLAKNGICQRIFGEKVLGLSQGSVSDMLSRPKPWSKLTQKGREPFIRMQLWLNGELGQGVLPVQGQQQGPVLHSVTSLQDPLQQGCVSSESTPKTSASCSPAPESPMSSSESVKSLTELVQQPCPPIEASKDSKPPEPSDPPASDSQPTTPLPLSGHSALSIQELVAMSPELDTYGITKRVKEVLTDNNLGQRLFGETILGLTQGSVSDLLARPKPWHKLSLKGREPFVRMQLWLNDPNNVEKLMDMKRMEKKAYMKRRHSSVSDSQPCEPPSVGTEYSQGASPQPQHQLKKPRVVLAPEEKEALKRAYQQKPYPSPKTIEDLATQLNLKTSTVINWFHNYRSRIRRELFIEEIQAGSQGQAGASDSPSARSGRAAPSSEGDSCDGVEATEGPGSADTEEPKSQGEAEREEVPRPAEQTEPPPSGTPGPDDARDDDHEGGPVEGPGPLPSPASATATAAPAAPEDAATSAAAAPGEGPAAPSSAPPPSNSSSSSAPRRPSSLQSLFGLPEAAGARDSRDNPLRKKKAANLNSIIHRLEKAASREEPIEWEF

SEQ ID NO: 14859 - protein, 678 aa, Homo Sapiens
MAANVGSMFQYWKRFDLQQLQRELDATATVLANRQDESEQSRKRLIEQSREFKKNTPEDLRKQVAPLLKSFQGEIDALSKRSKEAEAAFLNVYKRLIDVPDPVPALDLGQQLQLKVQRLHDIETENQKLRETLEEYNKEFAEVKNQEVTIKALKEKIREYEQTLKNQAETIALEKEQKLQNDFAEKERKLQETQMSTTSKLEEAEHKVQSLQTALEKTRTELFDLKTKYDEETTAKADEIEMIMTDLERANQRAEVAQREAETLREQLSSANHSLQLASQIQKAPDVEQAIEVLTRSSLEVELAAKEREIAQLVEDVQRLQASLTKLRENSASQISQLEQQLSAKNSTLKQLEEKLKGQADYEEVKKELNILKSMEFAPSEGAGTQDAAKPLEVLLLEKNRSLQSENAALRISNSDLSGRCAELQVRITEAVATATEQRELIARLEQDLSIIQSIQRPDAEGAAEHRLEKIPEPIKEATALFYGPAAPASGALPEGQVDSLLSIISSQRERFRARNQELEAENRLAQHTLQALQSELDSLRADNIKLFEKIKFLQSYPGRGSGSDDTELRYSSQYEERLDPFSSFSKRERQRKYLSLSPWDKATLSMGRLVLSNKMARTIGFFYTLFLHCLVFLVLYKLAWSESMERDCATFCAKKFADHLHKFHENDNGAAAGDLWQ

SEQ ID NO: 14860 - protein, 1486 aa, Homo Sapiens
MAANVGSMFQYWKRFDLRRLQKELNSVASELSARQEESEHSHKHLIELRREFKKNVPEEIREMVAPVLKSFQAEVVALSKRSQEAEAAFLSVYKQLIEAPDPVPVFEAARSLDDRLQPPSFDPSGQPRRDLHTSWKRNPELLSPKEQREGTSPAGPTLTEGSRLPGIPGKALLTETLLQRNEAEKQKGLQEVQITLAARLGEAEEKIKVLHSALKATQAELLELRRKYDEEAASKADEVGLIMTNLEKANQRAEAAQREVESLREQLASVNSSIRLACCSPQGPSGDKVNFTLCSGPRLEAALASKDREILRLLKDVQHLQSSLQELEEASANQIADLERQLTAKSEAIEKLEEKLQAQSDYEEIKTELSILKAMKLASSTCSLPQGMAKPEDSLLIAKEAFFPTQKFLLEKPSLLASPEEDPSEDDSIKDSLGTEQSYPSPQQLPPPPGPEDPLSPSPGQPLLGPSLGPDGTRTFSLSPFPSLASGERLMMPPAAFKGEAGGLLVFPPAFYGAKPPTAPATPAPGPEPLGGPEPADGGGGGAAGPGAEEEQLDTAEIAFQVKEQLLKHNIGQRVFGHYVLGLSQGSVSEILARPKPWRKLTVKGKEPFIKMKQFLSDEQNVLALRTIQVRQRGSITPRIRTPETGSDDAIKSILEQAKKEIESQKGGEPKTSVAPLSIANGTTPASTSEDAIKSILEQARREMQAQQQALLEMEVAPRGRSVPPSPPERPSLATASQNGAPALVKQEEGSGGPAQAPLPVLSPAAFVQSIIRKVKSEIGDAGYFDHHWASDRGLLSRPYASVSPSLSSSSSSGYSGQPNGRAWPRGDEAPVPPEDEAAAGAEDEPPRTGELKAEGATAEAGARLPYYPAYVPRTLKPTVPPLTPEQYELYMYREVDTLELTRQVKEKLAKNGICQRIFGEKVLGLSQGSVSDMLSRPKPWSKLTQKGREPFIRMQLWLSDQLGQAVGQQPGASQASPTEPRSSPSPPPSPTEPEKSSQEPLSLSLESSKENQQPEGRSSSSLSGKMYSGSQAPGGIQEIVAMSPELDTYSITKRVKEVLTDNNLGQRLFGESILGLTQGSVSDLLSRPKPWHKLSLKGREPFVRMQLWLNDPHNVEKLRDMKKLEKKAYLKRRYGLISTGSDSESPATRSECPSPCLQPQDLSLLQIKKPRVVLAPEEKEALRKAYQLEPYPSQQTIELLSFQLNLKTNTVINWFHNYRSRMRREMLVEGTQDEPDLDPSGGPGILPPGHSHPDPTPQSPDSETEDQKPTVKELELQEGPEENSTPLTTQDKAQVRIKQEQMEEDAEEEAGSQPQDSGELDKGQGPPKEEHPDPPGNDGLPKVAPGPLLPGGSTPDCPSLHPQQESEAGERLHPDPLSFKSASESSRCSLEVSLNSPSAASSPGLMMSVSPVPSSSAPISPSPPGAPPAKVPSASPTADMAGALHPSAKVNPNLQRRHEKMANLNNIIYRVERAANREEALEWEF

SEQ ID NO: 14861 - protein, 656 aa, Homo Sapiens
MEGDGSDPEPPDAGEDSKSENGENAPIYCICRKPDINCFMIGCDNCNEWFHGDCIRITEKMAKAIREWYCRECREKDPKLEIRYRHKKSRERDGNERDSSEPRDEGGGRKRPVPDPDLQRRAGSGTGVGAMLARGSASPHKSSPQPLVATPSQHHQQQQQQIKRSARMCGECEACRRTEDCGHCDFCRDMKKFGGPNKIRQKCRLRQCQLRARESYKYFPSSLSPVTPSESLPRPRRPLPTQQQPQPSQKLGRIREDEGAVASSTVKEPPEATATPEPLSDEDLPLDPDLYQDFCAGAFDDHGLPWMSDTEESPFLDPALRKRAVKVKHVKRREKKSEKKKEERYKRHRQKQKHKDKWKHPERADAKDPASLPQCLGPGCVRPAQPSSKYCSDDCGMKLAANRIYEILPQRIQQWQQSPCIAEEHGKKLLERIRREQQSARTRLQEMERRFHELEAIILRAKQQAVREDEESNEGDSDDTDLQIFCVSCGHPINPRVALRHMERCYAKYESQTSFGSMYPTRIEGATRLFCDVYNPQSKTYCKRLQVLCPEHSRDPKVPADEVCGCPLVRDVFELTGDFCRLPKRQCNRHYCWEKLRRAEVDLERVRVWYKLDELFEQERNVRTAMTNRAGLLALMLHQTIQHDPLTTDLRSSADR

SEQ ID NO: 14862 - protein, 760 aa, Homo Sapiens
MAVPAALIPPTQLVPPQPPISTSASSSGTTTSTSSATSSPAPSIGPPASSGPTLFRPEPIASAAAAAATVTSTGGGGGGGGGGSGGGGGSSGNGGGGGGGGGGSNCNPNLAAASNGSGGGGGGISAGGGVASSTPINASTGSSSSSSSSSSSSSSSSSSSSSSSSCGPLPGKPVYSTPSPVENTPQNNECKMVDLRGAKVASFTVEGCELICLPQAFDLFLKHLVGGLHTVYTKLKRLEITPVVCNVEQVRILRGLGAIQPGVNRCKLISRKDFETLYNDCTNASSRPGRPPKRTQSVTSPENSHIMPHSVPGLMSPGIIPPTGLTAAAAAAAAATNAAIAEAMKVKKIKLEAMSNYHASNNQHGADSENGDMNSSVGSSDGSWDKETLPSSPSQGPQASITHPRMPGARSLPLSHPLNHLQQSHLLPNGLELPFMMMPHPLIPVSLPPASVTMAMSQMNHLSTIANMAAAAQVQSPPSRVETSVIKERVPDSPSPAPSLEEGRRPGSHPSSHRSSSVSSSPARTESSSDRIPVHQNGLSMNQMLMGLSPNVLPGPKEGDLAGHDMGHESKRMHIEKDETPLSTPTARDSLDKLSLTGHGQPLPPGFPSPFLFPDGLSSIETLLTNIQGLLKVAIDNARAQEKQVQLEKTELKMDFLRERELRETLEKQLAMEQKNRAIVQKRLKKEKKAKRKLQEALEFETKRREQAEQTLKQAASTDSLRVLNDSLTPEIEADRSGGRTDAERTIQDGRLYLKTTVMY

SEQ ID NO: 14863 - protein, 599 aa, Homo Sapiens
MAVSASPVISATSSGAGVPGGLFRAEPLYSTPREPPRLTPNMINSFVVNNHSNSAGGGGRGNTNTNECRMVDMHGMKVASFLMDGQELICLPQVFDLFLKHLVGGLHTVYTKLKRLDISPVVCTVEQVRILRGLGAIQPGVNRCKLITRKDFETLFTDCTNARRKRQMTRKQAVNSSRPGRPPKRSLGVLQENARLLTHAVPGLLSPGLITPTGITAAAMAEAMKLQKMKLMAMNTLQGNGSQNGTESEPDDLNSNTGGSESSWDKDKMQSPFAAPGPQHGIAHAALAGQPGIGGAPTLNPLQQNHLLTNRLDLPFMMMPHPLLPVSLPPASVAMAMNQMNHLNTIANMAAAAQIHSPLSRAGTSVIKERIPESPSPAPSLEENHRPGSQTSSHTSSSVSSSPSQMDHHLERMEEVPVQIPIMKSPLDKIQLTPGQALPAGFPGPFIFADSLSSVETLLTNIQGLLKVALDNARIQEKQIQQEKKELRLELYREREIRENLERQLAVELQSRTTMQKRLKKEKKTKRKLQEALEFESKRREQVEQALKQATTSDSGLRMLKDTGIPDIEIENNGTPHDSAAMQGGNYYCLEMAQQLYSA

SEQ ID NO: 14864 - protein, 325 aa, Homo Sapiens
MARPVSDRTPAPLLLGGPAGTPPGGGALLGLRSLLQGTSKPKEPASCLLKEKERKAALPAATTPGPGLETAGPADAPAGAVVGGGSPRGRPGPVPAPGLLAPLLWERTLPFGDVEYVDLDAFLLEHGLPPSPPPPGGPSPEPSPARTPAPSPGPGSCGSASPRSSPGHAPARAALGTASGHRAGLTSRDTPSPVDPDTVEVLMTFEPDPADLALSSIPGHETFDPRRHRFSEEELKPQPIMKKARKIQVPEEQKDEKYWSRRYKNNEAAKRSRDARRLKENQISVRAAFLEKENALLRQEVVAVRQELSHYRAVLSRYQAQHGAL

SEQ ID NO: 14865 - protein, 343 aa, Homo Sapiens
MMFPGLLAPPAGYPSLLRPTPTLTLPQSLQSAFSGHSSFLVEDLIRISRPPAYLPRSVPTASMSPPRQGAPTALTDTGASDLGSPGPGSRRGGSPPTAFSPASETTFLKFGVNAILSSGPRTETSPALLQSVPPKTFAFPYFEGSFQPFIRSSYFPASSSVVPIPGTFSWPLAARGKPRRGMLRRAVFSDVQRKALEKMFQKQKYISKPDRKKLAAKLGLKDSQVKIWFQNRRMKWRNSKERELLSSGGCREQTLPTKLNPHPDLSDVGQKGPGNEEEEEGPGSPSHRLAYHASSDPQHLRDPRLPGPLPPSPAHSSSPGKPSDFSDSEEEEEGEEQEEITVS

SEQ ID NO: 14866 - protein, 339 aa, Homo Sapiens
MLPSAVAAHAGAYWDVVASSALLNLPAAPGFGNLGKSFLIENLLRVGGAPTPRLQPPAPHDPATALATAGAQLRPLPASPVPLKLCPAAEQVSPAGAPYGTRWAFQVLSPSADSARLPGRAPGDRDCTFQPSAPAPSKPFLLSTPPFYSACCGGSCRRPASSTAFPREESMLPLLTQDSNSKARRGILRRAVFSEDQRKALEKMFQKQKYISKTDRKKLAINLGLKESQVKIWFQNRRMKWRNSKEKEVLSNRCIQEVGLQEDPLSRSALGFPSPCPSIWDVPQQHSSPRWRENSPEPSERLIQESSGAPPPEANSLQGALYLCSEEEAGSKGVLTGAV

SEQ ID NO: 14867 - protein, 427 aa, Homo Sapiens
MAPKKRPETQKTSEIVLRPRNKRSRSPLELEPEAKKLCAKGSGPSRRCDSDCLWVGLAGPQILPPCRSIVRTLHQHKLGRASWPSVQQGLQQSFLHTLDSYRILQKAAPFDRRATSLAWHPTHPSTVAVGSKGGDIMLWNFGIKDKPTFIKGIGAGGSITGLKFNPLNTNQFYASSMEGTTRLQDFKGNILRVFASSDTINIWFCSLDVSASSRMVVTGDNVGNVILLNMDGKELWNLRMHKKKVTHVALNPCCDWFLATASVDQTVKIWDLRQVRGKASFLYSLPHRHPVNAACFSPDGARLLTTDQKSEIRVYSASQWDCPLGLIPHPHRHFQHLTPIKAAWHPRYNLIVVGRYPDPNFKSCTPYELRTIDVFDGNSGKMMCQLYDPESSGISSLNEFNPMGDTLASAMGYHILIWSQEEARTRK

SEQ ID NO: 14868 - protein, 169 aa, Homo Sapiens
MAAESLPFSFGTLSSWELEAWYEDLQEVLSSDENGGTYVSPPGNEEEESKIFTTLDPASLAWLTEEEPEPAEVTSTSQSPHSPDSSQSSLAQEEEEEDQGRTRKRKQSGHSPARAGKQRMKEKEQENERKVAQLAEENERLKQEIERLTREVEATRRALIDRMVNLHQA

SEQ ID NO: 14869 - protein, 565 aa, Homo Sapiens; identical to SEQ ID NO: 4097

SEQ ID NO: 14870 - protein, 255 aa, Homo Sapiens
MTMTTMPESLNSPVSGKAVFMEFGPPNQQMSPSPMSHGHYSMHCLHSAGHSQPDGAYSSASSFSRPLGYPYVNSVSSHASSPYISSVQSYPGSASLAQSRLEDPGADSEKSTVVEGGEVRFNGKGKKIRKPRTIYSSLQLQALNRRFQQTQYLALPERAELAASLGLTQTQVKIWFQNKRSKFKKLMKQGGAALEGSALANGRALSAGSPPVPPGWNPNSSSGKGSGGNAGSYIPSYTSWYPSAHQEAMQQPQLM

SEQ ID NO: 14871 - protein, 328 aa, Homo Sapiens
MTGVFDSLVADMHSTQIAASSTYHQHQQPPSGGGAGPGGNSSSSSSLHKPQESPTLPVSTATDSSYYTNQQHPAGGGGGGGSPYAHMGSYQYQASGLNNVPYSAKSSYDLGYTAAYTSYAPYGTSSSPANNEPEKEDLEPEIRIVNGKPKKVRKPRTIYSSFQLAALQRRFQKTQYLALPERAELAASLGLTQTQVKIWFQNRRSKFKKMWKSGEIPSEQHPGASASPPCASPPVSAPASWDFGVPQRMAGGGGPGSGGSGAGSSGSSPSSAASAFLGNYPWYHQTSGSASHLQATAPLLHPTQTPQPHHHHHHHGGGGAPVSAGTIF

SEQ ID NO: 14872 - protein, 287 aa, Homo Sapiens
MSGSFDRKLSSILTDISSSLSCHAGSKDSPTLPESSVTDLGYYSAPQHDYYSGQPYGQTVNPYTYHHQFNLNGLAGTGAYSPKSEYTYGASYRQYGAYREQPLPAQDPVSVKEEPEAEVRMVNGKPKKVRKPRTIYSSYQLAALQRRFQKAQYLALPERAELAAQLGLTQTQVKIWFQNRRSKFKKLYKNGEVPLEHSPNNSDSMACNSPPSPALWDTSSHSTPAPARSQLPPPLPYSASPSYLDDPTNSWYHAQNLSGPHLQQQPPQPATLHHASPGPPPNPGAVY

SEQ ID NO: 14873 - protein, 240 aa, Homo Sapiens
MTSLPCPLPGRDASKAVFPDLAPVPSVAAAYPLGLSPTTAASPNLSYSRPYGHLLSYPYTEPANPGDSYLSCQQPAALSQPLCGPAEHPQELEADSEKPRLSPEPSERRPQAPAKKLRKPRTIYSSLQLQHLNQRFQHTQYLALPERAQLAAQLGLTQTQVKIWFQNKRSKYKKLLKQNSGGQEGDFPGRTFSVSPCSPPLPSLWDLPKAGTLPTSGYGNSFGAWYQHHSSDVLASPQMM

SEQ ID NO: 14874 - protein, 289 aa, Homo Sapiens
MTGVFDRRVPSIRSGDFQAPFQTSAAMHHPSQESPTLPESSATDSDYYSPTGGAPHGYCSPTSASYGKALNPYQYQYHGVNGSAGSYPAKAYADYSYASSYHQYGGAYNRVPSATNQPEKEVTEPEVRMVNGKPKKVRKPRTIYSSFQLAALQRRFQKTQYLALPERAELAASLGLTQTQVKIWFQNKRSKIKKIMKNGEMPPEHSPSSSDPMACNSPQSPAVWEPQGSSRSLSHHPHAHPPTSNQSPASSYLENSASWYTSAASSINSHLPPPGSLQHPLALASGTLY

SEQ ID NO: 14875 - protein, 175 aa, Homo Sapiens
MSHSQHSPYLQSYHNSSAAAQTRGDDTDQQKTTVIENGEIRFNGKGKKIRKPRTIYSSLQLQALNHRFQQTQYLALPERAELAASLGLTQTQVKIWFQNKRSKFKKLLKQGSNPHESDPLQGSAALSPRSPALPPVWDVSASAKGVSMPPNSYMPGYSHWYSSPHQDTMQRPQMM

SEQ ID NO: 14876 - protein, 467 aa, Homo Sapiens
MATGADVRDILELGGPEGDAASGTISKKDIINPDKKKSKKSSETLTFKRPEGMHREVYALLYSDKKDAPPLLPSDTGQGYRTVKAKLGSKKVRPWKWMPFTNPARKDGAMFFHWRRAAEEGKDYPFARFNKTVQVPVYSEQEYQLYLHDDAWTKAETDHLFDLSRRFDLRFVVIHDRYDHQQFKKRSVEDLKERYYHICAKLANVRAVPGTDLKIPVFDAGHERRRKEQLERLYNRTPEQVAEEEYLLQELRKIEARKKEREKRSQDLQKLITAADTTAEQRRTERKAPKKKLPQKKEAEKPAVPETAGIKFPDFKSAGVTLRSQRMKLPSSVGQKKIKALEQMLLELGVELSPTPTEELVHMFNELRSDLVLLYELKQACANCEYELQMLRHRHEALARAGVLGGPATPASGPGPASAEPAVTEPGLGPDPKDTIIDVVGAPLTPNSRKRRESASSSSSVKKAKKP

SEQ ID NO: 14877 - protein, 382 aa, Homo Sapiens
MQHYGVNGYSLHAMNSLSAMYNLHQQAAQQAQHAPDYRPSVHALTLAERLAGCTFQDIILEARYGSQHRKQRRSRTAFTAQQLEALEKTFQKTHYPDVVMRERLAMCTNLPEARVQVWFKNRRAKFRKKQRSLQKEQLQKQKEAEGSHGEGKAEAPTPDTQLDTEQPPRLPGSDPPAELHLSLSEQSASESAPEDQPDREEDPRAGAEDPKAEKSPGADSKGLGCKRGSPKADSPGSLTITPVAPGGGLLGPSHSYSSSPLSLFRLQEQFRQHMAATNNLVHYSSFEVGGPAPAAAAAAAAVPYLGVNMAPLGSLHCQSYYQSLSAAAAAHQGVWGSPLLPAPPAGLAPASATLNSKTTSIENLRLRAKQHAASLGLDTLPN

SEQ ID NO: 14878 - protein, 373 aa, Homo Sapiens
MPNDEAFSKPSTPSEAPHAPGVPPQGRAGGFGKASGALVGAASGSSAGGSSRGGGSGSGASDLGAGSKKSPRLPKCARCRNHGYASPLKGHKRFCMWRDCQCKKCNLIAERQRVMAAQVALRRQQAQEEELGISHPIPLPSAAELLVKRENNGSNPCLMTECSGTSQPPPASVPTTAASEGRMVIQDIPAVTSRGHVENTPDLVSDSTYYSSFYQPSLFPYYNNLYNCPQYSMALAADSASGEVGNPLGGSPVKNSLRGLPGPYVPGQTGNQWQMKNMENRHAMSSQYRMHSYYPPPSYLGQSVPQFFTFEDAPSYPEARASVFSPPSSQDSGLVSLSSSSPISNKSTKAVLECEPASEPSSFTVTPVIEEDE

SEQ ID NO: 14879 - protein, 561 aa, Homo Sapiens
MADPQAGSAAGDWEIDVESLELEEDVCGAPRSTPPGPSPPPADGDCEDDEDDDGVDEDAEEEGDGEEAGASPGMPGQPEQRGGPQPRPPLAPQASPAGTGPRERCTPAGGGAEPRKLSRTPKCARCRNHGVVSCLKGHKRFCRWRDCQCANCLLVVERQRVMAAQVALRRQQATEDKKGLSGKQNNFERKAVYQRQVRAPSLLAKSILEGYRPIPAETYVGGTFPLPPPVSDRMRKRRAFADKELENIMLEREYKEREMLETSQAAALFLPNRMVPGPDYNSYKSAYSPSPVEPPSKDFCNFLPTCLDLTMQYSGSGNMELISSNVSVATTYRQYPLSSRFLVWPKCGPISDTLLYQQCLLNATTSVQALKPGASWDLKGARVQDGLSAEQDMMPSKLEGSLVLPHTPEIQTTRSDLQGHQAVPERSAFSPPRRNFSPIVDTDSLAAQGHVLTKISKENTRHPLPLRHNPFHSLFQQTLTDKSGPELKTPFVKEAFEETPKKHRECLVKDNQKYTFTIDRCAKDLFVAKQVGTKLSVNEPLSFSVESILKRPSSAITRVSQ

SEQ ID NO: 14880 - protein, 472 aa, Homo Sapiens
MNGYGSPYLYMGGPVSQPPRAPLQRTPKCARCRNHGVLSWLKGHKRYCRFKDCTCEKCILIIERQRVMAAQVALRRQQANESLESLIPDSLRALPGPPPPGDAVAAPQPPPASQPSQPQPPRPAAELAAAAALRWTAEPQPGALQAQLAKPDLTEERLGDGKSADNTEVFSDKDTDQRSSPDVAKSKGCFTPESPEIVSVEEGGYAVQKNGGNPESRPDSPKCHAEQNHLLIEGPSGTVSLPFSLKANRPPLEVLKKIFPNQKPTVLELILKGCGGDLVSAVEVLLSSRSSVTGAERTSAEPESLALPSNGHIFEHTLSSYPISSSKWSVGSAFRVPDTLRFSADSSNVVPSPLAGPLQPPFPQPPRYPLMLRNTLARSQSSPFLPNDVTLWNTMTLQQQYQLRSQYVSPFPSNSTSVFRSSPVLPARATEDPRISIPDDGCPFVSKQSIYTEDDYDERSDSSDSRTLNTSS

SEQ ID NO: 14881 - protein, 504 aa, Homo Sapiens
MERSQCGSRDRGVSGRPHLAPGLVVAAPPPPSPALPVPSGMQVPPAFLRPPSLFLRAAAAAAAAAAATSGSGGCPPAPGLESGVGAVGCGYPRTPKCARCRNHGVVSALKGHKRFCRWRDCACAKCTLIAERQRVMAAQVALRRQQAQEESEARGLQRLLCSGLSWPPGGRASGGGGRAENPQSTGGPAAGAALGLGALRQASGSATPAFEVFQQDYPEEKQEQKESKCESCQNGQEELISKSHQLYLGSSSRSNGVIGKQSIGSSISEYSNKPDSILSPHPGEQSGGEESPRSLSSSDLESGNESEWVKDLTATKASLPTVSSRPRDPLDILTKIFPNYRRSRLEGILRFCKGDVVQAIEQVLNGKEHKPDNRNLANSEELENTAFQRASSFSLAGIGFGTLGNKSAFSPLQTTSASYGGDSSLYGVNPRVGISPLRLAYSSAGRGLSGFMSPYLTPGLVPTLPFRPALDYAFSGMIRDSSYLSSKDSITCGRLYFRPNQDNP

SEQ ID NO: 14882 - protein, 542 aa, Homo Sapiens; identical to SEQ ID NO: 4339

SEQ ID NO: 14883 - protein, 342 aa, Homo Sapiens
MADKMVRTPKCSRCRNHGFLVPVKGHAGKCRWKQCLCEKCYLISERQKIMAAQKVLKTQAAEEEQEAALCAQGPKQASGAAAAAPAPVPVPAASLRPLSPGTPSGDADPGPEGRAAACFFEQPPRGRNPGPRALQPVLGGRSHVEPSERAAVAMPSLAGPPFGAEAAGSGYPGPLDLRRPMRTVPGPLFTDFVRPLNINPDRALGPEYPGGSSMHPYCPFPLGYLDAPPGVPLQQGFRHVSRSQYQGGGLVSEPGGDFQPSYYLPPPPPPLPPLPPLPPQPQFLPPGYLSALHFLPPPPPPPPPSSFSLTVLFDTDKENTDDQDAEVLSGEPSQPSSQEQSD

SEQ ID NO: 14884 - protein, 192 aa, Homo Sapiens
MAAPPKAPIRVRNLTIRAGALTGKENNMLQPETHIFTAPEEGSSQGALLLGQAPEPLSLPCTPVTLEQQLVSPSGDPHRAPALPSICSTLILQPCATLDPLLLQPQVPKVSDQALVSAHSEWQRKLEAAEALLTLRNSAQAPPDSISLHQPCNPPAPAGDKGFQPPSPSLRPRPASSISLPIGHLGCISLLS

SEQ ID NO: 14885 - protein, 367 aa, Homo Sapiens
MEPSDMPAGYHCPLDSAPWDETRDPQSTELIPRRAISRSPTCARCRNHGVTAHLKGHKRLCLFQACECHKCVLILERRRVMAAQVALRRQQEAQLKKHLMRRGEASPKAPNHFRKGTTQPQVPSGKENIAPQPQTPHGAVLLAPTPPGKNSCGPLLLSHPPEASPLSWTPVPPGPWVPGHWLPPGFSMPPPVVCRLLYQEPAVSLPPFPGFDPGTSLQLPTHGPFTTCPGSHPVLTAPLSGEPQGPPSQPRTHSTLILQPCGTPDPLQLQPQASGASCLARTSGPSEWQLQQEAAEALVGLKDSSQAPRVTPSVPPNPAWISLLHPCGPPAPAGGRGFQPVGPCLRPSPAPSVALHIGRLGSISLLS

SEQ ID NO: 14886 - protein, 760 aa, Homo Sapiens
MSTVEEDSDTVTVETVNSVTLTQDTEGNLILHCPQNEADEIDSEDSIEPPHKRLCLSSEDDQSIDDSTPCISVVALPLSENDQSFEVTMTATTEVADDEVTEGTVTQIQILQNEQLDEISPLGNEEVSAVSQAWFTTKEDKDSLTNKGHKWKQGMWSKEEIDILMNNIERYLKARGIKDATEIIFEMSKDERKDFYRTIAWGLNRPLFAVYRRVLRMYDDRNHVGKYTPEEIEKLKELRIKHGNDWATIGAALGRSASSVKDRCRLMKDTCNTGKWTEEEEKRLAEVVHELTSTEPGDIVTQGVSWAAVAERVGTRSEKQCRSKWLNYLNWKQSGGTEWTKEDEINLILRIAELDVADENDINWDLLAEGWSSVRSPQWLRSKWWTIKRQIANHKDVSFPVLIKGLKQLHENQKNNPTLLENKSGSGVPNSNTNSSVQHVQIRVARLEDNTAISSSPMAALQIPVQITHVSSADSPATVDSETITLNSGTLQTFEILPSFHLQPTGTPGTYLLQTSSSQGLPLTLTASPTVTLTAAAPASPEQIIVHALSPEHLLNTSDNVTVQCHTPRVIIQTVATEDITSSISQAELTVDSDIQSSDFPEPPDALEADTFPDEIHHPKMTVEPSFNDAHVSKFSDQNSTELMNSVMVRTEEEISDTDLKQEESPSDLASAYVTEGLESPTIEEQVDQTIDDETILIVPSPHGFIQASDVIDTESVLPLTTLTDPILQHHQEESNIIGSSLGSPVSEDSKDVEDLVNCH

SEQ ID NO: 14887 - protein, 554 aa, Homo Sapiens
MTAPCSQPAQLPGRRQLGLVPFPPPPPRTPLLWLLLLLLAAVAPARGWESGDLELFDLVEEVQLNFYQFLGVQQDASSADIRKAYRKLSLTLHPDKNKDENAETQFRQLVAIYEVLKDDERRQRYDDILINGLPDWRQPVFYYRRVRKMSNAELALLLFIILTVGHYAVVWSIYLEKQLDELLSRKKREKKKKTGSKSVDVSKLGASEKNERLLMKPQWHDLLPCKLGIWFCLTLKALPHLIQDAGQFYAKYKETRLKEKEDALTRTELETLQKQKKVKKPKPEFPVYTPLETTYIQSYDHGTSIEEIEEQMDDWLENRNRTQKKQAPEWTEEDLSQLTRSMVKFPGGTPGRWEKIAHELGRSVTDVTTKAKQLKDSVTCSPGMVRLSELKSTVQNSRPIKTATTLPDDMITQREDAEGVAAEEEQEGDSGEQETGATDARPRRRKPARLLEATAKPEPEEKSRAKRQKDFDIAEQNESSDEESLRKERARSAEEPWTQNQQKLLELALQQYPRGSSDRWDKIARCVPSKSKEDCIARYKLLVELVQKKKQAKS

SEQ ID NO: 14888 - protein, 621 aa, Homo Sapiens
MLLLPSAADGRGTAITHALTSASTLCQVEPVGRWFEAFVKRRNRNASASFQELEDKKELSEESEDEELQLEEFPMLKTLDPKDWKNQDHYAVLGLGHVRYKATQRQIKAAHKAMVLKHHPDKRKAAGEPIKEGDNDYFTCITKAYEMLSDPVKRRAFNSVDPTFDNSVPSKSEAKDNFFEVFTPVFERNSRWSNKKNVPKLGDMNSSFEDVDIFYSFWYNFDSWREFSYLDEEEKEKAECRDERRWIEKQNRATRAQRKKEEMNRIRTLVDNAYSCDPRIKKFKEEEKAKKEAEKKAKAEAKRKEQEAKEKQRQAELEAARLAKEKEEEEVRQQALLAKKEKDIQKKAIKKERQKLRNSCKTWNHFSDNEAERVKMMEEVEKLCDRLELASLQCLNETLTSCTKEVGKAALEKQIEEINEQIRKEKEEAEARMRQASKNTEKSTGGGGNGSKNWSEDDLQLLIKAVNLFPAGTNSRWEVIANYMNIHSSSGVKRTAKDVIGKAKSLQKLDPHQKDDINKKAFDKFKKEHGVVPQADNATPSERFEGPYTDFTPWTTEEQKLLEQALKTYPVNTPERWEKIAEAVPGRTKKDCMKRYKELVEMVKAKKAAQEQVLNASRAKK

SEQ ID NO: 14889 - protein, 531 aa, Homo Sapiens
MKCHYEALGVRRDASEEELKKAYRKLALKWHPDKNLDNAAEAAEQFKLIQAAYDVLSDPQERAWYDNHREALLKGGFDGEYQDDSLDLLRYFTVTCYSGYGDDEKGFYTVYRNVFEMIAKEELESVLEEEVDDFPTFGDSQSDYDTVVHPFYAYWQSFCTQKNFAWKEEYDTRQASNRWEKRAMEKENKKIRDKARKEKNELVRQLVAFIRKRDKRVQAHRKLVEEQNAEKARKAEEMRRQQKLKQAKLVEQYREQSWMTMANLEKELQEMEARYEKEFGDGSDENEMEEHELKDEEDGKDSDEAEDAELYDDLYCPACDKSFKTEKAMKNHEKSKKHREMVALLKQQLEEEEENFSRPQIDENPLDDNSEEEMEDAPKQKLSKKQKKKKQKPAQNYDDNFNVNGPGEGVKVDPEDTNLNQDSAKELEDSPQENVSVTEIIKPCDDPKSEAKSVPKPKGKKTKDMKKPVRVPAEPQTMSVLISCTTCHSEFPSRNKLFDHLKATGHARAPSSSSLNSATSSQSKKEKRKNR

SEQ ID NO: 14890 - protein, 1616 aa, Homo Sapiens
MPARTAPARVPTLAVPAISLPDDVRRRLKDLERDSLTEKECVKEKLNLLHEFLQTEIKNQLCDLETKLRKEELSEEGYLAKVKSLLNKDLSLENGAHAYNREVNGRLENGNQARSEARRVGMADANSPPKPLSKPRTPRRSKSDGEAKPEPSPSPRITRKSTRQTTITSHFAKGPAKRKPQEESERAKSDESIKEEDKDQDEKRRRVTSRERVARPLPAEEPERAKSGTRTEKEEERDEKEEKRLRSQTKEPTPKQKLKEEPDREARAGVQADEDEDGDEKDEKKHRSQPKDLAAKRRPEEKEPEKVNPQISDEKDEDEKEEKRRKTTPKEPTEKKMARAKTVMNSKTHPPKCIQCGQYLDDPDLKYGQHPPDAVDEPQMLTNEKLSIFDANESGFESYEALPQHKLTCFSVYCKHGHLCPIDTGLIEKNIELFFSGSAKPIYDDDPSLEGGVNGKNLGPINEWWITGFDGGEKALIGFSTSFAEYILMDPSPEYAPIFGLMQEKIYISKIVVEFLQSNSDSTYEDLINKIETTVPPSGLNLNRFTEDSLLRHAQFVVEQVESYDEAGDSDEQPIFLTPCMRDLIKLAGVTLGQRRAQARRQTIRHSTREKDRGPTKATTTKLVYQIFDTFFAEQIEKDDREDKENAFKRRRCGVCEVCQQPECGKCKACKDMVKFGGSGRSKQACQERRCPNMAMKEADDDEEVDDNIPEMPSPKKMHQGKKKKQNKNRISWVGEAVKTDGKKSYYKKVCIDAETLEVGDCVSVIPDDSSKPLYLARVTALWEDSSNGQMFHAHWFCAGTDTVLGATSDPLELFLVDECEDMQLSYIHSKVKVIYKAPSENWAMEGGMDPESLLEGDDGKTYFYQLWYDQDYARFESPPKTQPTEDNKFKFCVSCARLAEMRQKEIPRVLEQLEDLDSRVLYYSATKNGILYRVGDGVYLPPEAFTFNIKLSSPVKRPRKEPVDEDLYPEHYRKYSDYIKGSNLDAPEPYRIGRIKEIFCPKKSNGRPNETDIKIRVNKFYRPENTHKSTPASYHADINLLYWSDEEAVVDFKAVQGRCTVEYGEDLPECVQVYSMGGPNRFYFLEAYNAKSKSFEDPPNHARSPGNKGKGKGKGKGKPKSQACEPSEPEIEIKLPKLRTLDVFSGCGGLSEGFHQAGISDTLWAIEMWDPAAQAFRLNNPGSTVFTEDCNILLKLVMAGETTNSRGQRLPQKGDVEMLCGGPPCQGFSGMNRFNSRTYSKFKNSLVVSFLSYCDYYRPRFFLLENVRNFVSFKRSMVLKLTLRCLVRMGYQCTFGVLQAGQYGVAQTRRRAIILAAAPGEKLPLFPEPLHVFAPRACQLSVVVDDKKFVSNITRLSSGPFRTITVRDTMSDLPEVRNGASALEISYNGEPQSWFQRQLRGAQYQPILRDHICKDMSALVAARMRHIPLAPGSDWRDLPNIEVRLSDGTMARKLRYTHHDRKNGRSSSGALRGVCSCVEAGKACDPAARQFNTLIPWCLPHTGNRHNHWAGLYGRLEWDGFFSTTVTNPEPMGKQGRVLHPEQHRVVSVRECARSQGFPDTYRLFGNILDKHRQVGNAVPPPLAKAIGLEIKLCMLAKARESASAKIKEEEAAKD

SEQ ID NO: 14891 - protein, 912 aa, Homo Sapiens
MPAMPSSGPGDTSSSAAEREEDRKDGEEQEEPRGKEERQEPSTTARKVGRPGRKRKHPPVESGDTPKDPAVISKSPSMAQDSGASELLPNGDLEKRSEPQPEEGSPAGGQKGGAPAEGEGAAETLPEASRAVENGCCTPKEGRGAPAEAGKEQKETNIESMKMEGSRGRLRGGLGWESSLRQRPMPRLTFQAGDPYYISKRKRDEWLARWKREAEKKAKVIAGMNAVEENQGPGESQKVEEASPPAVQQPTDPASPTVATTPEPVGSDAGDKNATKAGDDEPEYEDGRGFGIGELVWGKLRGFSWWPGRIVSWWMTGRSRAAEGTRWVMWFGDGKFSVVCVEKLMPLSSFCSAFHQATYNKQPMYRKAIYEVLQVASSRAGKLFPVCHDSDESDTAKAVEVQNKPMIEWALGGFQPSGPKGLEPPEEEKNPYKEVYTDMWVEPEAAAYAPPPPAKKPRKSTAEKPKVKEIIDERTRERLVYEVRQKCRNIEDICISCGSLNVTLEHPLFVGGMCQNCKNCFLECAYQYDDDGYQSYCTICCGGREVLMCGNNNCCRCFCVECVDLLVGPGAAQAAIKEDPWNCYMCGHKGTYGLLRRREDWPSRLQMFFANNHDQEFDPPKVYPPVPAEKRKPIRVLSLFDGIATGLLVLKDLGIQVDRYIASEVCEDSITVGMVRHQGKIMYVGDVRSVTQKHIQEWGPFDLVIGGSPCNDLSIVNPARKGLYEGTGRLFFEFYRLLHDARPKEGDDRPFFWLFENVVAMGVSDKRDISRFLESNPVMIDAKEVSAAHRARYFWGNLPGMNRPLASTVNDKLELQECLEHGRIAKFSKVRTITTRSNSIKQGKDQHFPVFMNEKEDILWCTEMERVFGFPVHYTDVSNMSRLARQRLLGRSWSVPVIRHLFAPLKEYFACV

SEQ ID NO: 14892 - protein, 853 aa, Homo Sapiens
MKGDTRHLNGEEDAGGREDSILVNGACSDQSSDSPPILEAIRTPEIRGRRSSSRLSKREVSSLLSYTQDLTGDGDGEDGDGSDTPVMPKLFRETRTRSESPAVRTRNNNSVSSRERHRPSPRSTRGRQGRNHVDESPVEFPATRSLRRRATASAGTPWPSPPSSYLTIDLTDDTEDTHGTPQSSSTPYARLAQDSQQGGMESPQVEADSGDGDSSEYQDGKEFGIGDLVWGKIKGFSWWPAMVVSWKATSKRQAMSGMRWVQWFGDGKFSEVSADKLVALGLFSQHFNLATFNKLVSYRKAMYHALEKARVRAGKTFPSSPGDSLEDQLKPMLEWAHGGFKPTGIEGLKPNNTQPVVNKSKVRRAGSRKLESRKYENKTRRRTADDSATSDYCPAPKRLKTNCYNNGKDRGDEDQSREQMASDVANNKSSLEDGCLSCGRKNPVSFHPLFEGGLCQTCRDRFLELFYMYDDDGYQSYCTVCCEGRELLLCSNTSCCRCFCVECLEVLVGTGTAAEAKLQEPWSCYMCLPQRCHGVLRRRKDWNVRLQAFFTSDTGLEYEAPKLYPAIPAARRRPIRVLSLFDGIATGYLVLKELGIKVGKYVASEVCEESIAVGTVKHEGNIKYVNDVRNITKKNIEEWGPFDLVIGGSPCNDLSNVNPARKGLYEGTGRLFFEFYHLLNYSRPKEGDDRPFFWMFENVVAMKVGDKRDISRFLECNPVMIDAIKVSAAHRARYFWGNLPGMNRPVIASKNDKLELQDCLEYNRIAKLKKVQTITTKSNSIKQGKNQLFPVVMNGKEDVLWCTELERIFGFPVHYTDVSNMGRGARQKLLGRSWSVPVIRHLFAPLKDYFACE

SEQ ID NO: 14893 - protein, 386 aa, Homo Sapiens
MAAIPALDPEAEPSMDVILVGSSELSSSVSPGTGRDLIAYEVKANQRNIEDICICCGSLQVHTQHPLFEGGICAPCKDKFLDALFLYDDDGYQSYCSICCSGETLLICGNPDCTRCYCFECVDSLVGPGTSGKVHAMSNWVCYLCLPSSRSGLLQRRRKWRSQLKAFYDRESENPLEMFETVPVWRRQPVRVLSLFEDIKKELTSLGFLESGSDPGQLKHVVDVTDTVRKDVEEWGPFDLVYGATPPLGHTCDRPPSWYLFQFHRLLQYARPKPGSPRPFFWMFVDNLVLNKEDLDVASRFLEMEPVTIPDVHGGSLQNAVRVWSNIPAIRSRHWALVSEEELSLLAQNKQSSKLAAKWPTKLVKNCFLPLREYFKYFSTELTSSL

SEQ ID NO: 14894 - protein, 380 aa, Homo Sapiens
MGGLSARPTAGRTDPAGTCWGQDPGSKMATVIPGPLSLGEDFYREAIEHCRSYNARLCAERSLRLPFLDSQTGVAQNNCYIWMEKTHRGPGLAPGQIYTYPARCWRKKRRLNILEDPRLRPCEYKIDCEAPLKKEGGLPEGPVLEALLCAETGEKKIELKEEETIMDCQKQQLLEFPHDLEVEDLEDDIPRRKNRAKGKAYGIGGLRKRQDTASLEDRDKPYVCDKFYKELAWVPEAQRKHTAKKAPDGTVIPNGYCDFCLGGSKKTGCPEDLISCADCGRSGHPSCLQFTVNMTAAVRTYRWQCIECKSCSLCGTSENDGASWAGLTPQDQLLFCDDCDRGYHMYCLSPPMAEPPEGSWSCHLCLRHLKEKASAYITLT

SEQ ID NO: 14895 - protein, 391 aa, Homo Sapiens
MAAVVENVVKLLGEQYYKDAMEQCHNYNARLCAERSVRLPFLDSQTGVAQSNCYIWMEKRHRGPGLASGQLYSYPARRWRKKRRAHPPEDPRLSFPSIKPDTDQTLKKEGLISQDGSSLEALLRTDPLEKRGAPDPRVDDDSLGEFPVTNSRARKRILEPDDFLDDLDDEDYEEDTPKRRGKGKSKGKGVGSARKKLDASILEDRDKPYACDICGKRYKNRPGLSYHYAHSHLAEEEGEDKEDSQPPTPVSQRSEEQKSKKGPDGLALPNNYCDFCLGDSKINKKTGQPEELVSCSDCGRSGHPSCLQFTPVMMAAVKTYRWQCIECKCCNICGTSENDDQLLFCDDCDRGYHMYCLTPSMSEPPEGSWSCHLCLDLLKEKASIYQNQNSS

SEQ ID NO: 14896 - protein, 378 aa, Homo Sapiens; identical to SEQ ID NO: 4419

SEQ ID NO: 14897 - protein, 191 aa, Homo Sapiens
MPGSEDLRKGKDQMHSHRKRTMFTKKQLEDLNILFNENPYPNPSLQKEMASKIDIHPTVLQVWFKNHRAKLKKAKCKHIHQKQETPQPPIPEGGVSTSVGLRNADTLPRLPNAAHPIGLVYTGHRVPSFQLILYPNLKVPANDFIGHRIVHFGCCRDPNIYCLYPILESQVCAPSFHSGSPACSSNQSRER

SEQ ID NO: 14898 - protein, 176 aa, Homo Sapiens
MASSSGNDDDLTIPRAAINKMIKETLPNVRVANDARELVVNCCTEFIHLISSEANEICNKSEKKTISPEHVIQALESLGFGSYISEVKEVLQECKTVALKRRKASSRLENLGIPEEELLRQQQELFAKARQQQAELAQQEWLQMQQAAQQAQLAAASASASNQAGSSQDEEDDDDI

SEQ ID NO: 14899 - protein, 205 aa, Homo Sapiens
MPSKKKKYNARFPPARIKKIMQTDEEIGKVAAAVPVIISRALELFLESLLKKACQVTQSRNAKTMTTSHLKQCIELEQQFDFLKDLVASVPDMQGDGEDNHMDGDKGARRGRKPGSGGRKNGGMGTKSKDKKLSGTDSEQEDESEDTDTDGEEETSQPPPQASHPSAHFQSPPTPFLPFASTLPLPPAPPGPSAPDEEDEEDYDS

SEQ ID NO: 14900 - protein, 263 aa, Homo Sapiens
MFYFHCPPQLEGTATFGNHSSGDFDDGFLRRKQRRNRTTFTLQQLEALEAVFAQTHYPDVFTREELAMKINLTEARVQVWFQNRRAKWRKTERGASDQEPGAKEPMAEVTPPPVRNINSPPPGDQARSKKEALEAQQSLGRTVGPAGPFFPSCLPGTLLNTATYAQALSHVASLKGGPLCSCCVPDPMGLSFLPTYGCQSNRTASVATLRMKAREHSEAVLQSANLLPSTSSSPGPVAKPAPPDGSQEKTSPTKEQSEAEKSV

SEQ ID NO: 14901 - protein, 424 aa, Homo Sapiens
MALPTPSDSTLPAEARGRGRRRRLVWTPSQSEALRACFERNPYPGIATRERLAQAIGIPEPRVQIWFQNERSRQLRQHRRESRPWPGRRGPPEGRRKRTAVTGSQTALLLRAFEKDRFPGIAAREELARETGLPESRIQIWFQNRRARHPGQGGRAPAQAGGLCSAAPGGGHPAPSWVAFAHTGAWGTGLPAPHVPCAPGALPQGAFVSQAARAAPALQPSQAAPAEGISQPAPARGDFAYAAPAPPDGALSHPQAPRWPPHPGKSREDRDPQRDGLPGPCAVAQPGPAQAGPQGQGVLAPPTSQGSPWWGWGRGPQVAGAAWEPQAGAAPPPQPAPPDASASARQGQMQGIPAPSQALQEPAPWSALPCGLLLDELLASPEFLQQAQPLLETEAPGELEASEEAASLEAPLSEEEYRALLEEL

SEQ ID NO: 14902 - protein, 374 aa, Homo Sapiens
MALPTPSDSTLPAEARGRGRRRRLVWTPSQSEALRACFERNPYPGIATRERLAQAIGIPEPRVQIWFQNERSRQLRQHRRESRPWPGRRGPPEGRRKRTAVTGSQTALLLRAFEKDRFPGIAAREELARETGLPESRIQIWFQNRRARHPGQGGRAPAQAGGLCSAAPGGGHPAPSWVAFAHTGAWGTGLPAPHVPCAPGALPQGAFVSQAARAAPALQPSQAAPAEGISQPAPARGDFAYAAPAPPDGALSHPQAPRWPPHPGKSREDRDPQRDGLPGPCAVAQPGPAQAGPQGQGVLAPPTSQGSPWWGWGRGPQVAGAAWEPQAGAAPPPQPAPPDASAASTDASHPGASQPLQEPGRSSTVTSSLLYELL

SEQ ID NO: 14903 - protein, 204 aa, Homo Sapiens
MAEDTYSHKMVKTNHRRCRTKFTEEQLKILINTFNQKPYPGYATKQKLALEINTEESRIQIWFQNRRARHGFQKRPEAETLESSQSQGQDQPGVEFQSREARRCRTTYSASQLHTLIKAFMKNPYPGIDSREELAKEIGVPESRVQIWFQNRRSRLLLQRKREPVASLEQEEQGKIPEGLQGAEDTQNGTNFTSDSHFSGARTW

SEQ ID NO: 14904 - protein, 437 aa, Homo Sapiens
MALAGAPAGGPCAPALEALLGAGALRLLDSSQIVIISAAQDASAPPAPTGPAAPAAGPCDPDLLLFATPQAPRPTPSAPRPALGRPPVKRRLDLETDHQYLAESSGPARGRGRHPGKGVKSPGEKSRYETSLNLTTKRFLELLSHSADGVVDLNWAAEVLKVQKRRIYDITNVLEGIQLIAKKSKNHIQWLGSHTTVGVGGRLEGLTQDLRQLQESEQQLDHLMNICTTQLRLLSEDTDSQRLAYVTCQDLRSIADPAEQMVMVIKAPPETQLQAVDSSENFQISLKSKQGPIDVFLCPEETVGGISPGKTPSQEVTSEEENRATDSATIVSPPPSSPPSSLTTDPSQSLLSLEQEPLLSRMGSLRAPVDEDRLSPLVAADSLLEHVREDFSGLLPEEFISLSPPHEALDYHFGLEEGEGIRDLFDCDFGDLTPLDF

SEQ ID NO: 14905 - protein, 437 aa, Homo Sapiens
MLQGPRALASAAGQTPKVVPAMSPTELWPSGLSSPQLCPATATYYTPLYPQTAPPAAAPGTCLDATPHGPEGQVVRCLPAGRLPAKRKLDLEGIGRPVVPEFPTPKGKCIRVDGLPSPKTPKSPGEKTRYDTSLGLLTKKFIYLLSESEDGVLDLNWAAEVLDVQKRRIYDITNVLEGIQLIRKKAKNNIQWVGRGMFEDPTRPGKQQQLGQELKELMNTEQALDQLIQSCSLSFKHLTEDKANKRLAYVTYQDIRAVGNFKEQTVIAVKAPPQTRLEVPDRTEDNLQIYLKSTQGPIEVYLCPEEVQEPDSPSEEPLPSTSTLCPSPDSAQPSSSTDPSIMEPTASSVPAPAPTPQQAPPPPSLVPLEATDSLLELPHPLLQQTEDQFLSPTLACSSPLISFSPSLDQDDYLWGLEAGEGISDLFDSYDLGDLLIN

SEQ ID NO: 14906 - protein, 465 aa, Homo Sapiens
MRKGIQPALEQYLVTAGGGEGAAVVAAAAAASMDKRALLASPGFAAAAAAAAAPGAYIQILTTNTSTTSCSSSLQSGAVAAGPLLPSAPGAEQTAGSLLYTTPHGPSSRAGLLQQPPALGRGGSGGGGGPPAKRRLELGESGHQYLSDGLKTPKGKGRAALRSPDSPKTPKSPSEKTRYDTSLGLLTKKFIQLLSQSPDGVLDLNKAAEVLKVQKRRIYDITNVLEGIHLIKKKSKNNVQWMGCSLSEDGGMLAQCQGLSKEVTELSQEEKKLDELIQSCTLDLKLLTEDSENQRLAYVTYQDIRKISGLKDQTVIVVKAPPETRLEVPDSIESLQIHLASTQGPIEVYLCPEETETHSPMKTNNQDHNGNIPKPASKDLASTNSGHSDCSVSMGNLSPLASPANLLQQTEDQIPSNLEGPFVNLLPPLLQEDYLLSLGEEEGISDLFDAYDLEKLPLVEDFMCS

SEQ ID NO: 14907 - protein, 413 aa, Homo Sapiens
MAEAGPQAPPPPGTPSRHEKSLGLLTTKFVSLLQEAKDGVLDLKLAADTLAVRQKRRIYDITNVLEGIGLIEKKSKNSIQWKGVGPGCNTREIADKLIELKAEIEELQQREQELDQHKVWVQQSIRNVTEDVQNSCLAYVTHEDICRCFAGDTLLAIRAPSGTSLEVPIPEGLNGQKKYQIHLKSVSGPIEVLLVNKEAWSSPPVAVPVPPPEDLLQSPSAVSTPPPLPKPALAQSQEASRPNSPQLTPTAVPGSAEVQGMAGPAAEITVSGGPGTDSKDSGELSSLPLGPTTLDTRPLQSSALLDSSSSSSSSSSSSSNSNSSSSSGPNPSTSFEPIKADPTGVLELPKELSEIFDPTRECMSSELLEELMSSEVFAPLLRLSPPPGDHDYIYNLDESEGVCDLFDVPVLNL

SEQ ID NO: 14908 - protein, 346 aa, Homo Sapiens; identical to SEQ ID NO: 4477

SEQ ID NO: 14909 - protein, 281 aa, Homo Sapiens
MSQQRPARKLPSLLLDPTEETVRRRCRDPINVEGLLPSKIRINLEDNVQYVSMRKALKVKRPRFDVSLVYLTRKFMDLVRSAPGGILDLNKVATKLGVRKRRVYDITNVLDGIDLVEKKSKNHIRWIGSDLSNFGAVPQQKKLQEELSDLSAMEDALDELIKDCAQQLFELTDDKENERLAYVTYQDIHSIQAFHEQIVIAVKAPAETRLDVPAPREDSITVHIRSTNGPIDVYLCEVEQGQTSNKRSEGVGTSSSESTHPEGPEEEENPQQSEELLEVSN

SEQ ID NO: 14910 - protein, 911 aa, Homo Sapiens
MEVNCLTLKDLISPRQPRLDFAVEDGENAQKENIFVDRSRMAPKTPIKNEPIDLSKQKKFTPERNPITPVKFVDRQQAEPWTPTANLKMLISAASPDIRDREKKKGLFRPIENKDDAFTDSLQLDVVGDSAVDEFEKQRPSRKQKSLGLLCQKFLARYPSYPLSTEKTTISLDEVAVSLGVERRRIYDIVNVLESLHLVSRVAKNQYGWHGRHSLPKTLRNLQRLGEEQKYEEQMAYLQQKELDLIDYKFGERKKDGDPDSQEQQLLDFSEPDCPSSSANSRKDKSLRIMSQKFVMLFLVSKTKIVTLDVAAKILIEESQDAPDHSKFKTKVRRLYDIANVLTSLALIKKVHVTEERGRKPAFKWIGPVDFSSSDEELVDVSASVLPELKRETYGQIQVCAKQKLARHGSFNTVQASERIQRKVNSEPSSPYREEQGSGGYSLEIGSLAAVYRQKIEDNSQGKAFASKRVVPPSSSLDPVAPFPVLSVDPEYCVNPLAHPVFSVAQTDLQAFSMQNGLNGQVDVSLASAASAVESLKPALLAGQPLVYVPSASLFMLYGSLQEGPASGSGSERDDRSSEAPATVELSSAPSAQKRLCEERKPQEEDEPATKRQSREYEDGPLSLVMPKKPSDSTDLASPKTMGNRASIPLKDIHVNGQLPAAEEISGKATANSLVSSEWGNPSRNTDVEKPSKENESTKEPSLLQYLCVQSPAGLNGFNVLLSGSQTPPTVGPSSGQLPSFSVPCMVLPSPPLGPFPVLYSPAMPGPVSSTLGALPNTGPVNFSLPGLGSIAQLLVGPTAVVNPKSSTLPSADPQLQSQPSLNLSPVMSRSHSVVQQPESPVYVGHPVSVVKLHQSPVPVTPKSIQRTHRETFFKTPGSLGDPVLKRRERNQSRNTSSAQRRLEIPSGGAD

SEQ ID NO: 14911 - protein, 867 aa, Homo Sapiens
MENEKENLFCEPHKRGLMKTPLKESTTANIVLAEIQPDFGPLTTPTKPKEGSQGEPWTPTANLKMLISAVSPEIRNRDQKRGLFDNRSGLPEAKDCIHEHLSGDEFEKSQPSRKEKSLGLLCHKFLARYPNYPNPAVNNDICLDEVAEELNVERRRIYDIVNVLESLHMVSRLAKNRYTWHGRHNLNKTLGTLKSIGEENKYAEQIMMIKKKEYEQEFDFIKSYSIEDHIIKSNTGPNGHPDMCFVELPGVEFRAASVNSRKDKSLRVMSQKFVMLFLVSTPQIVSLEVAAKILIGEDHVEDLDKSKFKTKIRRLYDIANVLSSLDLIKKVHVTEERGRKPAFKWTGPEISPNTSGSSPVIHFTPSDLEVRRSSKENCAKNLFSTRGKPNFTRHPSLIKLVKSIESDRRKINSAPSSPIKTNKAESSQNSAPFPSKMAQLAAICKMQLEEQSSESRQKVKVQLARSGPCKPVAPLDPPVNAEMELTAPSLIQPLGMVPLIPSPLSSAVPLILPQAPSGPSYAIYLQPTQAHQSVTPPQGLSPTVCTTHSSKATGSKDSTDATTEKAANDTSKASASTRPGSLLPAPERQGAKSRTREPAGERGSKRASMLEDSGSKKKFKEDLKGLENVSATLFPSGYLIPLTQCSSLGAESILSGKENSSALSPNHRIYSSPIAGVIPVTSSELTAVNFPSFHVTPLKLMVSPTSVAAVPVGNSPALASSHPVPIQNPSSAIVNFTLQHLGLISPNVQLSASPGSGIVPVSPRIESVNVAPENAGTQQGRATNYDSPVPGQSQPNGQSVAVTGAQQPVPVTPKGSQLVAESFFRTPGGPTKPTSSSCMDFEGANKTSLGTLFVPQRKLEVSTEDVH

SEQ ID NO: 14912 - protein, 784 aa, Homo Sapiens
MEGAMAVRVTAAHTAEAQAEAGREAGEGAVAAVAAALAPSGFLGLPAPFSEEDEDDVHRCGRCQAEFTALEDFVQHKIQKACQRAPPEALPATPATTALLGQEVVPAAPGPEEPITVAHIVVEAASLAADISHASDLVGGGHIKEVIVAAEAELGDGEMAEAPGSPRQQGLGLAGEGEQAQVKLLVNKDGRYVCALCHKTFKTGSILKAHMVTHSSRKDHECKLCGASFRTKGSLIRHHRRHTDERPYKCSKCGKSFRESGALTRHLKSLTPCTEKIRFSVSKDVVVSKEDARAGSGAGAAGLGTATSSVTGEPIETSPVIHLVTDAKGTVIHEVHVQMQELSLGMKALAPEPPVSQELPCSSEGSRENLLHQAMQNSGIVLERAAGEEGALEPAPAAGSSPQPLAVAAPQLPVLEVQPLETQVASEASAVPRTHPCPQCSETFPTAATLEAHKRGHTGPRPFACAQCGKAFPKAYLLKKHQEVHVRERRFRCGDCGKLYKTIAHVRGHRRVHSDERPYPCPKCGKRYKTKNAQQVHFRTHLEEKPHVCQFCSRGFREKGSLVRHVRHHTGEKPFKCYKCGRGFAEHGTLNRHLRTKGGCLLEVEELLVSEDSPAAATTVLTEDPHTVLVEFSSVVADTQEYIIEATADDAETSEATEIIEGTQTEVDSHIMKVVQQIVHQASAGHQIIVQNVTMDEETALGPEAAAADTITIATPESLTEQVAMTLASAISEGTVLAARAGTSGTEQATVTMVSSEDIEILEHAGELVIASPEGQLEVQTVIV

SEQ ID NO: 14913 - protein, 591 aa, Homo Sapiens
MFGIQESIQRSGSSMKEEPLGSGMNAVRTWMQGAGVLDANTAAQSGVGLARAHFEKQPPSNLRKSNFFHFVLALYDRQGQPVEIERTAFVGFVEKEKEANSEKTNNGIHYRLQLLYSNGIRTEQDFYVRLIDSMTKQAIVYEGQDKNPEMCRVLLTHEIMCSRCCDKKSCGNRNETPSDPVIIDRFFLKFFLKCNQNCLKNAGNPRDMRRFQVVVSTTVNVDGHVLAVSDNMFVHNNSKHGRRARRLDPSEGTPSYLEHATPCIKAISPSEGWTTGGATVIIIGDNFFDGLQVIFGTMLVWSELITPHAIRVQTPPRHIPGVVEVTLSYKSKQFCKGTPGRFIYTALNEPTIDYGFQRLQKVIPRHPGDPERLPKEVILKRAADLVEALYGMPHNNQEIILKRAADIAEALYSVPRNHNQLPALANTSVHAGMMGVNSFSGQLAVNVSEASQATNQGFTRNSSSVSPHGYVPSTTPQQTNYNSVTTSMNGYGSAAMSNLGGSPTFLNGSAANSPYAIVPSSPTMASSTSLPSNCSSSSGIFSFSPANMVSAVKQKSAFAPVVRPQTSPPPTCTSTNGNSLQAISGMIVPPM

SEQ ID NO: 14914 - protein, 575 aa, Homo Sapiens
MFGIQDTLGRGPTLKEKSLGAEMDSVRSWVRNVGVVDANVAAQSGVALSRAHFEKQPPSNLRKSNFFHFVLALYDRQGQPVEIERTAFVDFVENDKEQGNEKTNNGTHYKLQLLYSNGVRTEQDLYVRLIDSVTKQPIAYEGQNKNPEMCRVLLTHEVMCSRCCEKKSCGNRNETPSDPVIIDRFFLKFFLKCNQNCLKTAGNPRDMRRFQVVLSTTVNVDGHVLAVSDNMFVHNNSKHGRRARRLDPSEATPCIKAISPSEGWTTGGAMVIIIGDNFFDGLQVVFGTMLVWSELITPHAIRVQTPPRHIPGVVEVTLSYKSKQFCKGAPGRFIYTALNEPTIDYGFQRLQKVIPRHPGDPERLAKEMLLKRAADLVEALYGTPHNNQDIILKRAADIAEALYSVPRNPSQLPALSSSPAHSGMMGINSYGSQLGVSISESTQGNNQGYIRNTSSISPRGYSSSSTPQQSNYSTSSNSMNGYSNVPMANLGVPGSPGFLNGSPTGSPYGIMSSSPTVGSSSTSSILPFSSSVFPAVKQKSAFAPVIRPQGSPSPACSSGNGNGFRAMTGLVVPPM

SEQ ID NO: 14915 - protein, 596 aa, Homo Sapiens
MFGIQENIPRGGTTMKEEPLGSGMNPVRSWMHTAGVVDANTAAQSGVGLARAHFEKQPPSNLRKSNFFHFVLALYDRQGQPVEIERTAFVDFVEKEKEPNNEKTNNGIHYKLQLLYSNGVRTEQDLYVRLIDSMTKQAIVYEGQDKNPEMCRVLLTHEIMCSRCCDKKSCGNRNETPSDPVIIDRFFLKFFLKCNQNCLKNAGNPRDMRRFQVVVSTTVNVDGHVLAVSDNMFVHNNSKHGRRARRLDPSEGTAPSYLENATPCIKAISPSEGWTTGGATVIIIGDNFFDGLQVVFGTMLVWSELITPHAIRVQTPPRHIPGVVEVTLSYKSKQFCKGAPGRFVYTALNEPTIDYGFQRLQKVIPRHPGDPERLPKEVLLKRAADLVEALYGMPHNNQEIILKRAADIAEALYSVPRNHNQIPTLGNNPAHTGMMGVNSFSSQLAVNVSETSQANDQVGYSRNTSSVSPRGYVPSSTPQQSNYNTVSTSMNGYGSGAMASLGVPGSPGFLNGSSANSPYGIVPSSPTMAASSVTLPSNCSSTHGIFSFSPANVISAVKQKSAFAPVVRPQASPPPSCTSANGNGLQAMSGLVVPPM

SEQ ID NO: 14916 - protein, 602 aa, Homo Sapiens
MFPAQDALPRSGLNLKEEPLLPAGLGSVRSWMQGAGILDASTAAQSGVGLARAHFEKQPPSNLRKSNFFHFVLAMYDRQGQPVEVERTAFIDFVEKDREPGAEKTNNGIHYRLRLVYNNGLRTEQDLYVRLIDSMSKQAIIYEGQDKNPEMCRVLLTHEIMCSRCCDRKSCGNRNETPSDPVIIDRFFLKFFLKCNQNCLKNAGNPRDMRRFQVVVSTTVSVDGHVLAVSDNMFVHNNSKHGRRARRLDPSEAATPCIKAISPGEGWTTGGATVIVIGDNFFDGLQVVFGNVLVWSELITPHAIRVQTPPRHIPGVVEVTLSYKSKQFCKGCPGRFVYTALNEPTIDYGFQRLQKVIPRHPGDPERLPKEVLLKRAADLAEALYGVPGSNQELLLKRAADVAEALYSTPRAPGPLAPLAPSHPHPAVVGINAFSSPLAIAVGDATPGPEPGYARSCSSASPRGFAPSPGSQQSGYGGGLGAGLGGYGAPGVAGLGVPGSPSFLNGSTATSPFAIMPSSPPLAAASSMSLPAAAPTTSVFSFSPVNMISAVKQRSAFAPVLRPPSSPPQACPRAHGEGLPDQSFEDSDKFHSPARGLQGLAYS

SEQ ID NO: 14917 - protein, 706 aa, Homo Sapiens
MTTLKEAVTFKDVAVVFTEEELRLLDLAQRKLYREVMLENFRNLLSVGHQSLHRDTFHFLKEEKFWMMETATQREGNLGGKIQMEMETVSESGTHEGLFSHQTWEQISSDLTRFQDSMVNSFQFSKQDDMPCQVDAGLSIIHVRQKPSEGRTCKKSFSDVSVLDLHQQLQSREKSHTCDECGKSFCYSSALRIHQRVHMGEKLYNCDVCGKEFNQSSHLQIHQRIHTGEKPFKCEQCGKGFSRRSGLYVHRKLHTGVKPHICEKCGKAFIHDSQLQEHQRIHTGEKPFKCDICCKSFRSRANLNRHSMVHMREKPFRCDTCGKSFGLKSALNSHRMVHTGEKRYKCEECGKRFIYRQDLYKHQIDHTGEKPYNCKECGKSFRWASGLSRHVRVHSGETTFKCEECGKGFYTNSQRYSHQRAHSGEKPYRCEECGKGYKRRLDLDFHQRVHRGEKPYNCKECGKSFGWASCLLNHQRIHSGEKPFKCEECGKRFTQNSQLYTHRRVHSGEKPFKCEECGKRFTQNSQLYSHRRVHTGVKPYKCEECGKGFNSKFNLDMHQRVHTGERPYNCKECGKSFSRASSILNHKRLHGDEKPFKCEECGKRFTENSQLHSHQRVHTGEKPYKCEKCGKSFRWASTHLTHQRLHSREKLLQCEDCGKSIVHSSCLKDQQRDQSGEKTSKCEDCGKRYKRRLNLDTLLSLFLNDT

SEQ ID NO: 14918 - protein, 476 aa, Homo Sapiens
MMTAKAVDKIPVTLSGFVHQLSDNIYPVEDLAATSVTIFPNAELGGPFDQMNGVAGDGMINIDMTGEKRSLDLPYPSSFAPVSAPRNQTFTYMGKFSIDPQYPGASCYPEGIINIVSAGILQGVTSPASTTASSSVTSASPNPLATGPLGVCTMSQTQPDLDHLYSPPPPPPPYSGCAGDLYQDPSAFLSAATTSTSSSLAYPPPPSYPSPKPATDPGLFPMIPDYPGFFPSQCQRDLHGTAGPDRKPFPCPLDTLRVPPPLTPLSTIRNFTLGGPSAGVTGPGASGGSEGPRLPGSSSAAAAAAAAAAYNPHHLPLRPILRPRKYPNRPSKTPVHERPYPCPAEGCDRRFSRSDELTRHIRIHTGHKPFQCRICMRNFSRSDHLTTHIRTHTGEKPFACDYCGRKFARSDERKRHTKIHLRQKERKSSAPSASVPAPSTASCSGGVQPGGTLCSSNSSSLGGGPLAPCSSRTRTP

SEQ ID NO: 14919 - protein, 387 aa, Homo Sapiens
MTGKLAEKLPVTMSSLLNQLPDNLYPEEIPSALNLFSGSSDSVVHYNQMATENVMDIGLTNEKPNPELSYSGSFQPAPGNKTVTYLGKFAFDSPSNWCQDNIISLMSAGILGVPPASGALSTQTSTASMVQPPQGDVEAMYPALPPYSNCGDLYSEPVSFHDPQGNPGLAYSPQDYQSAKPALDSNLFPMIPDYNLYHHPNDMGSIPEHKPFQGMDPIRVNPPPITPLETIKAFKDKQIHPGFGSLPQPPLTLKPIRPRKYPNRPSKTPLHERPHACPAEGCDRRFSRSDELTRHLRIHTGHKPFQCRICMRSFSRSDHLTTHIRTHTGEKPFACEFCGRKFARSDERKRHAKIHLKQKEKKAEKGGAPSASSAPPVSLAPVVTTCA

SEQ ID NO: 14920 - protein, 589 aa, Homo Sapiens
MAVARGVGSPEPAPPQLYKWGGCGLGEPGSALERRGAAARGRCGRARAPRLPDSFPRGECPKPGARAPRSVRCGEPLPPASPPPARPQAQRARPRAPHSRRRAMLHLSEFSEPDALLVKSTEGCCAEPSAELPRLPARDAPAATGYPGAGDFLSWALNSCGASGDLADSCFLEGPAPTPPPGLSYSGSFFIQAVPEHPHDPEALFNLMSGILGLAPFPGPEAAASRSPLDAPFPAGSDALLPGPPDLYSPDLGAAPFPEAFWEASPCAGAPSQCLYEPQLSPPDVKPGLRAPPASPALDAVSAFKGPYAPWELLSVGAPGNCGSQGDYQAAPEARFPVIGTKIEDLLSISCPAELPAVPANRLYPSGAYDAFPLAPGDLGEGAEGLPGLLTPPSGEGGSSGDGGEFLASTQPQLSPLGLRSAAAADFPKPLVADIPGSSGVAAPPVPPPPPTPFPQAKARRKGRRGGKCSTRCFCPRPHAKAFACPVESCVRSFARSDELNRHLRIHTGHKPFQCRICLRNFSRSDHLTTHVRTHTGEKPFACDVCGRRFARSDEKKRHSKVHLKQKARAEERLKGLGFYSLGLSFASL

SEQ ID NO: 14921 - protein, 300 aa, Homo Sapiens; identical to SEQ ID NO: 4633

SEQ ID NO: 14922 - protein, 619 aa, Homo Sapiens
MAAVVQQNDLVFEFASNVMEDERQLGDPAIFPAVIVEHVPGADILNSYAGLACVEEPNDMITESSLDVAEEEIIDDDDDDITLTVEASCHDGDETIETIEAAEALLNMDSPGPMLDEKRINNNIFSSPEDDMVVAPVTHVSVTLDGIPEVMETQQVQEKYADSPGASSPEQPKRKKGRKTKPPRPDSPATTPNISVKKKNKDGKGNTIYLWEFLLALLQDKATCPKYIKWTQREKGIFKLVDSKAVSRLWGKHKNKPDMNYETMGRALRYYYQRGILAKVEGQRLVYQFKEMPKDLIYINDEDPSSSIESSDPSLSSSATSNRNQTSRSRVSSSPGVKGGATTVLKPGNSKAAKPKDPVEVAQPSEVLRTVQPTQSPYPTQLFRTVHVVQPVQAVPEGEAARTSTMQDETLNSSVQSIRTIQAPTQVPVVVSPRNQQLHTVTLQTVPLTTVIASTDPSAGTGSQKFILQAIPSSQPMTVLKENVMLQSQKAGSPPSIVLGPAQVQQVLTSNVQTICNGTVSVASSPSFSATAPVVTFSPRSSQLVAHPPGTVITSVIKTQETKTLTQEVEKKESEDHLKENTEKTEQQPQPYVMVVSSSNGFTSQVAMKQNELLEPNSF

SEQ ID NO: 14923 - protein, 593 aa, Homo Sapiens
MTSAVVDSGGTILELSSNGVENQEESEKVSEYPAVIVEPVPSARLEQGYAAQVLVYDDETYMMQDVAEEQEVETENVETVEASVHSSNAHCTDKTIEAAEALLHMESPTCLRDSRSPVEVFVPPCVSTPEFIHAAMRPDVITETVVEVSTEESEPMDTSPIPTSPDSHEPMKKKKVGRKPKTQQSPISNGSPELGIKKKPREGKGNTTYLWEFLLDLLQDKNTCPRYIKWTQREKGIFKLVDSKAVSKLWGKHKNKPDMNYETMGRALRYYYQRGILAKVEGQRLVYQFKDMPKNIVVIDDDKSETCNEDLAGTTDEKSLERVSLSAESLLKAASSVRSGKNSSPINCSRAEKGVARVVNITSPGHDASSRSPTTTASVSATAAPRTVRVAMQVPVVMTSLGQKISTVAVQSVNAGAPLITSTSPTTATSPKVVIQTIPTVMPASTENGDKITMQPAKIITIPATQLAQCQLQTKSNLTGSGSINIVGTPLAVRALTPVSIAHGTPVMRLSMPTQQASGQTPPRVISAVIKGPEVKSEAVAKKQEHDVKTLQLVEEKPADGNKTVTHVVVVSAPSAIALPVTMKTEGLVTCEK

SEQ ID NO: 14924 - protein, 371 aa, Homo Sapiens
MAATCEISNIFSNYFSAMYSSEDSTLASVPPAATFGADDLVLTLSNPQMSLEGTEKASWLGEQPQFWSKTQVLDWISYQVEKNKYDASAIDFSRCDMDGATLCNCALEELRLVFGPLGDQLHAQLRDLTSSSSDELSWIIELLEKDGMAFQEALDPGPFDQGSPFAQELLDDGQQASPYHPGSCGAGAPSPGSSDVSTAGTGASRSSHSSDSGGSDVDLDPTDGKLFPSDGFRDCKKGDPKHGKRKRGRPRKLSKEYWDCLEGKKSKHAPRGTHLWEFIRDILIHPELNEGLMKWENRHEGVFKFLRSEAVAQLWGQKKKNSNMTYEKLSRAMRYYYKREILERVDGRRLVYKFGKNSSGWKEEEVLQSRN

SEQ ID NO: 14925 - protein, 663 aa, Homo Sapiens
MAITLQPSDLIFEFASNGMDDDIHQLEDPSVFPAVIVEQVPYPDLLHLYSGLELDDVHNGIITDGTLCMTQDQILEGSFLLTDDNEATSHTMSTAEVLLNMESPSDILDEKQIFSTSEMLPDSDPAPAVTLPNYLFPASEPDALNRAGDTSDQEGHSLEEKASREESAKKTGKSKKRIRKTKGNRSTSPVTDPSIPIRKKSKDGKGSTIYLWEFLLALLQDRNTCPKYIKWTQREKGIFKLVDSKAVSKLWGKQKNKPDMNYETMGRALRYYYQRGILAKVEGQRLVYQFKEMPKDLVVIEDEDESSEATAAPPQASTASVASASTTRRTSSRVSSRSAPQGKGSSSWEKPKIQHVGLQPSASLELGPSLDEEIPTTSTMLVSPAEGQVKLTKAVSASSVPSNIHLGVAPVGSGSALTLQTIPLTTVLTNGPPASTTAPTQLVLQSVPAASTFKDTFTLQASFPLNASFQDSQVAAPGAPLILSGLPQLLAGANRPTNPAPPTVTGAGPAGPSSQPPGTVIAAFIRTSGTTAAPRVKEGPLRSSSYVQGMVTGAPMEGLLVPEETLRELLRDQAHLQPLPTQVVSRGSHNPSLLGNQTLSPPSRPTVGLTPVAELELSSGSGSLLMAEPSVTTSGSLLTRSPTPAPFSPFNPTSLIKMEPHDI

SEQ ID NO: 14926 - protein, 265 aa, Homo Sapiens
MPSLPHSHRVMLDSVTHSTFLPNASFCDPLMSWTDLFSNEEYYPAFEHQTACDSYWTSVHPEYWTKRHVWEWLQFCCDQYKLDTNCISFCNFNISGLQLCSMTQEEFVEAAGLCGEYLYFILQNIRTQGYSFFNDAEESKATIKDYADSNCLKTSGIKSQDCHSHSRTSLQSSHLWEFVRDLLLSPEENCGILEWEDREQGIFRVVKSEALAKMWGQRKKNDRMTYEKLSRALRYYYKTGILERVDRRLVYKFGKNAHGWQEDKL

SEQ ID NO: 14927 - protein, 428 aa, Homo Sapiens
MDPSVTLWQFLLQLLREQGNGHIISWTSRDGGEFKLVDAEEVARLWGLRKNKTNMNYDKLSRALRYYYDKNIIRKVSGQKFVYKFVSYPEVAGCSTEDCPPQPEVSVTSTMPNVAPAAIHAAPGDTVSGKPGTPKGAGMAGPGGLARSSRNEYMRSGLYSTFTIQSLQPQPPPHPRPAVVLPSAAPAGAAAPPSGSRSTSPSPLEACLEAEEAGLPLQVILTPPEAPNLKSEELNVEPGLGRALPPEVKVEGPKEELEVAGERGFVPETTKAEPEVPPQEGVPARLPAVVMDTAGQAGGHAASSPEISQPQKGRKPRDLELPLSPSLLGGPGPERTPGSGSGSGLQAPGPALTPSLLPTHTLTPVLLTPSSLPPSIHFWSTLSPIAPRSPAKLSFQFPSSGSAQVHIPSISVDGLSTPVVLSPGPQKP

SEQ ID NO: 14928 - protein, 407 aa, Homo Sapiens
MESAITLWQFLLQLLLDQKHEHLICWTSNDGEFKLLKAEEVAKLWGLRKNKTNMNYDKLSRALRYYYDKNIIKKVIGQKFVYKFVSFPEILKMDPHAVEISRESLLLQDSDCKASPEGREAHKHGLAALRSTSRNEYIHSGLYSSFTINSLQNPPDAFKAIKTEKLEEPPEDSPPVEEVRTVIRFVTNKTDKHVTRPVVSLPSTSEAAAASAFLASSVSAKISSLMLPNAASISSASPFSSRSPSLSPNSPLPSEHRSLFLEAACHDSDSLEPLNLSSGSKTKSPSLPPKAKKPKGLEISAPPLVLSGTDIGSIALNSPALPSGSLTPAFFTAQTPNGLLLTPSPLLSSIHFWSSLSPVAPLSPARLQGPSTLFQFPTLLNGHMPVPIPSLDRAASPVLLSSNSQKS

SEQ ID NO: 14929 - protein, 431 aa, Homo Sapiens
MDSAITLWQFLLQLLQKPQNKHMICWTSNDGQFKLLQAEEVARLWGIRKNKPNMNYDKLSRALRYYYVKNIIKKVNGQKFVYKFVSYPEILNMDPMTVGRIEGDCESLNFSEVSSSSKDVENGGKDKPPQPGAKTSSRNDYIHSGLYSSFTLNSLNSSNVKLFKLIKTENPAEKLAEKKSPQEPTPSVIKFVTTPSKKPPVEPVAATISIGPSISPSSEETIQALETLVSPKLPSLEAPTSASNVMTAFATTPPISSIPPLQEPPRTPSPPLSSHPDIDTDIDSVASQPMELPENLSLEPKDQDSVLLEKDKVNNSSRSKKPKGLELAPTLVITSSDPSPLGILSPSLPTASLTPAFFSQTPIILTPSPLLSSIHFWSTLSPVAPLSPARLQGANTLFQFPSVLNSHGPFTLSGLDGPSTPGPFSPDLQKT

SEQ ID NO: 14930 - protein, 1045 aa, Homo Sapiens
MNLQAQPKAQNKRKRCLFGGQEPAPKEQPPPLQPPQQSIRVKEEQYLGHEGPGGAVSTSQPVELPPPSSLALLNSVVYGPERTSAAMLSQQVASVKWPNSVMAPGRGPERGGGGGVSDSSWQQQPGQPPPHSTWNCHSLSLYSATKGSPHPGVGVPTYYNHPEALKREKAGGPQLDRYVRPMMPQKVQLEVGRPQAPLNSFHAAKKPPNQSLPLQPFQLAFGHQVNRQVFRQGPPPPNPVAAFPPQKQQQQQQPQQQQQQQQAALPQMPLFENFYSMPQQPSQQPQDFGLQPAGPLGQSHLAHHSMAPYPFPPNPDMNPELRKALLQDSAPQPALPQVQIPFPRRSRRLSKEGILPPSALDGAGTQPGQEATGNLFLHHWPLQQPPPGSLGQPHPEALGFPLELRESQLLPDGERLAPNGREREAPAMGSEEGMRAVSTGDCGQVLRGGVIQSTRRRRRASQEANLLTLAQKAVELASLQNAKDGSGSEEKRKSVLASTTKCGVEFSEPSLATKRAREDSGMVPLIIPVSVPVRTVDPTEAAQAGGLDEDGKGPEQNPAEHKPSVIVTRRRSTRIPGTDAQAQAEDMNVKLEGEPSVRKPKQRPRPEPLIIPTKAGTFIAPPVYSNITPYQSHLRSPVRLADHPSERSFELPPYTPPPILSPVREGSGLYFNAIISTSTIPAPPPITPKSAHRTLLRTNSAEVTPPVLSVMGEATPVSIEPRINVGSRFQAEIPLMRDRALAAADPHKADLVWQPWEDLESSREKQRQVEDLLTAACSSIFPGAGTNQELALHCLHESRGDILETLNKLLLKKPLRPHNHPLATYHYTGSDQWKMAERKLFNKGIAIYKKDFFLVQKLIQTKTVAQCVEFYYTYKKQVKIGRNGTLTFGDVDTSDEKSAQEEVEVDIKTSQKFPRVPLPRRESPSEERLEPKREVKEPRKEGEEEVPEIQEKEEQEEGRERSRRAAAVKATQTLQANESASDILILRSHESNAPGSAGGQASEKPREGTGKSRRALPFSEKKKKTETFSKTQNQENTFPCKKCGR

SEQ ID NO: 14931 - protein, 257 aa, Homo Sapiens
MFQPAAKRGFTIESLVAKDGGTGGGTGGGGAGSHLLAAAASEEPLRPTALNYPHPSAAEAAFVSGFPAAAAAGAGRSLYGGPELVFPEAMNHPALTVHPAHQLGASPLQPPHSFFGAQHRDPLHFYPWVLRNRFFGHRFQASDVPQDGLLLHGPFARKPKRIRTAFSPSQLLRLERAFEKNHYVVGAERKQLAGSLSLSETQVKVWFQNRRTKYKRQKLEEEGPESEQKKKGSHHINRWRIATKQANGEDIDVTSND

SEQ ID NO: 14932 - protein, 252 aa, Homo Sapiens
MFQPAPKRCFTIESLVAKDSPLPASRSEDPIRPAALSYANSSPINPFLNGFHSAAAAAAGRGVYSNPDLVFAEAVSHPPNPAVPVHPVPPPHALAAHPLPSSHSPHPLFASQQRDPSTFYPWLIHRYRYLGHRFQGNDTSPESFLLHNALARKPKRIRTAFSPSQLLRLEHAFEKNHYVVGAERKQLAHSLSLTETQVKVWFQNRRTKFKRQKLEEEGSDSQQKKKGTHHINRWRIATKQASPEEIDVTSDD

SEQ ID NO: 14933 - protein, 392 aa, Homo Sapiens
MEEQQPEPKSQRDSALGAAAAATPGGLSLSLSPGASGSSGSGSDGDSVPVSPQPAPPSPPAAPCLPPLAHHPHLPPHPPPPPPQHLAAPAHQPQPAAQLHRTTNFFIDNILRPDFGCKKEQPPPQLLVAAAARGGAGGGGRVERDRGQTAAGRDPVHPLGTRAPGAASLLCAPDANCGPPDGSQPAAAGAGASKAGNPAAAAAAAAAAVAAAAAAAAAKPSDTGGGGSGGGAGSPGAQGTKYPEHGNPAILLMGSANGGPVVKTDSQQPLVWPAWVYCTRYSDRPSSGPRTRKLKKKKNEKEDKRPRTAFTAEQLQRLKAEFQANRYITEQRRQTLAQELSLNESQIKIWFQNKRAKIKKATGIKNGLALHLMAQGLYNHSTTTVQDKDESE

SEQ ID NO: 14934 - protein, 333 aa, Homo Sapiens
MEENDPKPGEAAAAVEGQRQPESSPGGGSGGGGGSSPGEADTGRRRALMLPAVLQAPGNHQHPHRITNFFIDNILRPEFGRRKDAGTCCAGAGGGRGGGAGGEGGASGAEGGGGAGGSEQLLGSGSREPRQNPPCAPGAGGPLPAAGSDSPGDGEGGSKTLSLHGGAKKGGDPGGPLDGSLKARGLGGGDLSVSSDSDSSQAGANLGAQPMLWPAWVYCTRYSDRPSSGPRSRKPKKKNPNKEDKRPRTAFTAEQLQRLKAEFQTNRYLTEQRRQSLAQELSLNESQIKIWFQNKRAKIKKATGNKNTLAVHLMAQGLYNHSTTAKEGKSDSE

SEQ ID NO: 14935 - protein, 434 aa, Homo Sapiens
MSILKIHAREIFDSRGNPTVEVDLFTSKGLFRAAVPSGASTGIYEALELRDNDKTRYMGKGVSKAVEHINKTIAPALVSKKLNVTEQEKIDKLMIEMDGTENKSKFGANAILGVSLAVCKAGAVEKGVPLYRHIADLAGNSEVILPVPAFNVINGGSHAGNKLAMQEFMILPVGAANFREAMRIGAEVYHNLKNVIKEKYGKDATNVGDEGGFAPNILENKEGLELLKTAIGKAGYTDKVVIGMDVAASEFFRSGKYDLDFKSPDDPSRYISPDQLADLYKSFIKDYPVVSIEDPFDQDDWGAWQKFTASAGIQVVGDDLTVTNPKRIAKAVNEKSCNCLLLKVNQIGSVTESLQACKLAQANGWGVMVSHRSGETEDTFIADLVVGLCTGQIKTGAPCRSERLAKYNQLLRIEEELGSKAKFAGRNFRNPLAK

SEQ ID NO: 14936 - protein, 686 aa, Homo Sapiens
MQLGEQLLVSSVNLPGAHFYPLESARGGSGGSAGHLPSAAPSPQKLDLDKASKKFSGSLSCEAVSGEPAAASAGAPAAMLSDTDAGDAFASAAAVAKPGPPDGRKGSPCGEEELPSAAAAAAAAAAAAAATARYSMDSLSSERYYLQSPGPQGSELAAPCSLFPYQAAAGAPHGPVYPAPNGARYPYGSMLPPGGFPAAVCPPGRAQFGPGAGAGSGAGGSSGGGGGPGTYQYSQGAPLYGPYPGAAAAGSCGGLGGLGVPGSGFRAHVYLCNRPLWLKFHRHQTEMIITKQGRRMFPFLSFNINGLNPTAHYNVFVEVVLADPNHWRFQGGKWVTCGKADNNMQGNKMYVHPESPNTGSHWMRQEISFGKLKLTNNKGANNNNTQMIVLQSLHKYQPRLHIVEVTEDGVEDLNEPSKTQTFTFSETQFIAVTAYQNTDITQLKIDHNPFAKGFRDNYDSSHQIVPGGRYGVQSFFPEPFVNTLPQARYYNGERTVPQTNGLLSPQQSEEVANPPQRWLVTPVQQPGTNKLDISSYESEYTSSTLLPYGIKSLPLQTSHALGYYPDPTFPAMAGWGGRGSYQRKMAAGLPWTSRTSPTVFSEDQLSKEKVKEEIGSSWIETPPSIKSLDSNDSGVYTSACKRRRLSPSNSSNENSPSIKCEDINAEEYSKDTSKGMGGYYAFYTTP

SEQ ID NO: 14937 - protein, 870 aa, Homo Sapiens
MTADKEKKRSSSERRKEKSRDAARCRRSKETEVFYELAHELPLPHSVSSHLDKASIMRLAISFLRTHKLLSSVCSENESEAEADQQMDNLYLKALEGFIAVVTQDGDMIFLSENISKFMGLTQVELTGHSIFDFTHPCDHEEIRENLSLKNGSGFGKKSKDMSTERDFFMRMKCTVTNRGRTVNLKSATWKVLHCTGQVKVYNNCPPHNSLCGYKEPLLSCLIIMCEPIQHPSHMDIPLDSKTFLSRHSMDMKFTYCDDRITELIGYHPEELLGRSAYEFYHALDSENMTKSHQNLCTKGQVVSGQYRMLAKHGGYVWLETQGTVIYNPRNLQPQCIMCVNYVLSEIEKNDVVFSMDQTESLFKPHLMAMNSIFDSSGKGAVSEKSNFLFTKLKEEPEELAQLAPTPGDAIISLDFGNQNFEESSAYGKAILPPSQPWATELRSHSTQSEAGSLPAFTVPQAAAPGSTTPSATSSSSSCSTPNSPEDYYTSLDNDLKIEVIEKLFAMDTEAKDQCSTQTDFNELDLETLAPYIPMDGEDFQLSPICPEERLLAENPQSTPQHCFSAMTNIFQPLAPVAPHSPFLLDKFQQQLESKKTEPEHRPMSSIFFDAGSKASLPPCCGQASTPLSSMGGRSNTQWPPDPPLHFGPTKWAVGDQRTEFLGAAPLGPPVSPPHVSTFKTRSAKGFGARGPDVLSPAMVALSNKLKLKRQLEYEEQAFQDLSGGDPPGGSTSHLMWKRMKNLRGGSCPLMPDKPLSANVPNDKFTQNPMRGLGHPLRHLPLPQPPSAISPGENSKSRFPPQCYATQYQDYSLSSAHKVSGMASRLLGPSFESYLLPELTRYDCEVNVPVLGSSTLLQGGDLLRALDQAT

SEQ ID NO: 14938 - protein, 548 aa, Homo Sapiens
MKTPADTGFAFPDWAYKPESSPGSRQIQLWHFILELLRKEEYQGVIAWQGDYGEFVIKDPDEVARLWGVRKCKPQMNYDKLSRALRYYYNKRILHKTKGKRFTYKFNFNKLVLVNYPFIDVGLAGGAVPQSAPPVPSGGSHFRFPPSTPSEVLSPTEDPRSPPACSSSSSSLFSAVVARRLGRGSVSDCSDGTSELEEPLGEDPRARPPGPPDLGAFRGPPLARLPHDPGVFRVYPRPRGGPEPLSPFPVSPLAGPGSLLPPQLSPALPMTPTHLAYTPSPTLSPMYPSGGGGPSGSGGGSHFSFSPEDMKRYLQAHTQSVYNYHLSPRAFLHYPGLVVPQPQRPDKCPLPPMAPETPPVPSSASSSSSSSSSPFKFKLQPPPLGRRQRAAGEKAVAGADKSGGSAGGLAEGAGALAPPPPPPQIKVEPISEGESEEVEVTDISDEDEEDGEVFKTPRAPPAPPKPEPGEAPGASQCMPLKLRFKRRWSEDCRLEGGGGPAGGFEDEGEDKKVRGEGPGEAGGPLTPRRVSSDLQHATAQLSLEHRDS

SEQ ID NO: 14939 - protein, 486 aa, Homo Sapiens
MIQTVPDPAAHIKEALSVVSEDQSLFECAYGTPHLAKTEMTASSSSDYGQTSKMSPRVPQQDWLSQPPARVTIKMECNPSQVNGSRNSPDECSVAKGGKMVGSPDTVGMNYGSYMEEKHMPPPNMTTNERRVIVPADPTLWSTDHVRQWLEWAVKEYGLPDVNILLFQNIDGKELCKMTKDDFQRLTPSYNADILLSHLHYLRETPLPHLTSDDVDKALQNSPRLMHARNTGGAAFIFPNTSVYPEATQRITTRPDLPYEPPRRSAWTGHGHPTPQSKAAQPSPSTVPKTEDQRPQLDPYQILGPTSSRLANPGSGQIQLWQFLLELLSDSSNSSCITWEGTNGEFKMTDPDEVARRWGERKSKPNMNYDKLSRALRYYYDKNIMTKVHGKRYAYKFDFHGIAQALQPHPPESSLYKYPSDLPYMGSYHAHPQKMNFVAPHPPALPVTSSSFFAAPNPYWNSPTGGIYPNTRLPTSHMPSHLGTYY

SEQ ID NO: 14940 - protein, 1159 aa, Homo Sapiens
MPVRRGHVAPQNTFLDTIIRKFEGQSRKFIIANARVENCAVIYCNDGFCELCGYSRAEVMQRPCTCDFLHGPRTQRRAAAQIAQALLGAEERKVEIAFYRKDGSCFLCLVDVVPVKNEDGAVIMFILNFEVVMEKDMVGSPAHDTNHRGPPTSWLAPGRAKTFRLKLPALLALTARESSVRSGGAGGAGAPGAVVVDVDLTPAAPSSESLALDEVTAMDNHVAGLGPAEERRALVGPGSPPRSAPGQLPSPRAHSLNPDASGSSCSLARTRSRESCASVRRASSADDIEAMRAGVLPPPPRHASTGAMHPLRSGLLNSTSDSDLVRYRTISKIPQITLNFVDLKGDPFLASPTSDREIIAPKIKERTHNVTEKVTQVLSLGADVLPEYKLQAPRIHRWTILHYSPFKAVWDWLILLLVIYTAVFTPYSAAFLLKETEEGPPATECGYACQPLAVVDLIVDIMFIVDILINFRTTYVNANEEVVSHPGRIAVHYFKGWFLIDMVAAIPFDLLIFGSGSEELIGLLKTARLLRLVRVARKLDRYSEYGAAVLFLLMCTFALIAHWLACIWYAIGNMEQPHMDSRIGWLHNLGDQIGKPYNSSGLGGPSIKDKYVTALYFTFSSLTSVGFGNVSPNTNSEKIFSICVMLIGSLMYASIFGNVSAIIQRLYSGTARYHTQMLRVREFIRFHQIPNPLRQRLEEYFQHAWSYTNGIDMNAVLKGFPECLQADICLHLNRSLLQHCKPFRGATKGCLRALAMKFKTTHAPPGDTLVHAGDLLTALYFISRGSIEILRGDVVVAILGKNDIFGEPLNLYARPGKSNGDVRALTYCDLHKIHRDDLLEVLDMYPEFSDHFWSSLEITFNLRDTNMIPGSPGSTELEGGFSRQRKRKLSFRRRTDKDTEQPGEVSALGPGRAGAGPSSRGRPGGPWGESPSSGPSSPESSEDEGPGRSSSPLRLVPFSSPRPPGEPPGGEPLMEDCEKSSDTCNPLSGAFSGVSNIFSFWGDSRGRQYQELPRCPAPTPSLLNIPLSSPGRRPRGDVESRLDALQRQLNRLETRLSADMATVLQLLQRQMTLVPPAYSAVTTPGPGPTSTSPLLPVSPLPTLTLDSLSQVSQFMACEELPPGAPELPQEGPTRRLSLPGQLGALTSQPLHRHGSDPGS

SEQ ID NO: 14941 - protein, 595 aa, Homo Sapiens [sequence omitted]

SEQ ID NO: 14942 - protein, 530 aa, Homo Sapiens
MDIKNSPSSLNSPSSYNCSQSILPLEHGSIYIPSSYVDSHHEYPAMTFYSPAVMNYSIPSNVTNLEGGPGRQTTSPNVLWPTPGHLSPLVVHRQLSHLYAEPQKSPWCEARSLEHTLPVNRETLKRKVSGNRCASPVTGPGSKRDAHFCAVCSDYASGYHYGVWSCEGCKAFFKRSIQGHNDYICPATNQCTIDKNRRKSCQACRLRKCYEVGMVKCGSRRERCGYRLVRRQRSADEQLHCAGKAKRSGGHAPRVRELLLDALSPEQLVLTLLEAEPPHVLISRPSAPFTEASMMMSLTKLADKELVHMISWAKKIPGFVELSLFDQVRLLESCWMEVLMMGLMWRSIDHPGKLIFAPDLVLDRDEGKCVEGILEIFDMLLATTSRFRELKLQHKEYLCVKAMILLNSSMYPLVTATQDADSSRKLAHLLNAVTDALVWVIAKSGISSQQQSMRLANLLMLLSHVRHASNKGMEHLLNMKCKNVVPVYDLLLEMLNAHVLRGCKSSITGSECSPAEDSKSKEGSQNPQSQ

SEQ ID NO: 14943 - protein, 423 aa, Homo Sapiens
MSSQVVGIEPLYIKAEPASPDSPKGSSETETEPPVALAPGPAPTRCLPGHKEEEDGEGAGPGEQGGGKLVLSSLPKRLCLVCGDVASGYHYGVASCEACKAFFKRTIQGSIEYSCPASNECEITKRRRKACQACRFTKCLRVGMLKEGVRLDRVRGGRQKYKRRPEVDPLPFPGPFPAGPLAVAGGPRKTAAPVNALVSHLLVVEPEKLYAMPDPAGPDGHLPAVATLCDLFDREIVVTISWAKSIPGFSSLSLSDQMSVLQSVWMEVLVLGVAQRSLPLQDELAFAEDLVLDEEGARAAGLGELGAALLQLVRRLQALRLEREEYVLLKALALANSDSVHIEDAEAVEQLREALHEALLEYEAGRAGPGGGAERRRAGRLLLTLPLLRQTAGKVLAHFYGVKLEGKVPMHKLFLEMLEAMMD

SEQ ID NO: 14944 - protein, 433 aa, Homo Sapiens
MSSDDRHLGSSCGSFIKTEPSSPSSGIDALSHHSPSGSSDASGGFGLALGTHANGLDSPPMFAGAGLGGTPCRKSYEDCASGIMEDSAIKCEYMLNAIPKRLCLVCGDIASGYHYGVASCEACKAFFKRTIQGNIEYSCPATNECEITKRRRKSCQACRFMKCLKVGMLKEGVRLDRVRGGRQKYKRRLDSESSPYLSLQISPPAKKPLTKIVSYLLVAEPDKLYAMPPPGMPEGDIKALTTLCDLADRELVVIIGWAKHIPGFSSLSLGDQMSLLQSAWMEILILGIVYRSLPYDDKLVYAEDYIMDEEHSRLAGLLELYRAILQLVRRYKKLKVEKEEFVTLKALALANSDSMYIEDLEAVQKLQDLLHEALQDYELSQRHEEPWRTGKLLLTLPLLRQTAAKAVQHFYSVKLQGKVPMHKLFLEMLEAKV

SEQ ID NO: 14945 - protein, 458 aa, Homo Sapiens
MDSVELCLPESFSLHYEEELLCRMSNKDRHIDSSCSSFIKTEPSSPASLTDSVNHHSPGGSSDASGSYSSTMNGHQNGLDSPPLYPSAPILGGSGPVRKLYDDCSSTIVEDPQTKCEYMLNSMPKRLCLVCGDIASGYHYGVASCEACKAFFKRTIQGNIEYSCPATNECEITKRRRKSCQACRFMKCLKVGMLKEGVRLDRVRGGRQKYKRRIDAENSPYLNPQLVQPAKKPYNKIVSHLLVAEPEKIYAMPDPTVPDSDIKALTTLCDLADRELVVIIGWAKHIPGFSTLSLADQMSLLQSAWMEILILGVVYRSLSFEDELVYADDYIMDEDQSKLAGLLDLNNAILQLVKKYKSMKLEKEEFVTLKAIALANSDSMHIEDVEAVQKLQDVLHEALQDYEAGQHMEDPRRAGKMLMTLPLLRQTSTKAVQHFYNIKLEGKVPMHKLFLEMLEAKV

SEQ ID NO: 14946 - protein, 406 aa, Homo Sapiens
MESLRGYTHSDIGYRSLAVGEDIEEVNDEKLTVTSLMARGGEDEENTRSKPEYGTEAENNVGTEGSVPSDDQDREGGGGHEPEQQQEEPPLTKPEQQQEEPPLLELKQEQEEPPQTTVEGPQPAEGPQTAEGPQPPERKRRRRTAFTQFQLQELENFFDESQYPDVVARERLAARLNLTEDRVQVWFQNRRAKWKRNQRVLMLRNTATADLAHPLDMFLGGAYYAAPALDPALCVHLVPQLPRPPVLPVPPMPPRPPMVPMPPRPPIAPMPPMAPVPPGSRMAPVPPGPRMAPVPPWPPMAPVPPWPPMAPVPTGPPMAPVPPGPPMARVPPGPPMARVPPGPPMAPLPPGPPMAPLPPGPPMAPLPPGPPMAPLPPRSHVPHTGLAPVHITWAPVINSYYACPFF

SEQ ID NO: 14947 - protein, 441 aa, Homo Sapiens
MKAAVDLKPTLTIIKTEKVDLELFPSPDMECADVPLLTPSSKEMMSQALKATFSGFTKEQQRLGIPKDPRQWTETHVRDWVMWAVNEFSLKGVDFQKFCMNGAALCALGKDCFLELAPDFVGDILWEHLEILQKEDVKPYQVNGVNPAYPESRYTSDYFISYGIEHAQCVPPSEFSEPSFITESYQTLHPISSEELLSLKYENDYPSVILRDPLQTDTLQNDYFAIKQEVVTPDNMCMGRTSRGKLGGQDSFESIESYDSCDRLTQSWSSQSSFNSLQRVPSYDSFDSEDYPAALPNHKPKGTFKDYVRDRADLNKDKPVIPAAALAGYTGSGPIQLWQFLLELLTDKSCQSFISWTGDGWEFKLSDPDEVARRWGKRKNKPKMNYEKLSRGLRYYYDKNIIHKTAGKRYVYRFVCDLQSLLGYTPEELHAMLDVKPDADE

SEQ ID NO: 14948 - protein, 469 aa, Homo Sapiens
MNDFGIKNMDQVAPVANSYRGTLKRQPAFDTFDGSLFAVFPSLNEEQTLQEVPTGLDSISHDSANCELPLLTPCSKAVMSQALKATFSGFKKEQRRLGIPKNPWLWSEQQVCQWLLWATNEFSLVNVNLQRFGMNGQMLCNLGKERFLELAPDFVGDILWEHLEQMIKENQEKTEDQYEENSHLTSVPHWINSNTLGFGTEQAPYGMQTQNYPKGGLLDSMCPASTPSVLSSEQEFQMFPKSRLSSVSVTYCSVSQDFPGSNLNLLTNNSGTPKDHDSPENGADSFESSDSLLQSWNSQSSLLDVQRVPSFESFEDDCSQSLCLNKPTMSFKDYIQERSDPVEQGKPVIPAAVLAGFTGSGPIQLWQFLLELLSDKSCQSFISWTGDGWEFKLADPDEVARRWGKRKNKPKMNYEKLSRGLRYYYDKNIIHKTSGKRYVYRFVCDLQNLLGFTPEELHAILGVQPDTED

SEQ ID NO: 14949 - protein, 477 aa, Homo Sapiens
MDGFYDQQVPYMVTNSQRGRNCNEKPTNVRKRKFINRDLAHDSEELFQDLSQLQETWLAEAQVPDNDEQFVPDYQAESLAFHGLPLKIKKEPHSPCSEISSACSQEQPFKFSYGEKCLYNVSAYDQKPQVGMRPSNPPTPSSTPVSPLHHASPNSTHTPKPDRAFPAHLPPSQSIPDSSYPMDHRFRRQLSEPCNSFPPLPTMPREGRPMYQRQMSEPNIPFPPQGFKQEYHDPVYEHNTMVGSAASQSFPPPLMIKQEPRDFAYDSEVPSCHSIYMRQEGFLAHPSRTEGCMFEKGPRQFYDDTCVVPEKFDGDIKQEPGMYREGPTYQRRGSLQLWQFLVALLDDPSNSHFIAWTGRGMEFKLIEPEEVARRWGIQKNRPAMNYDKLSRSLRYYYEKGIMQKVAGERYVYKFVCDPEALFSMAFPDNQRPLLKTDMERHINEEDTVPLSHFDESMAYMPEGGCCNPHPYNEGYVY

SEQ ID NO: 14950 - protein, 342 aa, Homo Sapiens
MDLWNWDEASPQEVPPGNKLAGLEGAKLGFCFPDLALQGDTPTATAETCWKGTSSSLASFPQLDWGSALLHPEVPWGAEPDSQALPWSGDWTDMACTAWDSWSGASQTLGPAPLGPGPIPAAGSEGAAGQNCVPVAGEATSWSRAQAAGSNTSWDCSVGPDGDTYWGSGLGGEPRTDCTISWGGPAGPDCTTSWNPGLHAGGTTSLKRYQSSALTVCSEPSPQSDRASLARCPKTNHRGPIQLWQFLLELLHDGARSSCIRWTGNSREFQLCDPKEVARLWGERKRKPGMNYEKLSRGLRYYYRRDIVRKSGGRKYTYRFGGRVPSLAYPDCAGGGRGAETQ

SEQ ID NO: 14951 - protein, 512 aa, Homo Sapiens
MKAGCSIVEKPEGGGGYQFPDWAYKTESSPGSRQIQLWHFILELLQKEEFRHVIAWQQGEYGEFVIKDPDEVARLWGRRKCKPQMNYDKLSRALRYYYNKRILHKTKGKRFTYKFNFNKLVMPNYPFINIRSSGVVPQSAPPVPTASSRFHFPPLDTHSPTNDVQPGRFSASSLTASGQESSNGTDRKTELSELEDGSAADWRRGVDPVSSRNAIGGGGIGHQKRKPDIMLPLFARPGMYPDPHSPFAVSPIPGRGGVLNVPISPALSLTPTIFSYSPSPGLSPFTSSSCFSFNPEEMKHYLHSQACSVFNYHLSPRTFPRYPGLMVPPLQCQMHPEESTQFSIKLQPPPVGRKNRERVESSEESAPVTTPTMASIPPRIKVEPASEKDPESLRQSAREKEEHTQEEGTVPSRTIEEEKGTIFARPAAPPIWPSVPISTPSGEPLEVTEDSEDRPGKEPSAPEKKEDALMPPKLRLKRRWNDDPEARELSKSGKFLWNGSGPQGLATAAADA

SEQ ID NO: 14952 - protein, 361 aa, Homo Sapiens
MHCSCLAEGIPANPGNWISGLAFPDWAYKAESSPGSRQIQLWHFILELLQKEEFRHVIAWQQGEYGEFVIKDPDEVARLWGRRKCKPQMNYDKLSRALRYYYNKRILHKTKGKRFTYKFNFSKLIVVNYPLWEVRAPPSPHLLLGAPALCRPALVPVGVQSELLHSMLFAHQAMVEQLTGQQTPRGPPETSGDKKGSSSSVYRLGSAPGPCRLGLCCHLGSVQGELPGVASFTPPLPPPLPSNWTCLSGPFLPPLPSEQQLPGAFKPDILLPGPRSLPGAWHFPGLPLLAGLGQGAGERLWLLSLRPEGLEVKPAPMMEAKGGLDPREVFCPETRRLKTGEESLTSPNLENLKAVWPLDPP

SEQ ID NO: 14953 - protein, 484 aa, Homo Sapiens
MERRMKAGYLDQQVPYTFSSKSPGNGSLREALIGPLGKLMDPGSLPPLDSEDLFQDLSHFQETWLAEAQVPDSDEQFVPDFHSENLAFHSPTTRIKKEPQSPRTDPALSCSRKPPLPYHHGEQCLYSSAYDPPRQIAIKSPAPGALGQSPLQPFPRAEQRNFLRSSGTSQPHPGHGYLGEHSSVFQQPLDICHSFTSQGGGREPLPAPYQHQLSEPCPPYPQQSFKQEYHDPLYEQAGQPAVDQGGVNGHRYPGAGVVIKQEQTDFAYDSDVTGCASMYLHTEGFSGPSPGDGAMGYGYEKPLRPFPDDVCVVPEKFEGDIKQEGVGAFREGPPYQRRGALQLWQFLVALLDDPTNAHFIAWTGRGMEFKLIEPEEVARLWGIQKNRPAMNYDKLSRSLRYYYEKGIMQKVAGERYVYKFVCEPEALFSLAFPDNQRPALKAEFDRPVSEEDTVPLSHLDESPAYLPELAGPAQPFGPKGGYSY

SEQ ID NO: 14954 - protein, 510 aa, Homo Sapiens
MDGFYDQQVPFMVPGKSRSEECRGRPVIDRKRKFLDTDLAHDSEELFQDLSQLQEAWLAEAQVPDDEQFVPDFQSDNLVLHAPPPTKIKRELHSPSSELSSCSHEQALGANYGEKCLYNYCAYDRKPPSGFKPLTPPTTPLSPTHQNPLFPPPQATLPTSGHAPAAGPVQGVGPAPAPHSLPEPGPQQQTFAVPRPPHQPLQMPKMMPENQYPSEQRFQRQLSEPCHPFPPQPGVPGDNRPSYHRQMSEPIVPAAPPPPQGFKQEYHDPLYEHGVPGMPGPPAHGFQSPMGIKQEPRDYCVDSEVPNCQSSYMRGGYFSSSHEGFSYEKDPRLYFDDTCVVPERLEGKVKQEPTMYREGPPYQRRGSLQLWQFLVTLLDDPANAHFIAWTGRGMEFKLIEPEEVARRWGIQKNRPAMNYDKLSRSLRYYYEKGIMQKVAGERYVYKFVCDPDALFSMAFPDNQRPFLKAESECHLSEEDTLPLTHFEDSPAYLLDMDRCSSLPYAEGFAY

SEQ ID NO: 14955 - protein, 452 aa, Homo Sapiens
MSETPAQCSIKQERISYTPPESPVPSYASSTPLHVPVPRALRMEEDSIRLPAHLRLQPIYWSRDDVAQWLKWAENEFSLRPIDSNTFEMNGKALLLLTKEDFRYRSPHSGDVLYELLQHILKQRKPRILFSPFFHPGNSIHTQPEVILHQNHEEDNCVQRTPRPSVDNVHHNPPTIELLHRSRSPITTNHRPSPDPEQRPLRSPLDNMIRRLSPAERAQGPRPHQENNHQESYPLSVSPMENNHCPASSESHPKPSSPRQESTRVIQLMPSPIMHPLILNPRHSVDFKQSRLSEDGLHREGKPINLSHREDLAYMNHIMVSVSPPEEHAMPIGRIADCRLLWDYVYQLLSDSRYENFIRWEDKESKIFRIVDPNGLARLWGNHKNRTNMTYEKMSRALRHYYKLNIIRKEPGQRLLFRFMKTPDEIMSGRTDRLEHLESQELDEQIYQEDEC

SEQ ID NO: 14956 - protein, 341 aa, Homo Sapiens
MQEGELAISPISPVAAMPPLGTHVQARCEAQINLLGEGGICKLPGRLRIQPALWSREDVLHWLRWAEQEYSLPCTAEHGFEMNGRALCILTKDDFRHRAPSSGDVLYELLQYIKTQRRALVCGPFFGGIFRLKTPTQHSPVPPEEVTGPSQMDTRRGHLLQPPDPGLTSNFGHLDDPGLARWTPGKEESLNLCHCAELGCRTQGVCSFPAMPQAPIDGRIADCRLLWDYVYQLLLDTRYEPYIKWEDKDAKIFRVVDPNGLARLWGNHKNRVNMTYEKMSRALRHYYKLNIIKKEPGQKLLFRFLKTPGKMVQDKHSHLEPLESQEQDRIEFKDKRPEISP

SEQ ID NO: 14957 - protein, 407 aa, Homo Sapiens
MESRKDMVVFLDGGQLGTLVGKRVSNLSEAVGSPLPEPPEKMVPRGCLSPRAVPPATRERGGGGPEEEPVDGLAGSAAGPGAEPQVAGAAMLGPGPPAPSVDSLSGQGQPSSSDTESDFYEEIEVSCTPDCATGNAEYQHSKGSGSEALVGSPNGGSETPKSNGGSGGGGSQGTLACSASDQMRRYRTAFTREQIARLEKEFYRENYVSRPRRCELAAALNLPETTIKVWFQNRRMKDKRQRLAMTWPHPADPAFYTYMMSHAAAAGGLPYPFPSHLPLPYYSPVGLGAASAASAAASPFSGSLRPLDTFRVLSQPYPRPELLCAFRHPPLYPGPAHGLGASAGGPCSCLACHSGPANGLAPRAAAASDFTCASTSRSDSFLTFAPSVLSKASSVALDQREEVPLTR

SEQ ID NO: 14958 - protein, 476 aa, Homo Sapiens
MMERIRKEMILMERGLHSPTAGKRFSNLSNSAGNAVLEALENSQHPARLSPRLPSAPLHSALGELPAKGKFEIDTLFNLQHTGSESTVSSEISSAAESRKKPGHYSEAAAEADMSSDVEVGCSALRSPGGLGAAQLKENNGKGYAESGSAAGTTTSASGSGLGSLHGGSGGSGGSAALGGSGSGADQVRRYRTAFTREQIARLEKEFYRENYVSRPRRCELAAALNLPETTIKVWFQNRRMKDKRQRLAMSWPHPADPSFYTYMMTHAAATGSLPYPFHSHVPLHYYPHVGVTAAAAAAAASGAAAAASSPFATSIRPLDTFRALSHPYSRPELLCSFRHPGLYQAPAAAAGLNSAASAAAAAAAAAAAASSAAAAGAPPSGGSAPCSCLSCHSSQSAAAAAAAAAAALGSRGGGGGGGGGGGGGGGGAGAGGGSDFGCSAAAPRSESGFLPYSAAVLSKTAVSPPDQRDEAPLTR

SEQ ID NO: 14959 - protein, 747 aa, Homo Sapiens
MEIPNPPTSKCITYWKRKVKSEYMRLRQLKRLQANMGAKALYVANFAKVQEKTQILNEEWKKLRVQPVQSMKPVSGHPFLKKCTIESIFPGFASQHMLMRSLNTVALVPIMYSWSPLQQNFMVEDETVLCNIPYMGDEVKEEDETFIEELINNYDGKVHGEEEMIPGSVLISDAVFLELVDALNQYSDEEEEGHNDTSDGKQDDSKEDLPVTRKRKRHAIEGNKKSSKKQFPNDMIFSAIASMFPENGVPDDMKERYRELTEMSDPNALPPQCTPNIDGPNAKSVQREQSLHSFHTLFCRRCFKYDCFLHPFHATPNVYKRKNKEIKIEPEPCGTDCFLLLEGAKEYAMLHNPRSKCSGRRRRRHHIVSASCSNASASAVAETKEGDSDRDTGNDWASSSSEANSRCQTPTKQKASPAPPQLCVVEAPSEPVEWTGAEESLFRVFHGTYFNNFCSIARLLGTKTCKQVFQFAVKESLILKLPTDELMNPSQKKKRKHRLWAAHCRKIQLKKDNSSTQVYNYQPCDHPDRPCDSTCPCIMTQNFCEKFCQCNPDCQNRFPGCRCKTQCNTKQCPCYLAVRECDPDLCLTCGASEHWDCKVVSCKNCSIQRGLKKHLLLAPSDVAGWGTFIKESVQKNEFISEYCGELISQDEADRRGKVYDKYMSSFLFNLNNDFVVDATRKGNKIRFANHSVNPNCYAKVVMVNGDHRIGIFAKRAIQAGEELFFDYRYSQADALKYVGIERETDVL

SEQ ID NO: 14960 - protein, 746 aa, Homo Sapiens
MGQTGKKSEKGPVCWRKRVKSEYMRLRQLKRFRRADEVKSMFSSNRQKILERTEILNQEWKQRRIQPVHILTSVSSLRGTRECSVTSDLDFPTQVIPLKTLNAVASVPIMYSWSPLQQNFMVEDETVLHNIPYMGDEVLDQDGTFIEELIKNYDGKVHGDRECGFINDEIFVELVNALGQYNDDDDDDDGDDPEEREEKQKDLEDHRDDKESRPPRKFPSDKIFEAISSMFPDKGTAEELKEKYKELTEQQLPGALPPECTPNIDGPNAKSVQREQSLHSFHTLFCRRCFKYDCFLHPFHATPNTYKRKNTETALDNKPCGPQCYQHLEGAKEFAAALTAERIKTPPKRPGGRRRGRLPNNSSRPSTPTINVLESKDTDSDREAGTETGGENNDKEEEEKKDETSSSSEANSRCQTPIKMKPNIEPPENVEWSGAEASMFRVLIGTYYDNFCAIARLIGTKTCRQVYEFRVKESSIIAPAPAEDVDTPPRKKKRKHRLWAAHCRKIQLKKDGSSNHVYNYQPCDHPRQPCDSSCPCVIAQNFCEKFCQCSSECQNRFPGCRCKAQCNTKQCPCYLAVRECDPDLCLTCGAADHWDSKNVSCKNCSIQRGSKKHLLLAPSDVAGWGIFIKDPVQKNEFISEYCGEIISQDEADRRGKVYDKYMCSFLFNLNNDFVVDATRKGNKIRFANHSVNPNCYAKVMMVNGDHRIGIFAKRAIQTGEELFFDYRYSQADALKYVGIEREMEIP

SEQ ID NO: 14961 - protein, 330 aa, Homo Sapiens
MKRRQKRKHLENEESQETAEKGGGMSKSQEDALQPGSTRVAKGWSQGVGEVTSTSEYCSCVSSSRKLIHSGIQRIHRDSPQPQSPLAQVQERGETPPRSQHVSLSSYSSYKTCVSSLCVNKEERGMKIYYMQVQMNKGVAVSWETEETLESLEKQPRMEEVTLSEVVRVGTPPSDVSTRNLLSDSEPSGEEKEHEERTESDSLPGSPTVEDTPRAKTPDWLVTMENGFRCMACCRVFTTMEALQEHVQFGIREGFSCHVFHLTMAQLTGNMESESTQDEQEEENGNEKEEEEKPEAKEEEGQPTEEDLGLRRSWSQCPGCVFHSPKDRNS

SEQ ID NO: 14962 - protein, 166 aa, Homo Sapiens
MAAYPESCVDTTVLDFVADLSLASPRRPLLCDFAPGVSLGDPALALREGRPRRMARFEEGDPEEEECEVDQGDGEEEEEEERGRGVSLLGRPKRKRVITYAQRQAANIRERKRMFNLNEAFDQLRRKVPTFAYEKRLSRIETLRLAIVYISFMTELLESCEKKESG

SEQ ID NO: 14963 - protein, 238 aa, Homo Sapiens
MRQSGASQPLLINMYLPDPVGDGLFKDGKNPSWGPLSPAVQKGSGQIQLWQFLLELLADRANAGCIAWEGGHGEFKLTDPDEVARRWGERKSKPNMNYDKLSRALRYYYDKNIMSKVHGKRYAYRFDFQGLAQACQPPPAHAHAAAAAAAAAAAAQDGALYKLPAGLAPLPFPGLSKLNLMAASAGVAPAGFSYWPGPGPAATAAAATAALYPSPSLQPPPGPFGAVAAASHLGGHYH

SEQ ID NO: 14964 - protein, 475 aa, Homo Sapiens
MDSSCHNATTKMLATAPARGNMMSTSKPLAFSIERIMARTPEPKALPVPHFLQGALPKGEPKHSLHLNSSIPCMIPFVPVAYDTSPKAGVTGSEPRKASLEAPAAPAAVPSAPAFSCSDLLNCALSLKGDLARDALPLQQYKLVRPRVVNHSSFHAMGALCYLNRGDGPCHPAAGVNIHPVASYFLSSPLHPQPKTYLAERNKLVVPAVEKYPSGVAFKDLSQAQLQHYMKESAQLLSEKIAFKTSDFSRGSPNAKPKVFTCEVCGKVFNAHYNLTRHMPVHTGARPFVCKVCGKGFRQASTLCRHKIIHTQEKPHKCNQCGKAFNRSSTLNTHTRIHAGYKPFVCEFCGKGFHQKGNYKNHKLTHSGEKQFKCNICNKAFHQVYNLTFHMHTHNDKKPFTCPTCGKGFCRNFDLKKHVRKLHDSSLGLARTPAGEPGTEPPPPLPQQPPMTLPPLQPPLPTPGPLQPGLHQGHQ

SEQ ID NO: 14965 - protein, 459 aa, Homo Sapiens
MASSASLETMVPPACPRAGASPATSKTLAFSIERIMAKTSEPRAPFEPRPGALEADGSQGKKLLNLCSPLPCMIPLQPLGYEVPSKTLLSYSELWKSSLRAGGGGGGGGGGGGGGGGAPVCGASGLCKTNCGVCCKAELGLAPSALPAGRVIKPQVINQAVGLPASGSLYYFNYLDSTAYPPSELLSGHLFPSGLLNAQAPAALAAHPKLFLLENAKLAGLAADKFPHPAPYPHKERLPAPLEQVLKENSALTAERGGVKGHSKLPGGSADGKPKNFTCEVCGKVFNAHYNLTRHMPVHTGARPFVCKVCGKGFRQASTLCRHKIIHTQEKPHKCNQCGKAFNRSSTLNTHIRIHAGYKPFVCEFCGKGFHQKGNYKNHKLTHSGEKQYKCTICNKAFHQVYNLTFHMHTHNDKKPFTCATCGKGFCRNFDLKKHVRKLHDSVGPAAPSAKDLTRTVQS

SEQ ID NO: 14966 - protein, 219 aa, Homo Sapiens
MDPAPGVLDPRAAPPALLGTPQAEVLEDVLREQFGPLPQLAAVCRLKRLPSGGYSSTENLQLVLERRRVANAKERERIKNLNRGFARLKALVPFLPQSRKPSKVDILKGATEYIQVLSDLLEGAKDSKKQDPDEQSYSNNSSESHTSSARQLSRNITQHISCAFGLKNEEEGPWADGGSGEPAHACRHSVMSTTEIISPTRSLDRFPEVELLSHRLPQV

SEQ ID NO: 14967 - protein, 496 aa, Homo Sapiens
MDDVPAPTPAPAPPAAAAPRVPFHCSECGKSFRYRSDLRRHFARHTALKPHACPRCGKGFKHSFNLANHLRSHTGERPYRCSACPKGFRDSTGLLHHQVVHTGEKPYCCLVCELRFSSRSSLGRHLKRQHRGVLPSPLQPGPGLPALSAPCSVCCNVGPCSVCGGSGAGGGEGPEGAGAGLGSWGLAEAAAAAAASLPPFACGACARRFDHGRELAAHWAAHTDVKPFKCPRCERDFNAPALLERHKLTHDLQGPGAPPAQAWAAGPGAGPETAGEGTAAEAGDAPLASDRRLLLGPAGGGVPKLGGLLPEGGGEAPAPAAAAEPSEDTLYQCDCGTFFASAAALASHLEAHSGPATYGCGHCGALYAALAALEEHRRVSHGEGGGEEAATAAREREPASGEPPSGSGRGKKIFGCSECEKLFRSPRDLERHVLVHTGEKPFPCLECGKFFRHECYLKRHRLLHGTERPFPCHICGKGFITLSNLSRHLKLHRGMD

SEQ ID NO: 14968 - protein, 452 aa, Homo Sapiens
MDGTIKEALSVVSDDQSLFDSAYGAAAHLPKADMTASGSPDYGQPHKINPLPPQQEWINQPVRVNVKREYDHMNGSRESPVDCSVSKCSKLVGGGESNPMNYNSYMDEKNGPPPPNMTTNERRVIVPADPTLWTQEHVRQWLEWAIKEYSLMEIDTSFFQNMDGKELCKMNKEDFLRATTLYNTEVLLSHLSYLRESSLLAYNTTSHTDQSSRLSVKEDPSYDSVRRGAWGNNMNSGLNKSPPLGGAQTISKNTEQRPQPDPYQILGPTSSRLANPGSGQIQLWQFLLELLSDSANASCITWEGTNGEFKMTDPDEVARRWGERKSKPNMNYDKLSRALRYYYDKNIMTKVHGKRYAYKFDFHGIAQALQPHPTESSMYKYPSDISYMPSYHAHQQKVNFVPPHPSSMPVTSSSFFGAASQYWTSPTGGIYPNPNVPRHPNTHVPSHLGSYY

SEQ ID NO: 14969 - protein, 380 aa, Homo Sapiens
MMFSGFNADYEASSSRCSSASPAGDSLSYYHSPADSFSSMGSPVNAQDFCTDLAVSSANFIPTVTAISTSPDLQWLVQPALVSSVAPSQTRAPHPFGVPAPSAGAYSRAGVVKTMTGGRAQSIGRRGKVEQLSPEEEEKRRIRRERNKMAAAKCRNRRRELTDTLQAETDQLEDEKSALQTEIANLLKEKEKLEFILAAHRPACKIPDDLGFPEEMSVASLDLTGGLPEVATPESEEAFTLPLLNDPEPKPSVEPVKSISSMELKTEPFDDFLFPASSRPSGSETARSVPDMDLSGSFYAADWEPLHSGSLGMGPMATELEPLCTPVVTCTPSCTAYTSSFVFTYPEADSFPSCAAAHRKGSSSNEPSSDSLSSPTLLAL

SEQ ID NO: 14970 - protein, 338 aa, Homo Sapiens
MFQAFPGDYDSGSRCSSSPSAESQYLSSVDSFGSPPTAAASQECAGLGEMPGSFVPTVTAITTSQDLQWLVQPTLISSMAQSQGQPLASQPPVVDPYDMPGTSYSTPGMSGYSSGGASGSGGPSTSGTTSGPGPARPARARPRRPREETLTPEEEEKRRVRRERNKLAAAKCRNRRRELTDRLQAETDQLEEEKAELESEIAELQKEKERLEFVLVAHKPGCKIPYEEGPGPGPLAEVRDLPGSAPAKEDGFSWLLPPPPPPPLPFQTSQDAPPNLTASLFTHSEVQVLGDPFPVVNPSYTSSFVLTCPEVSAFAGAQRTSGSDQPSDPLNSPSLLAL

SEQ ID NO: 14971 - protein, 271 aa, Homo Sapiens
MFRDFGEPGPSSGNGGGYGGPAQPPAAAQAAQQKFHLVPSINTMSGSQELQWMVQPHFLGPSSYPRPLTYPQYSPPQPRPGVIRALGPPPGVRRRPCEQISPEEEERRRVRRERNKLAAAKCRNRRKELTDFLQAETDKLEDEKSGLQREIEELQKQKERLELVLEAHRPICKIPEGAKEGDTGSTSGTSSPPAPCRPVPCISLSPGPVLEPEALHTPTLMTTPSLTPFTPSLVFTYPSTPEPCASAHRKSSSSSGDPSSDPLGSPTLLAL

SEQ ID NO: 14972 - protein, 326 aa, Homo Sapiens
MYQDYPGNFDTSSRGSSGSPAHAESYSSGGGGQQKFRVDMPGSGSAFIPTINAITTSQDLQWMVQPTVITSMSNPYPRSHPYSPLPGLASVPGHMALPRPGVIKTIGTTVGRRRRDEQLSPEEEEKRRIRRERNKLAAAKCRNRRRELTEKLQAETEELEEEKSGLQKEIAELQKEKEKLEFMLVAHGPVCKISPEERRSPPAPGLQPMRSGGGSVGAVVVKQEPLEEDSPSSSSAGLDKAQRSVIKPISIAGGFYGEEPLHTPIVVTSTPAVTPGTSNLVFTYPSVLEQESPASPSESCSKAHRRSSSSGDQSSDSLNSPTLLAL

SEQ ID NO: 14973 - protein, 472 aa, Homo Sapiens
MLGTVKMEGHETSDWNSYYADTQEAYSSVPVSNMNSGLGSMNSMNTYMTMNTMTTSGNMTPASFNMSYANPGLGAGLSPGAVAGMPGGSAGAMNSMTAAGVTAMGTALSPSGMGAMGAQQAASMNGLGPYAAAMNPCMSPMAYAPSNLGRSRAGGGGDAKTFKRSYPHAKPPYSYISLITMAIQQAPSKMLTLSEIYQWIMDLFPYYRQNQQRWQNSIRHSLSFNDCFVKVARSPDKPGKGSYWTLHPDSGNMFENGCYLRRQKRFKCEKQPGAGGGGGSGSGGSGAKGGPESRKDPSGASNPSADSPLHRGVHGKTGQLEGAPAPGPAASPQTLDHSGATATGGASELKTPASSTAPPISSGPGALASVPASHPAHGLAPHESQLHLKGDPHYSFNHPFSINNLMSSSEQQHKLDFKAYEQALQYSPYGSTLPASLPLGSASVTTRSPIEPSALEPAYYQGVYSRPVLNTS

SEQ ID NO: 14974 - protein, 457 aa, Homo Sapiens
MLGAVKMEGHEPSDWSSYYAEPEGYSSVSNMNAGLGMNGMNTYMSMSAAAMGSGSGNMSAGSMNMSSYVGAGMSPSLAGMSPGAGAMAGMGGSAGAAGVAGMGPHLSPSLSPLGGQAAGAMGGLAPYANMNSMSPMYGQAGLSRARDPKTYRRSYTHAKPPYSYISLITMAIQQSPNKMLTLSEIYQWIMDLFPFYRQNQQRWQNSIRHSLSFNDCFLKVPRSPDKPGKGSFWTLHPDSGNMFENGCYLRRQKRFKCEKQLALKEAAGAAGSGKKAAAGAQASQAQLGEAAGPASETPAGTESPHSSASPCQEHKRGGLGELKGTPAAALSPPEPAPSPGQQQQAAAHLLGPPHHPGLPPEAHLKPEHHYAFNHPFSINNLMSSEQQHHHSHHHHQPHKMDLKAYEQVMHYPGYGSPMPGSLAMGPVTNKTGLDASPLAADTSYYQGVYSRPIMNSS

SEQ ID NO: 14975 - protein, 350 aa, Homo Sapiens
MLGSVKMEAHDLAEWSYYPEAGEVYSPVTPVPTMAPLNSYMTLNPLSSPYPPGGLPASPLPSGPLAPPAPAAPLGPTFPGLGVSGGSSSSGYGAPGPGLVHGKEMPKGYRRPLAHAKPPYSYISLITMAIQQAPGKMLTLSEIYQWIMDLFPYYRENQQRWQNSIRHSLSFNDCFVKVARSPDKPGKGSYWALHPSSGNMFENGCYLRRQKRFKLEEKVKKGGSGAATTTRNGTGSAASTTTPAATVTSPPQPPPPAPEPEAQGGEDVGALDCGSPASSTPYFTGLELPGELKLDAPYNFNHPFSINNLMSEQTPAPPKLDVGFGGYGAEGGEPGVYYQGLYSRSLLNAS

SEQ ID NO: 14976 - protein, 325 aa, Homo Sapiens
MPRPGRNTYSDQKPPYSYISLTAMAIQSSPEKMLPLSEIYKFIMDRFPYYRENTQRWQNSLRHNLSFNDCFIKIPRRPDQPGKGSFWALHPSCGDMFENGSFLRRRKRFKVLKSDHLAPSKPADAAQYLQQQAKLRLSALAASGTHLPQMPAAAYNLGGVAQPSGFKHPFAIENIIAREYKMPGGLAFSAMQPVPAAYPLPNQLTTMGSSLGTGWPHVYGSAGMIDSATPISMASGDYSAYGVPLKPLCHAAGQTLPAIPVPIKPTPAAVPALPALPAPIPTLLSNSPPSLSPTSSQTATSQSSPATPSETLTSPASALHSVAVH

SEQ ID NO: 14977 - protein, 432 aa, Homo Sapiens
MPRPGKSSYSDQKPPYSYISLTAMAIQHSAEKMLPLSDIYKFIMERFPYYREHTQRWQNSLRHNLSFNDCFIKIPRRPDQPGKGSFWALHPDCGDMFENGSFLRRRKRFKVLRADHTHLHAGSTKSAPGAGPGGHLHPHHHHHPHHHHHHHAAAHHHHHHHPPQPPPPPPPPPPHMVHYFHQQPPTAPQPPPHLPSQPPQQPPQQSQPQQPSHPGKMQEAAAVAAAAAAAAAAAVGSVGRLSQFPPYGLGSAAAAAAAAAASTSGFKHPFAIENIIGRDYKGVLQAGGLPLASVMHHLGYPVPGQLGNVVSSVWPHVGVMDSVAAAAAAAAAAGVPVGPEYGAFGVPVKSLCHSASQSLPAMPVPIKPTPALPPVSALQPGLTVPAASQQPPAPSTVCSAAAASPVASLLEPTAPTSAESKGGSLHSVLVHS

SEQ ID NO: 14978 - protein, 553 aa, Homo Sapiens
MQARYSVSSPNSLGVVPYLGGEQSYYRAAAAAAGGGYTAMPAPMSVYSHPAHAEQYPGGMARAYGPYTPQPQPKDMVKPPYSYIALITMAIQNAPDKKITLNGIYQFIMDRFPFYRDNKQGWQNSIRHNLSLNECFVKVPRDDKKPGKGSYWTLDPDSYNMFENGSFLRRRRRFKKKDAVKDKEEKDRLHLKEPPPPGRQPPPAPPEQADGNAPGPQPPPVRIQDIKTENGTCPSPPQPLSPAAALGSGSAAAVPKIESPDSSSSSLSSGSSPPGSLPSARPLSLDGADSAPPPPAPSAPPPHHSQGFSVDNIMTSLRGSPQSAAAELSSGLLASAAASSRAGIAPPLALGAYSPGQSSLYSSPCSQTSSAGSSGGGGGGAGAAGGAGGAGTYHCNLQAMSLYAAGERGGHLQGAPGGAGGSAVDDPLPDYSLPPVTSSSSSSLSHGGGGGGGGGGQEAGHHPAAHQGRLTSWYLNQAGGDLGHLASAAAAAAAAGYPGQQQNFHSVREMFESQRIGLNNSPVNGNSSCQMAFPSSQSLYRTSGAFVYDCSKF

SEQ ID NO: 14979 - protein, 501 aa, Homo Sapiens
MQARYSVSDPNALGVVPYLSEQNYYRAAGSYGGMASPMGVYSGHPEQYSAGMGRSYAPYHHHQPAAPKDLVKPPYSYIALITMAIQNAPEKKITLNGIYQFIMDRFPFYRENKQGWQNSIRHNLSLNECFVKVPRDDKKPGKGSYWTLDPDSYNMFENGSFLRRRRRFKKKDVSKEKEERAHLKEPPPAASKGAPATPHLADAPKEAEKKVVIKSEAASPALPVITKVETLSPESALQGSPRSAASTPAGSPDGSLPEHHAAAPNGLPGFSVENIMTLRTSPPGGELSPGAGRAGLVVPPLALPYAAAPPAAYGQPCAQGLEAGAAGGYQCSMRAMSLYTGAERPAHMCVPPALDEALSDHPSGPTSPLSALNLAAGQEGALAATGHHHQHHGHHHPQAPPPPPAPQPQPTPQPGAAAAQAASWYLNHSGDLNHLPGHTFAAQQQTFPNVREMFNSHRLGIENSTLGESQVSGNASCQLPYRSTPPLYRHAAPYSYDCTKY

SEQ ID NO: 14980 - protein, 465 aa, Homo Sapiens
MTLSTEMSDASGLAEETDIDVVGEGEDEEDEEEEDDDEGGGGGPRLAVPAQRRRRRRSYAGEDELEDLEEEEDDDDILLAPPAGGSPAPPGPAPAAGAGAGGGGGGGGAGGGGSAGSGAKNPLVKPPYSYIALITMAILQSPKKRLTLSEICEFISGRFPYYREKFPAWQNSIRHNLSLNDCFVKIPREPGNPGKGNYWTLDPESADMFDNGSFLRRRKRFKRQPLLPPNAAAAESLLLRGAGAAGGAGDPAAAAALFPPAPPPPPHAYGYGPYGCGYGLQLPPYAPPSALFAAAAAAAAAAAFHPHSPPPPPPPHGAAAELARTAFGYRPHPLGAALPGPLPASAAKAGGPGASALARSPFSIESIIGGSLGPAAAAAAAAQAAAAAQASPSPSPVAAPPAPGSSGGGCAAQAAVGPAAALTRSLVAAAAAAASSVSSSAALGTLHQGTALSSVENFTARISNC

SEQ ID NO: 14981 - protein, 495 aa, Homo Sapiens
MTLGSCCCEIMSSESSPAALSEADADIDVVGGGSGGGELPARSGPRAPRDVLPHGHEPPAEEAEADLAEDEEESGGCSDGEPRALASRGAAAAAGSPGPGAAAARGAAGPGPGPPSGGAATRSPLVKPPYSYIALITMAILQSPKKRLTLSEICEFISGRFPYYREKFPAWQNSIRHNLSLNDCFVKIPREPGNPGKGNYWTLDPESADMFDNGSFLRRRKRFKRQPLPPPHPHPHPHPELLLRGGAAAAGDPGAFLPGFAAYGAYGYGYGLALPAYGAPPPGPAPHPHPHPHAFAFAAAAAAAPCQLSVPPGRAAAPPPGPPTASVFAGAGSAPAPAPASGSGPGPGPAGLPAFLGAELGCAKAFYAASLSPPAAGTAAGLPTALLRQGLKTDAGGGAGGGGAGAGQRPSFSIDHIMGHGGGGAAPPGAGEGSPGPPFAAAAGPGGQAQVLAMLTAPALAPVAGHIRLSHPGDALLSSGSRFASKVAGLSGCHF

SEQ ID NO: 14982 - protein, 478 aa, Homo Sapiens
MTLSGGGSASDMSGQTVLTAEDVDIDVVGEGDDGLEEKDSDAGCDSPAGPPELRLDEADEVPPAAPHHGQPQPPHQQPLTLPKEAAGAGAGPGGDVGAPEADGCKGGVGGEEGGASGGGPGAGSGSAGGLAPSKPKNSLVKPPYSYIALITMAILQSPQKKLTLSGICEFISNRFPYYREKFPAWQNSIRHNLSLNDCFVKIPREPGNPGKGNYWTLDPQSEDMFDNGSFLRRRKRFKRHQQEHLREQTALMMQSFGAYSLAAAAGAAGPYGRPYGLHPAAAAGAYSHPAAAAAAAAAAALQYPYALPPVAPVLPPAVPLLPSGELGRKAAAFGSQLGPGLQLQLNSLGAAAAAAGTAGAAGTTASLIKSEPSARPSFSIENIIGGGPAAPGGSAVGAGVAGGTGGSGGGSTAQSFLRPPGTVQSAALMATHQPLSLSRTTATIAPILSVPLSGQFLQPAASAAAAAAAAAQAKWPAQ

SEQ ID NO: 14983 - protein, 439 aa, Homo Sapiens
MNLPRAERLRSTPQRSLRDSDGEDGKIDVLGEEEDEDEEEAASQQFLEQSLQPGLQVARWGGVALPREHIEGGGGPSDPSEFGTEFRAPPRSAAASEDARQPAKPPSSYIALITMAILQSPHKRLTLSGICAFISDRFPYYRRKFPAWQNSIRHNLSLNDCFVKIPREPGRPGKGNYWSLDPASQDMFDNGSFLRRRKRFQRHQPTPGAHLPHPFPLPAAHAALHNPRPGPLLGAPAPPQPVPGAYPNTGPGRRPYALLHPHPPRYLLLSAPAYAGAPKKAEGADLATPAPFPCCSPHLVLSLGRRARVWRRHREADASLSALRVSCKGSGERVQGLRRVCPRPRGATAPCSSDRQACRTILQQQQRHQEEDCANGCAPTKGAVLGGHLSAASALLRYQAVAEGSGLTSLAAPLGGEGTSPVFLVSPTPSSLAESAGPS

SEQ ID NO: 14984 - protein, 408 aa, Homo Sapiens
MNLPRAERPRSTPQRSLRDSDGEDGKIDVLGEEEDEDEVEDEEEEASQKFLEQSLQPGLQVARWGGVALPREHIEGGGPSDPSEFGTEFRAPPRSAAASEDARQPAKPPYSYIALITMAILQSPHKRLTLSGICAFISGRFPYYRRKFPAWQNSIRHNLSLNDCFVKIPREPGHPGKGTYWSLDPASQDMFDNGSFLRRRKRFKRHQLTPGAHLPHPFPLPAAHAALHNPRPGPLLGAPALPQPVPGAYPNTAPGRRPYALLHPHPPRYLLLSAPAYAGAPKKAEGADLATPGTLPVLQPSLGPQPWEEGKGLASPPGGGCISFSIESIMQGVRGAGTGAAQSLSPTAWSYCPLLQRPSSLSDNFAATAAASGGGLRQRLRSHQGRGAGRAPVGRVGAAAVSGGGRGL

SEQ ID NO: 14985 - protein, 417 aa, Homo Sapiens
MNLPRAERLRSTPQRSLRDSDGEDGKIDVLGEEEDEDEVEDEEEAASQQFLEQSLQPGLQVARWGGVALPREHIEGGGGPSDPSEFGTKFRAPPRSAAASEDARQPAKPPYSYIALITMAILQNPHKRLTLSGICAFISGRFPYYRRKFPAWQNSIRHNLSLNDCFVKIPREPGHPGKGNYWSLDPASQDMFDNGSFLRRRKRFKRHQLTPGAHLPHPFPLPAAHAALHNPRPGPLLGAPAPPQPVPGAYPNTAPGRRPYALLHPHPLRYLLLSAPVYAGAPKKAEGAALATPAPFPCCSPHLVLSLGRRARVWRRHREADASLSALRVLCKGSGERVQGLRRICPRPRGATATCSSDHQACCIPRPLPLCCKCPPPPLLGQFCSNSSSIRRRTAPTAALPPRARCWAGTCRPRRPC

SEQ ID NO: 14986 - protein, 416 aa, Homo Sapiens
MNLPRAERPRSTPQRSLRDSDGEDGKIDVLGEEEDEDEVEDEEEEARQQFLEQSLQPGLQVARWGGVALPREHIEGGGGPSDPSEFGTKFRAPPRSAAASEDARQPAKPPYSYIALITMAILQNPHKRLTLSGICAFISGRFPYYRRKFPAWQNSIRHNLSLNDCFVKIPREPGHPGKGNYWSLDPASQDMFDNGSFLRRRKRFKRHQLTPGAHLPHPFPLPAAHAALHNPHPGPLLGAPAPPQPVPGAYPNTAPGRRPYALLHPHPLRYLLLSARVYAGAPKKAEGADLATPAPFPCCSPHLVLSLGRRARVWRRHREADASLSALRVLCKGSGERVQGLRRVCPRPRGATATCSSDHQACCIPKPLPLCCKCPPPLLLGQFCSNSSSIRRTAPTAALPPRARCWAGTCRPRRRC

SEQ ID NO: 14987 - protein, 416 aa, Homo Sapiens
MNLPRAERPRSTPQRSLRDSDGEDGKIDVLGEEEDEDEVEDEEEEARQQFLEQSLQPGLQVARWGGVALPREHIEGGGGPSDPSEFGTKFRAPPRSAAASEDARQPAKPPYSYIALITMAILQNPHKRLTLSGICAFISGRFPYYRRKFPAWQNSIRHNLSLNDCFVKIPREPGHPGKGNYWSLDPASQDMFDNGSFLRRRKRFKRHQLTPGAHLPHPFPLPAAHAALHNPHPGPLLGAPAPPQPVPGAYPNTAPGRCPYALLHPHPLRYLLLSAPVYAGAPKKAEGADLATPAPFPCCSPHLVLSLGRRARVWRRHREADASLSALRVLCKGSGERVQGLRRVCPRPRGATATCSSDHQACCIPKPLPLCCKCPPPLLLGQFCSNSSSIRRTAPTAALPPRARCWAGTCRPRRRC

SEQ ID NO: 14988 - protein, 417 aa, Homo Sapiens
MNLPRAERLRSTPQRSLRDSDGEDGKIDVLGEEEDEDEVEDEEEAASQQFLEQSLQPGLQVARWGGVALPREHIEGGGGPSDPSEFGTKFRAPPRSAAASEDARQPAKPPYSYIALITMAILQNPHKRLTLSGICAFISGRFPYYRRKFPAWQNSIRHNLSLNDCFVKIPREPGHPGKGNYWSLDPASQDMFDNGSFLRRRKRFKRHQLTPGAHLPHPFPLPAAHAALHNPHPGPLLGAPAPPQPVPGAYPNTAPGRRPYALLHPHPLRYLLLSAPVYAGAPKKAEGAALATPAPFPCCSPHLVLSLGRRARVWRRHREADASLSALRVLCKGSGERVQGLRRVCPRPRGATATCSSDHQACCIPRPLPLCCKCPPPPLLGQFCSNSSSIRRRTAPTAALPPRARCWAGTCRPRRPC

SEQ ID NO: 14989 - protein, 373 aa, Homo Sapiens
MTAESGPPPPQPEVLATVKEERGETAAGAGVPGEATGRGAGGRRRKRPLQRGKPPYSYIALIAMAIAHAPERRLTLGGIYKFITERFPFYRDNPKKWQNSIRHNLTLNDCFLKIPREAGRPGKGNYWALDPNAEDMFESGSFLRRRKRFKRSDLSTYPAYMHDAAAAAAAAAAAAAAAAIFPGAVPAARPPYPGAVYAGYAPPSLAAPPPVYYPAASPGPCRVFGLVPERPLSPELGPAPSGPGGSCAFASAGAPATTTGYQPAGCTGARPANPSAYAAAYAGPDGAYPQGAGSAIFAAAGRLAGPASPPAGGSSGGVETTVDFYGRTSPGQFGALGACYNPGGQLGGASAGAYHARHAAAYPGGIDRFVSAM

SEQ ID NO: 14990 - protein, 319 aa, Homo Sapiens
MAGRSDMDPPAAFSGFPALPAVAPSGPPPSPLAGAEPGREPEEAAAGRGEAAPTPAPGPGRRRRRPLQRGKPPYSYIALIAMALAHAPGRRLTLAAIYRFITERFAFYRDSPRKWQNSIRHNLTLNDCFVKVPREPGNPGKGNYWTLDPAAADMFDNGSFLRRRKRFKRAELPAHAAAAPGPPLPFPYAPYAPAPGPALLVPPPSAGPGPSPPARLFSVDSLVNLQPELAGLGAPEPPCCAAPDAAAAAFPPCAAAASPPLYSQVPDRLVLPATRPGPGPLPAEPLLALAGPAAALGPLSPGEAYLRQPGFASGLERYL

SEQ ID NO: 14991 - protein, 379 aa, Homo Sapiens
MSSAPEKQQPPHGGGGGGGGGGGAAMDPASSGPSKAKKTNAGIRRPEKPPYSYIALIVMAIQSSPTKRLTLSEIYQFLQSRFPFFRGSYQGWKNSVRHNLSLNECFIKLPKGLGRPGKGHYWTIDPASEFMFEEGSFRRRPRGFRRKCQALKPMYSMMNGLGFNHLPDTYGFQGSAGGLSCPPNSLALEGGLGMMNGHLPGNVDGMALPSHSVPHLPSNGGHSYMGGCGGAAAGEYPHHDSSVPASPLLPTGAGGVMEPHAVYSGSAAAWPPSASAALNSGASYIKQQPLSPCNPAANPLSGSLSTHSLEQPYLHQNSHNAPAELQGIPRYHSQSPSMCDRKEFVFSFNAMASSSMHSAGGGSYYHQQVTYQDIKPCVM

SEQ ID NO: 14992 - protein, 444 aa, Homo Sapiens
MTTEGGPPPAPLRRACSPVPGALQAALMSPPPAAAAAAAAAPETTSSSSSSSSASCASSSSSSNSASAPSAACKSAGGGGAGAGSGGAKKASSGLRRPEKPPYSYIALIVMAIQSSPSKRLTLSEIYQFLQARFPFFRGAYQGWKNSVRHNLSLNECFIKLPKGLGRPGKGHYWTIDPASEFMFEEGSFRRRPRGFRRKCQALKPMYHRVVSGLGFGASLLPQGFDFQAPPSAPLGCHSQGGYGGLDMMPAGYDAGAGAPSHAHPHHHHHHHVPHMSPNPGSTYMASCPVPAGPGGVGAAGGGGGGDYGPDSSSSPVPSSPAMASAIECHSPYTSPAAHWSSPGASPYLKQPPALTPSSNPAASAGLHSSMSSYSLEQSYLHQNAREDLSVGLPRYQHHSTPVCDRKDFVLNFNGISSFHPSASGSYYHHHHQSVCQDIKPCVM

SEQ ID NO: 14993 - protein, 489 aa, Homo Sapiens [sequence omitted]

SEQ ID NO: 14994 - protein, 365 aa, Homo Sapiens
MGPCSGSRLGPPEAESPSQPPKRRKKRYLRHDKPPYTYLAMIALVIQAAPSRRLKLAQIIRQVQAVFPFFREDYEGWKDSIRHNLSSNRCFRKVPKDPAKPQAKGNFWAVDVSLIPAEALRLQNTALCRRWQNGGARGAFAKDLGPYVLHGRPYRPPSPPPPPSEGFSIKSLLGGSGEGAPWPGLAPQSSPVPAGTGNSGEEAVPTPPLPSSERPLWPLCPLPGPTRVEGETVQGGAIGPSTLSPEPRAWPLHLLQGTAVPGGRSSGGHRASLWGQLPTSYLPIYTPNVVMPLAPPPTSCPQCPSTSPAYWGVAPETRGPPGLLCDLDALFQGVPPNKSIYDVWVSHPRDLAAPGPGWLLSWCSL

SEQ ID NO: 14995 - protein, 378 aa, Homo Sapiens
MSSFDLPAPSPPRCSPQFPSIGQEPPEMNLYYENFFHPQGVPSPQRPSFEGGGEYGATPNPYLWFNGPTMTPPPYLPGPNASPFLPQAYGVQRPLLPSVSGLGGSDLGWLPIPSQEELMKLVRPPYSYSALIAMAIHGAPDKRLTLSQIYQYVADNFPFYNKSKAGWQNSIRHNLSLNDCFKKVPRDEDDPGKGNYWTLDPNCEKMFDNGNFRRKRKRKSDVSSSTASLALEKTESSLPVDSPKTTEPQDILDGASPGGTTSSPEKRPSPPPSGAPCLNSFLSSMTAYVSGGSPTSHPLVTPGLSPEPSDKTGQNSLTFNSFSPLTNLSNHSGGGDWANPMPTNMLSYGGSVLSQFSPHFYNSVNTSGVLYPREGTEV

SEQ ID NO: 14996 - protein, 318 aa, Homo Sapiens
MATYCDDLGPSSAPPGQAQATAHPPGYEPGDLGAVGGGPLLWVNAPALSPKSYASGPGPAPPYAAPSYGAPGPLLGAPGGLAGADLAWLSLSGQQELLRLVRPPYSYSALIAMAIQSAPLRKLTLSQIYQYVAGNFPFYKRSKAGWQNSIRHNLSLNDCFKKVPRDEDDPGKGNYWTLDPNCEKMFDNGNFRRKRKRRAEASAAVRSGARSVGGAEAPALEPPSAACLDLQASPSPSAPEAATCFSGFASAMSALAGGLGTFPGGLAGDFSFGRRPPTVATHAPQTLNPSPGFAPGHQTAAAGFRLSHLLYSREGTEV

SEQ ID NO: 14997 - protein, 420 aa, Homo Sapiens
MALYCGDNFGVYSQPGLPPPAATAAAPGAPPAARAPYGLADYAAPPAAAANPYLWLNGPGVGGPPSAAAAAAAAYLGAPPPPPPPGAAAGPFLQPPPAAGTFGCSQRPFAQPAPAAPASPAAPAGPGELGWLSMASREDLMKMVRPPYSYSALIAMAIQSAPERKLTLSHIYQFVADSFPFYQRSKAGWQNSIRHNLSLNDCFKKVPRDEDDPGKGNYWTLDPNCEKMFDNGNFRRKRKRRSEASNGSTVAAGTSKSEEGLSSGLGSGVGGKPEEESPSTLLRPSHSPEPPEGTKSTASSPGGPMLTSTPCLNTFFSSLSSLSVSSSVSTQRALPGSRHLGIQGAQLPSSGVFSPTSISEASADTLQLSNSTSNSTGQRSSYYSPFPASTSGGQSSPFSSPFHNFSMVNSLIYPREGSEV

SEQ ID NO: 14998 - protein, 421 aa, Homo Sapiens
MAESWLRLSGAGPAEEAGPEGGLEEPDALDDSLTSLQWLQEFSILNAKAPALPPGGTDPHGYHQVPGSAAPGSPLAADPACLGQPHTPGKPTSSCTSRSAPPGLQAPPPDDVDYATNPHVKPPYSYATLICMAMQASKATKITLSAIYKWITDNFCYFRHADPTWQNSIRHNLSLNKCFIKVPREKDEPGKGGFWRIDPQYAERLLSGAFKKRRLPPVHIHPAFARQAAQEPSAVPRAGPLTVNTEAQQLLREFEEATGEAGWGAGEGRLGHKRKQPLPKRVAKVPRPPSTLLPTPEEQGELEPLKGNFDWEAIFDAGTLGGELGALEALELSPPLSPASHVDVDLTIHGRHIDCPATWGPSVEQAADSLDFDETFLATSFLQHPWDESGSGCLPPEPLFEAGDATLASDLQDWASVGAFL

SEQ ID NO: 14999 - protein, 574 aa, Homo Sapiens
MASDLESSLTSIDWLPQLTLRATIEKLGSASQAGPPGSSRKCSPGSPTDPNATLSKDEAAVHQDGKPRYSYATLITYAINSSPAKKMTLSEIYRWICDNFPYYKNAGIGWKNSIRHNLSLNKCFRKVPRPRDDPGKGSYWTIDTCPDISRKRRHPPDDDLSQDSPEQEASKSPRGGVAGSGEASLPPEGNPQMSLQSPTSIASYSQGTGSVDGGAVAAGASGRESAEGPPPLYNTNHDFKFSYSEINFQDLSWSFRNLYKSMLEKSSSSSQHGFSSLLGDIPPSNNYYMYQQQQPPPPQQQQQQQQPPQPPPQQSQPQQQQAPAQGPSAVGGAPPLHTPSTDGCTPPGGKQAGAEGYGPPPVMAMHPPPLQHGGYHPHQHHPHSHPAQQPPPPQPQAQGQAPINNTGFAFPSDWCSNIDSLKESFKMVNRLNWSSIEQSQFSELMESLRQAEQKNWTLDQHHIANLCDSLNHFLTQTGHVPPQGGTHRPPAPARIADSCALTSGKQESAMSQVNSYGHPQAPHLYPGPSPMYPIPTQDSAGYNRPAHHMVPRPSVPPPGANEEIPDDFDWDLIT

SEQ ID NO: 15000 - protein, 622 aa, Homo Sapiens
MGLYGQACPSVTSLRMTSELESSLTSMDWLPQLTMRAAIQKSDATQNAHGTGISKKNALLDPNTTLDQEEVQQHKDGKPPYSYASLITFAINSSPKKKMTLSEIYQWICDNFPYYREAGSGWKNSIRHNLSLNKCFLKVPRSKDDPGKGSYWAIDTNPKEDVLPTRPKKRARSVERASTPYSIDSDSLGMECIISGSASPTLAINTVTNKVTLYNTDQDGSDSPRSSLNNSLSDQSLASVNLNSVGSVHSYTPVTSHPESVSQSLTPQQQPQYNLPERDKQLLFSEYNFEDLSASFRSLYKSVFEQSLSQQGLMNIPSESSQQSHTSCTYQHSPSSTVSTHPHSNQSSLSNSHGSGLNTTGSNSVAQVSLSHPQMHTQPSPHPPHRPHGLPQHPQRSPHPAPHPQQHSQLQSPHPQHPSPHQHIQHHPNHQHQTLTHQAPPPPQQVSCNSGVSNDWYATLDMLKESCRIASSVNWSDVDLSQFQGLMESMRQADLKNWSLDQVQFADLCSSLNQFFTQTGLIHSQSNVQQNVCHGAMHPTKPSQHIGTGNLYIDSRQNLPPSVMPPPGYPHIPQALSTPGTTMAGHHRAMNQQHMMPSQAFQMRRSLPPDDIQDDFDWDSIV

SEQ ID NO: 15001 - protein, 733 aa, Homo Sapiens
MAEVGEDSGARALLALRSAPCSPVLCAAAAAAAFPAAAPPPAPAQPQPPPGPPPPPPPPLPPGAIAGAGSSGGSSGVSGDSAVAGAAPALVAAAAASVRQSPGPALARLEGREFEFLMRQPSVTIGRNSSQGSVDLSMGLSSFISRRHLQLSFQEPHFYLRCLGKNGVFVDGAFQRRGAPALQLPKQCTFRFPSTAIKIQFTSLYHKEEAPASPLRPLYPQISPLKIHIPEPDLRSMVSPVPSPTGTISVPNSCPASPRGAGSSSYRFVQNVTSDLQLAAEFAAKAASEQQADTSGGDSPKDESKPPFSYAQLIVQAISSAQDRQLTLSGIYAHITKHYPYYRTADKGWQNSIRHNLSLNRYFIKVPRSQEEPGKGSFWRIDPASEAKLVEQAFRKRRQRGVSCFRTPFGPLSSRSAPASPTHPGLMSPRSGGLQTPECLSREGSPIPHDPEFGSKLASVPEYRYSQSAPGSPVSAQPVIMAVPPRPSSLVAKPVAYMPASIVTSQQPAGHAIHVVQQAPTVTMVRVVTTSANSANGYILTSQGAAGGSHDAAGAAVLDLGSEARGLEEKPTIAFATIPAAGGVIQTVASQMAPGVPGHTVTILQPATPVTLGQHHLPVRAVTQNGKHAVPTNSLAGNAYALTSPLQLLATQASSSAPVVVTRVCEVGPKEPAAAVAATATTTPATATTASASASSTGEPEVKRSRVEEPSGAVTTPAGVIAAAGPQGPGTGE

SEQ ID NO: 15002 - protein, 660 aa, Homo Sapiens
MAAAAAALSGAGTPPAGGGAGGGGAGGGGSPPGGWAVARLEGREFEYLMKKRSVTIGRNSSQGSVDVSMGHSSFISRRHLEIFTPPGGGGHGGAAPELPPAQPRPDAGGDFYLRCLGKNGVFVDGVFQRRGAPPLQLPRVCTFRFPSTNIKITFTALSSEKREKQEASESPVKAVQPHISPLTINIPDTMAHLISPLPSPTGTISAANSCPSSPRGAGSSGYKVGRVMPSDLNLMADNSQPENEKEASGGDSPKDDSKPPYSYAQLIVQAITMAPDKQLTLNGIYTHITKNYPYYRTADKGWQNSIRHNLSLNRYFIKVPRSQEEPGKGSFWRIDPASESKLIEQAFRKRRPRGVPCFRTPLGPLSSRSAPASPNHAGVLSAHSSGAQTPESLSREGSPAPLEPEPGAAQPKLAVIQEARFAQSAPGSPLSSQPVLITVQRQLPQAIKPVTYTVATPVTTSTSQPPVVQTVHVVHQIPAVSVTSVAGLAPANTYTVSGQAVVTPAAVLAPPKAEAQENGDHREVKVKVEPIPAIGHATLGTASRIIQTAQTTPVQTVTIVQQAPLGQHQLPIKTVTQNGTHVASVPTAVHGQVNNAAASPLHMLATHASASASLPTKRHNGDQPEQPELKRIKTEDGEGIVIALSVDTPPAAVREKGVQN

SEQ ID NO: 15003 - protein, 345 aa, Homo Sapiens
MSHLFDPRLPALAASPMLYLYGPERPGLPLAFAPAAALAASGRAETPQKPPYSYIALIAMAIQDAPEQRVTLNGIYQFIMDRFPFYHDNRQGWQNSIRHNLSLNDCFVKVPREKGRPGKGSYWTLDPRCLDMFENGNYRRRKRKPKPGPGAPEAKRPRAETHQRSAEAQPEAGSGAGGSGPAISRLQAAPAGPSPLLDGPSPPAPLHWPGTASPNEDAGDAAQGAAAVAVGQAARTGDGPGSPLRPASRSSPKSSDKSKSFSIDSILAGKQGQKPPSGDELLGGAKPGPGGRLGASLLAASSSLRPPFNASLMLDPHVQGGFYQLGIPFLSYFPLQVPDTVLHFQ

SEQ ID NO: 15004 - protein, 376 aa, Homo Sapiens
MMASYPEPEDAAGALLAPETGRTVKEPEGPPPSPGKGGGGGGGTAPEKPDPAQKPPYSYVALIAMAIRESAEKRLTLSGIYQYIIAKFPFYEKNKKGWQNSIRHNLSLNECFIKVPREGGGERKGNYWTLDPACEDMFEKGNYRRRRRMKRPFRPPPAHFQPGKGLFGAGGAAGGCGVAGAGADGYGYLAPPKYLQSGFLNNSWPLPQPPSPMPYASCQMAAAAAAAAAAAAAAGPGSPGAAAVVKGLAGPAASYGPYTRVQSMALPPGVVNSYNGLGGPPAAPPPPPHPHPHPHAHHLHAAAAPPPAPPHHGAAAPPPGQLSPASPATAAPPAPAPTSAPGLQFACARQPELAMMHCSYWDHDSKTGALHSRLDL

SEQ ID NO: 15005 - protein, 763 aa, Homo Sapiens
MKTSPRRPLILKRRRLPLPVQNAPSETSEEEPKRSPAQQESNQAEASKEVAESNSCKFPAGIKIINHPTMPNTQVVAIPNNANIHSIITALTAKGKESGSSGPNKFILISCGGAPTQPPGLRPQTQTSYDAKRTEVTLETLGPKPAARDVNLPRPPGALCEQKRETCADGEAAGCTINNSLSNIQWLRKMSSDGLGSRSIKQEMEEKENCHLEQRQVKVEEPSRPSASWQNSVSERPPYSYMAMIQFAINSTERKRMTLKDIYTWIEDHFPYFKHIAKPGWKNSIRHNLSLHDMFVRETSANGKVSFWTIHPSANRYLTLDQVFKPLDPGSPQLPEHLESQQKRPNPELRRNMTIKTELPLGARRKMKPLLPRVSSYLVPIQFPVNQSLVLQPSVKVPLPLAASLMSSELARHSKRVRIAPKVLLAEEGIAPLSSAGPGKEEKLLFGEGFSPLLPVQTIKEEEIQPGEEMPHLARPIKVESPPLEEWPSPAPSFKEESSHSWEDSSQSPTPRPKKSYSGLRSPTRCVSEMLVIQHRERRERSRSRRKQHLLPPCVDEPELLFSEGPSTSRWAAELPFPADSSDPASQLSYSQEVGGPFKTPIKETLPISSTPSKSVLPRTPESWRLTPPAKVGGLDFSPVQTSQGASDPLPDPLGLMDLSTTPLQSAPPLESPQRLLSSEPLDLISVPFGNSSPSDIDVPKPGSPEPQVSGLAANRSLTEGLVLDTMNDSLSKILLDISFPGLDEDPLGPDNINWSQFIPELQ

SEQ ID NO: 15006 - protein, 648 aa, Homo Sapiens
MVSLPPPQSDVTLPGPTRLEGERQGDLMQAPGLPGSPAPQSKHAGFSCSSFVSDGPPERTPSLPPHSPRIASPGPEQVQGHCPAGPGPGPFRLSPSDKYPGFGFEEAAASSPGRFLKGSHAPFHPYKRPFHEDVFPEAETTLALKGHSFKTPGPLEAFEEIPVDVAEAEAFLPGFSAEAWCNGLPYPSQEHGPQVLGSEVKVKPPVLESGAGMFCYQPPLQHMYCSSQPPFHQYSPGGGSYPIPYLGSSHYQYQRMAPQASTDGHQPLFPKPIYSYSILIFMALKNSKTGSLPVSEIYNFMTEHFPYFKTAPDGWKNSVRHNLSLNKCFEKVENKSGSSSRKGCLWALNPAKIDKMQEELQKWKRKDPIAVRKSMAKPEELDSLIGDKREKLGSPLLGCPPPGLSGSGPIRPLAPPAGLSPPLHSLHPAPGPIPGKNPLQDLLMGHTPSCYGQTYLHLSPGLAPPGPPQPLFPQPDGHLELRAQPGTPQDSPLPAHTPPSHSAKLLAEPSPARTMHDTLLPDGDLGTDLDAINPSLTDFDFQGNLWEQLKDDSLALDPLVLVTSSPTSSSMPPPQPPPHCFPPGPCLTETGSGAGDLAAPGSGGSGALGDLHLTTLYSAFMELEPTPPTAPAGPSVYLSPSSKPVALA

SEQ ID NO: 15007 - protein, 431 aa, Homo Sapiens
MGPVIGMTPDKRAETPGAEKIAGLSQIYKMGSLPEAVDAARPKATLVDSESADDELTNLNWLHESTNLLTNFSLGSEGLPIVSPLYDIEGDDVPSFGPACYQNPEKKSATSKPPYSFSLLIYMAIEHSPNKCLPVKEIYSWILDHFPYFATAPTGWKNSVRHNLSLNKCFQKVERSHGKVNGKGSLWCVDPEYKPNLIQALKKQPFSSASSQNGSLSPHYLSSVIKQNQVRNLKESDIDAAAAMMLLNTSIEQGILECEKPLPLKTALQKKRSYGNAFHHPSAVRLQESDSLATSIDPKEDHNYSASSMAAQRCASRSSVSSLSSVDEVYEFIPKNSHVGSDGSEGFHSEEDTDVDYEDDPLGDSGYASQPCAKISEKGQSGKKMRKQTCQEIDEELKEAAGSLLHLAGIRTCLGSLISTAKTQNQKQRKK

SEQ ID NO: 15008 - protein, 490 aa, Homo Sapiens
MGPVMPPSKKPESSGISVSSGLSQCYGGSGFSKALQEDDDLDFSLPDIRLEEGAMEDEELTNLNWLHESKNLLKSFGESVLRSVSPVQDLDDDTPPSPAHSDMPYDARQNPNCKPPYSFSCLIFMAIEDSPTKRLPVKDIYNWILEHFPYFANAPTGWKNSVRHNLSLNKCFKKVDKERSQSIGKGSLWCIDPEYRQNLIQALKKTPYHPHPHVFNTPPTCPQAYQSTSGPPIWPGSTFFKRNGALLQDPDIDAASAMMLLNTPPEIQAGFPPGVIQNGARVLSRGLFPGVRPLPITPIGVTAAMRNGITSCRMRTESEPSCGSPVVSGDPKEDHNYSSAKSSNARSTSPTSDSISSSSSSADDHYEFATKGSQEGSEGSEGSFRSHESPSDTEEDDRKHSQKEPKDSLGDSGYASQHKKRQHFAKARKVPSDTLPLKKRRTEKPPESDDEEMKEAAGSLLHLAGIRSCLNNITNRTAKGQKEQKETTKN

SEQ ID NO: 15009 - protein, 517 aa, Homo Sapiens
MIESDTSSIMSGIIRNSGQNHHPSPQEYRLLATTSDDDLPGDLQSLSWLTAVDVPRLQQMASGRVDLGGPCVPHPHPGALAGVADLHVGATPSPLLHGPAGMAPRGMPGLGPITGHRDSMSQFPVGGQPSSGLQDPPHLYSPATQPQFPLPPGAQQCPPVGLYGPPFGVRPPYPQPHVAVHSSQELHPKHYPKPIYSYSCLIAMALKNSKTGSLPVSEIYSFMKEHFPYFKTAPDGWKNSVRHNLSLNKCFEKVENKMSGSSRKGCLWALNLARIDKMEEEMHKWKRKDLAAIHRSMANPEELDKLISDRPESCRRPGKPGEPEAPVLTHATTVAVAHGCLAVSQLPPQPLMTLSLQSVPLHHQVQPQAHLAPDSPAPAQTPPLHALPDLSPSPLPHPAMGRAPVDFINISTDMNTEVDALDPSIMDFALQGNLWEEMKDEGFSLDTLGAFADSPLGCDLGASGLTPASGGSDQSFPDLQVTGLYTAYSTPDSVAASGTSSSSQYLGAQGNKPIALL

SEQ ID NO: 15010 - protein, 655 aa, Homo Sapiens
MAEAPQVVEIDPDFEPLPRPRSCTWPLPRPEFSQSNSATSSPAPSGSAAANPDAAAGLPSASAAAVSADFMSNLSLLEESEDFPQAPGSVAAAVAAAAAAAATGGLCGDFQGPEAGCLHPAPPQPPPPGPLSQHPPVPPAAAGPLAGQPRKSSSSRRNAWGNLSYADLITKAIESSAEKRLTLSQIYEWMVKSVPYFKDKGDSNSSAGWKNSIRHNLSLHSKFIRVQNEGTGKSSWWMLNPEGGKSGKSPRRRAASMDNNSKFAKSRSRAAKKKASLQSGQEGAGDSPGSQFSKWPASPGSHSNDDFDNWSTFRPRTSSNASTISGRLSPIMTEQDDLGEGDVHSMVYPPSAAKMASTLPSLSEISNPENMENLLDNLNLLSSPTSLTVSTQSSPGTMMQQTPCYSFAPPNTSLNSPSPNYQKYTYGQSSMSPLPQMPIQTLQDNKSSYGGMSQYNCAPGLLKELLTSDSPPHNDIMTPVDPGVAQPNSRVLGQNVMMGPNSVMSTYGSQASHNKMMNPSSHTHPGHAQQTSAVNGRPLPHTVSTMPHTSGMNRLTQVKTPVQVPLPHPMQMSALGGYSSVSSCNGYGRMGLLHQEKLPSDLDGMFIERLDCDMESIIRNDLMDGDTLDFNFDNVLPNQSFPHSVKTTTHSWVSG

SEQ ID NO: 15011 - protein, 673 aa, Homo Sapiens
MAEAPASPAPLSPLEVELDPEFEPQSRPRSCTWPLQRPELQASPAKPSGETAADSMIPEEEDDEDDEDGGGRAGSAMAIGGGGGSGTLGSGLLLEDSARVLAPGGQDPGSGPATAAGGLSGGTQALLQPQQPLPPPQPGAAGGSGQPRKCSSRRNAWGNLSYADLITRAIESSPDKRLTLSQIYEWMVRCVPYFKDKGDSNSSAGWKNSIRHNLSLHSRFMRVQNEGTGKSSWWIINPDGGKSGKAPRRRAVSMDNSNKYTKSRGRAAKKKAALQTAPESADDSPSQLSKWPGSPTSRSSDELDAWTDFRSRTNSNASTVSGRLSPIMASTELDEVQDDDAPLSPMLYSSSASLSPSVSKPCTVELPRLTDMAGTMNLNDGLTENLMDDLLDNITLPPSQPSPTGGLMQRSSSFPYTTKGSGLGSPTSSFNSTVFGPSSLNSLRQSPMQTIQENKPATFSSMSHYGNQTLQDLLTSDSLSHSDVMMTQSDPLMSQASTAVSAQNSRRNVMLRNDPMMSFAAQPNQGSLVNQNLLHHQHQTQGALGGSRALSNSVSNMGLSESSSLGSAKHQQQSPVSQSMQTLSDSLSGSSLYSTSANLPVMGHEKFPSDLDLDMFNGSLECDMESIIRSELMDADGLDFNFDSLISTQNVVGLNVGNFTGAKQASSQSWVPG

SEQ ID NO: 15012 - protein, 505 aa, Homo Sapiens
MDPGNENSATEAAAIIDLDPDFEPQSRPRSCTWPLPRPEIANQPSEPPEVEPDLGEKVHTEGRSEPILLPSRLPEPAGGPQPGILGAVTGPRKGGSRRNAWGNQSYAELISQAIESAPEKRLTLAQIYEWMVRTVPYFKDKGDSNSSAGWKNSIRHNLSLHSKFIKVHNEATGKSSWWMLNPEGGKSGKAPRRRAASMDSSSKLLRGRSKAPKKKPSVLPAPPEGATPTSPVGHFAKWSGSPCSRNREEADMWTTFRPRSSSNASSVSTRLSPLRPESEVLAEEIPASVSSYAGGVPPTLNEGLELLDGLNLTSSHSLLSRSGLSGFSLQHPGVTGPLHTYSSSLFSPAEGPLSAGEGCFSSSQALEALLTSDTPPPPADVLMTQVDPILSQAPTLLLLGGLPSSSKLATGVGLCPKPLEAPGPSSLVPTLSMIAPPPVMASAPIPKALGTPVLTPPTEAASQDRMPQDLDLDMYMENLECDMDNIISDLMDEGEGLDFNFEPDP

SEQ ID NO: 15013 - protein, 492 aa, Homo Sapiens
MAAKLRAHQVDVDPDFAPQSRPRSCTWPLPQPDLAGDEDGALGAGVAEGAEDCGPERRATAPAMAPAPPLGAEVGPLRKAKSSRRNAWGNLSYADLITKAIESAPDKRLTLSQIYDWMVRYVPYFKDKGDSNSSAGWKNSIRHNLSLHTRFIRVQNEGTGKSSWWMLNPEGGKTGKTPRRRAVSMDNGAKFLRIKGKASKKKQLQAPERSPDDSSPSAPAPGPVPAAAKWAASPASHASDDYEAWADFRGGGRPLLGEAAELEDDEALEALAPSSPLMYPSPASALSPALGSRCPGELPRLAELGGPLGLHGGGGAGLPEGLLDGAQDAYGPRPAPRPGPVLGAPGELALAGAAAAYPGKGAAPYAPPAPSRSALAHPISLMTLPGEAGAAGLAPPGHAAAFGGPPGGLLLDALPGPYAAAAAGPLGAAPDRFPADLDLDMFSGSLECDVESIILNDFMDSDEMDFNFDSALPPPPPGLAGAPPPNQSWVPG

SEQ ID NO: 15014 - protein, 677 aa, Homo Sapiens
MMQESGTETKSNGSAIQNGSGGSNHLLECGGLREGRSNGETPAVDIGAADLAHAQQQQQQALQVARQLLLQQQQQQQVSGLKSPKRNDKQPALQVPVSVAMMTPQVITPQQMQQILQQQVLSPQQLQVLLQQQQALMLQQQQLQEFYKKQQEQLQLQLLQQQHAGKQPKEQQQVATQQLAFQQQLLQMQQLQQQHLLSLQRQGLLTIQPGQPALPLQPLAQGMIPTELQQLWKEVTSAHTAEETTGNNHSSLDLTTTCVSSSAPSKTSLIMNPHASTNGQLSVHTPKRESLSHEEHPHSHPLYGHGVCKWPGCEAVCEDFQSFLKHLNSEHALDDRSTAQCRVQMQVVQQLELQLAKDKERLQAMMTHLHVKSTEPKAAPQPLNLVSSVTLSKSASEASPQSLPHTPTTPTAPLTPVTQGPSVITTTSMHTVGPIRRRYSDKYNVPISSADIAQNQEFYKNAEVRPPFTYASLIRQAILESPEKQLTLNEIYNWFTRMFAYFRRNAATWKNAVRHNLSLHKCFVRVENVKGAVWTVDEVEFQKRRPQKISGNPSLIKNMQSSHAYCTPLNAALQASMAENSIPLYTTASMGNPTLGNLASAIREELNGAMEHTNSNESDSSPGRSPMQAVHPVHVKEEPLDPEEAEGPLSLVTTANHSPDFDHDRDYEDEPVNEDME

SEQ ID NO: 15015 - protein, 431 aa, Homo Sapiens
MPNPRPGKPSAPSLALGPSPGASPSWRAAPKASDLLGARGPGGTFQGRDLRGGAHASSSSLNPMPPSQLQLPTLPLVMVAPSGARLGPLPHLQALLQDRPHFMHQLSTVDAHARTPVLQVHPLESPAMISLTPPTTATGVFSLKARPGLPPGINVASLEWVSREPALLCTFPNPSAPRKDSTLSAVPQSSYPLLANGVCKWPGCEKVFEEPEDFLKHCQADHLLDEKGRAQCLLQREMVQSLEQQLVLEKEKLSAMQAHLAGKMALTKASSVASSDKGSCCIVAAGSQGPVVPAWSGPREAPDSLFAVRRHLWGSHGNSTFPEFLHNMDYFKFHNMRPPFTYATLIRWAILEAPEKQRTLNEIYHWFTRMFAFFRNHPATWKNAIRHNLSLHKCFVRVESEKGAVWTVDELEFRKKRSQRPSRCSNPTPGP

SEQ ID NO: 15016 - protein, 680 aa, Homo Sapiens
MMVESASETIRSAPSGQNGVGSLSGQADGSSGGATGTTASGTGREVTTGADSNGEMSPAELLHFQQQQALQVARQFLLQQASGLSSPGNNDSKQSASAVQVPVSVAMMSPQMLTPQQMQQILSPPQLQALLQQQQALMLQQLQEYYKKQQEQLHLQLLTQQQAGKPQPKEALGNKQLAFQQQLLQMQQLQQQHLLNLQRQGLVSLQPNQASGPLQTLPQAAVCPTDLPQLWKGEGAPGQPAEDSVKQEGLDLTGTAATATSFAAPPKVSPPLSHHTLPNGQPTVLTSRRDSSSHEETPGSHPLYGHGECKWPGCETLCEDLGQFIKHLNTEHALDDRSTAQCRVQMQVVQQLEIQLAKESERLQAMMAHLHMRPSEPKPFSQPLNPVPGSSSFSKVTVSAADSFPDGLVHPPTSAAAPVTPLRPPGLGSASLHGGGPARRRSSDKFCSPISSELAQNHEFYKNADVRPPFTYASLIRQAILETPDRQLTLNEIYNWFTRMFAYFRRNTATWKNAVRHNLSLHKCFVRVENVKGAVWTVDEREYQKRRPPKMTGSPTLVKNMISGLSYGALNASYQAALAESSFPLLNSPGMLNPGSASSLLPLSHDDVGAPVEPLPSNGSSSPPRLSPPQYSHQVQVKEEPAEAEEDRQPGPPLGAPNPSASGPPEDRDLEEELPGEELS

SEQ ID NO: 15017 - protein, 403 aa, Homo Sapiens
MKLEVFVPRAAHGDKQGSDLEGAGGSDAPSPLSAAGDDSLGSDGDCAANSPAAGGGARDTQGDGEQSAGGGPGAEEAIPAAAAAAVVAEGAEAGAAGPGAGGAGSGEGARSKPYTRRPKPPYSYIALIAMAIRDSAGGRLTLAEINEYLMGKFPFFRGSYTGWRNSVRHNLSLNDCFVKVLRDPSRPWGKDNYWMLNPNSEYTFADGVFRRRRKRLSHRAPVPAPGLRPEEAPGLPAAPPPAPAAPASPRMRSPARQEERASPAGKFSSSFAIDSILRKPFRSRRLRDTAPGTTLQWGAAPCPPLPAFPALLPAAPCRALLPLCAYGAGEPARLGAREAEVPPTAPPLLLAPLPAAAPAKPLRGPAAGGAHLYCPLRLPAALQAASVRRPGPHLPYPVETLLA

SEQ ID NO: 15018 - protein, 292 aa, Homo Sapiens
MGNELFLAFTTSHLPLAEQKLARYKLRIVKPPKLPLEKKPNPDKDGPDYEPNLWMWVNPNIVYPPGKLEVSGRRKREDLTSTLPSSQPPQKEEDASCSEAAGVESLSQSSSKRSPPRKRFAFSPSTWELTEEEEAEDQEDSSSMALPSPHKRAPLQSRRLRQASSQAGRLWSRPPLNYFHLIALALRNSSPCGLNVQQIYSFTRKHFPFFRTAPEGWKNTVRHNLCFRDSFEKVPVSMQGGASTRPRSCLWKLTEEGHRRFAEEARALASTRLESIQQCMSQPDVMPFLFDL

SEQ ID NO: 15019 - protein, 311 aa, Homo Sapiens
MDLKLKDCEFWYSLHGQVPGLLDWDMRNELFLPCTTDQCSLAEQILAKYRVGVMKPPEMPQKRRPSPDGDGPPCEPNLWMWVDPNILCPLGSQEAPKPSGKEDLTNISPFPQPPQKDEGSNCSEDKVVESLPSSSSEQSPLQKQGIHSPSDFELTEEEAEEPDDNSLQSPEMKCYQSQKLWQINNQEKSWQRPPLNCSHLIALALRNNPHCGLSVQEIYNFTRQHFPFFWTAPDGWKSTIHYNLCFLDSFEKVPDSLKDEDNARPRSCLWKLTKEGHRRFWEETRVLAFAQRERIQECMSQPELLTSLFDL

SEQ ID NO: 15020 - protein, 330 aa, Homo Sapiens
MQQQPLPGPGAPTTEPTKPPYSYIALIAMAIQSSPGQRATLSGIYRYIMGRFAFYRHNRPGWQNSIRHNLSLNECFVKVPRDDRKPGKGSYWTLDPDCHDMFEHGSFLRRRRRFTRQTGAEGTRGPAKARRGPLRATSQDPGVPNATTGRQCSFPPELPDPKGLSFGGLVGAMPASMCPATTDGRPRPPMEPKEISTPKPACPGELPVATSSSSCPAFGFPAGFSEAESFNKAPTPVLSPESGIGSSYQCRLQALNFCMGADPGLEHLLASAAPSPAPPTPPGSLRAPLPLPTDHKEPWVAGGFPVQGGSGYPLGLTPCLYRTPGMFFFE

SEQ ID NO: 15021 - protein, 431 aa, Homo Sapiens; identical to SEQ ID NO: 15015

SEQ ID NO: 15022 - protein, 644 aa, Homo Sapiens
MADYSTVPPPSSGSAGGGGGGGGGGGVNDAFKDALQRARQIAAKIGGDAGTSLNSNDYGYGGQKRPLEDGDQPDAKKVAPQNDSFGTQLPPMHQQQSRSVMTEEYKVPDGMVGFIIGRGGEQISRIQQESGCKIQIAPDSGGLPERSCMLTGTPESVQSAKRLLDQIVEKGRPAPGFHHGDGPGNAVQEIMIPASKAGLVIGKGGETIKQLQERAGVKMVMIQDGPQNTGADKPLRITGDPYKVQQAKEMVLELIRDQGGFREVRNEYGSRIGGNEGIDVPIPRFAVGIVIGRNGEMIKKIQNDAGVRIQFKPDDGTTPERIAQITGPPDRCQHAAEIITDLLRSVQAGNPGGPGPGGRGRGRGQGNWNMGPPGGLQEFNFIVPTGKTGLIIGKGGETIKSISQQSGARIELQRNPPPNADPNMKLFTIRGTPQQIDYARQLIEEKIGGPVNPLGPPVPHGPHGVPGPHGPPGPPGPGTPMGPYNPAPYNPGPPGPAPHGPPAPYAPQGWGNAYPHWQQQAPPDPAKAGTDPNSAAWAAYYAHYYQQQAQPPPAAPAGAPTTTQTNGQGDQQNPAPAGQVDYTKAWEEYYKKMGQAVPAPTGAPPGGQPDYSAAWAEYYRQQAAYYAQTSPQGMPQHPPAPQGQ

SEQ ID NO: 15023 - protein, 572 aa, Homo Sapiens
MAELVQGQSAPVGMKAEGFVDALHRVRQIAAKIDSIPHLNNSTPLVDPSVYGYGVQKRPLDDGVGNQLGALVHQRTVITEEFKVPDKMVGFIIGRGGEQISRIQAESGCKIQIASESSGIPERPCVLTGTPESIEQAKRLLGQIVDRCRNGPGFHNDIDSNSTIQEILIPASKVGLVIGRGGETIKQLQERTGVKMVMIQDGPLPTGADKPLRITGDAFKVQQAREMVLEIIREKDQADFRGVRGDFNSRMGGGSIEVSVPRFAVGIVIGRNGEMIKKIQNDAGVRIQFKPDDGISPERAAQVMGPPDRCQHAAHIISELILTAQERDGFGGLAAARGRGRGRGDWSVGAPGGVQEITYTVPADKCGLVIGKGGENIKSINQQSGAHVELQRNPPPNSDPNLRRFTIRGVPQQIEVARQLIDEKVGGTNLGAPGAFGQSPFSQPPAPPHQNTFPPRSSGCFPNMAAKVNGNPHSTPVSGPPAFLTQGWGSTYQAWQQPTQQVPSQQSQPQSSQPNYSKAWEDYYKKQSHAASAAPQASSPPDYTMAWAEYYRQQVAFYGQTLGQAQAHSQEQ

SEQ ID NO: 15024 - protein, 454 aa, Homo Sapiens
MTKREAEELIEIEIDGTEKAECTEESIVEQTYAPAECVSQAIDINEPIGNLKKLLEPRLQCSLDAHEICLQDIQLDPERSLFDQGVKTDGTVQLSVQVISYQGIEPKLNILEIVKPADTVEVVIDPDAHHAESEAHLVEEAQVITLDGTKHITTISDETSEQVTRWAAALEGYRKEQERLGIPYDPIQWSTDQVLHWVVWVMKEFSMTDIDLTTLNISGRELCSLNQEDFFQRVPRGEILWSHLELLRKYVLASQEQQMNEIVTIDQPVQIIPASVQSATPTTIKVINSSAKAAKVQRAPRISGEDRSSPGNRTGNNGQIQLWQFLLELLTDKDARDCISWVGDEGEFKLNQPELVAQKWGQRKNKPTMNYEKLSRALRYYYDGDMICKVQGKRFVYKFVCDLKTLIGYSAAELNRLVTECEQKKLAKMQLHGIAQPVTAVALATASLQTEKDN

SEQ ID NO: 15025 - protein, 395 aa, Homo Sapiens
MSLVDLGKKLLEAARAGQDDEVRILMANGAPFTTDWLGTSPLHLAAQYGHYSTTEVLLRAGVSRDARTKVDRTPLHMAASEGHASIVEVLLKHGADVNAKDMLKMTALHWATEHNHQEVVELLIKYGADVHTQSKFCKTAFDISIDNGNEDLAEILQIAMQNQINTNPESPDTVTIHAATPQFIIGPGGVVNLTGLVSSENSSKATDETGVSAVQFGNSSTSVLATLAALAEASAPLSNSSETPVVATEEVVTAESVDGAIQQVVSSGGQQVITIVTDGIQLGNLHSIPTSGIGQPIIVTMPDGQQVLTVPATDIAEETVISEEPPAKRQCIEIIENRVESAEIEEREALQKQLDEANREAQKYRQQLLKKEQEAEAYRQKLEAMTRLQTNKEAV

SEQ ID NO: 15026 - protein, 448 aa, Homo Sapiens
MSLVDLGKRLLEAARKGQDDEVRTLMANGAPFTTDWLGTSPLHLAAQYGHYSTAEVLLRAGVSRDARTKVDRTPLHMAAADGHAHIVELLVRNGADVNAKDMLKMTALHWATERHHRDVVELLIKYGADVHAFSKFDKSAFDIALEKNNAEILVILQEAMQNQVNVNPERANPVTDPVSMAAPFIFTSGEVVNLASLISSTNTKTTSGDPHASTVQFSNSTTSVLATLAALAEASVPLSNSHRATANTEEIIEGNSVDSSIQQVMGSGGQRVITIVTDGVPLGNIQTSIPTGGIGQPFIVTVQDGQQVLTVPAGKVAEETVIKEEEEEKLPLTKKPRIGEKTNSVEESKEGNERELLQQQLQEANRRAQEYRHQLLKKEQEAEQYRLKLEAIARQQPNGVDFTMVEEVAEVDAVVVTEGELEERETKVTGSAGTTEPHTRVSMATVSS

SEQ ID NO: 15027 - protein, 413 aa, Homo Sapiens
MEFPGLGSLGTSEPLPQFVDPALVSSTPESGVFFPSGPEGLDAAASSTAPSTATAAAAALAYYRDAEAYRHSPVFQVYPLLNCMEGIPGGSPYAGWAYGKTGLYPASTVCPTREDSPPQAVEDLDGKGSTSFLETLKTERLSPDLLTLGPALPSSLPVPNSAYGGPDFSSTFFSPTGSPLNSAAYSSPKLRGTLPLPPCEARECVNCGATATPLWRRDRTGHYLCNACGLYHKMNGQNRPLIRPKKRLIVSKRAGTQCTNCQTTTTTLWRRNASGDPVCNACGLYYKLHQVNRPLTMRKDGIQTRNRKASGKGKKKRGSSLGGTGAAEGPAGGFMVVAGGSGSGNCGEVASGLTLGPPGTAHLYQGLGPVVLSGPVSHLMPFPGPLLGSPTGSFPTGPMPPTTSTTVVAPLSS

SEQ ID NO: 15028 - protein, 480 aa, Homo Sapiens
MEVAPEQPRWMAHPAVLNAQHPDSHHPGLAHNYMEPAQLLPPDEVDVFFNHLDSQGNPYYANPAHARARVSYSPAHARLTGGQMCRPHLLHSPGLPWLDGGKAALSAAAAHHHNPWTVSPFSKTPLHPSAAGGPGGPLSVYPGAGGGSGGGSGSSVASLTPTAAHSGSHLFGFPPTPPKEVSPDPSTTGAASPASSSAGGSAARGEDKDGVKYQVSLTESMKMESGSPLRPGLATMGTQPATHHPIPTYPSYVPAAAHDYSSGLFHPGGFLGGPASSFTPKQRSKARSCSEGRECVNCGATATPLWRRDGTGHYLCNACGLYHKMNGQNRPLIKPKRRLSAARRAGTCCANCQTTTTTLWRRNANGDPVCNACGLYYKLHNVNRPLTMKKEGIQTRNRKMSNKSKKSKKGAECFEELSKCMQEKSSPFSAAALAGHMAPVGHLPPFSHSGHILPTPTPIHPSSSLSFGHPHPSSMVTAMG

SEQ ID NO: 15029 - protein, 443 aa, Homo Sapiens
MEVTADQPRWVSHHHPAVLNGQHPDTHHPGLSHSYMDAAQYPLPEEVDVLFNIDGQGNHVPPYYGNSVRATVQRYPPTHHGSQVCRPPLLHGSLPWLDGGKALGSHHTASPWNLSPFSKTSIHHGSPGPLSVYPPASSSSLSGGHASPHLFTFPPTPPKDVSPDPSLSTPGSAGSARQDEKECLKYQVPLPDSMKLESSHSRGSMTALGGASSSTHHPITTYPPYVPEYSSGLFPPSSLLGGSPTGFGCKSRPKARSSTGRECVNCGATSTPLWRRDGTGHYLCNACGLYHKMNGQNRPLIKPKRRLSAARRAGTSCANCQTTTTTLWRRNANGDPVCNACGLYYKLHNINRPLTMKKEGIQTRNRKMSSKSKKCKKVHDSLEDFPKNSSFNPAALSRHMSSLSHISPFSHSSHMLTTPTPMHPPSSLSFGPHHPSSMVTAMG

SEQ ID NO: 15030 - protein, 442 aa, Homo Sapiens
MYQSLAMAANHGPPPGAYEAGGPGAFMHGAGAASSPVYVPTPRVPSSVLGLSYLQGGGAGSASGGASGGSSGGAASGAGPGTQQGSPGWSQAGADGAAYTPPPVSPRFSFPGTTGSLAAAAAAAAAREAAAYSSGGGAAGAGLAGREQYGRAGFAGSYSSPYPAYMADVGASWAAAAAASAGPFDSPVLHSLPGRANPAARHPNLDMFDDFSEGRECVNCGAMSTPLWRRDGTGHYLCNACGLYHKMNGINRPLIKPQRRLSASRRVGLSCANCQTTTTTLWRRNAEGEPVCNACGLYMKLHGVPRPLAMRKEGIQTRKRKPKNLNKSKTPAAPSGSESLPPASGASSNSSNATTSSSEEMRPIKTEPGLSSHYGHSSSVSQTFSVSAMSGHGPSIHPVLSALKLSPQGYASPVSQSPQTSSKQDSWNSLVLADSHGDIITA

SEQ ID NO: 15031 - protein, 397 aa, Homo Sapiens
MYQSLALAASPRQAAYADSGSFLHAPGAGSPMFVPPARVPSMLSYLSGCEPSPQPPELAARPGWAQTATADSSAFGPGSPHPPAAHPPGATAFPFAHSPSGPGSGGSAGGRDGSAYQGALLPREQFAAPLGRPVGTSYSATYPAYVSPDVAQSWTAGPFDGSVLHGLPGRRPTFVSDFLEEFPGEGRECVNCGALSTPLWRRDGTGHYLCNACGLYHKMNGVNRPLVRPQKRLSSSRRAGLCCTNCHTTNTTLWRRNSEGEPVCNACGLYMKLHGVPRPLAMKKESIQTRKRKPKTIAKARGSSGSTRNASASPSAVASTDSSAATSKAKPSLASPVCPGPSMAPQASGQEDDSLAPGHLEFKFEPEDFAFPSTAPSPQAGLRGALRQEAWCALALA

SEQ ID NO: 15032 - protein, 595 aa, Homo Sapiens
MALTDGGWCLPKRFGAAGADASDSRAFPAREPSTPPSPISSSSSSCSRGGERGPGGASNCGTPQLDTEAAAGPPARSLLLSSYASHPFGAPHGPSAPGVAGPGGNLSSWEDLLLFTDLDQAATASKLLWSSRGAKLSPFAPEQPEEMYQTLAALSSQGPAAYDGAPGGFVHSAAAAAAAAAAASSPVYVPTTRVGSMLPGLPYHLQGSGSGPANHAGGAGAHPGWPQASADSPPYGSGGGAAGGGAAGPGGAGSAAAHVSARFPYSPSPPMANGAAREPGGYAAAGSGGAGGVSGGGSSLAAMGGREPQYSSLSAARPLNGTYHHHHHHHHHHPSPYSPYVGAPLTPAWPAGPFETPVLHSLQSRAGAPLPVPRGPSADLLEDLSESRECVNCGSIQTPLWRRDGTGHYLCNACGLYSKMNGLSRPLIKPQKRVPSSRRLGLSCANCHTTTTTLWRRNAEGEPVCNACGLYMKLHGVPRPLAMKKEGIQTRKRKPKNINKSKTCSGNSNNSIPMTPTSTSSNSDDCSKNTSPTTQPTASGAGAPVMTGAGESTNPENSELKYSGQDGLYIGVSLASPAEVTSSVRPDSWCALALA

SEQ ID NO: 15033 - protein, 269 aa, Homo Sapiens
MPLGLKPTCSVCKTTSSSMWKKGAQGEILCHHCTGRGGAGSGGAGSGAAGGTGGSGGGGFGAATFASTSATPPQSNGGGGGKQSKQEIHRRSARLRNTKYKSAPAAEKKVSTKGKGRRHIFKLKNPIKAPESVSTIITAESIFYKGVYYQIGDVVSVIDEQDGKPYYAQIRGFIQDQYCEKSAALTWLIPTLSSPRDQFDPASYIIGPEEDLPRKMEYLEFVCHAPSEYFKSRSSPFPTVPTRPEKGYIWTHVGPTPAITIKESVANHL

SEQ ID NO: 15034 - protein, 633 aa, Homo Sapiens
MTEEACRTRSQKRALERDPTEDDVESKKIKMERGLLASDLNTDGDMRVTPEPGAGPTQGLLRATEATAMAMGRGEGLVGDGPVDMRTSHSDMKSERRPPSPDVIVLSDNEQPSSPRVNGLTTVALKETSTEALMKSSPEERERMIKQLKEELRLEEAKLVLLKKLRQSQIQKEATAQKPTGSVGSTVTTPPPLVRGTQNIPAGKPSLQTSSARMPGSVIPPPLVRGGQQASSKLGPQASSQVVMPPLVRGAQQIHSIRQHSSTGPPPLLLAPRASVPSVQIQGQRIIQQGLIRVANVPNTSLLVNIPQPTPASLKGTTATSAQANSTPTSVASVVTSAESPASRQAAAKLALRKQLEKTLLEIPPPKPPAPEMNFLPSAANNEFIYLVGLEEVVQNLLETQGRMSAATVLSREPYMCAQCKTDFTCRWREEKSGAIMCENCMTTNQKKALKVEHTSRLKAAFVKALQQEQEIEQRLLQQGTAPAQAKAEPTAAPHPVLKQVIKPRRKLAFRSGEARDWSNGAVLQASSQLSRGSATTPRGVLHTFSPSPKLQNSASATALVSRTGRHSERTVSAGKGSATSNWKKTPLSTGGTLAFVSPSLAVHKSSSAVDRQREYLLDMIPPRSIPQSATWK

SEQ ID NO: 15035 - protein, 593 aa, Homo Sapiens
MDRMTEDALRLNLLKRSLDPADERDDVLAKRLKMEGHEAMERLKMLALLKRKDLANLEVPHELPTKQDGSGVKGYEEKLNGNLRPHGDNRTAGRPGKENINDEPVDMSARRSEPERGRLTPSPDIIVLSDNEASSPRSSSRMEERLKAANLEMFKGKGIEERQQLIKQLRDELRLEEARLVLLKKLRQSQLQKENVVQKTPVVQNAASIVQPSPAHVGQQGLSKLPSRPGAQGVEPQNLRTLQGHSVIRSATNTTLPHMLMSQRVIAPNPAQLQGQRGPPKPGLVRTTTPNMNPAINYQPQSSSSVPCQRTTSSAIYMNLASHIQPGTVNRVSSPLPSPSAMTDAANSQAAAKLALRKQLEKTLLEIPPPKPPAPLLHFLPSAANSEFIYMVGLEEVVQSVIDSQGKSCASLLRVEPFVCAQCRTDFTPHWKQEKNGKILCEQCMTSNQKKALKAEHTNRLKNAFVKALQQEQEIEQRLQQQAALSPTTAPAVSSVSKQETIMRHHTLRQAPQPQSSLQRGIPTSARSMLSNFAQAPQLSVPGGLLGMPGVNIAYLNTGIGGHKGPSLADRQREYLLDMIPPRSISQSISGQK

SEQ ID NO: 15036 - protein, 363 aa, Homo Sapiens
MQRAGGGSAPGGNGGGGGGGPGTAFSIDSLIGPPPPRSGHLLYTGYPMFMPYRPLVLPQALAPAPLPAGLPPLAPLASFAGRLTNTFCAGLGQAVPSMVALTTALPSFAEPPDAFYGPQELAAAAAAAAATAARNNPEPGGRRPEGGLEADELLPAREKVAEPPPPPPPHFSETFPSLPAEGKVYSSDEEKLEASAGDPAGSEQEEEGSGGDSEDDGFLDSSAGGPGALLGPKPKLKGSLGTGAEEGAPVTAGVTAPGGKSRRRRTAFTSEQLLELEKEFHCKKYLSLTERSQIAHALKLSEVQVKIWFQNRRAKWKRIKAGNVSSRSGEPVRNPKIVVPIPVHVNRFAVRSQHQQMEQGARP

SEQ ID NO: 15037 - protein, 348 aa, Homo Sapiens
MSAAFPPSLMMMQRPLGSSTAFSIDSLIGSPPQPSPGHFVYTGYPMFMPYRPVVLPPPPPPPPALPQAALQPALPPAHPHHQIPSLPTGFCSSLAQGMALTSTLMATLPGGFSASPQHQEAAAARKFAPQPLPGGGNFDKAEALQADAEDGKGFLAKEGSLLAFSAAETVQASLVGAVRGQGKDESKVEDDPKGKEESFSLESDVDYSSDDNLTGQAAHKEEDPGHALEETPPSSGAAGSTTSTGKNRRRRTAFTSEQLLELEKEFHCKKYLSLTERSQIAHALKLSEVQVKIWFQNRRAKWKRVKAGNANSKTGEPSRNPKIVVPIPVHVSRFAIRSQHQQLEQARP

SEQ ID NO: 15038 - protein, 781 aa, Homo Sapiens
MAHRPKRTFRQRAADSSDSDGAEESPAEPGAPRELPVPGSAEEEPPSGGGRAQVAGLPHRVRGPRGRGRVWASSRRATKAAPRADEGSESRTLDVSTDEEDKIHHSSESKDDQGLSSDSSSSLGEKELSSTVKIPDAAFIQAARRKRELARAQDDYISLDVQHTSSISGMKRESEDDPESEPDDHEKRIPFTLRPQTLRQRMAEESISRNEETSEESQEDEKQDTWEQQQMRKAVKIIEERDIDLSCGNGSSKVKKFDTSISFPPVNLEIIKKQLNTRLTLLQETHRSHLREYEKYVQDVKSSKSTIQNLESSSNQALNCKFYKSMKIYVENLIDCLNEKIINIQEIESSMHALLLKQAMTFMKRRQDELKHESTYLQQLSRKDETSTSGNFSVDEKTQWILEEIESRRTKRRQARVLSGNCNHQEGTSSDDELPSAEMIDFQKSQGDILQKQKKVFEEVQDDFCNIQNILLKFQQWREKFPDSYYEAFISLCIPKLLNPLIRVQLIDWNPLKLESTGLKEMPWFKSVEEFMDSSVEDSKKESSSDKKVLSAIINKTIIPRLTDFVEFLWDPLSTSQTTSLITHCRVILEEHSTCENEVSKSRQDLLKSIVSRMKKAVEDDVFIPLYPKSAVENKTSPHSKFQERQFWSGLKLFRNILLWNGLLTDDTLQELGLGKLLNRYLIIALLNATPGPDVVKKCNQVAACLPEKWFENSAMRTSIPQLENFIQFLLQSAHKLSRSEFRDEVEEIILILVKIKALNQAESFIGEHHLDHLKSLIKED

SEQ ID NO: 15039 - protein, 436 aa, Homo Sapiens
MEPDDFDSEDKEILSWDINDVKLPQNVKKTDWFQEWPDSYAKHIYSSEDKNAQRHLSSWAMRNTNNHNSRILKKSCLGVVVCGRDCLAEEGRKIYLRPAICDKARQKQQRKRCPNCDGPLKLIPCRGHGGFPVTNFWRHDGRFIFFQSKGEHDHPKPETKLEAEARRAMKKVNTAPSSVSLSLKGSTETRSLPGETQSQGSLPLTWSFQEGVQLPGSYSGHLIANTPQQNSLNDCFSFSKSYGLGGITDLTDQTSTVDPMKLYEKRKLSSSRTYSSGDLLPPSASGVYSDHGDLQAWSKNAALGRNHLADNCYSNYPFPLTSWPCSFSPSQNSSEPFYQQLPLEPPAAKTGCPPLWPNPAGNLYEEKVHVDFNSYVQSPAYHSPQEDPFLFTYASHPHQQYSLPSKSSKWDFEEEMTYLGLDHCNNDMLLNLCPLR

SEQ ID NO: 15040 - protein, 506 aa, Homo Sapiens
MPAAAVQEAVGVCSYGMQLSWDINDPQMPQELALFDQFREWPDGYVRFIYSSDEKKAQRHLSGWAMRNTNNHNGHILKKSCLGVVVCTQACTLPDGSRLQLRPAICDKARLKQQKKACPNCHSALELIPCRGHSGYPVTNFWRLDGNAIFFQAKGVHDHPRPESKSETEARRSAIKRQMASFYQPQKKRIRESEAEENQDSSGHFSNIPPLENPEDFDIVTETSFPIPGQPCPSFPKSDVYKATCDLATFQGDKMPPFQKYSSPRIYLPRPPCSYELANPGYTNSSPYPTLYKDSTSIPNDTDWVHLNTLQCNVNSYSSYERSFDFTNKQHGWKPALGKPSLVERTNHGQFQAMATRPYYNPELPCRYLTTPPPGAPALQTVITTTTKVSYQAYQPPAMKYSDSVREVKSLSSCNYAPEDTGMSVYPEPWGPPVTVTRAASPSGPPPMKIAGDCRAIRPTVAIPHEPVSSRTDEAETWDVCLSGLGSAVSYSDRVGPFFTYNNEDF

SEQ ID NO: 15041 - protein, 422 aa, Homo Sapiens
MPRSFLVKSKKAHSYHQPRSPGPDYSLRLENVPAPSRADSTSNAGGAKAEPRDRLSPESQLTEAPDRASASPDSCEGSVCERSSEFEDFWRPPSPSASPASEKSMCPSLDEAQPFPLPFKPYSWSGLAGSDLRHLVQSYRPCGALERGAGLGLFCEPAPEPGHPAALYGPKRAAGGAGAGAPGSCSAGAGATAGPGLGLYGDFGSAAAGLYERPTAAAGLLYPERGHGLHADKGAGVKVESELLCTRLLLGGGSYKCIKCSKVFSTPHGLEVHVRRSHSGTRPFACEMCGKTFGHAVSLEQHKAVHSQERSFDCKICGKSFKRSSTLSTHLLIHSDTRPYPCQYCGKRFHQKSDMKKHTFIHTGEKPHKCQVCGKAFSQSSNLITHSRKHTGFKPFGCDLCGKGFQRKVDLRRHRETQHGLK

SEQ ID NO: 15042 - protein, 330 aa, Homo Sapiens
MPRSFLVKSKKAHTYHQPRVQEDEPLWPPALTPVPRDQAPSNSPVLSTLFPNQCLDWTNLKREPELEQDQNLARMAPAPEGPIVLSRPQDGDSPLSDSPPFYKPSFSWDTLATTYGHSYRQAPSTMQSAFLEHSVSLYGSPLVPSTEPALDFSLRYSPGMDAYHCVKCNKVFSTPHGLEVHVRRSHSGTRPFACDICGKTFGHAVSLEQHTHVHSQERSFECRMCGKAFKRSSTLSTHLLIHSDTRPYPCQFCGKRFHQKSDMKKHTYIHTGEKPHKCQVCGKAFSQSSNLITHSRKHTGFKPFSCELCTKGFQRKVDLRRHRESQHNLK

SEQ ID NO: 15043 - protein, 1106 aa, Homo Sapiens
MFNSMTPPPISSYGEPCCLRPLPSQGAPSVGTEGLSGPPFCHQANLMSGPHSYGPARETNSCTEGPLFSSPRSAVKLTKKRALSISPLSDASLDLQTVIRTSPSSLVAFINSRCTSPGGSYGHLSIGTMSPSLGFPAQMNHQKGPSPSFGVQPCGPHDSARGGMIPHPQSRGPFPTCQLKSELDMLVGKCREEPLEGDMSSPNSTGIQDPLLGMLDGREDLEREEKREPESVYETDCRWDGCSQEFDSQEQLVHHINSEHIHGERKEFVCHWGGCSRELRPFKAQYMLVVHMRRHTGEKPHKCTFEGCRKSYSRLENLKTHLRSHTGEKPYMCEHEGCSKAFSNASDRAKHQNRTHSNEKPYVCKLPGCTKRYTDPSSLRKHVKTVHGPDAHVTKRHRGDGPLPRAPSISTVEPKREREGGPIREESRLTVPEGAMKPQPSPGAQSSCSSDHSPAGSAANTDSGVEMTGNAGGSTEDLSSLDEGPCIAGTGLSTLRRLENLRLDQLHQLRPIGTRGLKLPSLSHTGTTVSRRVGPPVSLERRSSSSSSISSAYTVSRRSSLASPFPPGSPPENGASSLPGLMPAQHYLLRARYASARGGGTSPTAASSLDRIGGLPMPPWRSRAEYPGYNPNAGVTRRASDPAQAADRPAPARVQRFKSLGCVHTPPTVAGGGQNFDPYLPTSVYSPQPPSITENAAMDARGLQEEPEVGTSMVGSGLNPYMDFPPTDTLGYGGPEGAAAEPYGARGPGSLPLGPGPPTNYGPNPCPQQASYPDPTQETWGEFPSHSGLYPGPKALGGTYSQCPRLEHYGQVQVKPEQGCPVGSDSTGLAPCLNAHPSEGPPHPQPLFSHYPQPSPPQYLQSGPYTQPPPDYLPSEPRPCLDFDSPTHSTGQLKAQLVCNYVQSQQELLWEGGGREDAPAQEPSYQSPKFLGGSQVSPSRAKAPVNTYGPGFGPNLPNHKSGSYPTPSPCHENFVVGANRASHRAAAPPRLLPPLPTCYGPLKVGGTNPSCGHPEVGRLGGGPALYPPPEGQVCNPLDSLDLDNTQLDFVAILDEPQGLSPPPSHDQRGSSGHTPPPSGPPNMAVGNMSVLLRSLPGETEFLNSSA

SEQ ID NO: 15044 - protein, 1586 aa, Homo Sapiens
METSASATASEKQEAKSGILEAAGFPDPGKKASPLVVAAAAAAAVAAQGVPQHLLPPFHAPLPIDMRHQEGRYHYEPHSVHGVHGPPALSGSPVISDISLIRLSPHPAGPGESPFNAPHPYVNPHMEHYLRSVHSSPTLSMISAARGLSPADVAQEHLKERGLFGLPAPGTTPSDYYHQMTLVAGHPAPYGDLLMQSGGAASAPHLHDYLNPVDVSRFSSPRVTPRLSRKRALSISPLSDASLDLQRMIRTSPNSLVAYINNSRSSSAASGSYGHLSAGALSPAFTFPHPINPVAYQQILSQQRGLGSAFGHTPPLIQPSPTFLAQQPMALTSINATPTQLSSSSNCLSDTNQNKQSSESAVSSTVNPVAIHKRSKVKTEPEGLRPASPLALTQGQVSGHGSCGCALPLSQEQLADLKEDLDRDDCKQEAEVVIYETNCHWEDCTKEYDTQEQLVHHINNEHIHGEKKEFVCRWQACTREQKPFKAQYMLVVHMRRHTGEKPHKCTFEGCSKAYSRLENLKTHLRSHTGEKPYVCEHEGCNKAFSNASDRAKHQNRTHSNEKPYICKIPGCTKRYTDPSSLRKHVKTVHGPDAHVTKKQRNDVHLRTPLLKENGDSEAGTEPGGPESTEASSTSQAVEDCLHVRAIKTESSGLCQSSPGAQSSCSSEPSPLGSAPNNDSGVEMPGTGPGSLGDLTALDDTPPGADTSALAAPSAGGLQLRKHMTTMHRFEQLKKEKLKSLKDSCSWAGPTPHTRNTKLPPLPGSGSILENFSGSGGGGPAGLLPNPRLSELSASEVTMLSQLQERRDSSTSTVSSAYTVSRRSSGISPYFSSRRSSEASPLGAGRPHNASSADSYDPISTDASRRSSEASQCSGGSGLLNLTPAQQYSLRAKYAAATGGPPPTPLPGLERMSLRTRLALLDAPERTLPAGCPRPLGPRRGSDGPTYGHGHAGAAPAFPHEAPGGGARRASDPVRRPDALSLPRVQRFHSTHNVNPGPLPPCADRRGLRLQSHPSTDGGLARGAYSPRPPSISENVAMEAVAAGVDGAGPEADLGLPEDDLVLPDDVVQYIKAHASGALDEGTGQVYPTESTGFSDNPRLPSPGLHGQRRMVAADSNVGPSAPMLGGCQLGFGAPSSLNKNNMPVQWNEVSSGTVDALASQVKPPPFPQGNLAVVQQKPAFGQYPGYSPQGLQASPGGLDSTQPHLQPRSGAPSQGIPRVNYMQQLRQPVAGSQCPGMTTTMSPHACYGQVHPQLSPSTISGALNQFPQSCSNMPAKPGHLGHPQQTEVAPDPTTMGNRHRELGVPDSALAGVPPPHPVQSYPQQSHHLAASMSQEGYHQVPSLLPARQPGFMEPQTGPMGVATAGFGLVQPRPPLEPSPTGRHRGVRAVQQQLAYARATGHAMAAMPSSQETAEAVPKGAMGNMGSVPPQPPPQDAGGAPDHSMLYYYGQIHMYEQDGGLENLGSCQVMRSQPPQPQACQDSIQPQPLPSPGVNQVSSTVDSQLLEAPQIDFDAIMDDGDHSSLFSGALSPSLLHSLSQNSSRLTTPRNSLTLPSIPAGISNMAVGDMSSMLTSLAEESKFLNMMT

SEQ ID NO: 15045 - protein, 1580 aa, Homo Sapiens
MEAQSHSSTTTEKKKVENSIVKCSTRTDVSEKAVASSTTSNEDESPGQTYHRERRNAITMQPQNVQGLSKVSEEPSTSSDERASLIKKEIHGSLPHVAEPSVPYRGTVFAMDPRNGYMEPHYHPPHLFPAFHPPVPIDARHHEGRYHYDPSPIPPLHMTSALSSSPTYPDLPFIRISPHRNPTAASESPFSPPHPYINPYMDYIRSLHSSPSLSMISATRGLSPTDAPHAGVSPAEYYHQMALLTGQRSPYADIIPSAATAGTGAIHMEYLHAMDSTRFSSPRLSARPSRKRTLSISPLSDHSFDLQTMIRTSPNSLVTILNNSRSSSSASGSYGHLSASAISPALSFTYSSAPVSLHMHQQILSRQQSLGSAFGHSPPLIHPAPTFPTQRPIPGIPTVLNPVQVSSGPSESSQNKPTSESAVSSTGDPMHNKRSKIKPDEDLPSPGARGQQEQPEGTTLVKEEGDKDESKQEPEVIYETNCHWEGCAREFDTQEQLVHHINNDHIHGEKKEFVCRWLDCSREQKPFKAQYMLVVHMRRHTGEKPHKCTFEGCTKAYSRLENLKTHLRSHTGEKPYVCEHEGCNKAFSNASDRAKHQNRTHSNEKPYVCKIPGCTKRYTDPSSLRKHVKTVHGPEAHVTKKQRGDIHPRPPPPRDSGSHSQSRSPGRPTQGALGEQQDLSNTTSKREECLQVKTVKAEKPMTSQPSPGGQSSCSSQQSPISNYSNSGLELPLTDGGSIGDLSAIDETPIMDSTISTATTALALQARRNPAGTKWMEHVKLERLKQVNGMFPRLNPILPPKAPAVSPLIGNGTQSNNTCSLGGPMTLLPGRSDLSGVDVTMLNMLNRRDSSASTISSAYLSSRRSSGISPCFSSRRSSEASQAEGRPQNVSVADSYDPISTDASRRSSEASQSDGLPSLLSLTPAQQYRLKAKYAAATGGPPPTPLPNMERMSLKTRLALLGDALEPGVALPPVHAPRRCSDGGAHGYGRRHLQPHDAPGHGVRRASDPVRTGSEGLALPRVPRFSSLSSCNPPAMATSAEKRSLVLQNYTRPEGGQSRNFHSSPCPPSITENVTLESLTMDADANLNDEDFLPDDVVQYLNSQNQAGYEQHFPSALPDDSKVPHGPGDFDAPGLPDSHAGQQFHALEQPCPEGSKTDLPIQWNEVSSGSADLSSSKLKCGPRPAVPQTRAFGFCNGMVVHPQNPLRSGPAGGYQTLGENSNPYGGPEHLMLHNSPGSGTSGNAFHEQPCKAPQYGNCLNRQPVAPGALDGACGAGIQASKLKSTPMQGSGGQLNFGLPVAPNESAGSMVNGMQNQDPVGQGYLAHQLLGDSMQHPGAGRPGQQMLGQISATSHINIYQGPESCLPGAHGMGSQPSSLAVVRGYQPCASFGGSRRQAMPRDSLALQSGQLSDTSQTCRVNGIKMEMKGQPHPLCSNLQNYSGQFYDQTVGFSQQDTKAGSFSISDASCLLQGTSAKNSELLSPGANQVTSTVDSLDSHDLEGVQIDFDAIIDDGDHSSLMSGALSPSIIQNLSHSSSRLTTPRASLPFPALSMSTTNMAIGDMSSLLTSLAEESKFLAVMQ

SEQ ID NO: 15046 - protein, 376 aa, Homo Sapiens
MAALGDIQESPSVPSPVSLSSPGTPGTQHHEPQLHLHGHQHGSPGSSPKVLSQPSDLDLQDVEEVEIGRDTFWPDSEPKPEQAPRSPGSQAPDEGAGGALRSLLRSLPRRARCSAGFGPESSAERPAGQPPGAVPCAQPRGAWRVTLVQQAAAGPEGAPERAAELGVNFGRSRQGSARGAKPHRCEACGKSFKYNSLLLKHQRIHTGEKPYACHECGKRFRGWSGFIQHHRIHTGEKPYECGQCGRAFSHSSHFTQHLRIHNGEKPYKCGECGQAFSQSSNLVRHQRLHTGEKPYACSQCGKAFIWSSVLIEHQRIHTGEKPYECSDCGKAFRGRSHFFRHLRTHTGEKPFACGACGKAFGQSSQLIQHQRVHYRE

SEQ ID NO: 15047 - protein, 620 aa, Homo Sapiens
MAEARTSLSAHCRGPLATGLHPDLDLPGRSLATPAPSCYLLGSEPSSGLGLQPETHLPEGSLKRCCVLGLPPTSPASSSPCASSDVTSIIRSSQTSLVTCVNGLRSPPLTGDLGGPSKRARPGPASTDSHEGSLQLEACRKASFLKQEPADEFSELFGPHQQGLPPPYPLSQLPPGPSLGGLGLGLAGRVVAGRQACRWVDCCAAYEQQEELVRHIEKSHIDQRKGEDFTCFWAGCVRRYKPFNARYKLLIHMRVHSGEKPNKCMFEGCSKAFSRLENLKIHLRSHTGEKPYLCQHPGCQKAFSNSSDRAKHQRTHLDTKPYACQIPGCSKRYTDPSSLRKHVKAHSAKEQQVRKKLHAGPDTEADVLTECLVLQQLHTSTQLAASDGKGGCGLGQELLPGVYPGSITPHNGLASGLLPPAHDVPSRHHPLDATTSSHHHLSPLPMAESTRDGLGPGLLSPIVSPLKGLGPPPLPPSSQSHSPGGQPFPTLPSKPSYPPFQSPPPPPLPSPQGYQGSFHSIQSCFPYGDCYRMAEPAAGGDGLVGETHGFNPLRPNGYHSLSTPLPATGYEALAEASCPTALPQQPSEDVVSSGPEDCGFFPNGAFDHCLGHIPSIYTDT

SEQ ID NO: 15048 - protein, 524 aa, Homo Sapiens
MHSLDEPLDLKLSITKLRAAREKRERTLGVVRPRALHRELGLVDDSPTPGSPGSPPSGFLLNSKFPEKVEGRFSAAPLVDLSLSPPSGLDSPNGSSSLSPERQGNGDLPPVPSASDFQPLRYLDGVPSSFQFFLPLGSGGALHLPASSFLTPPKDKCLSPDLPLPKQLVCRWAKCNQLFELLQDLVDHVNDYHVKPEKDAGYCCHWEGCARHGRGFNARYKMLIHIRTHTNEKPHRCPTCSKSFSRLENLKIHNRSHTGEKPYVCPYEGCNKRYSNSSDRFKHTRTHYVDKPYYCKMPGCHKRYTDPSSLRKHIKAHGHFVSHEQQELLQLRPPPKPPLPAPDGGPYVSGAQIIIPNPAALFGGPGLPGLPLPLAPGPLDLSALACGNGGGSGGGGGMGPGLPGPVLPLNLAKNPLLPSPFGAGGLGLPVVSLLAGAAGGKAEGEKGRGSVPTRALGMEGHKTPLERTESSCSRPSPDGLPLLPGTVLDLSTGVNSAASSPEALAPGWVVIPPGSVLLKPAVVN

SEQ ID NO: 15049 - protein, 775 aa, Homo Sapiens; identical to SEQ ID NO: 6017

SEQ ID NO: 15050 - protein, 573 aa, Homo Sapiens
MANAEVSVPVGDVVVVPTEGNEGENPEDTKTQVILQLQPVQQGLFIDGHFYNRIYEAGSENNTAVVAVETHTIHKIEEGIDTGTIEANEDMEIAYPITCGESKAILLWKKFVCPGINVKCVKFNDQLISPKHFVHLAGKSTLKDWKRAIRLGGIMLRKMMDSGQIDFYQHDKVCSNTCRSTKFDLLISSARAPVPGQQTSVVQTPTSADGSITQIAISEESMEEAGLEWNSALTAAVTMATEEGVKKDSEEISEDTLMFWKGIADVGLMEEVVCNIQKEIEELLRGVQQRLIQAPFQVTDAAVLNNVAHTFGLMDTVKKVLDNRRNQVEQGEEQFLYTLTDLERQLEEQKKQGQDHRLKSQTVQNVVLMPVSTPKPPKRPRLQRPASTTVLSPSPPVQQPQFTVISPITITPVGQSFSMGNIPVATLSQGSSPVTVHTLPSGPQLFRYATVVSSAKSSSPDTVTIHPSSSLALLSSTAMQDGSTLGNMTTMVSPVELVAMESGLTSAIQAVESTSEDGQTIIEIDPAPDPEAEDTEGKAVILETELRTEEKVVAEMEEHQHQVHNVEIVVLED

SEQ ID NO: 15051 - protein, 530 aa, Homo Sapiens
MATPDVSVHMEEVVVVTTPDTAVDGSGVEGVKTVLVTTNLAPHGGDLTEDNMETENAAAAAAAAFTASSQLKEAVLVKMAEEGENLEAEIVYPITCGDSRANLIWRKFVCPGINVKCVQYDEHVISPKEFVHLAGKSTLKDWKRAIRMNGIMLRKIMDSGELDFYQHDKVCSNTCRSTKIDLSGARVSLSSPTSAEYIPLTPAAADVNGSPATITIETCEDPGDWTAAIGDDTFTFWRGLKDAGLLDEVIQEFHQELVETMRGLQQRVQDPPLQLRDAVLLNNIVQNFGMLDLVKKVLASHKCQMDRSREQYARDLAALEQQCDEHRRRAKELKHKSQHLSNVLMTLTPVSLPPPVKRPRLARATSGPAAMASQVLTQSAQLALGPGVPVPQLTSVPLGKVVSTLPSTVLGKGSLQAPPASSPASPLLGGYTVLASSGSTYPSTVEIHPDASSLTVLSTAAVQDGSTVFKVVSPLQLLTLPGLGPTLQNVAQASPGSSTIVTVPAGAAPGPEEHTATIEVAAMAEDHERK

SEQ ID NO: 15052 - protein, 2241 aa, Homo Sapiens
MLPCKKRRTTVTESLQHKGNQEENNVDLESAVKPESDQVKDLSSVSLSWDPSHGRVAGFEVQSLQDAGNQLGMEDTSLSSGMLTQNTNVPILEGVDVAISQGITLPSLESFHPLNIHIGKGKLHATGSKRGKKMTLRPGPVTQEDRCDHLTLKEPFSGEPSEEVKEEGGKPQMNSEGEIPSLPSGSQSAKPVSQPRKSTQPDVCASPQEKPLRTLFHQPEEEIEDGGLFIPMEEQDNEESEKRRKKKKGTKRKRDGRGQEGTLAYDLKLDDMLDRTLEDGAKQHNLTAVNVRNILHEVITNEHVVAMMKAAISETEDMPMFEPKMTRSKLKEVVEKGVVIPTWNISPIKKANEIKPPQFVDIHLEEDDSSDEEYQPDDEEEDETAEESLLESDVESTASSPRGAKKSRLRQSSEMTETDEESGILSEAEKVTTPAIRHISAEVVPMGPPPPPKPKQTRDSTFMEKLHAVDEELASSPVCMDSFQPMDDSLIAFRTRSKMPLKDVPLGQLEAELQAPDITPDMYDPNTADDEDWKMWLGGLMNDDVGNEDEADDDDDPEYNFLEDLDEPDTEDFRTDRAVRITKKEVNELMEELFETFQDEMGFSNMEDDGPEEEECVAEPRPNFNTPQALRFEEPLANLLNEQHRTVKELFEQLKMKKSSAKQLQEVEKVKPQSEKVHQTLILDPAQRKRLQQQMQQHVQLLTQIHLLATCNPNLNPEATTTRIFLKELGTFAQSSIALHHQYNPKFQTLFQPCNLMGAMQLIEDFSTHVSIDCSPHKTVKKTANEFPCLPKQVAWILATSKVFMYPELLPVCSLKAKNPQDKIVFTKAEDNLLALGLKHFEGTEFPNPLISKYLLTCKTAHQLTVRIKNLNMNRAPDNIIKFYKKTKQLPVLGKCCEEIQPHQWKPPIEREEHRLPFWLKASLPSIQEELRHMADGAREVGNMTGTTEINSDRSLEKDNLELGSESRYPLLLPKGVVLKLKPVATRFPRKAWRQKRSSVLKPLLIQPSPSLQPSFNPGKTPARSTHSEAPPSKMVLRIPHPIQPATVLQTVPGVPPLGVSGGESFESPAALPAVPPEARTSFPLSESQTLLSSAPVPKVMLPSLAPSKFRKPYVRRRPSKRRGVKASPCMKPAPVIHHPASVIFTVPATTVKIVSLGGGCNMIQPVNAAVAQSPQTIPITTLLVNPTSFPCPLNQSLVASSVSPLIVSGNSVNLPIPSTPEDKAHVNVDIACAVADGENAFQGLEPKLEPQELSPLSATVFPKVEHSPGPPLADAECQEGLSENSACRWTVVKTEEGRQALEPLPQGIQESLNNPTPGDLEEIVKMEPEEAREEISGSPERDICDDIKVEHAVELDTGAPSEELSSAGEVTKQTVLQKEEERSQPTKTPSSSQEPPDEGTSGTDVNKGSSKNALSSMDPEVRLSSPPGKPEDSSSVDGQSVGTPVGPETGGEKNGPEEEEEEDFDDLTQDEEDEMSSASEESVLSVPELQETMEKLTWLASERRMSQEGESEEENSQEENSEPEEEEEEEAEGMESLQKEDEMTDEAVGDSAEKPPTFASPETAPEVETSRTPPGESIKAAGKGRNNHRARNKRGSRARASKDTSKLLLLYDEDILERDPLREQKDLAFAQAYLTRVREALQHIPGKYEDFLQVIYEFESSTQRRTAVDLYKSLQILLQDWPQLLKDFAAFLLPEQALACGLFEEQQAFEKSRKFLRQLEICFAENPSHHQKIIKVLQGCADCLPQEITELKTQMWQLLKGHDHLQDEFSIFFDHLRPAASRMGDFEEINWTEEKEYEFDGFEEVALPDVEEEEEPPKIPTASKNKRKKEIGVQNHDKETEWPDGAKDCACSCHEGGPDSKLKKSKRRSCSHCSSKVCDSKSYKSKEPHELVGSSPHREASPMPGAKEAGQGKDMMEEEAPEERESTEATQSRTVRTTRKGEMPVSAGLAVGSTLPSPREVTVTERLLLDGPPPHSPETPQFPPTTGAVLYTVKRNQVGPEVRSCPKASPRLQKEREGQKAVSESEALMLVWDASETEKLPGTVEPPASFLSPVSSKTRDAGRRHVSGKPDTQERWLPSSRARVKTRDRTCPVHESPSGIDTSETSPKAPRGGLAKDSGTQAKGPEGEQQPKAAEATVCANNSKVSSTGEKVVLWTREADRVILTMCQEQGAQPQTFNIISQQLGNKTPAEVSHRFRELMQLFHTACEASSEDEDDATSTSNADQLSDHGDLLSEEELDE

SEQ ID NO: 15053 - protein, 618 aa, Homo Sapiens
MTQEYDNKRPVLVLQNEALYPQRRSYTSEDEAWKSFLENPLTAATKAMMSINGDEDSAAALGLLYDYYKVPRERRSSTAKPEVEHPEPDHSKRNSIPIVTEQPLISAGENRVQVLKNVPFNIVLPHGNQLGIDKRGHLTAPDTTVTVSIATMPTHSIKTETQPHGFAVGIPPAVYHPEPTERVVVFDRNLNTDQFSSGAQAPNAQRRTPDSTFSETFKEGVQEVFFPSDLSLRMPGMNSEDYVFDSVSGNNFEYTLEASKSLRQKPGDSTMTYLNKGQFYPITLKEVSSSEGIHHPISKVRSVIMVVFAEDKSREDQLRHWKYWHSRQHTAKQRCIDIADYKESFNTISNIEEIAYNAISFTWDINDEAKVFISVNCLSTDFSSQKGVKGLPLNIQVDTYSYNNRSNKPVHRAYCQIKVFCDKGAERKIRDEERKQSKRKVSDVKVPLLPSHKRMDITVFKPFIDLDTQPVLFIPDVHFANLQRGTHVLPIASEELEGEGSVLKRGPYGTEDDFAVPPSTKLARIEEPKRVLLYVRKESEEVFDALMLKTPSLKGLMEAISDKYDVPHDKIGKIFKKCKKGILVNMDDNIVKHYSNEDTFQLQIEEAGGSYKLTLTEI

SEQ ID NO: 15054 - protein, 625 aa, Homo Sapiens
MSQESDNNKRLVALVPMPSDPPFNTRRAYTSEDEAWKSYLENPLTAATKAMMSINGDEDSAAALGLLYDYYKVPRDKRLLSVSKASDSQEDQEKRNCLGTSEAQSNLSGGENRVQVLKTVPVNLSLNQDHLENSKREQYSISFPESSAIIPVSGITVVKAEDFTPVFMAPPVHYPRGDGEEQRVVIFEQTQYDVPSLATHSAYLKDDQRSTPDSTYSESFKDAATEKFRSASVGAEEYMYDQTSSGTFQYTLEATKSLRQKQGEGPMTYLNKGQFYAITLSETGDNKCFRHPISKVRSVVMVVFSEDKNRDEQLKYWKYWHSRQHTAKQRVLDIADYKESFNTIGNIEEIAYNAVSFTWDVNEEAKIFITVNCLSTDFSSQKGVKGLPLMIQIDTYSYNNRSNKPIHRAYCQIKVFCDKGAERKIRDEERKQNRKKGKGQASQTQCNSSSDGKLAAIPLQKKSDITYFKTMPDLHSQPVLFIPDVHFANLQRTGQVYYNTDDEREGGSVLVKRMFRPMEEEFGPVPSKQMKEEGTKRVLLYVRKETDDVFDALMLKSPTVKGLMEAISEKYGLPVEKIAKLYKKSKKGILVNMDDNIIEHYSNEDTFILNMESMVEGFKVTLMEI

SEQ ID NO: 15055 - protein, 626 aa, Homo Sapiens; identical to SEQ ID NO: 6189

SEQ ID NO: 15056 - protein, 257 aa, Homo Sapiens
MPASMFSIDNILAARPRCKDSVLPVAHSAAAPVVFPALHGDSLYGASGGASSDYGAFYPRPVAPGGAGLPAAVSGSRLGYNNYFYGQLHVQAAPVGPACCGAVPPLGAQQCSCVPTPPGYEGPGSVLVSPVPHQMLPYMNVGTLSRTELQLLNQLHCRRKRRHRTIFTDEQLEALENLFQETKYPDVGTREQLARKVHLREEKVEVWFKNRRAKWRRQKRSSSEESENAEKWNKTSSSKASPEKREEEGKSDLDSDS

SEQ ID NO: 15057 - protein, 205 aa, Homo Sapiens
MAAAAGGAASRRGAGRPCPFSIEHILSSLPERSLPARAACPPQPAGRQSPAKPEEPGAPEAAPCACCCCCGPRAAPCGPPEAAAGLGARLAWPLRLGPAVPLSLGAPAGGSGALPGAVGPGSQRRTRRHRTIFSEEQLQALEALFVQNQYPDVSTRERLAGRIRLREERVEVWFKNRRAKWRHQKRASASARLLPGVKKSPKGSC

SEQ ID NO: 15058 - protein, 264 aa, Homo Sapiens
MPRSFLVDSLVLREAGEKKAPEGSPPPLFPYAVPPPHALHGLSPGACHARKAGLLCVCPLCVTASQLHGPPGPPALPLLKASFPPFGSQYCHAPLGRQHSAVSPGVAHGPAAAAAAAALYQTSYPLPDPRQFHCISVDSSSNQLPSSKRMRTAFTSTQLLELEREFASNMYLSRLRRIEIATYLNLSEKQVKIWFQNRRVKHKKEGKGSNHRGGGGGGAGGGGSAPQGCKCASLSSAKCSEDDDELPMSPSSSGKDDRDLTVTP

SEQ ID NO: 15059 - protein, 304 aa, Homo Sapiens
MSRSFYVDSLIIKDTSRPAPSLPEPHPGPDFFIPLGMPPPLVMSVSGPGCPSRKSGAFCVCPLCVTSHLHSSRGSVGAGSGGAGAGVTGAGGSGVAGAAGALPLLKGQFSSAPGDAQFCPRVNHAHHHHHPPQHHHHHHQPQQPGSAAAAAAAAAAAAAAAALGHPQHHAPVCTATTYNVADPRRFHCLTMGGSDASQVPNGKRMRTAFTSTQLLELEREFSSNMYLSRLRRIEIATYLNLSEKQVKIWFQNRRVKHKKEGKGTQRNSHAGCKCVGSQVHYARSEDEDSLSPASANDDKEISPL

SEQ ID NO: 15060 - protein, 998 aa, Homo Sapiens
MAQVAMSTLPVEDEESSESRMVVTFLMSALESMCKELAKSKAEVACIAVYETDVFVVGTERGRAFVNTRKDFQKDFVKYCVEEEEKAAEMHKMKSTTQANRMSVDAVEIETLRKTVEDYFCFCYGKALGKSTVVPVPYEKMLRDQSAVVVQGLPEGVAFKHPENYDLATLKWILENKAGISFIIKRPFLEPKKHVGGRVMVTDADRSILSPGGSCGPIKVKTEPTEDSGISLEMAAVTVKEESEDPDYYQYNIQAGPSETDDVDEKQPLSKPLQGSHHSSEGNEGTEMEVPAEDSTQHVPSETSEDPEVEVTIEDDDYSPPSKRPKANELPQPPVPEPANAGKRKVREFNFEKWNARITDLRKQVEELFERKYAQAIKAKGPVTIPYPLFQSHVEDLYVEGLPEGIPFRRPSTYGIPRLERILLAKERIRFVIKKHELLNSTREDLQLDKPASGVKEEWYARITKLRKMVDQLFCKKFAEALGSTEAKAVPYQKFEAHPNDLYVEGLPENIPFRSPSWYGIPRLEKIIQVGNRIKFVIKRPELLTHSTTEVTQPRTNTPVKEDWNVRITKLRKQVEEIFNLKFAQALGLTEAVKVPYPVFESNPEFLYVEGLPEGIPFRSPTWFGIPRLERIVRGSNKIKFVVKKPELVISYLPPGMASKINTKALQSPKRPRSPGSNSKVPEIEVTVEGPNNNNPQTSAVRTPTQTNGSNVPFKPRGREFSFEAWNAKITDLKQKVENLFNEKCGEALGLKQAVKVPFALFESFPEDFYVEGLPEGVPFRRPSTFGIPRLEKILRNKAKIKFIIKKPEMFETAIKESTSSKSPPRKINSSPNVNTTASGVEDLNIIQVTIPDDDNERLSKVEKARQLREQVNDLFSRKFGEAIGMGFPVKVPYRKITINPGCVVVDGMPPGVSFKAPSYLEISSMRRILDSAEFIKFTVIRPFPGLVINNQLVDQSESEGPVIQESAEPSQLEVPATEEIKETDGSSQIKQEPDPTW

SEQ ID NO: 15061 - protein, 365 aa, Homo Sapiens
MDPPAVVAESVSSLTIADAFIAAGESSAPTPPRPALPRRFICSFPDCSANYSKAWKLDAHLCKHTGERPFVCDYEGCGKAFIRDYHLSRHILTHTGEKPFVCAANGCDQKFNTKSNLKKHFERKHENQQKQYICSFEDCKKTFKKHQQLKIHQCQHTNEPLFKCTQEGCGKHFASPSKLKRHAKAHEGYVCQKGCSFVAKTWTELLKHVRETHKEEILCEVCRKTFKRKDYLKQHMKTHAPERDVCRCPREGCGRTYTTVFNLQSHILSFHEESRPFVCEHAGCGKTFAMKQSLTRHAVVHDPDKKKMKLKVKKSREKRSLASHLSGYIPPKRKQGQGLSLCQNGESPNCVEDKMLSTVAVLTLG

SEQ ID NO: 15062 - protein, 711 aa, Homo Sapiens
MESGAVLLESKSSPFNLLHEMHELRLLGHLCDVTVSVEYQGVRKDFMAHKAVLAATSKFFKEVFLNEKSVDGTRTNVYLNEVQVADFASFLEFVYTAKVQVEEDRVQRMLEVAEKLKCLDLSETCFQLKKQMLESVLLELQNFSESQEVEVSSGSQVSAAPAPRASVATDGPHPSGLTDSLDYPGERASNGMSSDLPPKKSKDKLDKKKEVVKPPYPKIRRASGRLAGRKVFVEIPKKKYTRRLREQQKTAEGDVGDYRCPQDQSPDRVGTEMEQVSKNEGCQAGAELEELSKKAGPEEEEEEEEEDEEGEKKKSNFKCSICEKAFLYEKSFLKHSKHRHGVATEVVYRCDTCGQTFANRCNLKSHQRHVHSSERHFPCELCGKKFKRKKDVKRHVLQVHEGGGERHRCGQCGKGLSSKTALRLHERTHTGDRPYGCTECGARFSQPSALKTHMRIHTGEKPFVCDECGARFTQNHMLIYHKRCHTGERPFMCETCGKSFASKEYLKHHNRIHTGSKPFKCEVCFRTFAQRNSLYQHIKVHTGERPYCCDQCGKQFTQLNALQRHRRIHTGERPFMCNACGRTFTDKSTLRRHTSIHDKNTPWKSFLVIVDGSPKNDDGHKTEQPDEEYVSSKLSDKLLSFAENGHFHNLAAVQDTVPTMQENSSADTACKADDSVVSQDTLLATTISELSELTPQTDSMPTQLHSLSNME

SEQ ID NO: 15063 - protein, 215 aa, Homo Sapiens
MNLVGSYAHHHHHHHPHPAHPMLHEPFLFGPASRCHQERPYFQSWLLSPADAAPDFPAGGPPPAAAAAATAYGPDARPGQSPGRLEALGGRLGRRKGSGPKKERRRTESINSAFAELRECIPNVPADTKLSKIKTLRLATSYIAYLMDVLAKDAQSGDPEAFKAELKKADGGRESKRKRELQQHEGFPPALGPVEKRIKGRTGWPQQVWALELNQ

SEQ ID NO: 15064 - protein, 217 aa, Homo Sapiens
MSLVGGFPHHPVVHHEGYPFAAAAAAAAAAAASRCSHEENPYFHGWLIGHPEMSPPDYSMALSYSPEYASGAAGLDHSHYGGVPPGAGPPGLGGPRPVKRRGTANRKERRRTQSINSAFAELRECIPNVPADTKLSKIKTLRLATSYIAYLMDLLAKDDQNGEAEAFKAEIKKTDVKEEKRKKELNEILKSTVSSNDKKTKGRTGWPQHVWALELKQ

SEQ ID NO: 15065 - protein, 514 aa, Homo Sapiens
MVWEVKTNQMPNAVQKLLLVMDKRASGMNDSLELLQCNENLPSSPGYNSCDEHMELDDLPELQAVQSDPTQSGMYQLSSDVSHQEYPRSSWNQNTSDIPETTYRENEVDWLTELANIATSPQSPLMQCSFYNRSSPVHIIATSKSLHSYARPPPVSSSSKSEPAFPHHHWKEETPVRHERANSESESGIFCMSSLSDDDDLGWCNSWPSTVWHCFLKGTRLCFHKGSNKEWQDVEDFARAEGCDNEEDLQMGIHKGYGSDGLKLLSHEESVSFGESVLKLTFDPGTVEDGLLTVECKLDHPFYVKNKGWSSFYPSLTVVQHGIPCCEVHIGDVCLPPGHPDAINFDDSGVFDTFKSYDFTPMDSSAVYVLSSMARQRRASLSCGGPGGQDFARSGFSKNCGSPGSSQLSSNSLYAKAVKNHSSGTVSATSPNKCKRPMNAFMLFAKKYRVEYTQMYPGKDNRAISVILGDRWKKMKNEERRMYTLEAKALAEEQKRLNPDCWKRKRTNSGSQQH

SEQ ID NO: 15066 - protein, 184 aa, Homo Sapiens
MKALGAVLLALLLCGRPGRGQTQQEEEEEDEDHGPDDYDEEDEDEVEEEETNRLPGGRSRVLLRCYTCKSLPRDERCNLTQNCSHGQTCTTLIAHGNTESGLLTTHSTWCTDSCQPITKTVEGTQVTMTCCQSSLCNVPPWQSSRVQDPTGKGAGGPRGSSETVGAALLLNLLAGLGAMGARRP

SEQ ID NO: 15067 - protein, 690 aa, Homo Sapiens
MNLRSVFTVEQQRILQRYYENGMTNQSKNCFQLILQCAQETKLDFSVVRTWVGNKRRKMSSKNSESGTATTGTSLSAPDITVRNVVNIARPSSQQSSWTSANNDVIVTGIYSPASSSSRQGTNKHTDTQITEAHKIPIQKTATKNDTEFQLHIPVQRQVAHCKNASLLLGEKTIILSRQTSVLNAGNSVFNHAKKNYGNSSVQASEMTVPQKPSVCHRPCKIEPVGIQRSYKPEHTGPALHNLCGQKPTIRDPYCRTQNLEIREVFSLAVSDYPQRILGGNAPQKPSSAEGNCLSIAMETGDAEDEYAREEELASMRAQIPSYSRFYESGSSLRAENQSTTLPGPGRNMPNSQMVNIRDMSDNVLYQNRNYHLTPRTSLHTASSTMYSNTNPLRSNFSPHFASSNQLRLSQNQNNYQISGNLTVPWITGCSRKRALQDRTQFSDRDLATLKKYWDNGMTSLGSVCREKIEAVATELNVDCEIVRTWIGNRRRKYRLMGIEVPPPRGGPADFSEQPESGSLSALTPGEEAGPEVGEDNDRNDEVSICLSEGSSQEEPNEVVPNDARAHKEEDHHAVTTDNVKIEIIDDEESDMISNSEVEQVNSFLDYKNEEVKFIENELEIQKQKYFKLQTFVRSLILAMKADDKEQQQALLSDLPPELEEMDFNHASLEPDDTSFSVSSLSEKNVSESL

SEQ ID NO: 15068 - protein, 242 aa, Homo Sapiens
MSDKLKERKRTPVSHKVIEKRRRDRINRCLNELGKTVPMALAKQSSGKLEKAEILEMTVQYLRALHSADFPRGREKAELLAEFANYFHYGYHECMKNLVHYLTTVERMETKDTKYARILAFLQSKARLGAEPAFPPLGSLPEPDFSYQLHPAGPEFAGHSPGEAAVFPQGSGAGPFPWPPGAARSPALPYLPSAPVPLASPAQQHSPFLTPVQGLDRHYLNLIGHAHPNALNLHTPQHPPVL

SEQ ID NO: 15069 - protein, 268 aa, Homo Sapiens; identical to SEQ ID NO: 5534

SEQ ID NO: 15070 - protein, 280 aa, Homo Sapiens
MPADIMEKNSSSPVAATPASVNTTPDKPKTASEHRKSSKPIMEKRRRARINESLSQLKTLILDALKKDSSRHSKLEKADILEMTVKHLRNLQRAQMTAALSTDPSVLGKYRAGFSECMNEVTRFLSTCEGVNTEVRTRLLGHLANCMTQINAMTYPGQPHPALQAPPPPPPGPGGPQHAPFAPPPPLVPIPGGAAPPPGGAPCKLGSQAGEAAKVFGGFQVVPAPDGQFAFLIPNGAFAHSGPVIPVYTSNSGTSVGPNAVSPSSGPSLTADSMWRPWRN

SEQ ID NO: 15071 - protein, 173 aa, Homo Sapiens
MGLPRRAGDAAELRKSLKPLLEKRRRARINQSLSQLKGLILPLLGRENSNCSKLEKADVLEMTVRFLQELPASSWPTAAPLPCDSYREGYSACVARLARVLPACRVLEPAVSARLLEHLWRRAASATLDGGRAGDSSGPSAPAPAPASAPEPASAPVPSPPSPPCGPGLWRPW

SEQ ID NO: 15072 - protein, 186 aa, Homo Sapiens
MEKKRRARINVSLEQLKSLLEKHYSHQIRKRKLEKADILELSVKYMRSLQNSLQGLWPVPRGAEQPSGFRSCLPGVSQLLRRGDEVGSGLRCPLVPESAAGSTMDSAGLGQEAPALFRPCTPAVWAPAPAAGGPRSPPPLLLLPESLPGSSASVPPPQPASSRCAESPGLGLRVWRPWGSPGDDLN

SEQ ID NO: 15073 - protein, 221 aa, Homo Sapiens
MAADTPGKPSASPMAGAPASASRTPDKPRSAAEHRKSSKPVMEKRRRARINESLAQLKTLILDALRKESSRHSKLEKADILEMTVRHLRSLRRVQVTAALSADPAVLGKYRAGFHECLAEVNRFLAGCEGVPADVRSRLLGHLAACLRQLGPSRRPASLSPAAPAEAPAPEVYAGRPLLPSLGGPFPLLAPPLLPGLTRALPAAPRAGPQGPGGPWRPWLR

SEQ ID NO: 15074 - protein, 166 aa, Homo Sapiens
MAPSTVAVELLSPKEKNRLRKPVVEKMRRDRINSSIEQLKLLLEQEFARHQPNSKLEKADILEMAVSYLKHSKAFVAAAGPKSLHQDYSEGYSWCLQEAVQFLTLHAASDTQMKLLYHFQRPPAAPAAPAKEPKAPGAAPPPALSAKATAAAAAAHQPACGLWRPW

SEQ ID NO: 15075 - protein, 224 aa, Homo Sapiens
MAPPAAPGRDRVGREDEDGWETRGDRKARKPLVEKKRRARINESLQELRLLLAGAEVQAKLENAEVLELTVRRVQGVLRGRAREREQLQAEASERFAAGYIQCMHEVHTFVSTCQAIDATVAAELLNHLLESMPLREGSSFQDLLGDALAGPPRAPGRSGWPAGGAPGSPIPSPPGPGDDLCSDLEEAPEAELSQAPAEGPDLVPAALGSLTTAQIARSVWRPW

SEQ ID NO: 15076 - protein, 225 aa, Homo Sapiens
MVTRDRAENRDGPKMLKPLVEKRRRDRINRSLEELRLLLLERTRDQNLRNPKLEKAEILEFAVGYLRERSRVEPPGVPRSPVQDAEALASCYLSGFRECLLRLAAFAHDASPAARAQLFSALHGYLRPKPPRPKPVDPRPPAPRPSLDPAAPALGPALHQRPPVHQGHPSPRCAWSPSLCSPRAGDSGAPAPLTGLLPPPPPPHRQDGAPKAPLPPPPAFWRPWP

SEQ ID NO: 15077 - protein, 185 aa, Homo Sapiens
MSPSLQEGAQLGENKPSTCSFSIERILGLDQKKDCVPLMKPHRPWADTCSSSGKDGNLCLHVPNPPSGISFPSVVDHPMPEERASKYENYFSASERLSLKRELSWYRGRRPRTAFTQNQIEVLENVFRVNCYPGIDIREDLAQKLNLEEDRIQIWFQNRRAKLKRSHRESQFLMAKKNFNTNLLE

SEQ ID NO: 15078 - protein, 304 aa, Homo Sapiens
MKRAHPEYSSSDSELDETIEVEKESADENGNLSSALGSMSPTTSSQILARKRRRGIIEKRRRDRINNSLSELRRLVPSAFEKQGSAKLEKAEILQMTVDHLKMLHTAGGKGYFDAHALAMDYRSLGFRECLAEVARYLSIIEGLDASDPLRVRLVSHLNNYASQREAASGAHAGLGHIPWGTVFGHHPHIAHPLLLPQNGHGNAGTTASPTEPHHQGRLGSAHPEAPALRAPPSGSLGPVLPVVTSASKLSPPLLSSVASLSAFPFSFGSFHLLSPNALSPSAPTQAANLGKPYRPWGTEIGAF

SEQ ID NO: 15079 - protein, 337 aa, Homo Sapiens
MKRPCEETTSESDMDETIDVGSENNYSGQSTSSVIRLNSPTTTSQIMARKKRRGIIEKRRRDRINNSLSELRRLVPTAFEKQGSAKLEKAEILQMTVDHLKMLQATGGKGYFDAHALAMDFMSIGFRECLTEVARYLSSVEGLDSSDPLRVRLVSHLSTCATQREAAAMTSSMAHHHHPLHPHHWAAAFHHLPAALLQPNGLHASESTPCRLSTTSEVPPAHGSALLTATFAHADSALRMPSTGSVAPCVPPLSTSLLSLSATVHAAAAAATAAAHSFPLSFAGAFPMLPPNAAAAVAAATAISPPLSVSATSSPQQTSSGTNNKPYRPWGTEVGAF

SEQ ID NO: 15080 - protein, 328 aa, Homo Sapiens
MKRPKEPSGSDGESDGPIDVGQEGQLSQMARPLSTPSSSQMQARKKHRGIIEKRRRDRINSSLSELRRLVPTAFEKQGSSKLEKAEVLQMTVDHLKMLHATGGTGFFDARALAVDFRSIGFRECLTEVIRYLGVLEGPSSRADPVRIRLLSHLNSYAAEMEPSPTPTGPLAFPAWPWSFFHSCPGLPALSNQLAILGRVPSPVLPGVSSPAYPIPALRTAPLRRATGIILPARRNVLPSRGASSTRRARPLERPATPVPVAPSSRAARSSHIAPLLQSSSPTPPGPTGSAAYVAVPTPNSSSPGPAGRPAGAMLYHSWVSEITEIGAF

SEQ ID NO: 15081 - protein, 270 aa, Homo Sapiens
MQYPHPGPAAGAVGVPLYAPTPLLQPAHPTPFYIEDILGRGPAAPTPAPTLPSPNSSFTSLVSPYRTPVYEPTPIHPAFSHHSAAALAAAYGPGGFGGPLYPFPRTVNDYTHALLRHDPLGKPLLWSPFLQRPLHKRKGGQVRFSNDQTIELEKKFETQKYLSPPERKRLAKMLQLSERQVKTWFQNRRAKWRRLKQENPQSNKKEELESLDSSCDQRQDLPSEQNKGASLDSSQCSPSPASQEDLESEISEDSDQEVDIEGDKSYFNAG

SEQ ID NO: 15082 - protein, 733 aa, Homo Sapiens
MTFPEADILLKSGECAGQTMLDTMEAPGHSRQLLLQLNNQRTKGFLCDVIIVVQNALFRAHKNVLAASSAYLKSLVVHDNLLNLDHDMVSPAVFRLVLDFIYTGRLADGAEAAAAAAVAPGAEPSLGAVLAAASYLQIPDLVALCKKRLKRHGKYCHLRGGGGGGGGYAPYGRPGRGLRAATPVIQACYPSPVGPPPPPAAEPPSGPEAAVNTHCAELYASGPGPAAALCASERRCSPLCGLDLSKKSPPGSAAPERPLAERELPPRPDSPPSAGPAAYKEPPLALPSLPPLPFQKLEEAAPPSDPFRGGSGSPGPEPPGRPDGPSLLYRWMKHEPGLGSYGDELGRERGSPSERCEERGGDAAVSPGGPPLGLAPPPRYPGSLDGPGAGGDGDDYKSSSEETGSSEDPSPPGGHLEGYPCPHLAYGEPESFGDNLYVCIPCGKGFPSSEQLNAHVEAHVEEEEALYGRAEAAEVAAGAAGLGPPFGGGGDKVAGAPGGLGELLRPYRCASCDKSYKDPATLRQHEKTHWLTRPYPCTICGKKFTQRGTMTRHMRSHLGLKPFACDACGMRFTRQYRLTEHMRIHSGEKPYECQVCGGKFAQQRNLISHMKMHAVGGAAGAAGALAGLGGLPGVPGPDGKGKLDFPEGVFAVARLTAEQLSLKQQDKAAAAELLAQTTHFLHDPKVALESLYPLAKFTAELGLSPDKAAEVLSQGAHLAAGPDGRTIDRFSPT

SEQ ID NO: 15083 - protein, 615 aa, Homo Sapiens
MVSGPLALRWCAWAGRGDMGPDMELPSHSKQLLLQLNQQRTKGFLCDVIIMVENSIFRAHKNVLAASSIYFKSLVLHDNLINLDTDMVSSTVFQQILDFIYTGKLLPSDQPAEPNFSTLLTAASYLQLPELAALCRRKLKRAGKPFGSGRAGSTGMGRPPRSQRLSTASVIQARYQGLVDGRKGAHAPQELPQAKGSDDELFLGGSNQDSVQGLGRAVCPAGGEAGLGGCSSSTNGSSGGCEQELGLDLSKKSPPLPPATPGPHLTPDDAAQLSDSQHGSPPAASAPPVANSASYSELGGTPDEPMDLEGAEDNHLSLLEAPGGQPRKSLRHSTRKKEWGKKEPVAGSPFERREAGPKGPCPGEEGEGVGDRVPNGILASGAGPSGPYGEPPYPCKEEEENGKDASEDSAQSGSEGGSGHASAHYMYRQEGYETVSYGDNLYVCIPCAKGFPSSEQLNAHVETHTEEELFIKEEGAYETGSGGAEEEAEDLSAPSAAYTAEPRPFKCSVCEKTYKDPATLRQHEKTHWLTRPFPCNICGKMFTQRGTMTRHMRSHLGLKPFACDECGMRFTRQYRLTEHMRVHSGEKPYECQLCGGKFTQQRNLISHLRMHTSPS

SEQ ID NO: 15084 - protein, 826 aa, Homo Sapiens
MEGAGGANDKKKISSERRKEKSRDAARSRRSKESEVFYELAHQLPLPHNVSSHLDKASVMRLTISYLRVRKLLDAGDLDIEDDMKAQMNCFYLKALDGFVMVLTDDGDMIYISDNVNKYMGLTQFELTGHSVFDFTHPCDHEEMREMLTHRNGLVKKGKEQNTQRSFFLRMKCTLTSRGRTMNIKSATWKVLHCTGHIHVYDTNSNQPQCGYKKPPMTCLVLICEPIPHPSNIEIPLDSKTFLSRHSLDMKFSYCDERITELMGYEPEELLGRSIYEYYHALDSDHLTKTHHDMFTKGQVTTGQYRMLAKRGGYVWVETQATVIYNTKNSQPQCIVCVNYVVSGIIQHDLIFSLQQTECVLKPVESSDMKMTQLFTKVESEDTSSLFDKLKKEPDALTLLAPAAGDTIISLDFGSNDTETDDQQLEEVPLYNDVMLPSPNEKLQNINLAMSPLPTAETPKPLRSSADPALNQEVALKLEPNPESLELSFTMPQIQDQTPSPSDGSTRQSSPEPNSPSEYCFYVDSDMVNEFKLELVEKLFAEDTEAKNPFSTQDTDLDLEMLAPYIPMDDDFQLRSFDQLSPLESSSASPESASPQSTVTVFQQTQIQEPTANATTTTATTDELKTVTKDRMEDIKILIASPSPTHIHKETTSATSSPYRDTQSRTASPNRAGKGVIEQTEKSHPRSPNVLSVALSQRTTVPEEELNPKILALQNAQRKRKMEHDGSLFQAVGIGTLLQQPDDHAATTSLSWKRVKGCKSSEQNGMEQKTIILIPSDLACRLLGQSMDESGLPQLTSYDCEVNAPIQGSRNLLQGEELLRALDQVN

SEQ ID NO: 15085 - protein, 669 aa, Homo Sapiens
MALGLQRARSTTELRKEKSRDAARSRRSQETEVLYQLAHTLPFARGVSAHLDKASIMRLTISYLRMHRLCAAGEWNQVGAGGEPLDACYLKALEGFVMVLTAEGDMAYLSENVSKHLGLSQLELIGHSIFDFIHPCDQEELQDALTPQQTLSRRKVEAPTERCFSLRMKSTLTSRGRTLNLKAATWKVLNCSGHMRAYKPPAQTSPAGSPDSEPPLQCLVLICEAIPHPGSLEPPLGRGAFLSRHSLDMKFTYCDDRIAEVAGYSPDDLIGCSAYEYIHALDSDAVSKSIHTLLSKGQAVTGQYRFLARSGGYLWTQTQATVVSGGRGPQSESIVCVHFLISQVEETGVVLSLEQTEQHSRRPIQRGAPSQKDTPNPGDSLDTPGPRILAFLHPPSLSEAALAADPRRFCSPDLRRLLGPILDGASVAATPSTPLATRHPQSPLSADLPDELPVGTENVHRLFTSGKDTEAVETDLDIAQDADALDLEMLAPYISMDDDFQLNASEQLPRAYHRPLGAVPRPRARSFHGLSPPALEPSLLPRWGSDPRLSCSSPSRGDPSASSPMAGARKRTLAQSSEDEDEGVELLGVRPPKRSPSPEHENFLLFPLSLSFLLTGGPAPGSLQDPSTPLLNLNEPLGLGPSLLSPYSDEDTTQPGGPFQPRAGSAQAD

SEQ ID NO: 15086 - protein, 517 aa, Homo Sapiens
MPPPGKVPRKENLWLQCEWGSCSFVCSTMEKFFEHVTQHLQQHLHGSGEEEEEEEEDDPLEEEFSCLWQECGFCSLDSSADLIRHVYFHCYHTKLKQWGLQALQSQADLGPCILDFQSRNVIPDIPDHFLCLWEHCENSFDNPEWFYRHVEAHSLCCEYEAVGKDNPVVLCGWKGCTCTFKDRSKLREHLRSHTQEKVVACPTCGGMFANNTKFLDHIRRQTSLDQQHFQCSHCSKRFATERLLRDHMRNHVNHYKCPLCDMTCPLPSSLRNHMRFRHSEDRPFKCDCCDYSCKNLIDLQKHLDTHSEEPAYRCDFENCTFSARSLCSIKSHYRKVHEGDSEPRYKCHVCDKCFTRGNNLTVHLRKKHQFKWPSGHPRFRYKEHEDGYMRLQLVRYESVELTQQLLRQPQEGSGLGTSLNESSLQGIILETVPGEPGRKEEEEEGKGSEGTALSASQDNPSSVIHVVNQTNAQGQQEIVYYVLSEAPGEPPPAPEPPSGGIMEKLQGIAEEPEIQMV

SEQ ID NO: 15087 - protein, 2718 aa, Homo Sapiens
MPRTKQIHPRNLRDKIEEAQKELNGAEVSKKEILQAGVKGTSESLKGVKRKKIVAENHLKKIPKSPLRNPLQAKHKQNTEESSFAVLHSASESHKKQNYIPVKNGKQFTKQNGETPGIIAEASKSEESVSPKKPLFLQQPSELRRWRSEGADPAKFSDLDEQCDSSSLSSKTRTDNSECISSHCGTTSPSYTNTAFDVLLKAMEPELSTLSQKGSPCAIKTEKLRPNKTARSPPKLKNSSMDAPNQTSQELVAESQSSCTSYTVHMSAAQKNEQGAMQSASHLYHQHEHFVPKSNQHNQQLPGCSGFTGSLTNLQNQENAKLEQVYNIAVTSSVGLTSPSSRSQVTPQNQQMDSASPLSISPANSTQSPPMPIYNSTHVASVVNQSVEQMCNLLLKDQKPKKQGKYICEYCNRACAKPSVLLKHIRSHTGERPYPCVTCGFSFKTKSNLYKHKKSHAHTIKLGLVLQPDAGGLFLSHESPKALSIHSDVEDSGESEEEGATDERQHDLGAMELQPVHIIKRMSNAETLLKSSFTPSSPENVIGDFLLQDRSAESQAVTELPKVVVHHVTVSPLRTDSPKAMDPKPELSSAQKQKDLQVTNVQPLSANMSQGGVSRLETNENSHQKGDMNPLEGKQDSHVGTVHAQLQRQQATDYSQEQQGKLLSPRSLGSTDSGYFSRSESADQTVSPPTPFARRLPSTEQDSGRSNGPSAALVTTSTPSALPTGEKALLLPGQMRPPLATKTLEERISKLISDNEALVDDKQLDSVKPRRTSLSRRGSIDSPKSYIFKDSFQFDLKPVGRRTSSSSDIPKSPFTPTEKSKQVFLLSVPSLDCLPITRSNSMPTTGYSAVPANIIPPPHPLRGSQSFDDKIGTFYDDVFVSGPNAPVPQSGHPRTLVRQAAIEDSSANESHVLGTGQSLDESHQGCHAAGEAMSVRSKALAQGPHIEKKKSHQGRGTMFECETCRNRYRKLENFENHKKFYCSELHGPKTKVAMREPEHSPVPGGLQPQILHYRVAGSSGIWEQTPQIRKRRKMKSVGDDEELQQNESGTSPKSSEGLQFQNALGCNPSLPKHNVTIRSDQQHKNIQLQNSHIHLVARGPEQTMDPKLSTIMEQQISSAAQDKIELQRHGTGISVIQHTNSLSRPNSFDKPEPFERASPVSFQELNRTGKSGSLKVIGISQEESHPSRDGSHPHQLALSDALRGELQESSRKSPSERHVLGQPSRLVRQHNIQVPEILVTEEPDRDLEAQCHDQEKSEKFSWPQRSETLSKLPTEKLPPKKKRLRLAEIEHSSTESSFDSTLSRSLSRESSLSHTSSFSASLDIEDVSKTEASPKIDFLNKAEFLMIPAGLNTLNVPGCHREMRRTASEQINCTQTSMEVSDLRSKSFDCGSITPPQTTPLTELQPPSSPSRVGVTGHVPLLERRRGPLVRQISLNIAPDSHLSPVHPTSFQNTALPSVNAVPYQGPQLTSTSLAEFSANTLHSQTQVKDLQAETSNSSSTNVFPVQQLCDINLLNQIHAPPSHQSTQLSLQVSTQGSKPDKNSVLSGSSKSEDCFAPKYQLHCQVFTSGPSCSSNPVHSLPNQVISDPVGTDHCVTSATLPTKLIDSMSNSHPLLPPELRPLGSQVQKVPSSFMLPIRLQSSVPAYCFATLTSLPQILVTQDLPNQPICQTNHSVVPISEEQNSVPTLQKGHQNALPNPEKEFLCENVFSEMSQNSSLSESLPITQKISVGRLSPQQESSASSKRMLSPANSLDIAMEKHQKRAKDENGAVCATDVRPLEALSSRVNEASKQKKPILVRQVCTTEPLDGVMLEKDVFSQPEISNEAVNLTNVLPADNSSTGCSKFVVIEPISELQEFENIKSSTSLTLTVRSSPAPSENTHISPLKCTDNNQERKSPGVKNQGDKVNIQEQSQQPVTSLSLFNIKDTQQLAFPSLKTTTNFTWCYLLRQKSLHLPQKDQKTSAYTDWTVSASNPNPLGLPTKVALALLNSKQNTGKSLYCQAITTHSKSDLLVYSSKWKSSLSKRALGNQKSTVVEFSNKDASEINSEQDKENSLIKSEPRRIKIFDGGYKSNEEYVYVRGRGRGKYICEECGIRCKKPSMLKKHIRTHTDVRPYHCTYCNFSFKTKGNLTKHMKSKAHSKKCVDLGVSVGLIDEQDTEESDEKQRFSYERSGYDLEESDGPDEDDNENEDDDEDSQAESVLSATPSVTASPQHLPSRSSLQDPVSTDEDVRITDCFSGVHTDPMDVLPRALLTRMTVLSTAQSDYNRKTLSPGKARQRAARDENDTIPSVDTSRSPCHQMSVDYPESEEILRSSMAGKAVAITQSPSSVRLPPAAAEHSPQTAAGMPSVASPHPDPQEQKQQITLQPTPGLPSPHTHLFSHLPLHSQQQSRTPYNMVPVGGIHVVPAGLTYSTFVPLQAGPVQLTIPAVSVVHRTLGTHRNTVTEVSGTTNPAGVAELSSVVPCIPIGQIRVPGLQNLSTPGLQSLPSLSMETVNIVGLANTNMAPQVHPPGLALNAVGLQVLTANPSSQSSPAPQAHIPGLQILNIALPTLIPSVSQVAVDAQGAPEMPASQSKACETQPKQTSVASANQVSRTESPQGLPTVQRENAKKVLNPPAPAGDHARLDGLSKMDTEKAASANHVKPKPELTSIQGQPASTSQPLLKAHSEVFTKPSGQQTLSPDRQVPRPTALPRRQPTVHFSDVSSDDDEDRLVIAT

SEQ ID NO: 15088 - protein, 2446 aa, Homo Sapiens
MDTGDTALGQKATSRSGETDKASGRWRQEQSAVIKMSTFGSHEGQRQPQIEPEQIGNTASAQLFGSGKLASPSEVVQQVAEKQYPPHRPSPYSCQHSLSFPQHSLPQGVMHSTKPHQSLEGPPWLFPGPLPSVASEDLFPFPIHGHSGGYPRKKISSLNPAYSQYSQKSIEQAEEAHKKEHKPKKPGKYICPYCSRACAKPSVLKKHIRSHTGERPYPCIPCGFSFKTKSNLYKHRKSHAHAIKAGLVPFTESAVSKLDLEAGFIDVEAEIHSDGEQSTDTDEESSLFAEASDKMSPGPPIPLDIASRGGYHGSLEESLGGPMKVPILIIPKSGIPLPNESSQYIGPDMLPNPSLNTKADDSHTVKQKLALRLSEKKGQDSEPSLNLLSPHSKGSTDSGYFSRSESAEQQISPPNTNAKSYEEIIFGKYCRLSPRNALSVTTTSQERAAMGRKGIMEPLPHVNTRLDVKMFEDPVSQLIPSKGDVDPSQTSMLKSTKFNSESRQPQIIPSSIRNEGKLYPANFQGSNPVLLEAPVDSSPLIRSNSVPTSSATNLTIPPSLRGSHSFDERMTGSDDVFYPGTVGIPPQRMLRRQAAFELPSVQEGHVEVEHHGRMLKGISSSSLKEKKLSPGDRVGYDYDVCRKPYKKWEDSETPKQNYRDISCLSSLKHGGEYFMDPVVPLQGVPSMFGTTCENRKRRKEKSVGDEEDTPMICSSIVSTPVGIMASDYDPKLQMQEGVRSGFAMAGHENLSHGHTERFDPCRPQLQPGSPSLVSEESPSAIDSDKMSDLGGRKPPGNVISVIQHTNSLSRPNSFERSESAELVACTQDKAPSPSETCDSEISEAPVSPEWAPPGDGAESGGKPSPSQQVQQQSYHTQPRLVRQHNIQVPEIRVTEEPDKPEKEKEAQSKEPEKPVEEFQWPQRSETLSQLPAEKLPPKKKRLRLADMEHSSGESSFESTGTGLSRSPSQESNLSHSSSFSMSFEREETSKLSALPKQDEFGKHSEFLTVPAGSYSLSVPGHHHQKEMRRCSSEQMPCPHPAEVPEVRSKSFDYGNLSHAPVSGAAASTVSPSRERKKCFLVRQASFSGSPEISQGEVGMDQSVKQEQLEHLHAGLRSGWHHGPPAVLPPLQQEDPGKQVAGPCPPLSSGPLHLAQPQIMHMDSQESLRNPLIQPTSYMTSKHLPEQPHLFPHQETIPFSPIQNALFQFQYPTVCMVHLPAQQPPWWQAHFPHPFAQHPQKSYGKPSFQTEIHSSYPLEHVAEHTGKKPAEYAHTKEQTYPCYSGASGLHPKNLLPKFPSDQSSKSTETPSEQVLQEDFASANAGSLQSLPGTVVPVRIQTHVPSYGSVMYTSISQILGQNSPAIVICKVDENMTQRTLVTNAAMQGIGFNIAQVLGQHAGLEKYPIWKAPQTLPLGLESSIPLCLPSTSDSVATLGGSKRMLSPASSLELFMETKQQKRVKEEKMYGQIVEELSAVELTNSDIKKDLSRPQKPQLVRQGCASEPKDGLQSGSSSFSSLSPSSSQDYPSVSPSSREPFLPSKEMLSGSRAPLPGQKSSGPSESKESSDELDIDETASDMSMSPQSSSLPAGDGQLEEEGKGHKRPVGMLVRMASAPSGNVADSTLLLTDMADFQQILQFPSLRTTTTVSWCFLNYTKPNYVQQATFKSSVYASWCISSCNPNPSGLNTKTTLALLRSKQKITAEIYTLAAMHRPGTGKLTSSSAWKQFTQMKPDASFLFGSKLERKLVGNILKERGKGDIHGDKDIGSKQTEPIRIKIFEGGYKSNEDYVYVRGRGRGKYICEECGIRCKKPSMLKKHIRTHTDVRPYVCKLCNFAFKTKGNLTKHMKSKAHMKKCLELGVSMTSVDDTETEEAENLEDLHKAAEKHSMSSISTDHQFSDAEESDGEDGDDNDDDDEDEDDFDDQGDLTPKTRSRSTSPQPPRFSSLPVNVGAVPHGVPSDSSLGHSSLISYLVTLPSIRVTQLMTPSDSCEDTQMTEYQRLFQSKSTDSEPDKDRLDIPSCMDEECMLPSEPSSSPRDFSPSSHHSSPGYDSSPCRDNSPKRYLIPKGDLSPRRHLSPRRDLSPMRHLSPRKEAALRREMSQRDVSPRRHLSPRRPVSPGKDITARRDLSPRRERRYMTTIRAPSPRRALYHNPPLSMGQYLQAEPIVLGPPNLRRGLPQVPYFSLYGDQEGAYEHPGSSLFPEGPNDYVFSHLPLHSQQQVRAPIPMVPVGGIQMVHSMPPALSSLHPSPTLPLPMEGFEEKKGASGESFSKDPYVLSKQHEKRGPHALQSSGPPSTPSSPRLLMKQSTSEDSLNATEREQEENIQTCTKAIASLRIATEEAALLGPDQPARVQEPHQNPLGSAHVSIRHFSRPEPGQPCTSATHPDLHDGEKDNFGTSQTPLAHSTFYSKSCVDDKQLDFHSSKELSSSTEESKDPSSEKSQLH

SEQ ID NO: 15089 - protein, 2406 aa, Homo Sapiens
MDPEQSVKGTKKAEGSPRKRLTKGEAIQTSVSSSVPYPGSGTAATQESPAQELLAPQPFPGPSSVLREGSQEKTGQQQKPPKRPPIEASVHISQLPQHPLTPAFMSPGKPEHLLEGSTWQLVDPMRPGPSGSFVAPGLHPQSQLLPSHASIIPPEDLPGVPKVFVPRPSQVSLKPTEEAHKKERKPQKPGKYICQYCSRPCAKPSVLQKHIRSHTGERPYPCGPCGFSFKTKSNLYKHRKSHAHRIKAGLASGMGGEMYPHGLEMERIPGEEFEEPTEGESTDSEEETSATSGHPAELSPRPKQPLLSSGLYSSGSHSSSHERCSLSQSSTAQSLEDPPPFVEPSSEHPLSHKPEDTHTIKQKLALRLSERKKVIDEQAFLSPGSKGSTESGYFSRSESAEQQVSPPNTNAKSYAEIIFGKCGRIGQRTAMLTATSTQPLLPLSTEDKPSLVPLSVPRTQVIEHITKLITINEAVVDTSEIDSVKPRRSSLSRRSSMESPKSSLYREPLSSHSEKTKPEQSLLSLQHPPSTAPPVPLLRSHSMPSAACTISTPHHPFRGSYSFDDHITDSEALSHSSHVFTSHPRMLKRQPAIELPLGGEYSSEEPGPSSKDTASKPSDEVEPKESELTKKTKKGLKTKGVIYECNICGARYKKRDNYEAHKKYYCSELQIAKPISAGTHTSPEAEKSQIEHEPWSQMMHYKLGTTLELTPLRKRRKEKSLGDEEEPPAFESTKSQFGSPGPSDAARNLPLESTKSPAEPSKSVPSLEGPTGFQPRTPKPGSGSESGKERRTTSKEISVIQHTSSFEKSDSLEQPSGLEGEDKPLAQFPSPPPAPHGRSAHSLQPKLVRQPNIQVPEILVTEEPDRPDTEPEPPPKEPEKTEEFQWPQRSQTLAQLPAEKLPPKKKRLRLAEMAQSSGESSFESSVPLSRSPSQESNVSLSGSSRSASFERDDHGKAEAPSPSSDMRPKPLGTHMLTVPSHHPHAREMRRSASEQSPNVSHSAHMTETRSKSFDYGSLSLTGPSAPAPVAPPARVAPPERRKCFLVRQASLSRPPESELEVAPKGRQESEEPQPSSSKPSAKSSLSQISSAATSHGGPPGGKGPGQDRPPLGPTVPYTEALQVFHHPVAQTPLHEKPYLPPPVSLFSFQHLVQHEPGQSPEFFSTQAMSSLLSSPYSMPPLPPSLFQAPPLPLQPTVLHPGQLHLPQLMPHPANIPFRQPPSFLPMPYPTSSALSSGFFLPLQSQFALQLPGDVESHLPQIKTSLAPLATGSAGLSPSTEYSSDIRLPPVAPPASSSAPTSAPPLALPACPDTMVSLVVPVRVQTNMPSYGSAMYTTLSQILVTQSQGSSATVALPKFEEPPSKGTTVCGADVHEVGPGPSGLSEEQSRAFPTPYLRVPVTLPERKGTSLSSESILSLEGSSSTAGGSKRVLSPAGSLELTMETQQQKRVKEEEASKADEKLELVKPCSVVLTSTEDGKRPEKSHLGNQGQGRRELEMLSSLSSDPSDTKEIPPLPHPALSHGTAPGSEALKEYPQPSGKPHRRGLTPLSVKKEDSKEQPDLPSLAPPSSLPLSETSSRPAKSQEGTDSKKVLQFPSLHTTTNVSWCYLNYIKPNHIQHADRRSSVYAGWCISLYNPNLPGVSTKAALSLLRSKQKVSKETYTMATAPHPEAGRLVPSSSRKPRMTEVHLPSLVSPEGQKDLARVEKEEERRGEPEEDAPASQRGEPARIKIFEGGYKSNEEYVYVRGRGRGKYVCEECGIRCKKPSMLKKHIRTHTDVRPYVCKHCHFAFKTKGNLTKHMKSKAHSKKCQETGVLEELEAEEGTSDDLFQDSEGREGSEAVEEHQFSDLEDSDSDSDLDEDEDEDEEESQDELSRPSSEAPPPGPPHALRADSSPILGPQPPDAPASGTEATRGSSVSEAERLTASSCSMSSQSMPGLPWLGPAPLGSVEKDTGSALSYKPVSPRRPWSPSKEAGSRPPLARKHSLTKNDSSPQRCSPAREPQASAPSPPGLHVDPGRGMGALPCGSPRLQLSPLTLCPLGRELAPRAHVLSKLEGTTDPGLPRYSPTRRWSPGQAESPPRSAPPGKWALAGPGSPSAGEHGPGLGLDPRVLFPPAPLPHKLLSRSPETCASPWQKAESRSPSCSPGPAHPLSSRPFSALHDFHGHILARTEENIFSHLPLHSQHLTRAPCPLIPIGGIQMVQARPGAHPTLLPGPTAAWVSGFSGGGSDLTGAREAQERGRWSPTESSSASVSPVAKVSKFTLSSELEGGDYPKERERTGGGPGRPPDWTPHGTGAPAEPTPTHSPCTPPDTLPRPPQGRRAAQSWSPRLESPRAPTNPEPSATPPLDRSSSVGCLAEASARFPARTRNLSGEPRTRQDSPKPSGSGEPRAHPHQPEDRVPPNA

SEQ ID NO: 15090 - protein, 659 aa, Homo Sapiens
MRVNHTVSTMLPTCMVHRQTMSCSGAGGITAFVAFRDVAVYFTQEEWRLLSPAQRTLHREVMLETYNHLVSLEIPSSKPKLIAQLERGEAPWREERKCPLDLCPESKPEIQLSPSCPLIFSSQQALSQHVWLSHLSQLFSSLWAGNPLHLGKHYPEDQKQQQDPFCFSGKAEWIQEGEDSRLLFGRVSKNGTSKALSSPPEEQQPAQSKEDNTVVDIGSSPERRADLEETDKVLHGLEVSGFGEIKYEEFGPGFIKESNLLSLQKTQTGETPYMYTEWGDSFGSMSVLIKNPRTHSGGKPYVCRECGRGFTWKSNLITHQRTHSGEKPYVCKDCGRGFTWKSNLFTHQRTHSGLKPYVCKECGQSFSLKSNLITHQRAHTGEKPYVCRECGRGFRQHSHLVRHKRTHSGEKPYICRECEQGFSQKSHLIRHLRTHTGEKPYVCTECGRHFSWKSNLKTHQRTHSGVKPYVCLECGQCFSLKSNLNKHQRSHTGEKPFVCTECGRGFTRKSTLSTHQRTHSGEKPFVCAECGRGFNDKSTLISHQRTHSGEKPFMCRECGRRFRQKPNLFRHKRAHSGAFVCRECGQGFCAKLTLIKHQRAHAGGKPHVCRECGQGFSRQSHLIRHQRTHSGEKPYICRKCGRGFSRKSNLIRHQRTHSG

SEQ ID NO: 15091 - protein, 295 aa, Homo Sapiens
MEKMSRPLPLNPTFIPPPYGVLRSLLENPLKLPLHHEDAFSKDKDKEKKLDDESNSPTVPQSAFLGPTLWDKTLPYDGDTFQLEYMDLEEFLSENGIPPSPSQHDHSPHPPGLQPASSAAPSVMDLSSRASAPLHPGIPSPNCMQSPIRPGQLLPANRNTPSPIDPDTIQVPVGYEPDPADLALSSIPGQEMFDPRKRKFSEEELKPQPMIKKARKVFIPDDLKDDKYWARRRKNNMAAKRSRDARRLKENQIAIRASFLEKENSALRQEVADLRKELGKCKNILAKYEARHGPL

SEQ ID NO: 15092 - protein, 1009 aa, Homo Sapiens
MSWMFKRDPVWKYLQTVQYGVHGNFPRLSYPTFFPRFEFQDVIPPDDFLTSDEEVDSVLFGSLRGHVVGLRYYTGVVNNNEMVALQRDPNNPYDKNAIKVNNVNGNQVGHLKKELAGALAYIMDNKLAQIEGVVPFGANNAFTMPLHMTFWGKEENRKAVSDQLKKHGFKLGPAPKTLGFNLESGWGSGRAGPSYSMPVHAAVQMTTEQLKTEFDKLFEDLKEDDKTHEMEPAEAIETPLLPHQKQALAWMVSRENSKELPPFWEQRNDLYYNTITNFSEKDRPENVHGGILADDMGLGKTLTAIAVILTNFHDGRPLPIERVKKNLLKKEYNVNDDSMKLGGNNTSEKADGLSKDASRCSEQPSISDIKEKSKFRMSELSSSRPKRRKTAVQYIESSDSEEIETSELPQKMKGKLKNVQSETKGRAKAGSSKVIEDVAFACALTSSVPTTKKKMLKKGACAVEGSKKTDVEERPRTTLIICPLSVLSNWIDQFGQHIKSDVHLNFYVYYGPDRIREPALLSKQDIVLTTYNILTHDYGTKGDSPLHSIRWLRVILDEGHAIRNPNAQQTKAVLDLESERRWVLTGTPIQNSLKDLWSLLSFLKLKPFIDREWWHRTIQRPVTMGDEGGLRRLQSLIKNITLRRTKTSKIKGKPVLELPERKVFIQHITLSDEERKIYQSVKNEGRATIGRYFNEGTVLAHYADVLGLLLRLRQICCHTYLLTNAVSSNGPSGNDTPEELRKKLIRKMKLILSSGSDEECAICLDSLTVPVITHCAHVFCKPCICQVIQNEQPHAKCPLCRNDIHEDNLLECPPEELARDSEKKSDMEWTSSSKINALMHALTDLRKKNPNIKSLVVSQFTTFLSLIEIPLKASGFVFTRLDGSMAQKKRVESIQCFQNTEAGSPTIMLLSLKAGGVGLNLSAASRVFLMDPAWNPAAEDQCFDRCHRLGQKQEVIITKFIVKDSVEENMLKIQNKKRELAAGAFGTKKPNADEMKQAKINEIRTLIDL

SEQ ID NO: 15093 - protein, 488 aa, Homo Sapiens
MFAAGLAPFYASNFSLWSAAYCSSAGPGGCSFPLDPAAVKKPSFCIADILHAGVGDLGAAPEGLAGASAAALTAHLGSVHPHASFQAAARSPLRPTPVVAPSEVPAGFPQRLSPLSAAYHHHHPQQQQQQQQPQQQQPPPPPRAGALQPPASGTRVVPNPHHSGSAPAPSSKDLKFGIDRILSAEFDPKVKEGNTLRDLTSLLTGGRPAGVHLSGLQPSAGQFFASLDPINEASAILSPLNSNPRNSVQHQFQDTFPGPYAVLTKDTMPQTYKRKRSWSRAVFSNLQRKGLEKRFEIQKYVTKPDRKQLAAMLGLTDAQVKVWFQNRRMKWRHSKEAQAQKDKDKEAGEKPSGGAPAADGEQDERSPSRSEGEAESESSDSESLDMAPSDTERTEGSERSLHQTTVIKAPVTGALITASSAGSGGSSGGGGNSFSFSSASSLSSSSTSAGCASSLGGGGASELLPATQPTASSAPKSPEPAQGALGCL

SEQ ID NO: 15094 - protein, 420 aa, Homo Sapiens
MLSSFPVVLLETMSHYTDEPRFTIEQIDLLQRLRRTGMTKHEILHALETLDRLDQEHSDKFGRRSSYGGSSYGNSTNNVPASSSTATASTQTQHSGMSPSPSNSYDTSPQPCTTNQNGRENNERLSTSNGKMSPTRYHANSMGQRSYSFEASEEDLDVDDKVEELMRRDSSVIKEEIKAFLANRRISQAVVAQVTGISQSRISHWLLQQGSDLSEQKKRAFYRWYQLEKTNPGATLSMRPAPIPIEDPEWRQTPPPVSATSGTFRLRRGSRFTWRKECLAVMESYFNENQYPDEAKREEIANACNAVIQKPGKKLSDLERVTSLKVYNWFANRRKEIKRRANIEAAILESHGIDVQSPGGHSNSDDVDGNDYSEQDDSTSHSDHQDPISLAVEMAAVNHTILALARQGANEIKTEALDDD

SEQ ID NO: 15095 - protein, 347 aa, Homo Sapiens
MENLMTSSTLPPLFADEDGSKESNDLATTGLNHPEVPYSSGATSSTNNPEFVEDLSQGQLLQSESSNAAEGNEQRHEDEQRSKRGGWSKGRKRKKPLRDSNAPKSPLTGYVRFMNERREQLRAKRPEVPFPEITRMLGNEWSKLPPEEKQRYLDEADRDKERYMKELEQYQKTEAYKVFSRKTQDRQKGKSHRQDAARQATHDHEKETEVKERSVFDIPIFTEEFLNHSKAREAELRQLRKSNMEFEERNAALQKHVESMRTAVEKLEVDVIQERSRNTVLQQHLETLRQVLTSSFASMPLPGSGETPTVDTIDSYMNRLHSIILANPQDNENFIATVREVVNRLDR

SEQ ID NO: 15096 - protein, 317 aa, Homo Sapiens
MSHGPKQPGAAAAPAGGKAPGQHGGFVVTVKQERGEGPRAGEKGSHEEEPVKKRGWPKGKKRKKILPNGPKAPVTGYVRFLNERREQIRTRHPDLPFPEITKMLGAEWSKLQPTEKQRYLDEAEREKQQYMKELRAYQQSEAYKMCTEKIQEKKIKKEDSSSGLMNTLLNGHKGGDCDGFSTFDVPIFTEEFLDQNKAREAELRRLRKMNVAFEEQNAVLQRHTQSMSSARERLEQELALEERRTLALQQQLQAVRQALTASFASLPVPGTGETPTLGTLDFYMARLHGAIERDPAQHEKLIVRIKEILAQVASEHL

SEQ ID NO: 15097 - protein, 107 aa, Homo Sapiens
MSESSSKSSQPLASKQEKDGTEKRGRGRPRKQPPVSPGTALVGSQKEPSEVPTPKRPRGRPKGSKNKGAAKTRKTTTTPGRKPRGRPKKLEKEEEEGISQESSEEEQ

SEQ ID NO: 15098 - protein, 109 aa, Homo Sapiens
MSARGEGAGQPSTSAQGQPAAPAPQKRGRGRPRKQQQEPTGEPSPKRPRGRPKGSKNKSPSKAAQKKAEATGEKRPRGRPRKWPQQVVQKKPAQEETEETSSQESAEED

SEQ ID NO: 15099 - protein, 1538 aa, Homo Sapiens
MQRTQPRPCYLNAPQQCPGAERPGRPTAGSHSFLLRPGPLAGSSPFALLDPLQAFEQFVWVRSQARAGLLRLRQGSHAVTRCRPLPVRREGRRDGSPWRSVVCRYCRCSRQTGASVTTVSLPSSSSSPGLDPRGPRQASVRSLRSEPVLLFLPFRTPYRDSEEGKREGLSRLRAVCRRAGPRGRGSFSPRDARASPRLHFLVAAVTTGAASRRQRGARVRQPSPSSSRRAKRLRECERRSLHAPPAMDASYDGTEVTVVMEEIEEAYCYTSPGPPKKKKKYKIHGEKTKKPRSAYLLYYYDIYLKVQQELPHLPQSEINKKISESWRLLSVAERSYYLEKAKLEKEGLDPNSKLSALTAVVPDIPGFRKILPRSDYIIIPKSSLQEDRSCPQLELCVAQNQMSPKGPPLVSNTAPETVPSHAGMAEQCLAVEALAEEVGALTQSGAVQEIATSEILSQDVLLEDASLEVGESHQPYQTSLVIEETLVNGSPDLPTGSLAVPHPQVGESVSVVTVMRDSSESSSSAPATQFIMLPLPAYSVVENPTSIKLTTTYTRRGHGTCTSPGCSFTYVTRHKPPKCPTCGNFLGGKWIPKEKPAKVKVELASGVSSKGSVVKRNQQPVTTEQNSSKENASKLTLENSEAVSQLLNVAPPREVGEESEWEEVIISDAHVLVKEAPGNCGTAVTKTPVVKSGVQPEVTLGTTDNDSPGADVPTPSEGTSTSSPLPAPKKPTGADLLTPGSRAPELKGRARGKPSLLAAARPMRAILPAPVNVGRGSSMGLPRARQAFSLSDKTPSVRTCGLKPSTLKQLGQPIQQPSGPGEVKLPSGPSNRTSQVKVVEVKPDMFPPYKYSCTVTLDLGLATSRGRGKCKNPSCSYVYTNRHKPRICPSCGVNLAKDRTEKTTKAIEVSSPLPDVLNATEPLSTAQREIQRQSTLQLLRKVLQIPENESELAEVFALIHELNSSRLILSNVSEETVTIEQTSWSNYYESPSTQCLLCSSPLFKGGQNSLAGPQECWLLTASRLQTVTAQVKMCLNPHCLALHSFIDIYTGLFNVGNKLLVSLDLLFAIRNQIKLGEDPRVSINVVLKSVQEQTEKTLTSEELSQLQELLCNGYWAFECLTVRDYNDMICGICGVAPKVEMAQRSEENVLALKSVEFTWPEFLGSNEVNVEDFWATMETEVIEQVAFPASIPITKFDASVIAPFFPPLMRGAVVVNTEKDKNLDVQPVPGSGSALVRLLQEGTCKLDEIGSYSEEKLQHLLRQCGIPFGAEDSKDQLCFSLLALYESVQNGARAIRPPRHFTGGKIYKVCPHQVVCGSKYLVRGESARDHVDLLASSRHWPPVYVVDMATSVALCADLCYPELTNQMWGRNQGCFSSPTEPPVSVSCPELLDQHYTVDMTETEHSIQHPVTKTATRRIVHAGLQPNPGDPSAGHHSLALCPELAPYATILASIVDSKPNGVRQRPIAFDNATHYYLYNRLMDFLTSREIVNRQIHDIVQSCQPGEVVIRDTLYRLGVAQIKTETEEEGEEEEVAAVAE

SEQ ID NO: 15100 - protein, 601 aa, Homo Sapiens
MAYDDSVKKEDCFDGDHTFEDIGLAAGRSQREKKRSYKDFLREEEEIAAQVRNSSKKKLKDSELYFLGTDTHKKKRKHSSDDYYYGDISSLESSQKKKKKSSPQSTDTAMDLLKAITSPLAAGSKPSKKTGEKSSGSSSHSESKKEHHRKKVSGSSGELPLEDGGSHKSKKMKPLYVNTETLTLREPDGLKMKLILSPKEKGSSSVDEESFQYPSQQATVKKSSKKSARDEQGALLLGHELQSFLKTARKKHKSSSDAHSSPGPEGCGSDASQFAESHSANLDLSGLEPILVESDSSSGGELEAGELVIDDSYREIKKKKKSKKSKKKKDKEKHKEKRHSKSKRSLGLSAVPVGEVTVTSGPPPSIPYAGAAAPPLPLPGLHTDGHSEKKKKKEEKDKERERGEKPKKKNMSAYQVFCKEYRVTIVADHPGIDFGELSKKLAEVWKQLPEKDKLIWKQKAQYLQHKQNKAEATTVKRKASSSEGSMKVKASSVGVLSPQKKSPPTTMLLPASPAKAPETEPIDVAAHLQLLGESLSLIGHRLQETEGMVAVSGSLSVLLDSIICALGPLACLTTQLPELNGCPKQVLSNTLDNIAYIMPGL

SEQ ID NO: 15101 - protein, 348 aa, Homo Sapiens
MPDELTEPGRATPARASSFLIENLLAAEAKGAGRATQGDGSREDEEEDDDDPEDEDAEQARRRRLQRRRQLLAGTGPGGEARARALLGPGALGLGPRPPPGPGPPFALGCGGAARWYPRAHGGYGGGLSPDTSDRDSPETGEEMGRAEGAWPRGPGPGAVQREAAELAARGPAAGTEEASELAEVPAAAGETRGGVGVGGGRKKKTRTVFSRSQVFQLESTFDLKRYLSSAERAGLAASLQLTETQVKIWFQNRRNKWKRQLAAELEAASLSPPGAQRLVRVPVLYHESPPAAAAAGPPATLPFPLAPAAPAPPPPLLGFSGALAYPLAAFPAAASVPFLRAQMPGLV

SEQ ID NO: 15102 - protein, 273 aa, Homo Sapiens
MGSKEDAGKGCPAAGGVSSFTIQSILGGGPSEAPREPVGWPARKRSLSVSSEEEEPDDGWKAPACFCPDQHGPKEQGPKHHPPIPFPCLGTPKGSGGSGPGGLERTPFLSPSHSDFKEEKERLLPAGSPSPGSERPRDGGAERQAGAAKKKTRTVFSRSQVYQLESTFDMKRYLSSSERACLASSLQLTETQVKTWFQNRRNKWKRQLSAELEAANMAHASAQTLVSMPLVFRDSSLLRVPVPRSLAFPAPLYYPGSNLSALPLYNLYNKLDY

SEQ ID NO: 15103 - protein, 357 aa, Homo Sapiens
MPEPGPDAAGTASAQPQPPPPPPPAPKESPFSIKNLLNGDHHRPPPKPQPPPRTLFAPASAAAAAAAAAAAAAKGALEGAAGFALSQVGDLAFPRFEIPAQRFALPAHYLERSPAWWYPYTLTPAGGHLPRPEASEKALLRDSSPASGTDRDSPEPLLKADPDHKELDSKSPDEIILEESDSEESKKEGEAAPGAAGASVGAAAATPGAEDWKKGAESPEKKPACRKKKTRTVFSRSQVFQLESTFDMKRYLSSSERAGLAASLHLTETQVKIWFQNRRNKWKRQLAAELEAANLSHAAAQRIVRVPILYHENSAAEGAAAAAAGAPVPVSQPLLTFPHPVYYSHPVVSSVPLLRPV

SEQ ID NO: 15104 - protein, 1130 aa, Homo Sapiens
MAAAVLSGPSAGSAAGVPGGTGGLSAVSSGPRLRLLLLESVSGLLQPRTGSAVAPVHPPNRSAPHLPGLMCLLRLHGSVGGAQNLSALGALVSLSNARLSSIKTRFEGLCLLSLLVGESPTELFQQHCVSWLRSIQQVLQTQDPPATMELAVAVLRDLLRYAAQLPALFRDISMNHLPGLLTSLLGLRPECEQSALEGMKACMTYFPRACGSLKGKLASFFLSRVDALSPQLQQLACECYSRLPSLGAGFSQGLKHTESWEQELHSLLASLHTLLGALYEGAETAPVQNEGPGVEMLLSSEDGDAHVLLQLRQRFSGLARCLGLMLSSEFGAPVSVPVQEILDFICRTLSVSSKNISLHGDGPLRLLLLPSIHLEALDLLSALILACGSRLLRFGILIGRLLPQVLNSWSIGRDSLSPGQERPYSTVRTKVYAILELWVQVCGASAGMLQGGASGEALLTHLLSDISPPADALKLRSPRGSPDGSLQTGKPSAPKKLKLDVGEAMAPPSHRKGDSNANSDVCAAALRGLSRTILMCGPLIKEETHRRLHDLVLPLVMGVQQGEVLGSSPYTSSRCRRELYCLLLALLLAPSPRCPPPLACALQAFSLGQREDSLEVSSFCSEALVTCAALTHPRVPPLQPMGPTCPTPAPVPPPEAPSPFRAPPFHPPGPMPSVGSMPSAGPMPSAGPMPSAGPVPSARPGPPTTANHLGLSVPGLVSVPPRLLPGPENHRAGSNEDPILAPSGTPPPTIPPDETFGGRVPRPAFVHYDKEEASDVEISLESDSDDSVVIVPEGLPPLPPPPPSGATPPPIAPTGPPTASPPVPAKEEPEELPAAPGPLPPPPPPPPPVPGPVTLPPPQLVPEGTPGGGGPPALEEDLTVININSSDEEEEEEEEEEEEEEEEEEEEEDFEEEEEDEEEYFEEEEEEEEEFEEEFEEEEGELEEEEEEEDEEEEEELEEVEDLEFGTAGGEVEEGAPPPPTLPPALPPPESPPKVQPEPEPEPGLLLEVEEPGTEEERGADTAPTLAPEALPSQGEVEREGESPAAGPPPQELVEEEPSAPPTLLEEETEDGSDKVQPPPETPAEEEMETETEAEALQEKEQDDTAAMLADFIDCPPDDEKPPPPTEPDS

SEQ ID NO: 15105 - protein, 631 aa, Homo Sapiens
MVSKLSQLQTELLAALLESGLSKEALIQALGEPGPYLLAGEGPLDKGESCGGGRGELAELPNGLGETRGSEDETDDDGEDFTPPILKELENLSPEEAAHQKAVVETLLQEDPWRVAKMVKSYLQQHNIPQREVVDTTGLNQSHLSQHLNKGTPMKTQKRAALYTWYVRKQREVAQQFTHAGQGGLIEEPTGDELPTKKGRRNRFKWGPASQQILFQAYERQKNPSKEERETLVEECNRAECIQRGVSPSQAQGLGSNLVTEVRVYNWFANRRKEEAFRHKLAMDTYSGPPPGPGPGPALPAHSSPGLPPPALSPSKVHGVRYGQPATSETAEVPSSSGGPLVTVSTPLHQVSPTGLEPSHSLLSTEAKLVSAAGGPLPPVSTLTALHSLEQTSPGLNQQPQNLIMASLPGVMTIGPGEPASLGPTFTNTGASTLVIGLASTQAQSVPVINSMGSSLTTLQPVQFSQPLHPSYQQPLMPPVQSHVTQSPFMATMAQLQSPHALYSHKPEVAQYTHTGLLPQTMLITDTTNLSALASLTPTKQVFTSDTEASSESGLHTPASQATTLHVPSQDPAGIQHLQPAHRLSASPTVSSSSLVLYQSSDSSNGQSHLLPSNHSVIETFISTQMASSSQ

SEQ ID NO: 15106 - protein, 557 aa, Homo Sapiens
MVSKLTSLQQELLSALLSSGVTKEVLVQALEELLPSPNFGVKLETLPLSPGSGAEPDTKPVFHTLTNGHAKGRLSGDEGSEDGDDYDTPPILKELQALNTEEAAEQRAEVDRMLSEDPWRAAKMIKGYMQQHNIPQREVVDVTGLNQSHLSQHLNKGTPMKTQKRAALYTWYVRKQREILRQFNQTVQSSGNMTDKSSQDQLLFLFPEFSQQSHGPGQSDDACSEPTNKKMRRNRFKWGPASQQILYQAYDRQKNPSKEEREALVEECNRAECLQRGVSPSKAHGLGSNLVTEVRVYNWFANRRKEEAFRQKLAMDAYSSNQTHSLNPLLSHGSPHHQPSSSPPNKLSGVRYSQQGNNEITSSSTISHHGNSAMVTSQSVLQQVSPASLDPGHNLLSPDGKMISVSGGGLPPVSTLTNIHSLSHHNPQQSQNLIMTPLSGVMAIAQSLNTSQAQSVPVINSVAGSLAALQPVQFSQQLHSPHQQPLMQQSPGSHMAQQPFMAAVTQLQNSHMYAHKQEPPQYSHTSRFPSAMVVTDTSSISTLTNMSSSKQCPLQAW

SEQ ID NO: 15107 - protein, 474 aa, Homo Sapiens
MRLSKTLVDMDMADYSAALDPAYTTLEFENVQVLTMGNDTSPSEGTNLNAPNSLGVSALCAICGDRATGKHYGASSCDGCKGFFRRSVRKNHMYSCRFSRQCVVDKDKRNQCRYCRLKKCFRAGMKKEAVQNERDRISTRRSSYEDSSLPSINALLQAEVLSRQITSPVSGINGDIRAKKIASIADVCESMKEQLLVLVEWAKYIPAFCELPLDDQVALLRAHAGEHLLLGATKRSMVFKDVLLLGNDYIVPRHCPELAEMSRVSIRILDELVLPFQELQIDDNEYAYLKAIIFFDPDAKGLSDPGKIKRLRSQVQVSLEDYINDRQYDSRGRFGELLLLLPTLQSITWQMIEQIQFIKLFGMAKIDNLLQEMLLGGSPSDAPHAHHPLHPHLMQEHMGTNVIVANTMPTHLSNGQMCEWPRPRGQAATPETPQPSPPGGSGSEPYKLLPGAVATIVKPLSAIPQPTITKQEVI

SEQ ID NO: 15108 - protein, 408 aa, Homo Sapiens
MNTTDNGVNCLCAICGDRATGKHYGASSCDGCKGFFRRSIRKSHVYSCRFSRQCVVDKDKRNQCRYCRLRKCFRAGMKKEAVQNERDRISTRRSTFDGSNIPSINTLAQAEVRSRQISVSSPGSSTDINVKKIASIGDVCESMKQQLLVLVEWAKYIPAFCELPLDDQVALLRAHAGEHLLLGATKRSMMYKDILLLGNNYVIHRNSCEVEISRVANRVLDELVRPFQEIQIDDNEYACLKAIVFFDPDAKGLSDPVKIKNMRFQVQIGLEDYINDRQYDSRGRFGELLLLLPTLQSITWQMIEQIQFVKLFGMVKIDNLLQEMLLGGASNDGSHLHHPMHPHLSQDPLTGQTILLGPMSTLVHADQISTPETPLPSPPQGSGQEQYKIAANQASVISHQHLSKQKQL

SEQ ID NO: 15109 - protein, 463 aa, Homo Sapiens
METEQPEETFPNTETNGEFGKRPAEDMEEEQAFKRSRNTDEMVELRILLQSKNAGAVIGKGGKNIKALRTDYNASVSVPDSSGPERILSISADIETIGEILKKIIPTLEEGLQLPSPTATSQLPLESDAVECLNYQHYKGSDFDCELRLLIHQSLAGGIIGVKGAKIKELRENTQTTIKLFQECCPHSTDRVVLIGGKPDRVVECIKIILDLISESPIKGRAQPYDPNFYDETYDYGGFTMMFDDRRGRPVGFPMRGRGGFDRMPPGRGGRPMPPSRRDYDDMSPRRGPPPPPPGRGGRGGSRARNLPLPPPPPPRGGDLMAYDRRGRPGDRYDGMVGFSADETWDSAIDTWSPSEWQMAYEPQGGSGYDYSYAGGRGSYGDLGGPIITTQVTIPKDLAGSIIGKGGQRIKQIRHESGASIKIDEPLEGSEDRIITITGTQDQIQNAQYLLQNSVKQYSGKFF

SEQ ID NO: 15110 - protein, 550 aa, Homo Sapiens
MVRGWEPPPGLDCAISEGHKSEGTMPPNKEASGLSSSPAGLICLPPISEELQLVWTQAAQTSELDSNEHLLKTFSYFPYPSLADIALLCLRYGLQMEKVKTWFMAQRLRCGISWSSEEIEETRARVVYRRDQLHFKSLLSFTHHAGRPPEEVPPPPVPAPEQVGIGIGPPTLSKPTQTKGLKVEPEEPSQMPPLPQSHQKLKESLMTPGSGAFPYQSDFWQHLQSSGLSKEQAGRGPNQSHGIGTASWNHSTTVPQPQARDKPPPIALIASSCKEESASSVTPSSSSTSSSFQVLANGATAASKPLQPLGCVPQSVSPSEQALPPHLEPAWPQGLRHNSVPGRVGPTEYLSPDMQRQRKTKRKTKEQLAILKSFFLQCQWARREDYQKLEQITGLPRPEIIQWFGDTRYALKHGQLKWFRDNAVPGAPSFQDPAIPTPPPSTRSLNERAETPPLPIPPPPPDIQPLERYWAAHQQLRETDIPQLSQASRLSTQQVLDWFDSRLPQPAEVVVCLDEEEEEEEEELPEDDEEEEEEEEEDDDDDDDDVIIQD

SEQ ID NO: 15111 - protein, 73 aa, Homo Sapiens
MSAETASGPTEDQVEILEYNFNKVDKHPDSTTLCLIAAEAGLSEEETQKWFKQRLAKWRRSEGLPSECRSVTD

SEQ ID NO: 15112 - protein, 335 aa, Homo Sapiens
MDNARMNSFLEYPILSSGDSGTCSARAYPSDHRITTFQSCAVSANSCGGDDRFLVGRGVQIGSPHHHHHHHHHHPQPATYQTSGNLGVSYSHSSCGPSYGSQNFSAPYSPYALNQEADVSGGYPQCAPAVYSGNLSSPMVQHHHHHQGYAGGAVGSPQYIHHSYGQEHQSLALATYNNSLSPLHASHQEACRSPASETSSPAQTFDWMKVKRNPPKTGKVGEYGYLGQPNAVRTNFTTKQLTELEKEFHFNKYLTRARRVEIAASLQLNETQVKIWFQNRRMKQKKREKEGLLPISPATPPGNDEKAEESSEKSSSSPCVPSPGSSTSDTLTTSH

SEQ ID NO: 15113 - protein, 410 aa, Homo Sapiens
MSARKGYLLPSPNYPTTMSCSESPAANSFLVDSLISSGRGEAGGGGGGAGGGGGGGYYAHGGVYLPPAADLPYGLQSCGLFPTLGGKRNEAASPGSGGGGGGLGPGAHGYGPSPIDLWLDAPRSCRMEPPDGPPPPPQQQPPPPPQPPQPAPQATSCSFAQNIKEESSYCLYDSADKCPKVSATAAELAPFPRGPPPDGCALGTSSGVPVPGYFRLSQAYGTAKGYGSGGGGAQQLGAGPFPAQPPGRGFDLPPALASGSADAARKERALDSPPPPTLACGSGGGSQGDEEAHASSSAAEELSPAPSESSKASPEKDSLGNSKGENAANWLTAKSGRKKRCPYTKHQTLELEKEFLFNMYLTRERRLEISRSVHLTDRQVKIWFQNRRMKLKKMNRENRIRELTANFNFS

SEQ ID NO: 15114 - protein, 313 aa, Homo Sapiens
MDFDERGPCSSNMYLPSCTYYVSGPDFSSLPSFLPQTPSSRPMTYSYSSNLPQVQPVREVTFREYAIEPATKWHPRGNLAHCYSAEELVHRDCLQAPSAAGVPGDVLAKSSANVYHHPTPAVSSNFYSTVGRNGVLPQAFDQFFETAYGTPENLASSDYPGDKSAEKGPPAATATSAAAAAAATGAPATSSSDSGGGGGCRETAAAAEEKERRRRPESSSSPESSSGHTEDKAGGSSGQRTRKKRCPYTKYQIRELEREFFFSVYINKEKRLQLSRMLNLTDRQVKIWFQNRRMKEKKINRDRLQYYSANPLL

SEQ ID NO: 15115 - protein, 388 aa, Homo Sapiens
MTASVLLHPRWIEPTVMFLYDNGGGLVADELNKNMEGAAAAAAAAAAAAAAGAGGGGFPHPAAAAAGGNFSVAAAAAAAAAAAANQCRNLMAHPAPLAPGAASAYSSAPGEAPPSAAAAAAAAAAAAAAAAAASSSGGPGPAGPAGAEAAKQCSPCSAAAQSSSGPAALPYGYFGSGYYPCARMGPHPNAIKSCAQPASAAAAAAFADKYMDTAGPAAEEFSSRAKEFAFYHQGYAAGPYHHHQPMPGYLDMPVVPGLGGPGESRHEPLGLPMESYQPWALPNGWNGQMYCPKEQAQPPHLWKSTLPDVVSHPSDASSYRRGRKKRVPYTKVQLKELEREYATNKFITKDKRRRISATTNLSERQVTIWFQNRRVKEKKVINKLKTTS

SEQ ID NO: 15116 - protein, 376 aa, Homo Sapiens
MNYEFEREIGFINSQPSLAECLTSFPPVADTFQSSSIKTSTLSHSTLIPPPFEQTIPSLNPGSHPRHGAGGRPKPSPAGSRGSPVPAGALQPPEYPWMKEKKAAKKTALLPAAAAAATAAATGPACLSHKESLEIADGSGGGSRRLRTAYTNTQLLELEKEFHFNKYLCRPRRVEIAALLDLTERQVKVWFQNRRMKHKRQTQCKENQNSEGKCKSLEDSEKVEEDEEEKTLFEQALSVSGALLEREGYTFQQNALSQQQAPNGHNGDSQSFPVSPLTSNEKNLKHFQHQSPTVPNCLSTMGQNCGAGLNNDSPEALEVPSLQDFSVFSTDSCLQLSDAVSPSLPGSLDSPVDISADSLDFFTDTLTTIDLQHLNY

SEQ ID NO: 15117 - protein, 443 aa, Homo Sapiens
MQKATYYDSSAIYGGYPYQAANGFAYNANQQPYPASAALGADGEYHRPACSLQSPSSAGGHPKAHELSEACLRTLSAPPSQPPSLGEPPLHPPPPQAAPPAPQPPQPAPQPPAPTPAAPPPPSSASPPQNASNNPTPANAAKSPLLNSPTVAKQIFPWMKESRQNTKQKTSSSSSGESCAGDKSPPGQASSKRARTAYTSAQLVELEKEFHFNRYLCRPRRVEMANLLNLTERQIKIWFQNRRMKYKKDQKGKGMLTSSGGQSPSRSPVPPGAGGYLNSMHSLVNSVPYEPQSPPPFSKPPQGTYGLPPASYPASLPSCAPPPPPQKRYTAAGAGAGGTPDYDPHAHGLQGNGSYGTPHIQGSPVFVGGSYVEPMSNSGPALFGLTHLPHAASGAMDYGGAGPLGSGHHHGPGPGEPHPTYTDLTGHHPSQGRIQEAPKLTHL

SEQ ID NO: 15118 - protein, 320 aa, Homo Sapiens
MTMSSFLINSNYIEPKFPPFEEYAQHSGSGGADGGPGGGPGYQQPPAPPTQHLPLQQPQLPHAGGGREPTASYYAPRTAREPAYPAAALYPAHGAADTAYPYGYRGGASPGRPPQPEQPPAQAKGPAHGLHASHVLQPQLPPPLQPRAVPPAAPRRCEAAPATPGVPAGGSAPACPLLLADKSPLGLKGKEPVVYPWMKKIHVSAVNPSYNGGEPKRSRTAYTRQQVLELEKEFHFNRYLTRRRRIEIAHTLCLSERQVKIWFQNRRMKWKKDHKLPNTKMRSSNSASASAGPPGKAQTQSPHLHPHPHPSTSTPVPSSI

SEQ ID NO: 15119 - protein, 270 aa, Homo Sapiens
MSSYFVNSFCGRYPNGPDYQLHNYGDHSSVSEQFRDSASMHSGRYGYGYNGMDLSVGRSGSGHFGSGERARSYAASASAAPAEPRYSQPATSTHSPQPDPLPCSAVAPSPGSDSHHGGKNSLSNSSGASADAGSTHISSREGVGTASGAEEDAPASSEQASAQSEPSPAPPAQPQIYPWMRKLHISHDNIGGPEGKRARTAYTRYQTLELEKEFHFNRYLTRRRRIEIAHALCLSERQIKIWFQNRRMKWKKDNKLKSMSMAAAGGAFRP

SEQ ID NO: 15120 - protein, 233 aa, Homo Sapiens
MSSYFVNPTFPGSLPSGQDSFLGQLPLYQAGYDALRPFPASYGASSLPDKTYTSPCFYQQSNSVLACNRASYEYGASCFYSDKDLSGASPSGSGKQRGPGDYLHFSPEQQYKPDSSSGQGKALHDEGADRKYTSPVYPWMQRMNSCAGAVYGSHGRRGRQTYTRYQTLELEKEFHFNRYLTRRRRIEIANALCLTERQIKIWFQNRRMKWKKENKLINSTQPSGEDSEAKAGE

SEQ ID NO: 15121 - protein, 230 aa, Homo Sapiens
MSSSYYVNALFSKYTAGASLFQNAEPTSCSFAPNSQRSGYGAGAGAFASTVPGLYNVNSPLYQSPFASGYGLGADAYGNLPCASYDQNIPGLCSDLAKGACDKTDEGALHGAAEANFRIYPWMRSSGPDRKRGRQTYTRYQTLELEKEFHFNRYLTRRRRIEIAHALCLTERQIKIWFQNRRMKWKKEHKDEGPTAAAAPEGAVPSAAATAAADKADEEDDDEEEEDEEE

SEQ ID NO: 15122 - protein, 272 aa, Homo Sapiens
MATTGALGNYYVDSFLLGADAADELSVGRYAPGTLGQPPRQAATLAEHPDFSPCSFQSKATVFGASWNPVHAAGANAVPAAVYHHHHHHPYVHPQAPVAAAAPDGRYMRSWLEPTPGALSFAGLPSSRPYGIKPEPLSARRGDCPTLDTHTLSLTDYACGSPPVDREKQPSEGAFSENNAENESGGDKPPIDPNNPAANWLHARSTRKKRCPYTKHQTLELEKEFLFNMYLTRDRRYEVARLLNLTERQVKIWFQNRRMKMKKINKDRAKDE

SEQ ID NO: 15123 - protein, 301 aa, Homo Sapiens
MDYNRMNSFLEYPLCNRGPSAYSAHSAPTSFPPSSAQAVDSYASEGRYGGGLSSPAFQQNSGYPAQQPPSTLGVPFPSSAPSGYAPAACSPSYGPSQYYPLGQSEGDGGYFHPSSYGAQLGGLSDGYGAGGAGPGPYPPQHPPYGNEQTASFAPAYADLLSEDKETPCPSEPNTPTARTFDWMKVKRNPPKTAKVSEPGLGSPSGLRTNFTTRQLTELEKEFHFNKYLSRARRVEIAATLELNETQVKIWFQNRRMKQKKREREEGRVPPAPPGCPKEAAGDASDQSTCTSPEASPSSVTS

SEQ ID NO: 15124 - protein, 284 aa, Homo Sapiens
MEPGNYATLDGAKDIEGLLGAGGGRNLVAHSPLTSHPAAPTLMPAVNYAPLDLPGSAEPPKQCHPCPGVPQGTSPAPVPYGYFGGGYYSCRVSRSSLKPCAQAATLAAYPAETPTAGEEYPSRPTEFAFYPGYPGTYQPMASYLDVSVVQTLGAPGEPRHDSLLPVDSYQSWALAGGWNSQMCCQGEQNPPGPFWKAAFADSSGQHPPDACAFRRGRKKRIPYSKGQLRELEREYAANKFITKDKRRKISAATSLSERQITIWFQNRRVKEKKVLAKVKNSATP

SEQ ID NO: 15125 - protein, 356 aa, Homo Sapiens
MNFEFEREIGFINSQPSLAECLTSFPAVLETFQTSSIKESTLIPPPPPFEQTFPSLQPGASTLQRPRSQKRAEDGPALPPPPPPPLPAAPPAPEFPWMKEKKSAKKPSQSATSPSPAASAVPASGVGSPADGLGLPEAGGGGARRLRTAYTNTQLLELEKEFHFNKYLCRPRRVEIAALLDLTERQVKVWFQNRRMKHKRQTQHREPPDGEPACPGALEDICDPAEEPAASPGGPSASRAAWEACCHPPEVVPGALSADPRPLAVRLEGAGASSPGCALRGAGGLEPGPLPEDVFSGRQDSPFLPDLNFFAADSCLQLSGGLSPSLQGSLDSPVPFSEEELDFFTSTLCAIDLQFP

SEQ ID NO: 15126 - protein, 431 aa, Homo Sapiens
MQKATYYDNAAAALFGGYSSYPGSNGFGFDVPPQPPFQAATHLEGDYQRSACSLQSLGNAAPHAKSKELNGSCMRPGLAPEPLSAPPGSPPPSAAPTSATSNSSNGGGPSKSGPPKCGPGTNSTLTKQIFPWMKESRQTSKLKNNSPGTAEGCGGGGGGGGGGGSGGSGGGGGGGGGGDKSPPGSAASKRARTAYTSAQLVELEKEFHFNRYLCRPRRVEMANLLNLSERQIKIWFQNRRMKYKKDQKAKGLASSSGGPSPAGSPPQPMQSTAGFMNALHSMTPSYESPSPPAFGKAHQNAYALPSNYQPPLKGCGAPQKYPPTPAPEYEPHVLQANGGAYGTPTMQGSPVYVGGGGYADPLPPPAGPSLYGLNHLSHHPSGNLDYNGAPPMAPSQHHGPCEPHPTYTDLSSHHAPPPQGRIQEAPKLTHL

SEQ ID NO: 15127 - protein, 251 aa, Homo Sapiens
MAMSSFLINSNYVDPKFPPCEEYSQSDYLPSDHSPGYYAGGQRRESSFQPEAGFGRRAACTVQRYAACRDPGPPPPPPPPPPPPPPPGLSPRAPAPPPAGALLPEPGQRCEAVSSSPPPPPCAQNPLHPSPSHSACKEPVVYPWMRKVHVSTVNPNYAGGEPKRSRTAYTRQQVLELEKEFHYNRYLTRRRRVEIAHALCLSERQIKIWFQNRRMKWKKDHKLPNTKIRSGGAAGSAGGPPGRPNGGPRAL

SEQ ID NO: 15128 - protein, 269 aa, Homo Sapiens
MSSYFVNSFSGRYPNGPDYQLLNYGSGSSLSGSYRDPAAMHTGSYGYNYNGMDLSVNRSSASSSHFGAVGESSRAFPAPAQEPRFRQAASSCSLSSPESLPCTNGDSHGAKPSASSPSDQATSASSSANFTEIDEASASSEPEEAASQLSSPSLARAQPEPMATSTAAPEGQTPQIFPWMRKLHISHDMTGPDGKRARTAYTRYQTLELEKEFHFNRYLTRRRRIEIAHALCLSERQIKIWFQNRRMKWKKDNKLKSMSLATAGSAFQP

SEQ ID NO: 15129 - protein, 224 aa, Homo Sapiens
MSSYFVNSTFPVTLASGQESFLGQLPLYSSGYADPLRHYPAPYGPGPGQDKGFATSSYYPPAGGGYGRAAPCDYGPAPAFYREKESACALSGADEQPPFHPEPRKSDCAQDKSVFGETEEQKCSTPVYPWMQRMNSCNSSSFGPSGRRGRQTYTRYQTLELEKEFHYNRYLTRRRRIEIAHALCLTERQIKIWFQNRRMKWKKESKLLSASQLSAEEEEEKQAE

SEQ ID NO: 15130 - protein, 217 aa, Homo Sapiens
MSSLYYANTLFSKYPASSSVFATGAFPEQTSCAFASNPQRPGYGAGSGASFAASMQGLYPGGGGMAGQSAAGVYAAGYGLEPSSFNMHCAPFEQNLSGVCPGDSAKAAGAKEQRDSDLAAESNFRIYPWMRSSGTDRKRGRQTYTRYQTLELEKEFHYNRYLTRRRRIEIAHTLCLTERQIKIWFQNRRMKWKKENKTAGPGTTGQDRAEAEEEEEE

SEQ ID NO: 15131 - protein, 243 aa, Homo Sapiens
MSSYFVNSLFSKYKTGESLRPNYYDCGFAQDLGGRPTVVYGPSSGGSFQHPSQIQEFYHGPSSLSTAPYQQNPCAVACHGDPGNFYGYDPLQRQSLFGAQDPDLVQYADCKLAAASGLGEEAEGSEQSPSPTQLFPWMRPQAAAGRRRGRQTYSRYQTLELEKEFLFNPYLTRKRRIEVSHALGLTERQVKIWFQNRRMKWKKENNKDKFPSSKCEQEELEKQKLERAPEAADEGDAQKGDKK

SEQ ID NO: 15132 - protein, 250 aa, Homo Sapiens
MSISGTLSSYYVDSIISHESEDAPPAKFPSGQYASSRQPGHAEHLEFPSCSFQPKAPVFGASWAPLSPHASGSLPSVYHPYIQPQGVPPAESRYLRTWLEPAPRGEAAPGQGQAAVKAEPLLGAPGELLKQGTPEYSLETSAGREAVLSNQRPGYGDNKICEGSEDKERPDQTNPSANWLHARSSRKKRCPYTKYQTLELEKEFLFNMYLTRDRRHEVARLLNLSERQVKIWFQNRRMKMKKMNKEQGKE

SEQ ID NO: 15133 - protein, 342 aa, Homo Sapiens
MTCPRNVTPNSYAEPLAAPGGGERYSRSAGMYMQSGSDFNCGVMRGCGLAPSLSKRDEGSSPSLALNTYPSYLSQLDSWGDPKAAYRLEQPVGRPLSSCSYPPSVKEENVCCMYSAEKRAKSGPEAALYSHPLPESCLGEHEVPVPSYYRASPSYSALDKTPHCSGANDFEAPFEQRASLNPRAEHLESPQLGGKVSFPETPKSDSQTPSPNEIKTEQSLAGPKGSPSESEKERAKAADSSPDTSDNEAKEEIKAENTTGNWLTAKSGRKKRCPYTKHQTLELEKEFLFNMYLTRERRLEISKTINLTDRQVKIWFQNRRMKLKKMNRENRIRELTSNFNFT

SEQ ID NO: 15134 - protein, 304 aa, Homo Sapiens
MFNSVNLGNFCSPSRKERGADFGERGSCASNLYLPSCTYYMPEFSTVSSFLPQAPSRQISYPYSAQVPPVREVSYGLEPSGKWHHRNSYSSCYAAADELMHRECLPPSTVTEILMKNEGSYGGHHHPSAPHATPAGFYSSVNKNSVLPQAFDRFFDNAYCGGGDPPAEPPCSGKGEAKGEPEAPPASGLASRAEAGAEAEAEEENTNPSSSGSAHSVAKEPAKGAAPNAPRTRKKRCPYSKFQIRELEREFFFNVYINKEKRLQLSRMLNLTDRQVKIWFQNRRMKEKKLSRDRLQYFSGNPLL

SEQ ID NO: 15135 - protein, 282 aa, Homo Sapiens
MGEHNLLNPGFVGPLVNIHTGDTFYFPNFRASGAQLPGLPSLSYPRRDNVCSLSWPSAEPCNGYPQPYLGSPVSLNPPFGRTCELARVEDGKGYYREPCAEGGGGGLKREERGRDPGAGPGAALLPLEPSGPPALGFKYDYAAGGGGGDGGGGAGPPHDPPSCQSLESDSSSSLLNEGNKGAGAGDPGSLVSPLNPGGGLSASGAPWYPINSRSRKKRKPYSKLQLAELEGEFLVNEFITRQRRRELSDRLNLSDQQVKIWFQNRRMKKKRLLLREQALSFF

SEQ ID NO: 15136 - protein, 330 aa, Homo Sapiens
MTTSLLLHPRWPESLMYVYEDSAAESGIGGGGGGGGGGTGGAGGGCSGASPGKAPSMDGLGSSCPASHCRDLLPHPVLGRPPAPLGAPQGAVYTDIPAPEAARQCAPPPAPPTSSSATLGYGYPFGGSYYGCRLSHNVNLQQKPCAYHPGDKYPEPSGALPGDDLSSRAKEFAFYPSFASSYQAMPGYLDVSVVPGISGHPEPRHDALIPVEGYQHWALSNGWDSQVYCSKEQSQSAHLWKSPFPDVVPLQPEVSSYRRGRKKRVPYTKVQLKELEKEYAASKFITKEKRRRISATTNLSERQVTIWFQNRRVKEKKVVSKSKAPHLHST

SEQ ID NO: 15137 - protein, 264 aa, Homo Sapiens
MIMSSYLMDSNYIDPKFPPCEEYSQNSYIPEHSPEYYGRTRESGFQHHHQELYPPPPPRPSYPERQYSCTSLQGPGNSRGHGPAQAGHHHPEKSQSLCEPAPLSGASASPSPAPPACSQPAPDHPSSAASKQPIVYPWMKKIHVSTVNPNYNGGEPKRSRTAYTRQQVLELEKEFHYNRYLTRRRRIEIAHSLCLSERQIKIWFQNRRMKWKKDHRLPNTKVRSAPPAGAAPSTLSAATPGTSEDHSQSATPPEQQRAEDITRL

SEQ ID NO: 15138 - protein, 222 aa, Homo Sapiens
MSSYVANSFYKQSPNIPAYNMQTCGNYGSASEVQASRYCYGGLDLSITFPPPAPSNSLHGVDMAANPRAHPDRPACSAAAAPGHAPGRDEAAPLNPGMYSQKAARPALEERAKSSGEIKEEQAQTGQPAGLSQPPAPPQIYPWMTKLHMSHETDGKRSRTSYTRYQTLELEKEFHFNRYLTRRRRIEIANNLCLNERQIKIWFQNRRMKWKKDSKMKSKEAL

SEQ ID NO: 15139 - protein, 235 aa, Homo Sapiens
MNSYFTNPSLSCHLAGGQDVLPNVALNSTAYDPVRHFSTYGAAVAQNRIYSTPFYSPQENVVFSSSRGPYDYGSNSFYQEKDMLSNCRQNTLGHNTQTSIAQDFSSEQGRTAPQDQKASIQIYPWMQRMNSHSGVGYGADRRRGRQIYSRYQTLELEKEFHFNRYLTRRRRIEIANALCLTERQIKIWFQNRRMKWKKESNLTSTLSGGGGGATADSLGGKEEKREETEEEKQKE

SEQ ID NO: 15140 - protein, 242 aa, Homo Sapiens
MSSYFVNPLFSKYKAGESLEPAYYDCRFPQSVGRSHALVYGPGGSAPGFQHASHHVQDFFHHGTSGISNSGYQQNPCSLSCHGDASKFYGYEALPRQSLYGAQQEASVVQYPDCKSSANTNSSEGQGHLNQNSSPSLMFPWMRPHAPGRRSGRQTYSRYQTLELEKEFLFNPYLTRKRRIEVSHALGLTERQVKIWFQNRRMKWKKENNKDKLPGARDEEKVEEEGNEEEEKEEEEKEENKD

SEQ ID NO: 15141 - protein, 260 aa, Homo Sapiens
MSATGPISNYYVDSLISHDNEDLLASRFPATGAHPAAARPSGLVPDCSDFPSCSFAPKPAVFSTSWAPVPSQSSVVYHPYGPQPHLGADTRYMRTWLEPLSGAVSFPSFPAGGRHYALKPDAYPGRRADCGPGEGRSYPDYMYGSPGELRDRAPQTLPSPEADALAGSKHKEEKADLDPSNPVANWIHARSTRKKRCPYTKYQTLELEKEFLFNMYLTRDRRYEVARVLNLTERQVKIWFQNRRMKMKKMNKEKTDKEQS

SEQ ID NO: 15142 - protein, 328 aa, Homo Sapiens
MSSYLEYVSCSSSGGVGGDVLSLAPKFCRSDARPVALQPAFPLGNGDGAFVSCLPLAAARPSPSPPAAPARPSVPPPAAPQYAQCTLEGAYEPGAAPAAAAGGADYGFLGSGPAYDFPGVLGRAADDGGSHVHYATSAVFSGGGSFLLSGQVDYAAFGEPGPFPACLKASADGHPGAFQTASPAPGTYPKSVSPASGLPAAFSTFEWMKVKRNASKKGKLAEYGAASPSSAIRTNFSTKQLTELEKEFHFNKYLTRARRIEIANCLHLNDTQVKIWFQNRRMKQKKREREGLLATAIPVAPLQLPLSGTTPTKFIKNPGSPSQSQEPS

SEQ ID NO: 15143 - protein, 340 aa, Homo Sapiens
MSFPNSSPAANTFLVDSLISACRSDSFYSSSASMYMPPPSADMGTYGMQTCGLLPSLAKREVNHQNMGMNVHPYIPQVDSWTDPNRSCRIEQPVTQQVPTCSFTTNIKEESNCCMYSDKRNKLISAEVPSYQRLVPESCPVENPEVPVPGYFRLSQTYATGKTQEYNNSPEGSSTVMLQLNPRGAAKPQLSAAQLQMEKKMNEPVSGQEPTKVSQVESPEAKGGLPEERSCLAEVSVSSPEVQEKESKEEIKSDTPTSNWLTAKSGRKKRCPYTKHQTLELEKEFLFNMYLTRERRLEISKSVNLTDRQVKIWFQNRRMKLKKMSRENRIRELTANLTFS

SEQ ID NO: 15144 - protein, 338 aa, Homo Sapiens
MNDFDECGQSAASMYLPGCAYYVAPSDFASKPSFLSQPSSCQMTFPYSSNLAPHVQPVREVAFRDYGLERAKWPYRGGGGGGSAGGGSSGGGPGGGGGGAGGYAPYYAAAAAAAAAAAAAEEAAMQRELLPPAGRRPDVLFKAPEPVCAAPGPPHGPAGAASNFYSAVGRNGILPQGFDQFYEAAPGPPFAGPQPPPPPAPPQPEGAADKGDPRTGAGGGGGSPCTKATPGSEPKGAAEGSGGDGEGPPGEAGAEKSSSAVAPQRSRKKRCPYTKYQIRELEREFFFNVYINKEKRLQLSRMLNLTDRQVKIWFQNRRMKEKKLNRDRLQYFTGNPLF

SEQ ID NO: 15145 - protein, 270 aa, Homo Sapiens
MCERSLYRAGYVGSLLNLQSPDSFYFSNLRPNGGQLAALPPISYPRGALPWAATPASCAPAQPAGATAFGGFSQPYLAGSGPLGLQPPTAKDGPEEQAKFYAPEAAAGPEERGRTRPSFAPESSLAPAVAALKAAKYDYAGVGRATPGSTTLLQGAPCAPGFKDDTKGPLNLNMTVQAAGVASCLRPSLPDGLPWGAAPGRARKKRKPYTKQQIAELENEFLVNEFINRQKRKELSNRLNLSDQQVKIWFQNRRMKKKRVVLREQALALY

SEQ ID NO: 15146 - protein, 343 aa, Homo Sapiens
MSRAGSWDMDGLRADGGGAGGAPASSSSSSVAAAAASGQCRGFLSAPVFAGTHSGRAAAAAAAAAAAAAAASGFAYPGTSERTGSSSSSSSSAVVAARPEAPPAKECPAPTPAAAAAAPPSAPALGYGYHFGNGYYSCRMSHGVGLQQNALKSSPHASLGGFPVEKYMDVSGLASSSVPANEVPARAKEVSFYQGYTSPYQHVPGYIDMVSTFGSGEPRHEAYISMEGYQSWTLANGWNSQVYCTKDQPQGSHFWKSSFPGDVALNQPDMCVYRRGRKKRVPYTKLQLKELENEYAINKFINKDKRRRISAATNLSERQVTIWFQNRRVKDKKIVSKLKDTVS

SEQ ID NO: 15147 - protein, 432 aa, Homo Sapiens
MLFEQGQQALELPECTMQKAAYYENPGLFGGYGYSKTTDTYGYSTPHQPYPPPAAASSLDTDYPGSACSIQSSAPLRAPAHKGAELNGSCMRPGTGNSQGGGGGSQPPGLNSEQQPPQPPPPPPTLPPSSPTNPGGGVPAKKPKGGPNASSSSATISKQIFPWMKESRQNSKQKNSCATAGESCEDKSPPGPASKRVRTAYTSAQLVELEKEFHFNRYLCRPRRVEMANLLNLTERQIKIWFQNRRMKYKKDQKAKGILHSPASQSPERSPPLGGAAGHVAYSGQLPPVPGLAYDAPSPPAFAKSQPNMYGLAAYTAPLSSCLPQQKRYAAPEFEPHPMASNGGGFASANLQGSPVYVGGNFVESMAPASGPVFNLGHLSHPSSASVDYSCAAQIPGNHHHGPCDPHPTYTDLSAHHSSQGRLPEAPKLTHL

SEQ ID NO: 15148 - protein, 255 aa, Homo Sapiens
MVMSSYMVNSKYVDPKFPPCEEYLQGGYLGEQGADYYGGGAQGADFQPPGLYPRPDFGEQPFGGSGPGPGSALPARGHGQEPGGPGGHYAAPGEPCPAPPAPPPAPLPGARAYSQSDPKQPPSGTALKQPAVVYPWMKKVHVNSVNPNYTGGEPKRSRTAYTRQQVLELEKEFHFNRYLTRRRRIEIAHTLCLSERQIKIWFQNRRMKWKKDHKLPNTKGRSSSSSSSSSCSSSVAPSQHLQPMAKDHHTDLTTL

SEQ ID NO: 15149 - protein, 290 aa, Homo Sapiens
MSSYFVNPLYSKYKAAAAAAAAAGEAINPTYYDCHFAPEVGGRHAAAAAALQLYGNSAAGFPHAPPQAHAHPHPSPPPSGTGCGGREGRGQEYFHPGGGSPAAAYQAAPPPPPHPPPPPPPPPCGGIACHGEPAKFYGYDNLQRQPIFTTQQEAELVQYPDCKSSSGNIGEDPDHLNQSSSPSQMFPWMRPQAAPGRRRGRQTYSRFQTLELEKEFLFNPYLTRKRRIEVSHALALTERQVKIWFQNRRMKWKKENNKDKFPVSRQEVKDGETKKEAQELEEDRAEGLTN

SEQ ID NO: 15150 - protein, 352 aa, Homo Sapiens
MLGGSAGRLKMSSSGTLSNYYVDSLIGHEGDEVFAARFGPPGPGAQGRPAGVADGPAATAAEFASCSFAPRSAVFSASWSAVPSQPPAAAAMSGLYHPYVPPPPLAASASEPGRYVRSWMEPLPGFPGGAGGGGGGGGGGPGRGPSPGPSGPANGRHYGIKPETRAAPAPATAASTTSSSSTSLSSSSKRTECSVARESQGSSGPEFSCNSFLQEKAAAATGGTGPGAGIGAATGTGGSSEPSACSDHPIPGCSLKEEEKQHSQPQQQQLDPNNPAANWIHARSTRKKRCPYTKYQTLELEKEFLFNMYLTRDRRYEVARILNLTERQVKIWFQNRRMKMKKMSKEKCPKGD

SEQ ID NO: 15151 - protein, 529 aa, Homo Sapiens
MDLPVGPGAAGPSNVPAFLTKLWTLVSDPDTDALICWSPSGNSFHVFDQGQFAKEVLPKYFKHNNMASFVRQLNMYGFRKVVHIEQGGLVKPERDDTEFQHPCFLRGQEQLLENIKRKVTSVSTLKSEDIKIRQDSVTKLLTDVQLMKGKQECMDSKLLAMKHENEALWREVASLRQKHAQQQKVVNKLIQFLISLVQSNRILGVKRKIPLMLNDSGSAHSMPKYSRQFSLEHVHGSGPYSAPSPAYSSSSLYAPDAVASSGPIISDITELAPASPMASPGGSIDERPLSSSPLVRVKEEPPSPPQSPRVEEASPGRPSSVDTLLSPTALIDSILRESEPAPASVTALTDARGHTDTEGRPPSPPPTSTPEKCLSVACLDKNELSDHLDAMDSNLDNLQTMLSSHGFSVDTSALLDLFSPSVTVPDMSLPDLDSSLASIQELLSPQEPPRPPEAENSSPDSGKQLVHYTAQPLFLLDPGSVDTGSNDLPVLFELGEGSYFSEGDGFAEDPTISLLTGSEPPKAKDPTVS

SEQ ID NO: 15152 - protein, 536 aa, Homo Sapiens
MKQSSNVPAFLSKLWTLVEETHTNEFITWSQNGQSFLVLDEQRFAKEILPKYFKHNNMASFVRQLNMYGFRKVVHIDSGIVKQERDGPVEFQHPYFKQGQDDLLENIKRKVSSSKPEENKIRQEDLTKIISSAQKVQIKQETIESRLSELKSENESLWKEVSELRAKHAQQQQVIRKIVQFIVTLVQNNQLVSLKRKRPLLLNTNGAQKKNLFQHIVKEPTDNHHHKVPHSRTEGLKPRERISDDIIIYDVTDDNADEENIPVIPETNEDVISDPSNCSQYPDIVIVEDDNEDEYAPVIQSGEQNEPARESLSSGSDGSSPLMSSAVQLNGSSSLTSEDPVTMMDSILNDNINLLGKVELLDYLDSIDCSLEDFQAMLSGRQFSIDPDLLVDLFTSSVQMNPTDYINNTKSENKGLETTKNNVVQPVSEEGRKSKSKPDKQLIQYTAFPLLAFLDGNPASSVEQASTTASSEVLSSVDKPIEVDELLDSSLDPEPTQSKLVRLEPLTEAEASEATLFYLCELAPAPLDSDMPLLDS

SEQ ID NO: 15153 - protein, 492 aa, Homo Sapiens
MQEAPAALPTEPGPSPVPAFLGKLWALVGDPGTDHLIRWSPSGTSFLVSDQSRFAKEVLPQYFKHSNMASFVRQLNMYGFRKVVSIEQGGLLRPERDHVEFQHPSFVRGREQLLERVRRKVPALRGDDGRWRPEDLGRLLGEVQALRGVQESTEARLRELRQQNEILWREVVTLRQSHGQQHRVIGKLIQCLFGPLQAGPSNAGGKRKLSLMLDEGSSCPTPAKFNTCPLPGALLQDPYFIQSPLPETNLGLSPHRARGPIISDIPEDSPSPEGTRLSPSSDGRREKGLALLKEEPASPGGDGEAGLALAPNECDFCVTAPPPLPVAVVQAILEGKGSFSPEGPRNAQQPEPGDPREIPDRGPLGLESGDRSPESLLPPMLLQPPQESVEPAGPLDVLGPSLQGREWTLMDLDMELSLMQPLVPERGEPELAVKGLNSPSPGKDPTLGAPLLLDVQAALGGPALGLPGALTIYSTPESRTASYLGPEASPSP

SEQ ID NO: 15154 - protein, 596 aa, Homo Sapiens
MEALLSTPINPNNFPAKLWRLVNSPRYRSIRWDGRGEGLLIDQPLFEAELLSPPGPGGGGGTAGAGAEPELFKTTSFTSFIRQLNLYGFRKVVLGGPGGGKPAGNGPLHHFHNPHFRRDQPQLLVHLKRLTSANKAKLAAGLEVPCRPPNRFQRLLITSASAATAPLQHQQPPPPAGPRPEPHGPVAVGQFHRSFRRDSLSPYSCVSTPSHDHSTYPLKGLDRTPVPHRIWQNSLGMHPGQVETSPTFSDKGVPFPVLQRFPTEVTYTLQPSTTSVHVQQGPQTMVSSSQKYSNYTPSAQYSQAYYPTAVLQCCSPTHMDALSSCVTPNASSYAHCNYFQNPSMQSSYPVEFLPSNWPCSTTDENTKTEVNLEAVFQIVDELHSSPKLEMVKVEPVENQCPTSPSYRGQHILANSNNSNPCSASQASQLEPLTPVGSDIMSFVVGTEQAVACSLPQSPEYIYTIHTAQPVENSTIQESAAIQQAHVKLKEHLNHNPSPSSVVFVQEGPPFSTHQVDANIKCQTSSRENILPSEQMGFLISEMGPASKPSEDTGLATPARYREHRSNSQQGKSPDLHLLVDVACKQERFPKEEELKE

SEQ ID NO: 15155 - protein, 423 aa, Homo Sapiens
MEDKRSLSMARCEERNSRGQDHGLERVPFPPQLQSETYLHPADPSPAWDDPGSTGSPNLRLLTEEIAFQPLAEEASFRRPHPDGDVPPQGEDNLLSLPFPQKLWRLVSSNQFSSIWWDDSGACRVINQKLFEKEILKRDVAHKVFATTSIKSFFRQLNLYGFRKRRQCTFRTFTRIFSAKRLVSILNKLEFYCHPYFQRDSPHLLVRMKRRVGVKSAPRHQEEDKPEAAGSCLAPADTEQQDHTSPNENDQVTPQHREPAGPNTQIRSGSAPPATPVMVPDSAVASDNSPVTQPAGEWSEGSQAHVTPVAAVPGPAALPFLYVPGSPTQMNSYGPVVALPTASRSTLAMDTTGLPAPGMLPFCHLWVPVTLVAAGAAQPAASMVMFPHLPALHHHCPHSHRTSQYMPASDGPQAYPDYADQST

SEQ ID NO: 15156 - protein, 401 aa, Homo Sapiens
MAHVSSETQDVSPKDELTASEASTRSPLCEHTFPGDSDLRSMIEEHAFQVLSQGSLLESPSYTVCVSEPDKDDDFLSLNFPRKLWKIVESDQFKSISWDENGTCIVINEELFKKEILETKAPYRIFQTDAIKSFVRQLNLYGFSKIQQNFQRSAFLATFLSEEKESSVLSKLKFYYNPNFKRGYPQLLVRVKRRIGVKNASPISTLFNEDFNKKHFRAGANMENHNSALAAEASEESLFSASKNLNMPLTRESSVRQIIANSSVPIRSGFPPPSPSTSVGPSEQIATDQHAILNQLTTIHMHSHSTYMQARGHIVNFITTTTSQYHIISPLQNGYFGLTVEPSAVPTRYPLVSVNEAPYRNMLPAGNPWLQMPTIADRSAAPHSRLALQPSPLDKYHPNYN

SEQ ID NO: 15157 - protein, 155 aa, Homo Sapiens; identical to SEQ ID NO: 6697

SEQ ID NO: 15158 - protein, 134 aa, Homo Sapiens
MKAFSPVRSVRKNSLSDHSLGISRSKTPVDDPMSLLYNMNDCYSKLKELVPSIPQNKKVSKMEILQHVIDYILDLQIALDSHPTIVSLHHQRPGQNQASRTPLTTLNTDISILSLQASEFPSELMSNDSKALCG

SEQ ID NO: 15159 - protein, 119 aa, Homo Sapiens
MKALSPVRGCYEAVCCLSERSLAIARGRGKGPAAEEPLSLLDDMNHCYSRLRELVPGVPRGTQLSQVEILQRVIDYILDLQVVLAEPAPGPPDGPHLPIQTAELTPELVISNDKRSFCH

SEQ ID NO: 15160 - protein, 161 aa, Homo Sapiens
MKAVSPVRPSGRKAPSGCGGGELALRCLAEHGHSLGGSAAAAAAAAAARCKAAEAAADEPALCLQCDMNDCYSRLRRLVPTIPPNKKVSKVEILQHVIDYILDLQLALETHPALLRQPPPPAPPHHPAGTCPAAPPRTPLTALNTDPAGAVNKQGDSILCR

SEQ ID NO: 15161 - protein, 785 aa, Homo Sapiens
MGKKYKNIVLLKGLEVINDYHFRMVKSLLSNDLKLNLKMREEYDKIQIADLMEEKFRGDAGLGKLIKIFEDIPTLEDLAETLKKEKLKVKGPALSRKRKKEVDATSPAPSTSSTVKTEGAEATPGAQKRKKSTKEKAGPKGSKVSEEQTQPPSPAGAGMSTAMGRSPSPKTSLSAPPNSSSTENPKTVAKCQVTPRRNVLQKRPVIVKVLSTTKPFEYETPEMEKKIMFHATVATQTQFFHVKVLNTSLKEKFNGKKIIIISDYLEYDSLLEVNEESTVSEAGPNQTFEVPNKIINRAKETLKIDILHKQASGNIVYGVFMLHKKTVNQKTTIYEIQDDRGKMDVVGTGQCHNIPCEEGDKLQLFCFRLRKKNQMSKLISEMHSFIQIKKKTNPRNNDPKSMKLPQEQRQLPYPSEASTTFPESHLRTPQMPPTTPSSSFFTKKSEDTISKMNDFMRMQILKEGSHFPGPFMTSIGPAESHPHTPQMPPSTPSSSFLTTKSEDTISKMNDFMRMQILKEGSHFPGPFMTSIGPAESHPHTPQMPPSTPSSSFLTTLKPRLKTEPEEVSIEDSAQSDLKEVMVLNATESFVYEPKEQKKMFHATVATENEVFRVKVFNIDLKEKFTPKKIIAIANYVCRNGFLEVYPFTLVADVNADRNMEIPKGLIRSASVTPKINQLCSQTKGSFVNGVFEVHKKNVRGEFTYYEIQDNTGKMEVVVHGRLTTINCEEGDKLKLTCFELAPKSGNTGELRSVIHSHIKVIKTRKNKKDILNPDSSMETSPDFFF

SEQ ID NO: 15162 - protein, 519 aa, Homo Sapiens
MDADEGQDMSQVSGKESPPVSDTPDEGDEPMPIPEDLSTTSGGQQSSKSDRVVASNVKVETQSDEENGRACEMNGEECAEDLRMLDASGEKMNGSHRDQGSSALSGVGGIRLPNGKLKCDICGIICIGPNVLMVHKRSHTGERPFQCNQCGASFTQKGNLLRHIKLHSGEKPFKCHLCNYACRRRDALTGHLRTHSVGKPHKCGYCGRSYKQRSSLEEHKERCHNYLESMGLPGTLYPVIKEETNHSEMAEDLCKIGSERSLVLDRLASNVAKRKSSMPQKFLGDKGLSDTPYDSSASYEKENEMMKSHVMDQAINNAINYLGAESLRPLVQTPPGGSEVVPVISPMYQLHKPLAEGTPRSNHSAQDSAVENLLLLSKAKLVPSEREASPSNSCQDSTDTESNNEEQRSGLIYLTNHIAPHARNGLSLKEEHRAYDLLRAASENSQDALRVVSTSGEQMKVYKCEHCRVLFLDHVMYTIHMGCHGFRDPFECNMCGYHSQDRYEFSSHITRGEHRFHMS

SEQ ID NO: 15163 - protein, 526 aa, Homo Sapiens [sequence omitted]

SEQ ID NO: 15164 - protein, 509 aa, Homo Sapiens
MEDIQTNAELKSTQEQSVPAESAAVLNDYSLTKSHEMENVDSGEGPANEDEDIGDDSMKVKDEYSERDENVLKSEPMGNAEEPEIPYSYSREYNEYENIKLERHVVSFDSSRPTSGKMNCDVCGLSCISFNVLMVHKRSHTGERPFQCNQCGASFTQKGNLLRHIKLHTGEKPFKCHLCNYACQRRDALTGHLRTHSVEKPYKCEFCGRSYKQRSSLEEHKERCRTFLQSTDPGDTASAEARHIKAEMGSERALVLDRLASNVAKRKSSMPQKFIGEKRHCFDVNYNSSYMYEKESELIQTRMMDQAINNAISYLGAEALRPLVQTPPAPTSEMVPVISSMYPIALTRAEMSNGAPQELEKKSIHLPEKSVPSERGLSPNNSGHDSTDTDSNHEERQNHIYQQNHMVLSRARNGMPLLKEVPRSYELLKPPPICPRDSVKVINKEGEVMDVYRCDHCRVLFLDYVMFTIHMGCHGFRDPFECNMCGYRSHDRYEFSSHIARGEHRALLK

SEQ ID NO: 15165 - protein, 585 aa, Homo Sapiens
MHTPPALPRRFQGGGRVRTPGSHRQGKDNLERDPSGGCVPDFLPQAQDSNHFIMESLFCESSGDSSLEKEFLGAPVGPSVSTPNSQHSSPSRSLSANSIKVEMYSDEESSRLLGPDERLLEKDDSVIVEDSLSEPLGYCDGSGPEPHSPGGIRLPNGKLKCDVCGMVCIGPNVLMVHKRSHTGERPFHCNQCGASFTQKGNLLRHIKLHSGEKPFKCPFCNYACRRRDALTGHLRTHSVSSPTVGKPYKCNYCGRSYKQQSTLEEHKERCHNYLQSLSTEAQALAGQPGDEIRDLEMVPDSMLHSSSERPTFIDRLANSLTKRKRSTPQKFVGEKQMRFSLSDLPYDVNSGGYEKDVELVAHHSLEPGFGSSLAFVGAEHLRPLRLPPTNCISELTPVISSVYTQMQPLPGRLELPGSREAGEGPEDLADGGPLLYRPRGPLTDPGASPSNGCQDSTDTESNHEDRVAGVVSLPQGPPPQPPPTIVVGRHSPAYAKEDPKPQEGLLRGTPGPSKEVLRVVGESGEPVKAFKCEHCRILFLDHVMFTIHMGCHGFRDPFECNICGYHSQDRYEFSSHIVRGEHKVG

SEQ ID NO: 15166 - protein, 419 aa, Homo Sapiens
MGEKKPEPLDFVKDFQEYLTQQTHHVNMISGSVSGDKEAEALQGAGTDGDQNGLDHPSVEVSLDENSGMLVDGFERTFDGKLKCRYCNYASKGTARLIEHIRIHTGEKPHRCHLCPFASAYERHLEAHMRSHTGEKPYKCELCSFRCSDRSNLSHHRRRKHKMVPIKGTRSSLSSKKMWGVLQKKTSNLGYSRRALINLSPPSMVVQKPDYLNDFTHEIPNIQTDSYESMAKTTPTGGLPRDPQELMVDNPLNQLSTLAGQLSSLPPENQNPASPDVVPCPDEKPFMIQQPSTQAVVSAVSASIPQSSSPTSPEPRPSHSQRNYSPVAGPSSEPSAHTSTPSIGNSQPSTPAPALPVQDPQLLHHCQHCDMYFADNILYTIHMGCHGYENPFQCNICGCKCKNKYDFACHFARGQHNQH

SEQ ID NO: 15167 - protein, 510 aa, Homo Sapiens
MPRGFLVKRSKKSTPVSYRVRGGEDGDRALLLSPSCGGARAEPPAPSPVPGPLPPPPPAERAHAALAAALACAPGPQPPPQGPRAAHFGNPEAAHPAPLYSPTRPVSREHEKHKYFERSFNLGSPVSAESFPTPAALLGGGGGGGASGAGGGGTCGGDPLLFAPAELKMGTAFSAGAEAARGPGPGPPLPPAAALRPPGKRPPPPTAAEPPAKAVKAPGAKKPKAIRKLHFEDEVTTSPVLGLKIKEGPVEAPRGRAGGAARPLGEFICQLCKEEYADPFALAQHKCSRIVRVEYRCPECAKVFSCPANLASHRRWHKPRPAPAAARAPEPEAAARAEAREAPGGGSDRDTPSPGGVSESGSEDGLYECHHCAKKFRRQAYLRKHLLAHHQALQAKGAPLAPPAEDLLALYPGPDEKAPQEAAGDGEGAGVLGLSASAECHLCPVCGESFASKGAQERHLRLLHAAQVFPCKYCPATFYSSPGLTRHINKCHPSENRQVILLQVPVRPAC

SEQ ID NO: 15168 - protein, 566 aa, Homo Sapiens
MPRGFLVKRTKRTGGLYRVRLAERVFPLLGPQGAPPFLEEAPSASLPGAERATPPTREEPGKGLTAEAAREQSGSPCRAAGVSPGTGGREGAEWRAGGREGPGPSPSPSPSPAKPAGAELRRAFLERCLSSPVSAESFPGGAAAVAAFSCSVAPAAAPTPGEQFLLPLRAPFPEPALQPDPAPLSAALQSLKRAAGGERRGKAPTDCASGPAAAGIKKPKAMRKLSFADEVTTSPVLGLKIKEEEPGAPSRGLGGSRTPLGEFICQLCKEQYADPFALAQHRCSRIVRVEYRCPECDKVFSCPANLASHRRWHKPRPAAANAATVSSADGKPPSSSSSSSRDSGAIASFLAEGKENSRIERTADQHPQARDSSGADQHPDSAPRQGLQVLTHPEPPLPQGPYTEGVLGRRVPVPGSTSGGRGSEIFVCPYCHKKFRRQAYLRKHLSTHEAGSARALAPGFGSERGAPLAFACPLCGAHFPTADIREKHRLWHAVREELLLPALAGAPPETSGPSGPSDGSAQQIFSCKHCPSTFFSSPGLTRHINKCHPSESRQVLLLQMPLRPGC

SEQ ID NO: 15169 - protein, 325 aa, Homo Sapiens
MPITRMRMRPWLEMQINSNQIPGLIWINKEEMIFQIPWKHAAKHGWDINKDACLFRSWAIHTGRYKAGEKEPDPKTWKANFRCAMNSLPDIEEVKDQSRNKGSSAVRVYRMLPPLTKNQRKERKSKSSRDAKSKAKRKSCGDSSPDTFSDGLSSSTLPDDHSSYTVPGYMQDLEVEQALTPALSPCAVSSTLPDWHIPVEVVPDSTSDLYNFQVSPMPSTSEATTDEDEEGKLPEDIMKLLEQSEWQPTNVDGKGYLLNEPGVQPTSVYGDFSCKEEPEIDSPGGDIGLSLQRVFTDLKNMDATWLDSLLTPVRLPSIQAIPCAP

SEQ ID NO: 15170 - protein, 349 aa, Homo Sapiens
MPVERMRMRPWLEEQINSNTIPGLKWLNKEKKIFQIPWMHAARHGWDVEKDAPLFRNWAIHTGKHQPGVDKPDPKTWKANFRCAMNSLPDIEEVKDKSIKKGNNAFRVYRMLPLSERPSKKGKKPKTEKEDKVKHIKQEPVESSLGLSNGVSDLSPEYAVLTSTIKNEVDSTVNIIVVGQSHLDSNIENQEIVTNPPDICQVVEVTTESDEQPVSMSELYPLQISPVSSYAESETTDSVPSDEESAEGRPHWRKRNIEGKQYLSNMGTRGSYLLPGMASFVTSNKPDLQVTIKEESNPVPYNSSWPPFQDLPLSSSMTPASSSSRPDRETRASVIKKTSDITQARVKSC

SEQ ID NO: 15171 - protein, 427 aa, Homo Sapiens
MGTPKPRILPWLVSQLDLGQLEGVAWVNKSRTRFRIPWKHGLRQDAQQEDFGIFQAWAEATGAYVPGRDKPDLPTWKRNFRSALNRKEGLRLAEDRSKDPHDPHKIYEFVNSGVGDFSQPDTSPDTNGGGSTSDTQEDILDELLGNMVLAPLPDPGPPSLAVAPEPCPQPLRSPSLDNPTPFPNLGPSENPLKRLLVPGEEWEFEVTAFYRGRQVFQQTISCPEGLRLVGSEVGDRTLPGWPVTLPDPGMSLTDRGVMSYVRHVLSCLGGGLALWRAGQWLWAQRLGHCHTYWAVSEELLPNSGHGPDGEVPKDKEGGVFDLGPFIVDLITFTEGSGRSPRYALWFCVGESWPQDQPWTKRLVMVKVVPTCLRALVEMARVGGASSLENTVDLHISNSHPLSLTSDQYKAYLQDLVEGMDFQGPGES

SEQ ID NO: 15172 - protein, 451 aa, Homo Sapiens
MNLEGGGRGGEFGMSAVSCGNGKLRQWLIDQIDSGKYPGLVWENEEKSIFRIPWKHAGKQDYNREEDAALFKAWALFKGKFREGIDKPDPPTWKTRLRCALNKSNDFEELVERSQLDISDPYKVYRIVPEGAKKGAKQLTLEDPQMSMSHPYTMTTPYPSLPAQQVHNYMMPPLDRSWRDYVPDQPHPEIPYQCPMTFGPRGHHWQGPACENGCQVTGTFYACAPPESQAPGVPTEPSIRSAEALAFSDCRLHICLYYREILVKELTTSSPEGCRISHGHTYDASNLDQVLFPYPEDNGQRKNIEKLLSHLERGVVLWMAPDGLYAKRLCQSRIYWDGPLALCNDRPNKLERDQTCKLFDTQQFLSELQAFAHHGRSLPRFQVTLCFGEEFPDPQRQRKLITAHVEPLLARQLYYFAQQNSGHFLRGYDLPEHISNPEDYHRSIRHSSIQE

SEQ ID NO: 15173 - protein, 498 aa, Homo Sapiens
MNQSIPVAPTPPRRVRLKPWLVAQVNSCQYPGLQWVNGEKKLFCIPWRHATRHGPSQDGDNTIFKAWAKETGKYTEGVDEADPAKWKANLRCALNKSRDFRLIYDGPRDMPPQPYKIYEVCSNGPAPTDSQPPEDYSFGAGEEEEEEEELQRMLPSLSLTEDVKWPPTLQPPTLRPPTLQPPTLQPPVVLGPPAPDPSPLAPPPGNPAGFRELLSEVLEPGPLPASLPPAGEQLLPDLLISPHMLPLTDLEIKFQYRGRPPRALTISNPHGCRLFYSQLEATQEQVELFGPISLEQVRFPSPEDIPSDKQRFYTNQLLDVLDRGLILQLQGQDLYAIRLCQCKVFWSGPCASAHDSCPNPIQREVKTKLFSLEHFLNELILFQKGQTNTPPPFEIFFCFGEEWPDRKPREKKLITVQVVPVAARLLLEMFSGELSWSADSIRLQISNPDLKDRMVEQFKELHHIWQSQQRLQPVAQAPPGAGLGVGQGPWPMHPAGMQ

SEQ ID NO: 15174 - protein, 467 aa, Homo Sapiens
MALHPRRVRLKPWLVAQVDSGLYPGLIWLHRDSKRFQIPWKHATRHSPQQEEENTIFKAWAVETGKYQEGVDDPDPAKWKAQLRCALNKSREFNLMYDGTKEVPMNPVKIYQVCDIPQPQGSIINPGSTGSAPWDEKDNDVDEEDEEDELDQSQHHVPIQDTFPFLNINGSPMAPASVGNCSVGNCSPEAVWPKTEPLEMEVPQAPIQPFYSSPELWISSLPMTDLDIKFQYRGKEYGQTMTVSNPQGCRLFYGDLGPMPDQEELFGPVSLEQVKFPGPEHITNEKQKLFTSKLLDVMDRGLILEVSGHAIYAIRLCQCKVYWSGPCAPSLVAPNLIERQKKVKLFCLETFLSDLIAHQKGQIEKQPPFEIYLCFGEEWPDGKPLERKLILVQVIPVVARMIYEMFSGDFTRSFDSGSVRLQISTPDIKDNIVAQLKQLYRILQTQESWQPMQPTPSMQLPPALPPQ

SEQ ID NO: 15175 - protein, 503 aa, Homo Sapiens
MALAPERAAPRVLFGEWLLGEISSGCYEGLQWLDEARTCFRVPWKHFARKDLSEADARIFKAWAVARGRWPPSSRGGGPPPEAETAERAGWKTNFRCALRSTRRFVMLRDNSGDPADPHKVYALSRELCWREGPGTDQTEAEAPAAVPPPQGGPPGPFLAHTHAGLQAPGPLPAPAGDKGDLLLQAVQQSCLADHLLTASWGADPVPTKAPGEGQEGLPLTGACAGGPGLPAGELYGWAVETTPSPGPQPAALTTGEAAAPESPHQAEPYLSPSPSACTAVQEPSPGALDVTIMYKGRTVLQKVVGHPSCTFLYGPPDPAVRATDPQQVAFPSPAELPDQKQLRYTEELLRHVAPGLHLELRGPQLWARRMGKCKVYWEVGGPPGSASPSTPACLLPRNCDTPIFDFRVFFQELVEFRARQRRGSPRYTIYLGFGQDLSAGRPKEKSLVLVKLEPWLCRVHLEGTQREGVSSLDSSSLSLCLSSANSLYDDIECFLMELEQPA

SEQ ID NO: 15176 - protein, 426 aa, Homo Sapiens
MCDRNGGRRLRQWLIEQIDSSMYPGLIWENEEKSMFRIPWKHAGKQDYNQEVDASIFKAWAVFKGKFKEGDKAEPATWKTRLRCALNKSPDFEEVTDRSQLDISEPYKVYRIVPEEEQKCKLGVATAGCVNEVTEMECGRSEIDELIKEPSVDDYMGMIKRSPSPPEACRSQLLPDWWAQQPSTGVPLVTGYTTYDAHHSAFSQMVISFYYGGKLVGQATTTCPEGCRLSLSQPGLPGTKLYGPEGLELVRFPPADAIPSERQRQVTRKLFGHLERGVLLHSSRQGVFVKRLCQGRVFCSGNAVVCKGRPNKLERDEVVQVFDTSQFFRELQQFYNSQGRLPDGRVVLCFGEEFPDMAPLRSKLILVQIEQLYVRQLAEEAGKSCGAGSVMQAPEEPPPDQVFRMFPDICASHQRSFFRENQQITV

SEQ ID NO: 15177 - protein, 393 aa, Homo Sapiens
MASGRARCTRKLRNWVVEQVESGQFPGVCWDDTAKTMFRIPWKHAGKQDFREDQDAAFFKAWAIFKGKYKEGDTGGPAVWKTRLRCALNKSSEFKEVPERGRMDVAEPYKVYQLLPPGIVSGQPGTQKVPSKRQHSSVSSERKEEEDAMQNCTLSPSVLQDSLNNEEEGASGGAVHSDIGSSSSSSSPEPQEVTDTTEAPFQGDQRSLEFLLPPEPDYSLLLTFIYNGRVVGEAQVQSLDCRLVAEPSGSESSMEQVLFPKPGPLEPTQRLLSQLERGILVASNPRGLFVQRLCPIPISWNAPQAPPGPGPHLLPSNECVELFRTAYFCRDLVRYFQGLGPPPKFQVTLNFWEESHGSSHTPQNLITVKMEQAFARYLLEQTPEQQAAILSLV

SEQ ID NO: 15178 - protein, 480 aa, Homo Sapiens
MSFPQLGYPQYLSAAGPGAYGGERPGVLAAAAAAAAAASSGRPGAAELGGGAGAAAVTSVLGMYAAAGPYAGAPNYSAFLPYAADLSLFSQMGSQYELKDNPGVHPATFAAHTAPAYYPYGQFQYGDPGRPKNATRESTSTLKAWLNEHRKNPYPTKGEKIMLAIITKMTLTQVSTWFANARRRLKKENKVTWGARSKDQEDGALFGSDTEGDPEKAEDDEEIDLESIDIDKIDEHDGDQSNEDDEDKAEAPHAPAAPSALARDQGSPLAAADVLKPQDSPLGLAKEAPEPGSTRLLSPGAAAGGLQGAPHGKPKIWSLAETATSPDGAPKASPPPPAGHPGAHGPSAGAPLQHPAFLPSHGLYTCHIGKFSNWTNSAFLAQGSLLNMRSFLGVGAPHAAPHGPHLPAPPPPQPPVAIAPGALNGDKASVRSSPTLPERDLVPRPDSPAQQLKSPFQPVRDNSLAPQEGTPRILAALPSA

SEQ ID NO: 15179 - protein, 471 aa, Homo Sapiens
MSYPQGYLYQAPGSLALYSCPAYGASALAAPRSEELARSASGSAFSPYPGSAAFTAQAATGFGSPLQYSADAAAAAAGFPSYMGAPYDAHTTGMTGAISYHPYGSAAYPYQLNDPAYRKNATRDATATLKAWLNEHRKNPYPTKGEKIMLAIITKMTLTQVSTWFANARRRLKKENKMTWAPRNKSEDEDEDEGDATRSKDESPDKAQEGTETSAEDEGISLHVDSLTDHSCSAESDGEKLPCRAGDPLCESGSECKDKYDDLEDDEDDDEEGERGLAPPKPVTSSPLTGLEAPLLSPPPEAAPRGGRKTPQGSRTSPGAPPPASKPKLWSLAEIATSDLKQPSLGPGCGPPGLPAAAAPASTGAPPGGSPYPASPLLGRPLYYTSPFYGNYTNYGNLNAALQGQGLLRYNSAAAAPGEALHTAPKAASDAGKAGAHPLESHYRSPGGGYEPKKDASEGCTVVGGGVQPYL

SEQ ID NO: 15180 - protein, 501 aa, Homo Sapiens
MSFPQLGYQYIRPLYPSERPGAAGGSGGSAGARGGLGAGASELNASGSLSNVLSSVYGAPYAAAAAAAAAQGYGAFLPYAAELPIFPQLGAQYELKDSPGVQHPAAAAAFPHPHPAFYPYGQYQFGDPSRPKNATRESTSTLKAWLNEHRKNPYPTKGEKIMLAIITKMTLTQVSTWFANARRRLKKENKMTWAPRSRTDEEGNAYGSEREEEDEEEDEEDGKRELELEEEELGGEEEDTGGEGLADDDEDEEIDLENLDGAATEPELSLAGAARRDGDLGLGPISDSKNSDSEDSSEGLEDRPLPVLSLAPAPPPVAVASPSLPSPPVSLDPCAPAPAPASALQKPKIWSLAETATSPDNPRRSPPGAGGSPPGAAVAPSALQLSPAAAAAAAHRLVSAPLGKFPAWTNRPFPGPPPGPRLHPLSLLGSAPPHLLGLPGAAGHPAAAAAFARPAEPEGGTDRCSALEVEKKLLKTAFQPVPRRPQNHLDAALVLSALSSS

SEQ ID NO: 15181 - protein, 519 aa, Homo Sapiens
MSYPQFGYPYSSAPQFLMATNSLSTCCESGGRTLADSGPAASAQAPVYCPVYESRLLATARHELNSAAALGVYGGPYGGSQGYGNYVTYGSEASAFYSLNSFDSKDGSGSAHGGLAPAAAAYYPYEPALGQYPYDRYGTMDSGTRRKNATRETTSTLKAWLQEHRKNPYPTKGEKIMLAIITKMTLTQVSTWFANARRRLKKENKMTWPPRNKCADEKRPYAEGEEEEGGEEEAREEPLKSSKNAEPVGKEEKELELSDLDDFDPLEAEPPACELKPPFHSLDGGLERVPAAPDGPVKEASGALRMSLAAGGGAALDEDLERARSCLRSAAAGPEPLPGAEGGPQVCEAKLGFVPAGASAGLEAKPRIWSLAHTATAAAAAATSLSQTEFPSCMLKRQGPAAPAAVSSAPATSPSVALPHSGALDRHQDSPVTSLRNWVDGVFHDPILRHSTLNQAWATAKGALLDPGPLGRSLGAGANVLTAPLARAFPPAVPQDAPAAGAARELLALPKAGGKPFCA

SEQ ID NO: 15182 - protein, 483 aa, Homo Sapiens
MSYPQGYLYQPSASLALYSCPAYSTSVISGPRTDELGRSSSGSAFSPYAGSTAFTAPSPGYNSHLQYGADPAAAAAAAFSSYVGSPYDHTPGMAGSLGYHPYAAPLGSYPYGDPAYRKNATRDATATLKAWLNEHRKNPYPTKGEKIMLAIITKMTLTQVSTWFANARRRLKKENKMTWTPRNRSEDEEEEENIDLEKNDEDEPQKPEDKGDPEGPEAGGAEQKAASGCERLQGPPTPAGKETEGSLSDSDFKEPPSEGRLDALQGPPRTGGPSPAGPAAARLAEDPAPHYPAGAPAPGPHPAAGEVPPGPGGPSVIHSPPPPPPPAVLAKPKLWSLAEIATSSDKVKDGGGGNEGSPCPPCPGPIAGQALGGSRASPAPAPSRSPSAQCPFPGGTVLSRPLYYTAPFYPGYTNYGSFGHLHGHPGPGPGPTTGPGSHFNGLNQTVLNRADALAKDPKMLRSQSQLDLCKDSPYELKKGMSDI

SEQ ID NO: 15183 - protein, 446 aa, Homo Sapiens
MSFPHFGHPYRGASQFLASASSSTTCCESTQRSVSDVASGSTPAPALCCAPYDSRLLGSARPELGAALGIYGAPYAAAAAAQSYPGYLPYSPEPPSLYGALNPQYEFKEAAGSFTSSLAQPGAYYPYERTLGQYQYERYGAVELSGAGRRKNATRETTSTLKAWLNEHRKNPYPTKGEKIMLAIITKMTLTQVSTWFANARRRLKKENKMTWAPKNKGGEERKAEGGEEDSLGCLTADTKEVTASQEARGLRLSDLEDLEEEEEEEEEAEDEEVVATAGDRLTEFRKGAQSLPGPCAAAREGRLERRECGLAAPRFSFNDPSGSEEADFLSAETGSPRLTMHYPCLEKPRIWSLAHTATASAVEGAPPARPRPRSPECRMIPGQPPASARRLSVPRDSACDESSCIPKAFGNPKFALQGLPLNCAPCPRRSEPVVQCQYPSGAEAG

SEQ ID NO: 15184 - protein, 349 aa, Homo Sapiens
MGDMGDPPKKKRLISLCVGCGNQIHDQYILRVSPDLEWHAACLKCAECNQYLDESCTCFVRDGKTYCKRDYIRLYGIKCAKCSIGFSKNDFVMRARSKVYHIECFRCVACSRQLIPGDEFALREDGLFCRADHDVVERASLGAGDPLSPLHPARPLQMAAEPISARQPALRPHVHKQPEKTTRVRTVLNEKQLHTLRTCYAANPRPDALMKEQLVEMTGLSPRVIRVWFQNKRCKDKKRSIMMKQLQQQQPNDKTNIQGMTGTPMVAASPERHDGGLQANPVEVQSYQPPWKVLSDFALQSDIDQPAFQQLVNFSEGGPGSNSTGSEVASMSSQLPDTPNSMVASPIEA

SEQ ID NO: 15185 - protein, 359 aa, Homo Sapiens
MVDIIFHYPFLGAMGDHSKKKPGTAMCVGCGSQIHDQFILRVSPDLEWHAACLKCAECSQYLDETCTCFVRDGKTYCKRDYVRLFGIKCAKCQVGFSSSDLVMRARDSVYHIECFRCSVCSRQLLPGDEFSLREHELLCRADHGLLLERAAAGSPRSPGPLPGARGLHLPDAGSGRQPALRPHVHKQTEKTTRVRTVLNEKQLHTLRTCYAANPRPDALMKEQLVEMTGLSPRVIRVWFQNKRCKDKKKSILMKQLQQQQHSDKTSLQGLTGTPLVAGSPIRHENAVQGSAVEVQTYQPPWKALSEFALQSDLDQPAFQQLVSFSESGSLGNSSGSDVTSLSSQLPDTPNSMVPSPVET

SEQ ID NO: 15186 - protein, 245 aa, Homo Sapiens
MCAEVGPALCRGMERNSLGCCEAPKKLSLSFSIEAILKRPARRSDMDRPEGPGEEGPGEAAASGSGLEKPPKDQPQEGRKSKRRVRTTFTTEQLHELEKIFHFTHYPDVHIRSQLAARINLPEARVQIWFQNQRAKWRKQEKIGNLGAPQQLSEASVALPTNLDVAGPTWTSTALRRLAPPTSCCPSAQDQLASAWFPAWITLLPAHPWETQPVPGLPIHQTCIPVLCILPPPHPKWGSICATST

SEQ ID NO: 15187 - protein, 1246 aa, Homo Sapiens [sequence omitted]

SEQ ID NO: 15188 - protein, 243 aa, Homo Sapiens
MTGIAAASFFSNTCRFGGCGLHFPTLADLIEHIEDNHIDTDPRVLEKQELQQPTYVALSYINRFMTDAARREQESLKKKIQPKLSLTLSSSVSRGNVSTPPRHSSGSLTPPVTPPITPSSSFRSSTPTGSEYDEEEVDYEESDSDESWTTESAISSEAILSSMCMNGGEEKPFACPVPGCKKRYKNVNGIKYHAKNGHRTQIRVRKPFKCRCGKSYKTAQGLRHHTINFHPPVSAEIIRKMQQ

SEQ ID NO: 15189 - protein, 163 aa, Homo Sapiens
MMPGQIPDPSVTTGSLPGLGPLTGLPSSALTVEELKYADIRNLGAMIAPLHFLEVKLGKRPQPVKSELDEEEERRKRRREKNKVAAARCRNKKKERTEFLQRESERLELMNAELKTQIEELKQERQQLILMLNRHRPTCIVRTDSVKTPESEGNPLLEQLEKK

SEQ ID NO: 15190 - protein, 331 aa, Homo Sapiens
MTAKMETTFYDDALNASFLPSESGPYGYSNPKILKQSMTLNLADPVGSLKPHLRAKNSDLLTSPDVGLLKLASPELERLIIQSSNGHITTTPTPTQFLCPKNVTDEQEGFAEGFVRALAELHSQNTLPSVTSAAQPVNGAGMVAPAVASVAGGSGSGGFSASLHSEPPVYANLSNFNPGALSSGGGAPSYGAAGLAFPAQPQQQQQPPHHLPQQMPVQHPRLQALKEEPQTVPEMPGETPPLSPIDMESQERIKAERKRMRNRIAASKCRKRKLERIARLEEKVKTLKAQNSELASTANMLREQVAQLKQKVMNHVNSGCQLMLTQQLQTF

SEQ ID NO: 15191 - protein, 347 aa, Homo Sapiens
MCTKMEQPFYHDDSYTATGYGRAPGGLSLHDYKLLKPSLAVNLADPYRSLKAPGARGPGPEGGGGGSYFSGQGSDTGASLKLASSELERLIVPNSNGVITTTPTPPGQYFYPRGGGSGGGAGGAGGGVTEEQEGFADGFVKALDDLHKMNHVTPPNVSLGATGGPPAGPGGVYAGPEPPPVYTNLSSYSPASASSGGAGAAVGTGSSYPTTTISYLPHAPPFAGGHPAQLGLGRGASTFKEEPQTVPEARSRDATPPVSPINMEDQERIKVERKRLRNRLAATKCRKRKLERIARLEDKVKTLKAENAGLSSTAGLLREQVAQLKQKVMTHVSNGCQLLLGVKGHAF

SEQ ID NO: 15192 - protein, 347 aa, Homo Sapiens
METPFYGDEALSGLGGGASGSGGSFASPGRLFPGAPPTAAAGSMMKKDALTLSLSEQVAAALKPAAAPPPTPLRADGAPSAAPPDGLLASPDLGLLKLASPELERLIIQSNGLVTTTPTSSQFLYPKVAASEEQEFAEGFVKALEDLHKQNQLGAGAAAAAAAAAAGGPSGTATGSAPPGELAPAAAAPEAPVYANLSSYAGGAGGAGGAATVAFAAEPVPFPPPPPPGALGPPRLAALKDEPQTVPDVPSFGESPPLSPIDMDTQERIKAERKRLRNRIAASKCRKRKLERISRLEEKVKTLKSQNTELASTASLLREQVAQLKQKVLSHVNSGCQLLPQHQVPAY

SEQ ID NO: 15193 - protein, 513 aa, Homo Sapiens
MAEVGEIIEGCRLPVLRRNQDNEDEWPLAEILSVKDISGRKLFYVHYIDFNKRLDEWVTHERLDLKKIQFPKKEAKTPTKNGLPGSRPGSPEREVPASAQASGKTLPIPVQITLRFNLPKEREAIPGGEPDQPLSSSSCLQPNHRSTKRKVEVVSPATPVPSETAPASVFPQNGAARRAVAAQPGRKRKSNCLGTDEDSQDSSDGIPSAPRMTGSLVSDRSHDDIVTRMKNIECIELGRHRLKPWYFSPYPQELTTLPVLYLCEFCLKYGRSLKCLQRHLTKCDLRHPPGNEIYRKGTISFFEIDGRKNKSYSQNLCLLAKCFLDHKTLYYDTDPFLFYVMTEYDCKGFHIVGYFSKEKESTEDYNVACILTLPPYQRRGYGKLLIEFSYELSKVEGKTGTPEKPLSDLGLLSYRSYWSQTILEILMGLKSESGERPQITINEISEITSIKKEDVISTLQYLNLINYYKGQYILTLSEDIVDGHERAMLKRLLRIDSKCLHFTPKDWSKRGKW

SEQ ID NO: 15194 - protein, 2004 aa, Homo Sapiens
MVKLANPLYTEWILEAIKKVKKQKQRPSEERICNAVSSSHGLDRKTVLEQLELSVKDGTILKVSNKGLNSYKDPDNPGRIALPKPRNHGKLDNKQNVDWNKLIKRAVEGLAESGGSTLKSIERFLKGQKDVSALFGGSAASGFHQQLRLAIKRAIGHGRLLKDGPLYRLNTKATNVDGKESCESLSCLPPVSLLPHEKDKPVAEPIPICSFCLGTKEQNREKKPEELISCADCGNSGHPSCLKFSPELTVRVKALRWQCIECKTCSSCRDQGKNADNMLFCDSCDRGFHMECCDPPLTRMPKGMWICQICRPRKKGRKLLQKKAAQIKRRYTNPIGRPKNRLKKQNTVSKGPFSKVRTGPGRGRKRKITLSSQSASSSSEEGYLERIDGLDFCRDSNVSLKFNKKTKGLIDGLTKFFTPSPDGRKARGEVVDYSEQYRIRKRGNRKSSTSDWPTDNQDGWDGKQENEERLFGSQEIMTEKDMELFRDIQEQALQKVGVTGPPDPQVRCPSVIEFGKYEIHTWYSSPYPQEYSRLPKLYLCEFCLKYMKSRTILQQHMKKCGWFHPPANEIYRKNNISVFEVDGNVSTIYCQNLCLLAKLFLDHKTLYYDVEPFLFYVLTQNDVKGCHLVGYFSKEKHCQQKYNVSCIMILPQYQRKGYGRFLIDFSYLLSKREGQAGSPEKPLSDLGRLSYMAYWKSVILECLYHQNDKQISIKKLSKLTGICPQDITSTLHHLRMLDFRSDQFVIIRREKLIQDHMAKLQLNLRPVDVDPECLRWTPVIVSNSVVSEEEEEEAEEGENEEPQCQERELEISVGKSVSHENKEQDSYSVESEKKPEVMAPVSSTRLSKQVLPHDSLPANSQPSRRGRWGRKNRKTQERFGDKDSKLLLEETSSAPQEQYGECGEKSEATQEQYTESEEQLVASEEQPSQDGKPDLPKRRLSEGVEPWRGQLKKSPEALKCRLTEGSERLPRRYSEGDRAVLRGFSESSEEEEEPESPRSSSPPILTKPTLKRKKPFLHRRRRVRKRKHHNSSVVTETISETTEVLDEPFEDSDSERPMPRLEPTFEIDEEEEEEDENELFPREYFRRLSSQDVLRCQSSSKRKSKDEEEDEESDDADDTPILKPVSLLRKRDVKNSPLEPDTSTPLKKKKGWPKGKSRKPIHWKKRPGRKPGFKLSREIMPVSTQACVIEPIVSIPKAGRKPKIQESEETVEPKEDMPLPEERKEEEEMQAEAEEAEEGEEEDAASSEVPAASPADSSNSPETETKEPEVEEEEEKPRVSEEQRQSEEEQQELEEPEPEEEEDAAAETAQNDDHDADDEDDGHLESTKKKELEEQPTREDVKEEPGVQESFLDANMQKSREKIKDKEETELDSEEEQPSHDTSVVSEQMAGSEDDHEEDSHTKEELIELKEEEEIPHSELDLETVQAVQSLTQEESSEHEGAYQDCEETLAACQTLQSYTQADEDPQMSMVEDCHASEHNSPISSVQSHPSQSVRSVSSPNVPALESGYTQISPEQGSLSAPSMQNMETSPMMDVPSVSDHSQQVVDSGFSDLGSIESTTENYENPSSYDSTMGGSICGNSSSQSSCSYGGLSSSSSLTQSSCVVTQQMASMGSSCSMMQQSSVQPAANCSIKSPQSCVVERPPSNQQQQPPPPPPQQPQPPPPQPQPAPQPPPPQQQPQQQPQPQPQQPPPPPPPQQQPPLSQCSMNNSFTPAPMIMEIPESGSTGNISIYERIPGDFGAGSYSQPSATFSLAKLQQLTNTIMDPHAMPYSHSPAVTSYATSVSLSNTGLAQLAPSHPLAGTPQAQATMTPPPNLASTTMNLTSPLLQCNMSATNIGIPHTQRLQGQMPVKGHISIRSKSAPLPSAAAHQQQLYGRSPSAVAMQAGPRALAVQRGMNMGVNLMPTPAYNVNSMNMNTLNAMNSYRMTQPMMNSSYHSNPAYMNQTAQYPMQMQMGMMGSQAYTQQPMQPNPHGNMMYTGPSHHSYMNAAGVPKQSLNGPYMRR

SEQ ID NO: 15195 - protein, 2073 aa, Homo Sapiens
MVKLANPLYTEWILEAIQKIKKQKQRPSEERICHAVSTSHGLDKKTVSEQLELSVQDGSVLKVTNKGLASYKDPDNPGRFSSVKPGTFPKSAKGSRGSCNDLRNVDWNKLLRRAIEGLEEPNGSSLKNIEKYLRSQSDLTSTTNNPAFQQRLRLGAKRAVNNGRLLKDGPQYRVNYGSLDGKGAPQYPSAFPSSLPPVSLLPHEKDQPRADPIPICSFCLGTKESNREKKPEELLSCADCGSSGHPSCLKFCPELTTNVKALRWQCIECKTCSACRVQGRNADNMLFCDSCDRGFHMECCDPPLSRMPKGMWICQVCRPKKKGRKLLHEKAAQIKRRYAKPIGRPKNKLKQRLLSVTSDEGSMNAFTGRGSPGRGQKTKVCTTPSSGHAASGKDSSSRLAVTDPTRPGATTKITTTSTYISASTLKVNKKTKGLIDGLTKFFTPSPDGRRSRGEIIDFSKHYRPRKKVSQKQSCTSHVLATGTTQKLKPPPSSLPPPTPISGQSPSSQKSSTATSSPSPQSSSSQCSVPSLSSLTTNSQLKALFDGLSHIYTTQGQSRKKGHPSYAPPKRMRRKTELSSTAKSKAHFFGKRDIRSRFISHSSSSSWGMARGSIFKAIAHFKRTTFLKKHRMLGRLKYKVTPQMGTPSPGKGSLTDGRIKPDQDDDTEIKINIKQESADVNVIGNKDVVTEEDLDVFKQAQELSWEKIECESGVEDCGRYPSVIEFGKYEIQTWYSSPYPQEYARLPKLYLCEFCLKYMKSKNILLRHSKKCGWFHPPANEIYRRKDLSVFEVDGNMSKIYCQNLCLLAKLFLDHKTLYYDVEPFLFYVLTKNDEKGCHLVGYFSKEKLCQQKYNVSCIMIMPQHQRQGFGRFLIDFSYLLSRREGQAGSPEKPLSDLGRLSYLAYWKSVILEYLYHHHERHISIKAISRATGMCPHDIATTLQHLHMIDKRDGRFVIIRREKLILSHMEKLKTCSRANELDPDSLRWTPILISNAAVSEEEREAEKEAERLMEQASCWEKEEQEILSTRANSRQSPAKVQSKNKYLHSPESRPVTGERGQLLELSKESSEEEEEEEDEEEEEEEEEEEEDEEEEEEEEEEEEEENIQSSPPRLTKPQSVAIKRKRPFVLKKKRGRKRRRINSSVTTETISETTEVLNEPFDNSDEERPMPQLEPTCEIEVEEDGRKPVLRKAFQHQPGKKRQTEEEEGKDNHCFKNADPCRNNMNDDSSNLKEGSKDNPEPLKCKQVWPKGTKRGLSKWRQNKERKTGFKLNLYTPPETPMEPDEQVTVEEQKETSEGKTSPSPIRIEEEVKETGEALLPQEENRREETCAPVSPNTSPGEKPEDDLIKPEEEEEEEEEEEEEEEEEEGEEEEGGGNVEKDPDGAKSQEKEEPEISTEKEDSARLDDHEEEEEEDEEPSHNEDHDADDEDDSHMESAEVEKEELPRESFKEVLENQETFLDLNVQPGHSNPEVLMDCGVDLTASCNSEPKELAGDPEAVPESDEEPPPGEQAQKQDQKNSKEVDTEFKEGNPATMEIDSETVQAVQSLTQESSEQDDTFQDCAETQEACRSLQNYTRADQSPQIATTLDDCQQSDHSSPVSSVHSHPGQSVRSVNSPSVPALENSYAQISPDQSAISVPSLQNMETSPMMDVPSVSDHSQQVVDSGFSDLGSIESTTENYENPSSYDSTMGGSICGNGSSQNSCSYSNLTSSSLTQSSCAVTQQMSNISGSCSMLQQTSISSPPTCSVKSPQGCVVERPPSSSQQLAQCSMAANFTPPMQLAEIPETSNANIGLYERMGQSDFGAGHYPQPSATFSLAKLQQLTNTLIDHSLPYSHSAAVTSYANSASLSTPLSNTGLVQLSQSPHSVPGGPQAQATMTPPPNLTPPPMNLPPPLLQRNMAASNIGISHSQRLQTQIASKGHISMRTKSASLSPAAATHQSQIYGRSQTVAMQGPARTLTMQRGMNMSVNLMPAPAYNVNSVNMNMNTLNAMNGYSMSQPMMNSGYHSNHGYMNQTPQYPMQMQMGMMGTQPYAQQPMQTPPHGNMMYTAPGHHGYMNTGMSKQSLNGSYMRR

SEQ ID NO: 15196 - protein, 611 aa, Homo Sapiens
MPRRKRNAGSSSDGTEDSDFSTDLEHTDSSESDGTSRRSARVTRSSARLSQSSQDSSPVRNLQSFGTEEPAYSTRRVTRSQQQPTPVTPKKYPLRQTRSSGSETEQVVDFSDRETKNTADHDESPPRTPTGNAPSSESDIDISSPNVSHDESIAKDMSLKDSGSDLSHRPKRRRFHESYNFNMKCPTPGCNSLGHLTGKHERHFSISGCPLYHNLSADECKVRAQSRDKQIEERMLSHRQDDNNRHATRHQAPTERQLRYKEKVAELRKKRNSGLSKEQKEKYMEHRQTYGNTREPLLENLTSEYDLDLFRRAQARASEDLEKLRLQGQITEGSNMIKTIAFGRYELDTWYHSPYPEEYARLGRLYMCEFCLKYMKSQTILRRHMAKCVWKHPPGDEIYRKGSISVFEVDGKKNKIYCQNLCLLAKLFLDHKTLYYDVEPFLFYVMTEADNTGCHLIGYFSKEKNSFLNYNVSCILTMPQYMRQGYGKMLIDFSYLLSKVEEKVGSPERPLSDLGLISYRSYWKEVLLRYLHNFQGKEISIKEISQETAVNPVDIVSTLQALQMLKYWKGKHLVLKRQDLIDEWIAKEAKRSNSNKTMDPSCLKWTPPKGT

SEQ ID NO: 15197 - protein, 458 aa, Homo Sapiens
MAAQGAAAAVAAGTSGVAGEGEPGPGENAAAEGTAPSPGRVSPPTPARGEPEVTVEIGETYLCRRPDSTWHSAEVIQSRVNDQEGREEFYVHYVGFNRRLDEWVDKNRLALTKTVKDAVQKNSEKYLSELAEQPERKITRNQKRKHDEINHVQKTYAEMDPTTAALEKEHEAITKVKYVDKIHIGNYEIDAWYFSPFPEDYGKQPKLWLCEYCLKYMKYEKSYRFHLGQCQWRQPPGKEIYRKSNISVYEVDGKDHKIYCQNLCLLAKLFLDHKTLYFDVEPFVFYILTEVDRQGAHIVGYFSKEKESPDGNNVACILTLPPYQRRGYGKFLIAFSYELSKLESTVGSPEKPLSDLGKLSYRSYWSWVLLEILRDFRGTLSIKDLSQMTSITQNDIISTLQSLNMVKYWKGQHVICVTPKLVEEHLKSAQYKKPPITVDSVCLKWAPPKHKQVKLSKK

SEQ ID NO: 15198 - protein, 381 aa, Homo Sapiens
MSRHEGVSCDACLKGNFRGRRYKCLICYDYDLCASCYESGATTTRHTTDHPMQCILTRVDFDLYYGGEAFSVEQPQSFTCPYCGKMGYTETSLQEHVTSEHAETSTEVICPICAALPGGDPNHVTDDFAAHLTLEHRAPRDLDESSGVRHVRRMFHPGRGLGGPRARRSNMHFTSSSTGGLSSSQSSYSPSNREAMDPIAELLSQLSGVRRSAGGQLNSSGPSASQLQQLQMQLQLERQHAQAARQQLETARNATRRTNTSSVTTTITQSTATTNIANTESSQQTLQNSQFLLTRLNDPKMSETERQSMESERADRSLFVQELLLSTLVREESSSSDEDDRGEMADFGAMGCVDIMPLDVALENLNLKESNKGNEPPPPPL

SEQ ID NO: 15199 - protein, 256 aa, Homo Sapiens; identical to SEQ ID NO: 7382

SEQ ID NO: 15200 - protein, 1162 aa, Homo Sapiens
MEPEEERIRYSQRLRGTMRRRYEDDGISDDEIEGKRTFDLEEKLHTNKYNANFVTFMEGKDFNVEYIQRGGLRDPLIFKNSDGLGIKMPDPDFTVNDVKMCVGSRRMVDVMDVNTQKGIEMTMAQWTRYYETPEEEREKLYNVISLEFSHTRLENMVQRPSTVDFIDWVDNMWPRHLKESQTESTNAILEMQYPKVQKYCLMSVRGCYTDFHVDFGGTSVWYHIHQGGKVFWLIPPTAHNLELYENWLLSGKQGDIFLGDRVSDCQRIELKQGYTFVIPSGWIHAVYTPTDTLVFGGNFLHSFNIPMQLKIYNIEDRTRVPNKFRYPFYYEMCWYVLERYVYCITNRSHLTKEFQKESLSMDLELNGLESGNGDEEAVDREPRRLSSRRSVLTSPVANGVNLDYDGLGKTCRSLPSLKKTLAGDSSSDCSRGSHNGQVWDPQCAPRKDRQVHLTHFELEGLRCLVDKLESLPLHKKCVPTGIEDEDALIADVKILLEELANSDPKLALTGVPIVQWPKRDKLKFPTRPKVRVPTIPITKPHTMKPAPRLTPVRPAAASPIVSGARRRRVRCRKCKACVQGECGVCHYCRDMKKFGGPGRMKQSCVLRQCLAPRLPHSVTCSLCGEVDQNEETQDFEKKLMECCICNEIVHPGCLQMDGEGLLNEELPNCWECPKCYQEDSSEKAQKRKMEESDEEAVQAKVLRPLRSCDEPLTPPPHSPTSMLQLIHDPVSPRGMVTRSSPGAGPSDHHSASRDERFKRRQLLRLQATERTMVREKENNPSGKKELSEVEKAKIRGSYLTVTLQRPTKELHGTSIVPKLQAITASSANLRHSPRVLVQHCPARTPQRGDEEGLGGEEEEEEEEEEEDDSAEEGGAARLNGRGSWAQDGDESWMQREVWMSVFRYLSRRELCECMRVCKTWYKWCCDKRLWTKIDLSRCKAIVPQALSGIIKRQPVSLDLSWTNISKKQLTWLVNRLPGLKDLLLAGCSWSAVSALSTSSCPLLRTLDLRWAVGIKDPQIRDLLTPPADKPGQDNRSKLRNMTDFRLAGLDITDATLRLIIRHMPLLSRLDLSHCSHLTDQSSNLLTAVGSSTRYSLTELNMAGCNKLTDQTLIYLRRIANVTLIDLRGCKQITRKACEHFISDLSINSLYCLSDEKLIQKIS

SEQ ID NO: 15201 - protein, 1690 aa, Homo Sapiens
MAGVGPGGYAAEFVPPPECPVFEPSWEEFTDPLSFIGRIRPLAEKTGICKIRPPKDWQPPFACEVKSFRFTPRVQRLNELEAMTRVRLDFLDQLAKFWELQGSTLKIPVVERKILDLYALSKIVASKGGFEMVTKEKKWSKVGSRLGYLPGKGTGSLLKSHYERILYPYELFQSGVSLMGVQMPNLDLKEKVEPEVLSTDTQTSPEPGTRMNILPKRTRRVKTQSESGDVSRNTELKKLQIFGAGPKVVGLAMGTKDKEDEVTRRRKVTNRSDAFNMQMRQRKGTLSVNFVDLYVCMFCGRGNNEDKLLLCDGCDDSYHTFCLIPPLPDVPKGDWRCPKCVAEECSKPREAFGFEQAVREYTLQSFGEMADNFKSDYFNMPVHMVPTELVEKEFWRLVSSIEEDVIVEYGADISSKDFGSGFPVKDGRRKILPEEEEYALSGWNLNNMPVLEQSVLAHINVDISGMKVPWLYVGMCFSSFCWHIEDHWSYSINYLHWGEPKTWYGVPSHAAEQLEEVMRELAPELFESQPDLLHQLVTIMNPNVLMEHGVPVYRTNQCAGEFVVTFPRAYHSGFNQGYNFAEAVNFCTADWLPIGRQCVNHYRRLRRHCVFSHEELIFKMAADPECLDVGLAAMVCKELTLMTEEETRLRESVVQMGVLMSEEEVFELVPDDERQCSACRTTCFLSALTCSCNPERLVCLYHPTDLCPCPMQKKCLRYRYPLEDLPSLLYGVKVRAQSYDTWVSRVTEALSANFNHKKDLIELRVMLEDAEDRKYPENDLFRKLRDAVKEAETCASVAQLLLSKKQKHRQSPDSGRTRTKLTVEELKAFVQQLFSLPCVISQARQVKNLLDDVEEFHERAQEAMMDETPDSSKLQMLIDMGSSLYVELPELPRLKQELQQARWLDEVRLTLSDPQQVTLDVMKKLIDSGVGLAPHHAVEKAMAELQELLTVSERWEEKAKVCLQARPRHSVASLESIVNEAKNIPAFLPNVLSLKEALQKAREWTAKVEAIQSGSNYAYLEQLESLSAKGRPIPVRLEALPQVESQVAAARAWRERTGRTFLKKNSSHTLLQVLSPRTDIGVYGSGKNRRKKVKELIEKEKEKDLDLEPLSDLEEGLEETRDTAMVVAVFKEREQKEIEAMHSLRAANLAKMTMVDRIEEVKFCICRKTASGFMLQCELCKDWFHNSCVPLPKSSSQKKGSSWQAKEVKFLCPLCMRSRRPRLETILSLLVSLQKLPVRLPEGEALQCLTERAMSWQDRARQALATDELSSALAKLSVLSQRMVEQAAREKTEKIISAELQKAAANPDLQGHLPSFQQSAFNRVVSSVSSSPRQTMDYDDEETDSDEDIRETYGYDMKDTASVKSSSSLEPNLFCDEEIPIKSEEVVTHMWTAPSFCAEHAYSSASKSCSQGSSTPRKQPRKSPLVPRSLEPPVLELSPGAKAQLEELMMVGDLLEVSLDETQHIWRILQATHPPSEDRFLHIMEDDSMEEKPLKVKGKDSSEKKRKRKLEKVEQLFGEGKQKSKELKKMDKPRKKKLKLGADKSKELNKLAKKLAKEEERKKKKEKAAAAKVELVKESTEKKREKKVLDIPSKYDWSGAEESDDENAVCAAQNCQRPCKDKVDWVQCDGGCDEWFHQVCVGVSPEMAENEDYICINCAKKQGPVSPGPAPPPSFIMSYKLPMEDLKETS

SEQ ID NO: 15202 - protein, 1544 aa, Homo Sapiens
MEAATTLHPGPRPALPLGGPGPLGEFLPPPECPVFEPSWEEFADPFAFIHKIRPIAEQTGICKVRPPPDWQPPFACDVDKLHFTPRIQRLNELEAQTRVKLNFLDQIAKYWELQGSTLKIPHVERKILDLFQLNKLVAEEGGFAVVCKDRKWTKIATKMGFAPGKAVGSHIRGHYERILNPYNLFLSGDSLRCLQKPNLTTDTKDKEYKPHDIPQRQSVQPSETCPPARRAKRMRAEAMNIKIEPEETTEARTHNLRRRMGCPTPKCENEKEMKSSIKQEPIERKDYIVENEKEKPKSRSKKATNAVDLYVCLLCGSGNDEDRLLLCDGCDDSYHTFCLIPPLHDVPKGDWRCPKCLAQECSKPQEAFGFEQAARDYTLRTFGEMADAFKSDYFNMPVHMVPTELVEKEFWRLVSTIEEDVTVEYGADIASKEFGSGFPVRDGKIKLSPEEEEYLDSGWNLNNMPVMEQSVLAHITADICGMKLPWLYVGMCFSSFCWHIEDHWSYSINYLHWGEPKTWYGVPGYAAEQLENVMKKLAPELFVSQPDLLHQLVTIMNPNTLMTHEVPVYRTNQCAGEFVITFPRAYHSGFNQGFNFAEAVNFCTVDWLPLGRQCVEHYRLLHRYCVFSHDEMICKMASKADVLDVVVASTVQKDMAIMIEDEKALRETVRKLGVIDSERMDFELLPDDERQCVKCKTTCFMSAISCSCKPGLLVCLHHVKELCSCPPYKYKLRYRYTLDDLYPMMNALKLRAESYNEWALNVNEALEAKINKKKSLVSFKALIEESEMKKFPDNDLLRHLRLVTQDAEKCASVAQQLLNGKRQTRYRSGGGKSQNQLTVNELRQFVTQLYALPCVLSQTPLLKDLLNRVEDFQQHSQKLLSEETPSAAELQDLLDVSFEFDVELPQLAEMRIRLEQARWLEEVQQACLDPSSLTLDDMRRLIDLGVGLAPYSAVEKAMARLQELLTVSEHWDDKAKSLLKARPRHSLNSLATAVKEIEEIPAYLPNGAALKDSVQRARDWLQDVEGLQAGGRVPVLDTLIELVTRGRSIPVHLNSLPRLETLVAEVQAWKECAVNTFLTENSPYSLLEVLCPRCDIGLLGLKRKQRKLKEPLPNGKKKSTKLESLSDLERALTESKETASAMATLGEARLREMEALQSLRLANEGKLLSPLQDVDIKICLCQKAPAAPMIQCELCRDAFHTSCVAVPSISQGLRIWLCPHCRRSEKPPLEKILPLLASLQRIRVRLPEGDALRYMIERTVNWQHRAQQLLSSGNLKFVQDRVGSGLLYSRWQASAGQVSDTNKVSQPPGTTSFSLPDDWDNRTSYLHSPFSTGRSCIPLHGVSPEVNELLMEAQLLQVSLPEIQELYQTLLAKPSPAQQTDRSSPVRPSSEKNDCCRGKRDGINSLERKLKRRLEREGLSSERWERVKKMRTPKKKKIKLSHPKDMNNFKLERERSYELVRSAETHSLPSDTSYSEQEDSEDEDAICPAVSCLQPEGDEVDWVQCDGSCNQWFHQVCVGVSPEMAEKEDYICVRCTVKDAPSRK

SEQ ID NO: 15203 - protein, 1560 aa, Homo Sapiens
MEPGSDDFLPPPECPVFEPSWAEFRDPLGYIAKIRPIAEKSGICKIRPPADWQPPFAVEVDNFRFTPRIQRLNELEAQTRVKLNYLDQIAKFWEIQGSSLKIPNVERRILDLYSLSKIVVEEGGYEAICKDRRWARVAQRLNYPPGKNIGSLLRSHYERIVYPYEMYQSGANLVQCNTRPFDNEEKDKEYKPHSIPLRQSVQPSKFNSYGRRAKRLQPDPEPTEEDIEKNPELKKLQIYGAGPKMMGLGLMAKDKTLRKKDKEGPECPPTVVVKEELGGDVKVESTSPKTFLESKEELSHSPEPCTKMTMRLRRNHSNAQFIESYVCRMCSRGDEDDKLLLCDGCDDNYHIFCLLPPLPEIPKGVWRCPKCVMAECKRPPEAFGFEQATREYTLQSFGEMADSFKADYFNMPVHMVPTELVEKEFWRLVNSIEEDVTVEYGADIHSKEFGSGFPVSDSKRHLTPEEEEYATSGWNLNVMPVLEQSVLCHINADISGMKVPWLYVGMVFSAFCWHIEDHWSYSINYLHWGEPKTWYGVPSLAAEHLEEVMKKLTPELFDSQPDLLHQLVTLMNPNTLMSHGVPVVRTNQCAGEFVITFPRAYHSGFNQGYNFAEAVNFCTADWLPAGRQCIEHYRRLRRYCVFSHEELICKMAACPEKLDLNLAAAVHKEMFIMVQEERRLRKALLEKGITEAEREAFELLPDDERQCIKCKTTCFLSALACYDCPDGLVCLSHINDLCKCSSSRQYLRYRYTLDELPAMLHKLKVRAESFDTWANKVRVALEVEDGRKRSLEELRALESEARERRFPNSELLQQLKNCLSEAEACVSRALGLVSGQEAGPHRVAGLQMTLTELRAFLDQMNNLPCAMHQIGDVKGVLEQVEAYQAEAREALASLPSSPGLLQSLLERGRQLGVEVPEAQQLQRQVEQARWLDEVKRTLAPSARRGTLAVMRGLLVAGASVAPSPAVDKAQAELQELLTIAERWEEKAHLCLEARQKHPPATLEAIIREAENIPVHLPNIQALKEALAKARAWIADVDEIQNGDHYPCLDDLEGLVAVGRDLPVGLEELRQLELQVLTAHSWREKASKTFLKKNSCYTLLEVLCPCADAGSDSTKRSRWMEKELGLYKSDTELLGLSAQDLRDPGSVIVAFKEGEQKEKEGILQLRRTNSAKPSPLASSSTASSTTSICVCGQVLAGAGALQCDLCQDWFHGRCVSVPRLLSSPRPNPTSSPLLAWWEWDTKFLCPLCMRSRRPRLETILALLVALQRLPVRLPEGEALQCLTERAISWQGRARQALASEDVTALLGRLAELRQRLQAEPRPEEPPNYPAAPASDPLREGSGKDMPKVQGLLENGDSVTSPEKVAPEEGSGKRDLELLSSLLPQLTGPVLELPEATRAPLEELMMEGDLLEVTLDENHSIWQLLQAGQPPDLERIRTLLELEKAERHGSRARGRALERRRRRKVDRGGEGDDPAREELEPKRVRSSGPEAEEVQEEEELEEETGGEGPPAPIPTTGSPSTQENQNGLEPAEGTTSGPSAPFSTLTPRLHLPCPQQPPQQQL

SEQ ID NO: 15204 - protein, 1539 aa, Homo Sapiens
MEPGCDEFLPPPECPVFEPSWAEFQDPLGYIAKIRPIAEKSGICKIRPPADWQPPFAVEVDNFRFTPRVQRLNELEAQTRVKLNYLDQIAKFWEIQGSSLKIPNVERKILDLYSLSKIVIEEGGYEAICKDRRWARVAQRLHYPPGKNIGSLLRSHYERIIYPYEMFQSGANHVQCNTHPFDNEVKDKEYKPHSIPLRQSVQPSKFSSYSRRAKRLQPDPEPTEEDIEKHPELKKLQIYGPGPKMMGLGLMAKDKDKTVHKKVTCPPTVTVKDEQSGGGNVSSTLLKQHLSLEPCTKTTMQLRKNHSSAQFIDSYICQVCSRGDEDDKLLFCDGCDDNYHIFCLLPPLPEIPRGIWRCPKCILAECKQPPEAFGFEQATQEYSLQSFGEMADSFKSDYFNMPVHMVPTELVEKEFWRLVSSIEEDVTVEYGADIHSKEFGSGFPVSNSKQNLSPEEKEYATSGWNLNVMPVLDQSVLCHINADISGMKVPWLYVGMVFSAFCWHIEDHWSYSINYLHWGEPKTWYGVPSLAAEHLEEVMKMLTPELFDSQPDLLHQLVTLMNPNTLMSHGVPVVRTNQCAGEFVITFPRAYHSGFNQGYNFAEAVNFCTADWLPAGRQCIEHYRRLRRYCVFSHEELICKMAAFPETLDLNLAVAVHKEMFIMVQEERRLRKALLEKGVTEAEREAFELLPDDERQCIKCKTTCFLSALACYDCPDGLVCLSHINDLCKCSSSRQYLRYRYTLDELPTMLHKLKIRAESFDTWANKVRVALEVEDGRKRSFEELRALESEARERRFPNSELLQRLKNCLSEVEACIAQVLGLVSGQVARMDTPQLTLTELRVLLEQMGSLPCAMHQIGDVKDVLEQVEAYQAEAREALATLPSSPGLLRSLLERGQQLGVEVPEAHQLQQQVEQAQWLDEVKQALAPSAHRGSLVIMQGLLVMGAKIASSPSVDKARAELQELLTIAERWEEKAHFCLEARQKHPPATLEAIIRETENIPVHLPNIQALKEALTKAQAWIADVDEIQNGDHYPCLDDLEGLVAVGRDLPVGLEELRQLELQVLTAHSWREKASKTFLKKNSCYTLLEVLCPCADAGSDSTKRSRWMEKALGLYQCDTELLGLSAQDLRDPGSVIVAFKEGEQKEKEGILQLRRTNSAKPSPLAPSLMASSPTSICVCGQVPAGVGVLQCDLCQDWFHGQCVSVPHLLTSPKPSLTSSPLLAWWEWDTKFLCPLCMRSRRPRLETILALLVALQRLPVRLPEGEALQCLTERAIGWQDRARKALASEDVTALLRQLAELRQQLQAKPRPEEASVYTSATACDPIREGSGNNISKVQGLLENGDSVTSPENMAPGKGSDLELLSSLLPQLTGPVLELPEAIRAPLEELMMEGDLLEVTLDENHSIWQLLQAGQPPDLDRIRTLLELEKFEHQGSRTRSRALERRRRRQKVDQGRNVENLVQQELQSKRARSSGIMSQVGREEEHYQEKADRENMFLTPSTDHSPFLKGNQNSLQHKDSGSSAACPSLMPLLQLSYSDEQQL

SEQ ID NO: 15205 - protein, 711 aa, Homo Sapiens
MSDYSTGGPPPGPPPPAGGGGGAGGAGGGPPPGPPGAGDRGGGGPGGGGPGGGSAGGPSQPPGGGGPGIRKDAFADAVQRARQIAAKIGGDAATTVNNSTPDFGFGGQKRQLEDGDQPESKKLASQGDSISSQLGPIHPPPRTSMTEEYRVPDGMVGLIIGRGGEQINKIQQDSGCKVQISPDSGGLPERSVSLTGAPESVQKAKMMLDDIVSRGRGGPPGQFHDNANGGQNGTVQEIMIPAGKAGLVIGKGGETIKQLQERAGVKMILIQDGSQNTNVDKPLRIIGDPYKVQQACEMVMDILRERDQGGFGDRNEYGSRIGGGIDVPVPRHSVGVVIGRSGEMIKKIQNDAGVRIQFKQDDGTGPEKIAHIMGPPDRCEHAARIINDLLQSLRSGPPGPPGGPGMPPGGRGRGRGQGNWGPPGGEMTFSIPTHKCGLVIGRGGENVKAINQQTGAFVEISRQLPPNGDPNFKLFIIRGSPQQIDHAKQLIEEKIEGPLCPVGPGPGGPGPAGPMGPFNPGPFNQGPPGAPPHAGGPPPHQYPPQGWGNTYPQWQPPAPHDPSKAAAAAADPNAAWAAYYSHYYQQPPGPVPGPAPAPAAPPAQGEPPQPPPTGQSDYTKAWEEYYKKIGQQPQQPGAPPQQDYTKAWEEYYKKQAQVATGGGPGAPPGSQPDYSAAWAEYYRQQAAYYGQTPGPGGPQPPPTQQGQQQAQ

SEQ ID NO: 15206 - protein, 1950 aa, Homo Sapiens
MPGARRRRRGAAMEGKPRAGVALAPGPSGRRPSARCARRRRPGLLLPGLWLLLLARPASCAPDELSPEQHNLSLYSMELVLKKSTGHSAAQVALTETAPGSQHSSPLHVTAPPSATTFDTAFFNQGKQTKSTADPSIFVATYVSVTSKEVAVNDDEMDNFLPDTHWTTPRMVSPIQYITVSPPGLPREALEPMLTPSLPMVSLQDEEVTSGWQNTTRQPAAYAESASHFHTFRSAFRTSEGIVPTPGRNLVLYPTDAYSHLSSRTLPEIVASLTEGVETTLFLSSRSLMPQPLGDGITIPLPSLGEVSQPPEEVWATSADRYTDVTTVLSQSLEETISPRTYPTVTASHAALAFSRTHSPLLSTPLAFASSASPTDVSSNPFLPSDSSKTSELHSNSALPGPVDNTHILSPVSSFRPYTWCAACTVPSPQQVLATSLMEKDVGSGDGAETLCMTVLEESSISLMSSVVADFSEFEEDPQVFNTLFPSRPIVPLSSRSMEISETSVGISAEVDMSSVTTTQVPPAHGRLSVPASLDPTAGSLSVAETQVTPSSVTTAFFSVITSILLDSSFSVIANKNTPSLAVRDPSVFTPYSLVPSVESSLFSDQERSSFSEHKPRGALDFASSFFSTPPLELSGSISSPSEAPASLSLMPSDLSPFTSQSFSPLVETFTLFDSSDLQSSQLSLPSSTNLEFSQLQPSSELPLNTIMLLPSRSEVSPWSSFPSDSLEFVEASTVSLTDSEAHFTSAFIETTSYLESSLISHESAVTALVPPGSESFDILTAGIQATSPLTTVHTTPILTESSLFSTLTPPDDQISALDGHVSVLASFSKAIPTGTVLITDAYLPSGSSFVSEATPFPLPTELTVVGPSLTPTEVPLNTSTEVSTTSTGAATGGPLDSTLMGDAASQSPPESSAAPPLPSLRPVTAFTLEATVDTPTLATAKPPYVCDITVPDAYLITTVLARRAVQEYIITAIKEVLRIHFNRAVELKVYELFTDFTFLVTSGPFVYTAISVINVLINSKLVRDQTPLILSVKPSFLVPESRFQVQTVLQFVPPSVDTGFCNFTQRIEKGLMTALFEVRKHHQGTYNLTVQILNITISSSRVTPRRGPVNIIFAVKSTQGFLNGSEVSELLRNLSVVEFSFYLGYPVLQIAEPFQYPQLNLSQLLKSSWVRTVLLGVMEKQLQNEVFQAEMERKLAQLLSEVSTRRRMWRRATVAAGNSVVQVVNVSRLEGDDNPVQLIYFVEDQDGERLSAVKSSDLINKMDLQRAAIILGYRIQGVIAQPVDRVKRPSPESQSNNLWVIVGVVIPVLVVMVIVVILYWKLCRTDKLDFQPDTVANIQQRQKLQIPSVKGFDFAKQHLGQHNKDDILIIHEPAPLPGPLKDHTTPSENGDVPSPKSKIPSKNVRHRGRVSPSDADSTVSEESSERDAGDKTPGAVNDGRSHRAPQSGPPLPSSGNEQHSSASIFEHVDRISRPPEASRRVPSKIQLIAMQPIPAPPVQRPSPADRVAESNKINKEIQTALRHKSEIEHHRNKIRLRAKRRGHYEFPVVDDLSSGDTKERHRVYRRAQMQIDKILDPTASVPSVFIEPRKSSRIKRSPKPRRKHQVNGCPADAEKDRLITTDSDGTYRRPPGVHNSAYIGCPSDPDLPADVQTPSSVELGRYPALPFPASQYIPPQPSIEEARQTMHSLLDDAFALVAPSSQPASTAGVGPGVPPGLPANSTPSQEERRATQWGSFYSPAQTANNPCSRYEDYGMTPPTGPLPRPGFGPGLLQSTELVPPDPQQPQASAEAPFAARGIYSEEMPSVARPRPVGGTTGSQIQHLTQVGIASRIGAQPVEIPPSRGSQYGGPGWPSYGEDEAGRREATHMLGHQEYSSSPLFQVPRTSGREPSAPSGNLPHRGLQGPGLGYPTSSTEDLQPGHSSASLIKAIREELLRLSQKQSTVQNFHS

SEQ ID NO: 15207 - protein, 362 aa, Homo Sapiens
MATAETALPSISTLTALGPFPDTQDDFLKWWRSEEAQDMGPGPPDPTEPPLHVKSEDQPGEEEDDERGADATWDLDLLLTNFSGPEPGGAPQTCALAPSEASGAQYPPPPETLGAYAGGPGLVAGLLGSEDHSGWVRPALRARAPDAFVGPALAPAPAPEPKALALQPVYPGPGAGSSGGYFPRTGLSVPAASGAPYGLLSGYPAMYPAPQYQGHFQLFRGLQGPAPGPATSPSFLSCLGPGTVGTGLGGTAEDPGVIAETAPSKRGRRSWARKRQAAHTCAHPGCGKSYTKSSHLKAHLRTHTGEKPYACTWEGCGWRFARSDELTRHYRKHTGQRPFRCQLCPRAFSRSDHLALHMKRHL

SEQ ID NO: 15208 - protein, 480 aa, Homo Sapiens
MLNFGASLQQTAEERMEMISERPKESMYSWNKTAEKSDFEAVEALMSMSCSWKSDFKKYVENRPVTPVSDLSEEENLLPGTPDFHTIPAFCLTPPYSPSDFEPSQVSNLMAPAPSTVHFKSLSDTAKPHIAAPFKEEEKSPVSAPKLPKAQATSVIRHTADAQLCNHQTCPMKAASILNYQNNSFRRRTHLNVEAARKNIPCAAVSPNRSKCERNTVADVDEKASAALYDFSVPSSETVICRSQPAPVSPQQKSVLVSPPAVSAGGVPPMPVICQMVPLPANNPVVTTVVPSTPPSQPPAVCPPVVFMGTQVPKGAVMFVVPQPVVQSSKPPVVSPNGTRLSPIAPAPGFSPSAAKVTPQIDSSRIRSHICSHPGCGKTYFKSSHLKAHTRTHTGEKPFSCSWKGCERRFARSDELSRHRRTHTGEKKFACPMCDRRFMRSDHLTKHARRHLSAKKLPNWQMEVSKLNDIALPPTPAPTQ

SEQ ID NO: 15209 - protein, 512 aa, Homo Sapiens
MHTPDFAGPDDARAVDIMDICESILERKRHDSERSTCSILEQTDMEAVEALVCMSSWGQRSQKGDLLRIRPLTPVSDSGDVTTTVHMDAATPELPKDFHSLSTLCITPPQSPDLVEPSTRTPVSPQVTDSKACTATDVLQSSAVVARALSGGAERGLLGLEPVPSSPCRAKGTSVIRHTGESPAACFPTIQTPDCRLSDSREGEEQLLGHFETLQDTHLTDSLLSTNLVSCQPCLHKSGGLLLTDKGQQAGWPGAVQTCSPKNYENDLPRKTTPLISVSVPAPPVLCQMIPVTGQSSMLPAFLKPPPQLSVGTVRPILAQAAPAPQPVFVGPAVPQGAVMLVLPQGALPPPAPCAANVMAAGNTKLLPLAPAPVFITSSQNCVPQVDFSRRRNYVCSFPGCRKTYFKSSHLKAHLRTHTGEKPFNCSWDGCDKKFARSDELSRHRRTHTGEKKFVCPVCDRRFMRSDHLTKHARRHMTTKKIPGWQAEVGKLNRIASAESPGSPLVSMPASA

SEQ ID NO: 15210 - protein, 402 aa, Homo Sapiens
MNIHMKRKTIKNINTFENRMLMLDGMPAVRVKTELLESEQGSPNVHNYPDMEAVPLLLNNVKGEPPEDSLSVDHFQTQTEPVDLSINKARTSPTAVSSSPVSMTASASSPSSTSTSSSSSSRLASSPTVITSVSSASSSSTVLTPGPLVASASGVGGQQFLHIIHPVPPSSPMNLQSNKLSHVHRIPVVVQSVPVVYTAVRSPGNVNNTIVVPLLEDGRGHGKAQMDPRGLSPRQSKSDSDDDDLPNVTLDSVNETGSTALSIARAVQEVHPSPVSRVRGNRMNNQKFPCSISPFSIESTRRQRRSESPDSRKRRIHRCDFEGCNKVYTKSSHLKAHRRTHTGEKPYKCTWEGCTWKFARSDELTRHYRKHTGVKPFKCADCDRSFSRSDHLALHRRRHMLV

SEQ ID NO: 15211 - protein, 288 aa, Homo Sapiens
MAAAAYVDHFAAECLVSMSSRAVVHGPREGPESRPEGAAVAATPTLPRVEERRDGKDSASLFVVARILADLNQQAPAPAPAERREGAAARKARTPCRLPPPAPEPTSPGAEGAAAAPPSPAWSEPEPEAGLEPEREPGPAGSGEPGLRQRVRRGRSRADLESPQRKHKCHYAGCEKVYGKSSHLKAHLRTHTGERPFACSWQDCNKKFARSDELARHYRTHTGEKKFSCPICEKRFMRSDHLTKHARRHANFHPGMLQRRGGGSRTGSLSDYSRSDASSPTISPASSP

SEQ ID NO: 15212 - protein, 323 aa, Homo Sapiens
MSAAVACLDYFAAECLVSMSAGAVVHRRPPDPEGAGGAAGSEVGAAPPESALPGPGPPGPASVPQLPQVPAPSPGAGGAAPHLLAASVWADLRGSSGEGSWENSGEAPRASSGFSDPIPCSVQTPCSELAPASGAAAVCAPESSSDAPAVPSAPAAPGAPAASGGFSGGALGAGPAPAADQAPRRRSVTPAAKRHQCPFPGCTKAYYKSSHLKSHQRTHTGERPFSCDWLDCDKKFTRSDELARHYRTHTGEKRFSCPLCPKQFSRSDHLTKHARRHPTYHPDMIEYRGRRRTPRIDPPLTSEVESSASGSGPGPAPSFTTCL

SEQ ID NO: 15213 - protein, 416 aa, Homo Sapiens
MVDHLLPVDENFSSPKCPVGYLGDRLVGRRAYHMLPSPVSEDDSDASSPCSCSSPDSQALCSCYGGGLGTESQDSILDFLLSQATLGSGGGSGSSIGASSGPVAWGPWRRAAAPVKGEHFCLPEFPLGDPDDVPRPFQPTLEEIEEFLEENMEPGVKEVPEGNSKDLDACSQLSAGPHKSHLHPGSSGRERCSPPPGGASAGGAQGPGGGPTPDGPIPVLLQIQPVPVKQESGTGPASPGQAPENVKVAQLLVNIQGQTFALVPQVVPSSNLNLPSKFVRIAPVPIAAKPVGSGPLGPGPAGLLMGQKFPKNPAAELIKMHKCTFPGCSKMYTKSSHLKAHLRRHTGEKPFACTWPGCGWRFSRSDELSRHRRSHSGVKPYQCPVCEKKFARSDHLSKHIKVHRFPRSSRSVRSVN

SEQ ID NO: 15214 - protein, 252 aa, Homo Sapiens
MSAAVACVDYFAADVLMAISSGAVVHRGRPGPEGAGPAAGLDVRAARREAASPGTPGPPPPPPAASGPGPGAAAAPHLLAASILADLRGGPGAAPGGASPASSSSAASSPSSGRAPGAAPSAAAKSHRCPFPDCAKAYYKSSHLKSHLRTHTGERPFACDWQGCDKKFARSDELARHHRTHTGEKRFSCPLCSKRFTRSDHLAKHARRHPGFHPDLLRRPGARSTSPSDSLPCSLAGSPAPSPAPSPAPAGL

SEQ ID NO: 15215 - protein, 389 aa, Homo Sapiens
MYGRPQAEMEQEAGELSRWQAAHQAAQDNENSAPILNMSSSSGSSGVHTSWNQGLPSIQHFPHSAEMLGSPLVSVEAPGQNVNEGGPQFSMPLPERGMSYCPQATLTPSRMIYCQRMSPPQQEMTIFSGPQLMPVGEPNIPRVARPFGGNLRMPPNGLPVSASTGIPIMSHTGNPPVPYPGLSTVPSDETLLGPTVPSTEAQAVLPSMAQMLPPQDAHDLGMPPAESQSLLVLGSQDSLVSQPDSQEGPFLPEQPGPAPQTVEKNSRPQEGTGRRGSSEARPYCCNYENCGKAYTKRSHLVSHQRKHTGERPYSCNWESCSWSFFRSDELRRHMRVHTRYRPYKCDQCSREFMRSDHLKQHQKTHRPGPSDPQANNNNGEQDSPPAAGP

SEQ ID NO: 15216 - protein, 355 aa, Homo Sapiens
MALSEPILPSFSTFASPCRERGLQERWPRAEPESGGTDDDLNSVLDFILSMGLDGLGAEAAPEPPPPPPPPAFYYPEPGAPPPYSAPAGGLVSELLRPELDAPLGPALHGRFLLAPPGRLVKAEPPEADGGGGYGCAPGLTRGPRGLKREGAPGPAASCMRGPGGRPPPPPDTPPLSPDGPARLPAPGPRASFPPPFGGPGFGAPGPGLHYAPPAPPAFGLFDDAAAAAAALGLAPPAARGLLTPPASPLELLEAKPKRGRRSWPRKRTATHTCSYAGCGKTYTKSSHLKAHLRTHTGEKPYHCNWDGCGWKFARSDELTRHYRKHTGHRPFQCHLCDRAFSRSDHLALHMKRHM

SEQ ID NO: 15217 - protein, 345 aa, Homo Sapiens
MLMFDPVPVKQEAMDPVSVSYPSNYMESMKPNKYGVIYSTPLPEKFFQTPEGLSHGIQMEPVDLTVNKRSSPPSAGNSPSSLKFPSSHRRASPGLSMPSSSPPIKKYSPPSPGVQPFGVPLSMPPVMAAALSRHGIRSPGILPVIQPVVVQPVPFMYTSHLQQPLMVSLSEEMENSSSSMQVPVIESYEKPISQKKIKIEPGIEPQRTDYYPEEMSPPLMNSVSPPQALLQENHPSVIVQPGKRPLPVESPDTQRKRRIHRCDYDGCNKVYTKSSHLKAHRRTHTGEKPYKCTWEGCTWKFARSDELTRHFRKHTGIKPFQCPDCDRSFSRSDHLALHRKRHMLV

SEQ ID NO: 15218 - protein, 513 aa, Homo Sapiens
MRQPPGESDMAVSDALLPSFSTFASGPAGREKTLRQAGAPNNRWREELSHMKRLPPVLPGRPYDLAAATVATDLESGGAGAACGGSNLAPLPRRETEEFNDLLDLDFILSNSLTHPPESVAATVSSSASASSSSSPSSSGPASAPSTCSFTYPIRAGNDPGVAPGGTGGGLLYGRESAPPPTAPFNLADINDVSPSGGFVAELLRPELDPVYIPPQQPQPPGGGLMGKFVLKASLSAPGSEYGSPSVISVSKGSPDGSHPVVVAPYNGGPPRTCPKIKQEAVSSCTHLGAGPPLSNGHRPAAHDFPLGRQLPSRTTPTLGLEEVLSSRDCHPALPLPPGFHPHPGPNYPSFLPDQMQPQVPPLHYQGQSRGFVARAGEPCVCWPHFGTHGMMLTPPSSPLELMPPGSCMPEEPKPKRGRRSWPRKRTATHTCDYAGCGKTYTKSSHLKAHLRTHTGEKPYHCDWDGCGWKFARSDELTRHYRKHTGHRPFQCQKCDRAFSRSDHLALHMKRHF

SEQ ID NO: 15219 - protein, 457 aa, Homo Sapiens
MATRVLSMSARLGPVPQPPAPQDEPVFAQLKPVLGAANPARDAALFPGEELKHAHHRPQAQPAPAQAPQPAQPPATGPRLPPEDLVQTRCEMEKYLTPQLPPVPIIPEHKKYRRDSASVVDQFFTDTEGLPYSINMNVFLPDITHLRTGLYKSQRPCVTHIKTEPVAIFSHQSETTAPPPAPTQALPEFTSIFSSHQTAAPEVNNIFIKQELPTPDLHLSVPTQQGHLYQLLNTPDLDMPSSTNQTAAMDTLNVSMSAAMAGLNTHTSAVPQTAVKQFQGMPPCTYTMPSQFLPQQATYFPPSPPSSEPGSPDRQAEMLQNLTPPPSYAATIASKLAIHNPNLPTTLPVNSQNIQPVRYNRRSNPDLEKRRIHYCDYPGCTKVYTKSSHLKAHLRTHTGEKPYKCTWEGCDWRFARSDELTRHYRKHTGAKPFQCGVCNRSFSRSDHLALHMKRHQN

SEQ ID NO: 15220 - protein, 283 aa, Homo Sapiens
MDVLPMCSIFQELQIVHETGYFSALPSLEEYWQQTCLELERYLQSEPCYVSASEIKFDSQEDLWTKIILAREKKEESELKISSSPPEDTLISPSFCYNLETNSLNSDVSSESSDSSEELSPTAKFTSDPIGEVLVSSGKLSSSVTSTPPSSPELSREPSQLWGCVPGELPSPGKVRSGTSGKPGDKGNGDASPDGRRRVHRCHFNGCRKVYTKSSHLKAHQRTHTGEKPYRCSWEGCEWRFARSDELTRHFRKHTGAKPFKCSHCDRCFSRSDHLALHMKRHL

SEQ ID NO: 15221 - protein, 302 aa, Homo Sapiens
MDVLASYSIFQELQLVHDTGYFSALPSLEETWQQTCLELERYLQTEPRRISETFGEDLDCFLHASPPPCIEESFRRLDPLLLPVEAAICEKSSAVDILLSRDKLLSETCLSLQPASSSLDSYTAVNQAQLNAVTSLTPPSSPELSRHLVKTSQTLSAVDGTVTLKLVAKKAALSSVKVGGVATAAAAVTAAGAVKSGQSDSDQGGLGAEACPENKKRVHRCQFNGCRKVYTKSSHLKAHQRTHTGEKPYKCSWEGCEWRFARSDELTRHYRKHTGAKPFKCNHCDRCFSRSDHLALHMKRHI

SEQ ID NO: 15222 - protein, 359 aa, Homo Sapiens
MVDMDKLINNLEVQLNSEGGSMQVFKQVTASVRNRDPPEIEYRSNMTSPTLLDANPMENPALFNDIKIEPPEELLASDFSLPQVEPVDLSFHKPKAPLQPASMLQAPIRPPKPQSSPQTLVVSTSTSDMSTSANIPTVLTPGSVLTSSQSTGSQQILHVIHTIPSVSLPNKMGGLKTIPVVVQSLPMVYTTLPADGGPAAITVPLIGGDGKNAGSVKVDPTSMSPLEIPSDSEESTIESGSSALQSLQGLQQEPAAMAQMQGEESLDLKRRRIHQCDFAGCSKVYTKSSHLKAHRRIHTGEKPYKCTWDGCSWKFARSDELTRHFRKHTGIKPFRCTDCNRSFSRSDHLSLHRRRHDTM

SEQ ID NO: 15223 - protein, 244 aa, Homo Sapiens
MSAAAYMDFVAAQCLVSISNRAAVPEHGVAPDAERLRLPEREVTKEHGDPGDTWKDYCTLVTIAKSLLDLNKYRPIQTPSVCSDSLESPDEDMGSDSDVTTESGSSPSHSPEERQDPGSAPSPLSLLHPGVAAKGKHASEKRHKCPYSGCGKVYGKSSHLKAHYRVHTGERPFPCTWPDCLKKFSRSDELTRHYRTHTGEKQFRCPLCEKRFMRSDHLTKHARRHTEFHPSMIKRSKKALANAL

SEQ ID NO: 15224 - protein, 3969 aa, Homo Sapiens
MAHSCRWRFPARPGTTGGGGGGGRRGLGGAPRQRVPALLLPPGPPVGGGGPGAPPSPPAVAAAAAAAGSSGAGVPGGAAAASAASSSSASSSSSSSSSASSGPALLRVGPGFDAALQVSAAIGTNLRRFRAVFGESGGGGGSGEDEQFLGFGSDEEVRVRSPTRSPSVKTSPRKPRGRPRSGSDRNSAILSDPSVFSPLNKSETKSGDKIKKKDSKSIEKKRGRPPTFPGVKIKITHGKDISELPKGNKEDSLKKIKRTPSATFQQATKIKKLRAGKLSPLKSKFKTGKLQIGRKGVQIVRRRGRPPSTERIKTPSGLLINSELEKPQKVRKDKEGTPPLTKEDKTVVRQSPRRIKPVRIIPSSKRTDATIAKQLLQRAKKGAQKKIEKEAAQLQGRKVKTQVKNIRQFIMPVVSAISSRIIKTPRRFIEDEDYDPPIKIARLESTPNSRFSAPSCGSSEKSSAASQHSSQMSSDSSRSSSPSVDTSTDSQASEEIQVLPEERSDTPEVHPPLPISQSPENESNDRRSRRYSVSERSFGSRTTKKLSTLQSAPQQQTSSSPPPPLLTPPPPLQPASSISDHTPWLMPPTIPLASPFLPASTAPMQGKRKSILREPTFRWTSLKHSRSEPQYFSSAKYAKEGLIRKPIFDNFRPPPLTPEDVGFASGFSASGTAASARLFSPLHSGTRFDMHKRSPLLRAPRFTPSEAHSRIFESVTLPSNRTSAGTSSSGVSNRKRKRKVFSPIRSEPRSPSHSMRTRSGRLSSSELSPLTPPSSVSSSLSISVSPLATSALNPTFTFPSHSLTQSGESAEKNQRPRKQTSAPAEPFSSSSPTPLFPWFTPGSQTERGRNKDKAPEELSKDRDADKSVEKDKSRERDREREKENKRESRKEKRKKGSEIQSSSALYPVGRVSKEKVVGEDVATSSSAKKATGRKKSSSHDSGTDITSVTLGDTTAVKTKILIKKGRGNLEKTNLDLGPTAPSLEKEKTLCLSTPSSSTVKHSTSSIGSMLAQADKLPMTDKRVASLLKKAKAQLCKIEKSKSLKQTDQPKAQGQESDSSETSVRGPRIKHVCRRAAVALGRKRAVFPDDMPTLSALPWEEREKILSSMGNDDKSSIAGSEDAEPLAPPIKPIKPVTRNKAPQEPPVKKGRRSRRCGQCPGCQVPEDCGVCTNCLDKPKFGGRNIKKQCCKMRKCQNLQWMPSKAYLQKQAKAVKKKEKKSKTSEKKDSKESSVVKNVVDSSQKPTPSAREDPAPKKSSSEPPPRKPVEEKSEEGNVSAPGPESKQATTPASRKSSKQVSQPALVIPPQPPTTGPPRKEVPKTTPSEPKKKQPPPPESGPEQSKQKKVAPRPSIPVKQKPKEKEKPPPVNKQENAGTLNILSTLSNGNSSKQKIPADGVHRIRVDFKEDCEAENVWEMGGLGILTSVPITPRVVCFLCASSGHVEFVYCQVCCEPFHKFCLEENERPLEDQLENWCCRRCKFCHVCGRQHQATKQLLECNKCRNSYHPECLGPNYPTKPTKKKKVWICTKCVRCKSCGSTTPGKGWDAQWSHDFSLCHDCAKLFAKGNFCPLCDKCYDDDDYESKMMQCGKCDRWVHSKCENLSDEMYEILSNLPESVAYTCVNCTERHPAEWRLALEKELQISLKQVLTALLNSRTTSHLLRYRQAAKPPDLNPETEESIPSRSSPEGPDPPVLTEVSKQDDQQPLDLEGVKRKMDQGNYTSVLEFSDDIVKIIQAAINSDGGQPEIKKANSMVKSFFIRQMERVFPWFSVKKSRFWEPNKVSSNSGMLPNAVLPPSLDHNYAQWQEREENSHTEQPPLMKKIIPAPKPKGPGEPDSPTPLHPPTPPILSTDRSREDSPELNPPPGIEDNRQCALCLTYGDDSANDAGRLLYIGQNEWTHVNCALWSAEVFEDDDGSLKNVHMAVIRGKQLRCEFCQKPGATVGCCLTSCTSNYHFMCSRAKNCVFLDDKKVYCQRHRDLIKGEVVPENGFEVFRRVFVDFEGISLRRKFLNGLEPENIHMMIGSMTIDCLGILNDLSDCEDKLFPIGYQCSRVYWSTTDARKRCVYTCKIVECRPPVVEPDINSTVEHDENRTIAHSPTSFTESSSKESQNTAEIISPPSPDRPPHSQTSGSCYYHVISKVPRIRTPSYSPTQRSPGCRPLPSAGSPTPTTHEIVTVGDPLLSSGLRSIGSRRHSTSSLSPQRSKLRIMSPMRTGNTYSRNNVSSVSTTGTATDLESSAKVVDHVLGPLNSSTSLGQNTSTSSNLQRTVVTVGNKNSHLDGSSSSEMKQSSASDLVSKSSSLKGEKTKVLSSKSSEGSAHNVAYPGIPKLAPQVHNTTSRELNVSKIGSFAEPSSVSFSSKEALSFPHLHLRGQRNDRDQHTDSTQSANSSPDEDTEVKTLKLSGMSNRSSIINEHMGSSSRDRRQKGKKSCKETFKEKHSSKSFLEPGQVTTGEEGNLKPEFMDEVLTPEYMGQRPCNNVSSDKIGDKGLSMPGVPKAPPMQVEGSAKELQAPRKRTVKVTLTPLKMENESQSKNALKESSPASPLQIESTSPTEPISASENPGDGPVAQPSPNNTSCQDSQSNNYQNLPVQDRNLMLPDGPKPQEDGSFKRRYPRRSARARSNMFFGLTPLYGVRSYGEEDIPFYSSSTGKKRGKRSAEGQVDGADDLSTSDEDDLYYYNFTRTVISSGGEERLASHNLFREEEQCDLPKISQLDGVDDGTESDTSVTATTRKSSQIPKRNGKENGTENLKIDRPEDAGEKEHVTKSSVGHKNEPKMDNCHSVSRVKTQGQDSLEAQLSSLESSRRVHTSTPSDKNLLDTYNTELLKSDSDNNNSDDCGNILPSDIMDFVLKNTPSMQALGESPESSSSELLNLGEGLGLDSNREKDMGLFEVFSQQLPTTEPVDSSVSSSISAEEQFELPLELPSDLSVLTTRSPTVPSQNPSRLAVISDSGEKRVTITEKSVASSESDPALLSPGVDPTPEGHMTPDHFIQGHMDADHISSPPCGSVEQGHGNNQDLTRNSSTPGLQVPVSPTVPIQNQKYVPNSTDSPGPSQISNAAVQTTPPHLKPATEKLIVVNQNMQPLYVLQTLPNGVTQKIQLTSSVSSTPSVMETNTSVLGPMGGGLTLTTGLNPSLPTSQSLFPSASKGLLPMSHHQHLHSFPAATQSSFPPNISNPPSGLLIGVQPPPDPQLLVSESSQRTDLSTTVATPSSGLKKRPISRLQTRKNKKLAPSSTPSNIAPSDVVSNMTLINFTPSQLPNHPSLLDLGSLNTSSHRTVPNIIKRSKSSIMYFEPAPLLPQSVGGTAATAAGTSTISQDTSHLTSGSVSGLASSSSVLNVVSMQTTTTPTSSASVPGHVTLTNPRLLGTPDIGSISNLLIKASQQSLGIQDQPVALPPSSGMFPQLGTSQTPSTAAITAASSICVLPSTQTTGITAASPSGEADEHYQLQHVNQLLASKTGIHSSQRDLDSASGPQVSNFTQTVDAPNSMGLEQNKALSSAVQASPTSPGGSPSSPSSGQRSASPSVPGPTKPKPKTKRFQLPLDKGNGKKHKVSHLRTSSSEAHIPDQETTSLTSGTGTPGAEAEQQDTASVEQSSQKECGQPAGQVAVLPEVQVTQNPANEQESAEPKTVEEEESNFSSPLMLWLQQEQKRKESITEKKPKKGLVFEISSDDGFQICAESIEDAWKSLTDKVQEARSNARLKQLSFAGVNGLRMLGILHDAVVFLIEQLSGAKHCRNYKFRFHKPEEANEPPLNPHGSARAEVHLRKSAFDMFNFLASKHRQPPEYNPNDEEEEEVQLKSARRATSMDLPMPMRFRHLKKTSKEAVGVYRSPIHGRGLFCKRNIDAGEMVIEYAGNVIRSIQTDKREKYYDSKGIGCYMFRIDDSEVVDATMHGNAARFINHSCEPNCYSRVINIDGQKHIVIFAMRKIYRGEELTYDYKFPIEDASNKLPCNCGAKKCRKFLN

SEQ ID NO: 15225 - protein, 2715 aa, Homo Sapiens
MAAAAGGGSCPGPGSARGRFPGRPRGAGGGGGRGGRGNGAERVRVALRRGGGATGPGGAEPGEDTALLRLLGLRRGLRRLRRLWAGPRVQRGRGRGRGRGWGPSRGCVPEEESSDGESDEEEFQGFHSDEDVAPSSLRSALRSQRGRAPRGRGRKHKTTPLPPPRLADVAPTPPKTPARKRGEEGTERMVQALTELLRRAQAPQAPRSRACEPSTPRRSRGRPPGRPAGPCRRKQQAVVVAEAAVTIPKPEPPPPVVPVKHQTGSWKCKEGPGPGPGTPRRGGQSSRGGRGGRGRGRGGGLPFVIKFVSRAKKVKMGQLSLGLESGQGQGQHEESWQDVPQRRVGSGQGGSPCWKKQEQKLDDEEEEKKEEEEKDKEGEEKEERAVAEEMMPAAEKEEAKLPPPPLTPPAPSPPPPLPPPSTSPPPPLCPPPPPPVSPPPLPSPPPPPAQEEQEESPPPVVPATCSRKRGRPPLTPSQRAEREAARAGPEGTSPPTPTPSTATGGPPEDSPTVAPKSTTFLKNIRQFIMPVVSARSSRVIKTPRRFMDEDPPKPPKVEVSPVLRPPITTSPPVPQEPAPVPSPPRAPTPPSTPVPLPEKRRSILREPTFRWTSLTRELPPPPPAPPPPPAPSPPPAPATSSRRPLLLRAPQFTPSEAHLKIYESVLTPPPLGAPEAPEPEPPPADDSPAEPEPRAVGRTNHLSLPRFAPVVTTPVKAEVSPHGAPALSNGPQTQAQLLQPLQALQTQLLPQALPPPQPQLQPPPSPQQMPPLEKARIAGVGSLPLSGVEEKMFSLLKRAKVQLFKIDQQQQQKVAASMPLSPGGQMEEVAGAVKQISDRGPVRSEDESVEAKRERPSGPESPVQGPRIKHVCRHAAVALGQARAMVPEDVPRLSALPLRDRQDLATEDTSSASETESVPSRSRRGKVEAAGPGGESEPTGSGGTLAHTPRRSLPSHHGKKMRMARCGHCRGCLRVQDCGSCVNCLDKPKFGGPNTKKQCCVYRKCDKIEARKMERLAKKGRTIVKTLLPWDSDESPEASPGPPGPRRGAGAGGPREEVVAHPGPEEQDSLLQRKSARRCVKQRPSYDIFEDSDDSEPGGPPAPRRRTPRENELPLPEPEEQSRPRKPTLQPVLQLKARRRLDKDALAPGPFASFPNGWTGKQKSPDGVHRVRVDFKEDCDLENVWLMGGLSVLTSVPGGPPMVCLLCASKGLHELVFCQVCCDPFHPFCLEEAERPLPQHHDTWCCRRCKFCHVCGRKGRGSKHLLECERCRHAYHPACLGPSYPTRATRKRRHWICSACVRCKSCGATPGKNWDVEWSGDYSLCPRCTQLYEKGNYCPICTRCYEDNDYESKMMQCAQCDHWVHAKCEGLSDEDYEILSGLPDSVLYTCGPCAGAAQPRWREALSGALQGGLRQVLQGLLSSKVVGPLLLCTQCGPDGKQLHPGPCGLQAVSQRFEDGHYKSVHSFMEDMVGILMRHSEEGETPDRRAGGQMKGLLLKLLESAFGWFDAHDPKYWRRSTRLPNGVLPNAVLPPSLDHVYAQWRQQEPETPESGQPPGDPSAAFQGKDPAAFSHLEDPRQCALCLKYGDADSKEAGRLLYIGQNEWTHVNCAIWSAEVFEENDGSLKNVHAAVARGRQMRCELCLKPGATVGCCLSSCLSNFHFMCARASYCIFQDDKKVFCQKHTDLLDGKEIVNPDGFDVLRRVYVDFEGINFKRKFLTGLEPDAINVLIGSIRIDSLGTLSDLSDCEGRLFPIGYQCSRLYWSTVDARRRCWYRCRILEYRPWGPREEPAHLEAAEENQTIVHSPAPSSEPPGGEDPPLDTDVLVPGAPERHSPIQNLDPPLRPDSGSAPPPAPRSFSGARIKVPNYSPSRRPLGGVSFGPLPSPGSPSSLTHHIPTVGDPDFPAPPRRSRRPSPLAPRPPPSRWASPPLKTSPQLRVPPPTSVVTALTPTSGELAPPGPAPSPPPPEDLGPDFEDMEVVSGLSAADLDFAASLLGTEPFQEEIVAAGAMGSSHGGPGDSSEEESSPTSRYIHFPVTVVSAPGLAPSATPGAPRIEQLDGVDDGTDSEAEAVQQPRGQGTPPSGPGVVRAGVLGAAGDRARPPEDLPSEIVDFVLKNLGGPGDGGAGPREESLPPAPPLANGSQPSQGLTASPADPTRTFAWLPGAPGVRVLSLGPAPEPPKPATSKIILVNKLGQVFVKMAGEGEPVPPPVKQPPLPPTISPTAPTSWTLPPGPLLGVLPVVGVVRPAPPPPPPPLTLVLSSGPASPPRQAIRVKRVSTFSGRSPPAPPPYKAPRLDEDGEASEDTPQVPGLGSGGFSRVRMKTPTVRGVLDLDRPGEPAGEESPGPLQERSPLLPLPEDGPPQVPDGPPDLLLESQWHHYSGEASSSEEEPPSPDDKENQAPKRTGPHLRFEISSEDGFSVEAESLEGAWRTLIEKVQEARGHARLRHLSFSGMSGARLLGIHHDAVIFLAEQLPGAQRCQHYKFRYHQQGEGQEEPPLNPHGAARAEVYLRKCTFDMFNFLASQHRVLPEGATCDEEEDEVQLRSTRRATSLELPMAMRFRHLKKTSKEAVGVYRSAIHGRGLFCKRNIDAGEMVIEYSGIVIRSVLTDKREKFYDGKGIGCYMFRMDDFDVVDATMHGNAARFINHSCEPNCFSRVIHVEGQKHIVIFALRRILRGEELTYDYKFPIEDASNKLPCNCGAKRCRRFLN

SEQ ID NO: 15226 - protein, 4911 aa, Homo Sapiens
MSSEEDKSVEQPQPPPPPPEEPGAPAPSPAAADKRPRGRPRKDGASPFQRARKKPRSRGKTAVEDEDSMDGLETTETETIVETEIKEQSAEEDAEAEVDNSKQLIPTLQRSVSEESANSLVSVGVEAKISEQLCAFCYCGEKSSLGQGDLKQFRITPGFILPWRNQPSNKKDIDDNSNGTYEKMQNSAPRKQRGQRKERSPQQNIVSCVSVSTQTASDDQAGKLWDELSLVGLPDAIDIQALFDSTGTCWAHHRCVEWSLGVCQMEEPLLVNVDKAVVSGSTERCAFCKHLGATIKCCEEKCTQMYHYPCAAGAGTFQDFSHIFLLCPEHIDQAPERSKEDANCAVCDSPGDLLDQFFCTTCGQHYHGMCLDIAVTPLKRAGWQCPECKVCQNCKQSGEDSKMLVCDTCDKGYHTFCLQPVMKSVPTNGWKCKNCRICIECGTRSSSQWHHNCLICDNCYQQQDNLCPFCGKCYHPELQKDMLHCNMCKRWVHLECDKPTDHELDTQLKEEYICMYCKHLGAEMDRLQPGEEVEIAELTTDYNNEMEVEGPEDQMVFSEQAANKDVNGQESTPGIVPDAVQVHTEEQQKSHPSESLDTDSLLIAVSSQHTVNTELEKQISNEVDSEDLKMSSEVKHICGEDQIEDKMEVTENIEVVTHQITVQQEQLQLLEEPETVVSREESRPPKLVMESVTLPLETLVSPHEESISLCPEEQLVIERLQGEKEQKENSELSTGLMDSEMTPTIEGCVKDVSYQGGKSIKLSSETESSFSSSADISKADVSSSPTPSSDLPSHDMLHNYPSALSSSAGNIMPTTYISVTPKIGMGKPAITKRKFSPGRPRSKQGAWSTHNTVSPPSWSPDISEGREIFKPRQLPGSAIWSIKVGRGSGFPGKRRPRGAGLSGRGGRGRSKLKSGIGAVVLPGVSTADISSNKDDEENSMHNTVVLFSSSDKFTLNQDMCVVCGSFGQGAEGRLLACSQCGQCYHPYCVSIKITKVVLSKGWRCLECTVCEACGKATDPGRLLLCDDCDISYHTYCLDPPLQTVPKGGWKCKWCVWCRHCGATSAGLRCEWQNNYTQCAPCASLSSCPVCYRNYREEDLILQCRQCDRWMHAVCQNLNTEEEVENVADIGFDCSMCRPYMPASNVPSSDCCESSLVAQIVTKVKELDPPKTYTQDGVCLTESGMTQLQSLTVTVPRRKRSKPKLKLKIINQNSVAVLQTPPDIQSEHSRDGEMDDSREGELMDCDGKSESSPEREAVDDETKGVEGTDGVKKRKRKPYRPGIGGFMVRQRSRTGQGKTKRSVIRKDSSGSISEQLPCRDDGWSEQLPDTLVDESVSVTESTEKIKKRYRKRKNKLEETFPAYLQEAFFGKDLLDTSRQSKISLDNLSEDGAQLLYKTNMNTGFLDPSLDPLLSSSSAPTKSGTHGPADDPLADISEVLNTDDDILGIISDDLAKSVDHSDIGPVTDDPSSLPQPNVNQSSRPLSEEQLDGILSPELDKMVTDGAILGKLYKIPELGGKDVEDLFTAVLSPANTQPTPLPQPPPPTQLLPIHNQDAFSRMPLMNGLIGSSPHLPHNSLPPGSGLGTFSAIAQSSYPDARDKNSAFNPMASDPNNSWTSSAPTVEGENDTMSNAQRSTLKWEKEEALGEMATVAPVLYTNINFPNLKEEFPDWTTRVKQIAKLWRKASSQERAPYVQKARDNRAALRINKVQMSNDSMKRQQQQDSIDPSSRIDSELFKDPLKQRESEHEQEWKFRQQMRQKSKQQAKIEATQKLEQVKNEQQQQQQQQFGSQHLLVQSGSDTPSSGIQSPLTPQPGNGNMSPAQSFHKELFTKQPPSTPTSTSSDDVFVKPQAPPPPPAPSRIPIQDSLSQAQTSQPPSPQVFSPGSSNSRPPSPMDPYAKMVGTPRPPPVGHSFSRRNSAAPVENCTPLSSVSRPLQMNETTANRPSPVRDLCSSSTTNNDPYAKPPDTPRPVMTDQFPKSLGLSRSPVVSEQTAKGPIAAGTSDHFTKPSPRADVFQRQRIPDSYARPLLTPAPLDSGPGPFKTPMQPPPSSQDPYGSVSQASRRLSVDPYERPALTPRPIDNFSHNQSNDPYSQPPLTPHPAVNESFAHPSRAFSQPGTISRPTSQDPYSQPPGTPRPVVDSYSQSSGTARSNTDPYSQPPGTPRPTTVDPYSQQPQTPRPSTQTDLFVTPVTNQRHSDPYAHPPGTPRPGISVPYSQPPATPRPRISEGFTRSSMTRPVLMPNQDPFLQAAQNRGPALPGPLVRPPDTCSQTPRPPGPGLSDTFSRVSPSAARDPYDQSPMTPRSQSDSFGTSQTAHDVADQPRPGSEGSFCASSNSPMHSQGQQFSGVSQLPGPVPTSGVTDTQNTVNMAQADTEKLRQRQKLREIILQQQQQKKIAGRQEKGSQDSPAVPHPGPLQHWQPENVNQAFTRPPPPYPGNIRSPVAPPLGPRYAVFPKDQRGPYPPDVASMGMRPHGFRFGFPGGSHGTMPSQERFLVPPQQIQGSGVSPQLRRSVSVDMPRPLNNSQMNNPVGLPQHFSPQSLPVQQHNILGQAYIELRHRAPDGRQRLPFSAPPGSVVEASSNLRHGNFIPRPDFPGPRHTDPMRRPPQGLPNQLPVHPDLEQVPPSQQEQGHSVHSSSMVMRTLNHPLGGEFSEAPLSTSVPSETTSDNLQITTQPSDGLEEKLDSDDPSVKELDVKDLEGVEVKDLDDEDLENLNLDTEDGKVVELDTLDNLETNDPNLDDLLRSGEFDIIAYTDPELDMGDKKSMFNEELDLPIDDKLDNQCVSVEPKKKEQENKTLVLSDKHSPQKKSTVTNEVKTEVLSPNSKVESKCETEKNDENKDNVDTPCSQASAHSDLNDGEKTSLHPCDPDLFEKRTNRETAGPSANVIQASTQLPAQDVINSCGITGSTPVLSSLLANEKSDNSDIRPSGSPPPPTLPASPSNHVSSLPPFIAPPGRVLDNAMNSNVTVVSRVNHVFSQGVQVNPGLIPGQSTVNHSLGTGKPATQTGPQTSQSGTSSMSGPQQLMIPQTLAQQNRERPLLLEEQPLLLQDLLDQERQEQQQQRQMQAMIRQRSEPFFPNIDFDAITDPIMKAKMVALKGINKVMAQNNLGMPPMVMSRFPFMGQVVTGTQNSEGQNLGPQAIPQDGSITHQISRPNPPNFGPGFVNDSQRKQYEEWLQETQQLLQMQQKYLEEQIGAHRKSKKALSAKQRTAKKAGREFPEEDAEQLKHVTEQQSMVQKQLEQIRKQQKEHAELIEDYRIKQQQQCAMAPPTMMPSVQPQPPLIPGATPPTMSQPTFPMVPQQLQHQQHTTVISGHTSPVRMPSLPGWQPNSAPAHLPLNPPRIQPPIAQLPIKTCTPAPGTVSNANPQSGPPPRVEFDDNNPFSESFQERERKERLREQQERQRIQLMQEVDRQRALQQRMEMEQHGMVGSEISSSRTSVSQIPFYSSDLPCDFMQPLGPLQQSPQHQQQMGQVLQQQNIQQGSINSPSTQTFMQTNERRQVGPPSFVPDSPSIPVGSPNFSSVKQGHGNLSGTSFQQSPVRPSFTPALPAAPPVANSSLPCGQDSTITHGHSYPGSTQSLIQLYSDIIPEEKGKKKRTRKKKRDDDAESTKAPSTPHSDITAPPTPGISETTSTPAVSTPSELPQQADQESVEPVGPSTPNMAAGQLCTELENKLPNSDFSQATPNQQTYANSEVDKLSMETPAKTEEIKLEKAETESCPGQEEPKLEEQNGSKVEGNAVACPVSSAQSPPHSAGAPAAKGDSGNELLKHLLKNKKSSSLLNQKPEGSICSEDDCTKDNKLVEKQNPAEGLQTLGAQMQGGFGCGNQLPKTDGGSETKKQRSKRTQRTGEKAAPRSKKRKKDEEEKQAMYSSTDTFTHLKQQNNLSNPPTPPASLPPTPPPMACQKMANGFATTEELAGKAGVLVSHEVTKTLGPKPFQLPFRPQDDLLARALAQGPKTVDVPASLPTPPHNNQEELRIQDHCGDRDTPDSFVPSSSPESVVGVEVSRYPDLSLVKEEPPEPVPSPIIPILPSTAGKSSESRRNDIKTEPGTLYFASPFGPSPNGPRSGLISVAITLHPTAAENISSVVAAFSDLLHVRIPNSYEVSSAPDVPSMGLVSSHRINPGLEYRQHLLLRGPPPGSANPPRLVSSYRLKQPNVPFPPTSNGLSGYKDSSHGIAESAALRPQWCCHCKVVILGSGVRKSFKDLTLLNKDSRESTKRVEKDIVFCSNNCFILYSSTAQAKNSENKESIPSLPQSPMRETPSKAFHQYSNNISTLDVHCLPQLPEKASPPASPPIAFPPAFEAAQVEAKPDELKVTVKLKPRLRAVHGGFEDCRPLNKKWRGMKWKKWSIHIVIPKGTFKPPCEDEIDEFLKKLGTSLKPDPVPKDYRKCCFCHEEGDGLTDGPARLLNLDLDLWVHLNCALWSTEVYETQAGALINVELALRRGLQMKCVFCHKTGATSGCHRFRCTNIYHFTCAIKAQCMFFKDKTMLCPMHKPKGIHEQELSYFAVFRRVYVQRDEVRQIASIVQRGERDHTFRVGSLIFHTIGQLLPQQMQAFHSPKALFPVGYEASRLYWSTRYANRRCRYLCSIEEKDGRPVFVIRIVEQGHEDLVLSDISPKGVWDKILEPVACVRKKSEMLQLFPAYLKGEDLFGLTVSAVARIAESLPGVEACENYTFRYGRNPLMELPLAVNPTGCARSEPKMSAHVKRFVLRPHTLNSTSTSKSFQSTVTGELNAPYSKQFVHSKSSQYRKMKTEWKSNVYLARSRIQGLGLYAARDIEKHTMVIEYIGTIIRNEVANRKEKLYESQNRGVYMFRMDNDHVIDATLTGGPARYINHSCAPNCVAEVVTFERGHKIIISSSRRIQKGEELCYDYKFDFEDDQHKIPCHCGAVNCRKWMN

SEQ ID NO: 15227 - protein, 1858 aa, Homo Sapiens
MSIVIPLGVDTAETSYLEMAAGSEPESVEASPVVVEKSNSYPHQLYTSSSHHSHSYIGLPYADHNYGARPPPTPPASPPPSVLISKNEVGIFTTPNFDETSSATTISTSEDGSYGTDVTRCICGFTHDDGYMICCDKCSVWQHIDCMGIDRQHIPDTYLCERCQPRNLDKERAVLLQRRKRENMSDGDTSATESGDEVPVELYTAFQHTPTSITLTASRVSKVNDKRRKKSGEKEQHISKCKKAFREGSRKSSRVKGSAPEIDPSSDGSNFGWETKIKAWMDRYEEANNNQYSEGVQREAQRIALRLGNGNDKKEMNKSDLNTNNLLFKPPVESHIQKNKKILKSAKDLPPDALIIEYRGKFMLREQFEANGYFFKRPYPFVLFYSKFHGLEMCVDARTFGNEARFIRRSCTPNAEVRHEIQDGTIHLYIYSIHSIPKGTEITIAFDFDYGNCKYKVDCACLKENPECPVLKRSSESMENINSGYETRRKKGKKDKDISKEKDTQNQNITLDCEGTTNKMKSPETKQRKLSPLRLSVSNNQEPDFIDDIEEKTPISNEVEMESEEQIAERKRKMTREERKMEAILQAFARLEKREKRREQALERISTAKTEVKTECKDTQIVSDAEVIQEQAKEENASKPTPAKVNRTKQRKSFSRSRTHIGQQRRRHRTVSMCSDIQPSSPDIEVTSQQNDIENTVLTIEPETETALAEIITETEVPALNKCPTKYPKTKKHLVNEWLSEKNEKTGKPSDGLSERPLRITTDPEVLATQLNSLPGLTYSPHVYSTPKHYIRFTSPFLSEKRRRKEPTENISGSCKKRWLKQALEEENSAILHRFNSPCQERSRSPAVNGENKSPLLLNDSCSLPDLTTPLKKRRFYQLLDSVYSETSTPTPSPYATPTHTDITPMDPSFATPPRIKSDDETCRNGYKPIYSPVTPVTPGTPGNTMHFENISSPESSPEIKRRTYSQEGYDRSSTMLTLGPFRNSNLTELGLQEIKTIGYTSPRSRTEVNRQCPGEKEPVSDLQLGLDAVEPTALHKTLETPAHDRAEPNSQLDSTHSGRGTMYSSWVKSPDRTGVNFSVNSNLRDLTPSHQLEVGGGFRISESKCLMQDDTRGMFMETTVFCTSEDGLVSGFGRTVNDNLIDGNCTPQNPPQKKKVSLLEYRKRQREARKSGSKTENFPLISVSPHASGSLSNNGDGCASSNDNGEQVDHTASLPLPTPATVYNATSEETSNNCPVKDATASEKNEPEVQWTASTSVEQVRERSYQRALLLSDHRKDKDSGGESPCVSCSPSHVQSSPSSHSNHIPQLQAKGPVPSFSELMEDPDPENPEPTTTNECPSPDTSQNTCKSPPKMSKPGSPGSVIPAQAHGKIFTKPDPQWDSTVSASEAENGVHLKTELQQKQLSNNNQALSKNHPPQTHVRNSSEQLSQKLPSVPTKLHCPPSPHLENPPKSSTPHTPVQHGYLSPKPPSQQLGSPYRPHHSQSPQVGTPQREPQRNFYPAAQNLPANTQQATSGTLFTQTPSGQSSATYSQFNQQSLNSTAPPPPPPPPPSSSYYQNQQPSANFQNYNQLKGSLSQQTVFTSGPNQALPGTTSQQTVPGHHVTPGHFLPSQNPTIHHQTAAAVVPPPPPPPPAPGPHLVQQPNSHQQHSVAHVVGPVHAVTPGSHIHSQTAGHHLPPPPPPPGPAPHHHPPPHPSTGLQGLQAQHQHVVNSAPPPPPPPPPSSVLASGHHTTSAQALHHPPHQGPPLFPSSAHPTVPPYPSQATHHTTLGPGPQHQPSGTGPHCPLPVTGPHLQPQGPNSIPTPTASGFCPHPGSVALPHGVQGPQQASPVPGQIPIHRAQVPPTFQNNYHGSGWH

SEQ ID NO: 15228 - protein, 840 aa, Homo Sapiens
MHLVAGDSPGSGPHLPATAFIIPASSATLGLPSSALDVSCFPREPIHVGAPEQVAGCEPVSATVLPQLSAGPASSSTSTVRLLEWTEAAAPPPGGGLRFRISEYKPLNMAGVEQPPSPELRQEGVTEYEDGGAPAGDGEAGPQQAEDHPQNPPEDPNQDPPEDDSTCQCQACGPHQAAGPDLGSSNDGCPQLFQERSVIVENSSGSTSASELLKPMKKRKRREYQSPSEEESEPEAMEKQEEGKDPEGQPTASTPESEEWSSSQPATGEKKECWSWESYLEEQKAITAPVSLFQDSQAVTHNKNGFKLGMKLEGIDPQHPSMYFILTVAEVCGYRLRLHFDGYSECHDFWVNANSPDIHPAGWFEKTGHKLQPPKGYKEEEFSWSQYLRSTRAQAAPKHLFVSQSHSPPPLGFQVGMKLEAVDRMNPSLVCVASVTDVVDSRFLVHFDNWDDTYDYWCDPSSPYIHPVGWCQKQGKPLTPPQDYPDPDNFCWEKYLEETGASAVPTWAFKVRPPHSFLVNMKLEAVDRRNPALIRVASVEDVEDHRIKIHFDGWSHGYDFWIDADHPDIHPAGWCSKTGHPLQPPLGPREPSSASPGGCPPLSYRSLPHTRTSKYSFHHRKCPTPGCDGSGHVTGKFTAHHCLSGCPLAERNQSRLKAELSDSEASARKKNLSGFSPRKKPRHHGRIGRPPKYRKIPQEDFQTLTPDVVHQSLFMSALSAHPDRSLSVCWEQHCKLLPGVAGISASTVAKWTIDEVFGFVQTLTGCEDQARLFKDEARIVRVTHVSGKTLVWTVAQLGDLVCSDHLQEGKGILETGVHSLLCSLPTHLLAKLSFASDSQY

SEQ ID NO: 15229 - protein, 705 aa, Homo Sapiens; identical to SEQ ID NO: 7623

SEQ ID NO: 15230 - protein, 780 aa, Homo Sapiens
MTESASSTSGQEFDVFSVMDWKDGVGTLPGSDLKFRVNEFGALEVITDENEMENVKKATATTTWMVPTAQEAPTSPPSSRPVFPPAYWTSPPGCPTVFSEKTGMPFRLKDPVKVEGLQFCENCCQYGNVDECLSGGNYCSQNCARHIKDKDQKEERDVEEDNEEEDPKCSRKKKPKLSLKADTKEDGEERDDEMENKQDVRILRGSQRARRKRRGDSAVLKQGLPPKGKKAWCWASYLEEEKAVAVPAKLFKEHQSFPYNKNGFKVGMKLEGVDPEHQSVYCVLTVAEVCGYRIKLHFDGYSDCYDFWVNADALDIHPVGWCEKTGHKLHPPKGYKEEEFNWQTYLKTCKAQAAPKSLFENQNITVIPSGFRVGMKLEAVDKKNPSFICVATVTDMVDNRFLVHFDNWDESYDYWCEASSPHIHPVGWCKEHRRTLITPPGYPNVKHFSWDKYLEETNSLPAPARAFKVKPPHGFQKKMKLEVVDKRNPMFIRVATVADTDDHRVKVHFDGWNNCYDYWIDADSPDIHPVGWCSKTGHPLQPPLSPLELMEASEHGGCSTPGCKGIGHFKRARHLGPHSAANCPYSEINLNKDRIFPDRLSGEMPPASPSFPRNKRTDANESSSSPEIRDQHADDVKEDFEERTESEMRTSHEARGAREEPTVQQAQRRSAVFLSFKSPIPCLPLRWEQQSKLLPTVAGIPASKVSKWSTDEVSEFIQSLPGCEEHGKVFKDEQIDGEAFLLMTQTDIVKIMSIKLGPALKIFNSILMFKAAEKNSHNEL

SEQ ID NO: 15231 - protein, 623 aa, Homo Sapiens
MKQPNRKRKLNMDSKERLDQDGRLEQAEEEKKPKDSTTPLSHVPSAAAQGAWSWEWYLKEQKAVAAPVELFSKDQSFPEHENGFQIGMRLEGIDPRHPSVFCVLSVAEVCGYRLRLHFDGYLSCYDFWTNAGSPDIHPVGWCEKTKHELHIPKGYRKDKFVWMDYLKACKLQNAPKKLFRNRSPNGPMSKEFQVGMKLEAVDRKNPSLVCVATIADIVEDRLLVHFDNWDDSYDYWCDVNSPYVQPVGWCQENGRTLIAPQGYPNPENFSWTEYLEATQTNAVPAKVFKMRLPHGFLPNMKLEVVDKRNPRLIRVATIVDVDDQRVKVHFDGWDHKYDYWVEADSPDIHPIGWCDVTGHPLEVPQRTNDLKILPGQAVCPTPGCRGIGHIRGPRYSGHHSAFGCPYSDMNLKKEATLHDRLREQTQANLESDSSHSKSKSLCSLNFNGKHEKVNSQPRLVQQAKCLKIKGKEDIDLDNLFRVLVLHPRGLEYSVEQAQQVLHQSVSMSTVSAHPFRDLPLGREQHCKLLPGVADIRASQVARWTVDEVAEFVQSLLGCEEHAKCFKKEQIDGKAFLLLTQTDIVKVMKIKLGPALKIYNSILMFRHSQELPEEDIASGQEVRG

SEQ ID NO: 15232 - protein, 281 aa, Homo Sapiens
MTSKEDGKAAPGEERRRSPLDHLPPPANSNKPLTPFSIEDILNKPSVRRSYSLCGAAHLLAAADKHAQGGLPLAGRALLSQTSPLCALEELASKTFKGLEVSVLQAAEGRDGMTIFGQRQTPKKRRKSRTAFTNHQIYELEKRFLYQKYLSPADRDQIAQQLGLTNAQVITWFQNRRAKLKRDLEEMKADVESAKKLGPSGQMDIVALAELEQNSEATAGGGGGCGRAKSRPGSPVLPPGAPKAPGAGALQLSPASPLTDQPASSQDCSEDEEDEEIDVDD

SEQ ID NO: 15233 - protein, 198 aa, Homo Sapiens
MNSGREPRTPRTLLSIADILAPRMVPRAPSAPQLPESGPGPTSPLCALEELTSKTFRGLDARALQPSEGRAGPDALGPGPFGRKRRKSRTAFTAQQVLELERRFVFQKYLAPSERDGLATRLGLANAQVVTWFQNRRAKLKRDVEEMRADVASLRALSPEVLCSLALPEGAPDPGLCLGPAGPDSRPHLSDEEIQVDD

SEQ ID NO: 15234 - protein, 433 aa, Homo Sapiens
MQRMIQQFAAEYTSKNSSTQDPSQPNSTKNQSLPKASPVTTSPTAATTQNPVLSKLLMADQDSPLDLTVRKSQSEPSEQDGVLDLSTKKSPCAGSTSLSHSPGCSSTQGNGRPGRPSQYRPDGLRSGDGVPPRSLQDGTREGFGHSTSLKVPLARSLQISEELLSRNQLSTAASLGPSGLQNHGQHLILSREASWAKPHYEFNLSRMKFRGNGALSNISDLPFLAENSAFPKMALQAKQDGKKDVSHSSPVDLKIPQVRGMDLSWESRTGDQYSYSSLVMGSQTESALSKKLRAILPKQSRKSMLDAGPDSWGSDAEQSTSGQPYPTSDQEGDPGSKQPRKKRGRYRQYNSEILEEAISVVMSGKMSVSKAQSIYGIPHSTLEYKVKERLGTLKNPPKKKMKLMRSEGPDVSVKIELDPQGEAAQSANESKNE

SEQ ID NO: 15235 - protein, 602 aa, Homo Sapiens; identical to SEQ ID NO: 7758

SEQ ID NO: 15236 - protein, 399 aa, Homo Sapiens
MPQLSGGGGGGGGDPELCATDEMIPFKDEGDPQKEKIFAEISHPEEEGDLADIKSSLVNESEIIPASNGHEVARQAQTSQEPYHDKAREHPDDGKHPDGGLYNKGPSYSSYSGYIMMPNMNNDPYMSNGSLSPPIPRTSNKVPVVQPSHAVHPLTPLITYSDEHFSPGSHPSHIPSDVNSKQGMSRHPPAPDIPTFYPLSPGGVGQITPPLGWQGQPVYPITGGFRQPYPSSLSVDTSMSRFSHHMIPGPPGPHTTGIPHPAIVTPQVKQEHPHTDSDLMHVKPQHEQRKEQEPKRPHIKKPLNAFMLYMKEMRANVVAECTLKESAAINQILGRRWHALSREEQAKYYELARKERQLHMQLYPGWSARDNYGKKKKRKREKLQESASGTGPRMTAAYI

SEQ ID NO: 15237 - protein, 168 aa, Homo Sapiens
MHPSLATMGKLASKLQLDLSVVKIWFKNQRAKWKRQQRQQMQTRPSLGPANQTTSVKKEETPSAITTANIRPVSPGISDANDHDLREPSGIKNPGGASASARVSSWDSQSYDIEQICLGASNPPWASTLFEIDEFVKIYDLPGEDDTSSLNQYLFPVCLEYDQLQSSV

SEQ ID NO: 15238 - protein, 406 aa, Homo Sapiens
MVHCAGCKRPILDRFLLNVLDRAWHVKCVQCCECKCNLTEKCFSREGKLYCKNDFFRCFGTKCAGCAQGISPSDLVRRARSKVFHLNCFTCMMCNKQLSTGEELYIIDENKFVCKEDYLSNSSVAKENSLHSATTGSDPSLSPDSQDPSQDDAKDSESANVSDKEAGSNENDDQNLGAKRRGPRTTIKAKQLETLKAAFAATPKPTRHIREQLAQETGLNMRVIQVWFQNRRSKERRMKQLSALGARRHAFFRSPRRMRPLVDRLEPGELIPNGPFSFYGDYQSEYYGPGGNYDFFPQGPPSSQAQTPVDLPFVPSSGPSGTPLGGLEHPLPGHHPSSEAQRFTDILAHPPGDSPSPEPSLPGPLHSMSAEVFGPSPPFSSLSVNGGASYGNHLSHPPEMNEAAVW

SEQ ID NO: 15239 - protein, 406 aa, Homo Sapiens
MLFHSLSGPEVHGVIDEMDRRAKSEAPAISSAIDRGDTETTMPSISSDRAALCAGCGGKISDRYYLLAVDKQWHMRCLKCCECKLNLESELTCFSKDGSIYCKEDYYRRFSVQRCARCHLGISASEMVMRARDLVYHLNCFTCTTCNKMLTTGDHFGMKDSLVYCRLHFEALLQGEYPAHFNHADVAAAAAAAAAAKSAGLGAAGANPLGLPYYNGVGTVQKGRPRKRKSPGPGADLAAYNAALSCNENDAEHLDRDQPYPSSQKTKRMRTSFKHHQLRTMKSYFAINHNPDAKDLKQLAQKTGLTKRVLQVWFQNARAKFRRNLLRQENTGVDKSTDAALQTGTPSGPASELSNASLSPSSTPTTLTDLTSPTLPTVTSVLTSVPGNLEGHEPHSPSQTTLTNLF

SEQ ID NO: 15240 - protein, 397 aa, Homo Sapiens
MLLETGLERDRARPGAAAVCTLGGTREIPLCAGCDQHILDRFILKALDRHWHSKCLKCSDCHTPLAERCFSRGESVYCKDDFFKRFGTKCAACQLGIPPTQVVRRAQDFVYHLHCFACVVCKRQLATGDEFYLMEDSRLVCKADYETAKQREAEATAKRPRTTITAKQLETLKSAYNTSPKPARHVREQLSSETGLDMRVVQVWFQNRRAKEKRLKKDAGRQRWGQYFRNMKRSRGGSKSDKDSVQEGQDSDAEVSFPDEPSLAEMGPANGLYGSLGEPTQALGRPSGALGNFSLEHGGLAGPEQYRELRPGSPYGVPPSPAAPQSLPGPQPLLSSLVYPDTSLGLVPSGAPGGPPPMRVLAGNGPSSDLSTGSSGGYPDFPASPASWLDEVDHAQF

SEQ ID NO: 15241 - protein, 390 aa, Homo Sapiens
MMQSATVPAEGAVKGLPEMLGVPMQQIPQCAGCNQHILDKFILKVLDRHWHSSCLKCADCQMQLADRCFSRAGSVYCKEDFFKRFGTKCTACQQGIPPTQVVRKAQDFVYHLHCFACIICNRQLATGDEFYLMEDGRLVCKEDYETAKQNDDSEAGAKRPRTTITAKQLETLKNAYKNSPKPARHVREQLSSETGLDMRVVQVWFQNRRAKEKRLKKDAGRHRWGQFYKSVKRSRGSSKQEKESSAEDCGVSDSELSFREDQILSELGHTNRIYGNVGDVTGGQLMNGSFSMDGTGQSYQDLRDGSPYGIPQSPSSISSLPSHAPLLNGLDYTVDSNLGIIAHAGQGVSQTLRAMAGGPTSDISTGSSVGYPDFPTSPGSWLDEMDHPPF

SEQ ID NO: 15242 - protein, 402 aa, Homo Sapiens
MMVHCAGCERPILDRFLLNVLDRAWHIKCVQCCECKTNLSEKCFSREGKLYCKNDFFRRFGTKCAGCAQGISPSDLVRKARSKVFHLNCFTCMVCNKQLSTGEELYVIDENKFVCKDDYLSSSSLKEGSLNSVSSCTDRSLSPDLQDALQDDPKETDNSTSSDKETANNENEEQNSGTKRRGPRTTIKAKQLETLKAAFAATPKPTRHIREQLAQETGLNMRVIQVWFQNRRSKERRMKQLSALGARRHAFFRSPRRMRPLGGRLDESEMLGSTPYTYYGDYQGDYYAPGSNYDFFAHGPPSQAQSPADSSFLAASGPGSTPLGALEPPLAGPHAADNPRFTDMISHPDTPSPEPGLPGTLHPMPGEVFSGGPSPPFPMSGTSGYSGPLSHPNPELNEAAVW

SEQ ID NO: 15243 - protein, 363 aa, Homo Sapiens
MAQPGSGCKATTRCLEGTAPPAMAQSDAEALAGALDKDEGQASPCTPSTPSVCSPPSAASSVPSAGKNICSSCGLEILDRYLLKVNNLIWHVRCLECSVCRTSLRQQNSCYIKNKEIFCKMDYFSRFGTKCARCGRQIYASDWVRRARGNAYHLACFACFSCKRQLSTGEEFGLVEEKVLCRIHYDTMIENLKRAAENGNGLTLEGAVPSEQDSQPKPAKRARTSFTAEQLQVMQAQFAQDNNPDAQTLQKLADMTGLSRRVIQVWFQNCRARHKKHTPQHPVPPSGAPPSRLPSALSDDIHYTPFSSPERARMVTLHGYIESQVQCGQVHCRLPYTAPPVHLKADMDGPLSNRGEKVILFQY

SEQ ID NO: 15244 - protein, 356 aa, Homo Sapiens
MQILSRCQGLMSEECGRTTALAAGRTRKGAGEEGLVSPEGAGDEDSCSSSAPLSPSSSPRSMASGSGCPPGKCVCNSCGLEIVDKYLLKVNDLCWHVRCLSCSVCRTSLGRHTSCYIKDKDIFCKLDYFRRYGTRCSRCGRHIHSTDWVRRAKGNVYHLACFACFSCKRQLSTGEEFALVEEKVLCRVHYDCMLDNLKREVENGNGISVEGALLTEQDVNHPKPAKRARTSFTADQLQVMQAQFAQDNNPDAQTLQKLAERTGLSRRVIQVWFQNCRARHKKHVSPNHSSSTPVTAVPPSRLSPPMLEEMAYSAYVPQDGTMLTALHSYMDAHSPTTLGLQPLLPHSMTQLPISHT

SEQ ID NO: 15245 - protein, 397 aa, Homo Sapiens
MEIVGCRAEDNSCPFRPPAMLFHGISGGHIQGIMEEMERRSKTEARLAKGAQLNGRDAGMPPLSPEKPALCAGCGGKISDRYYLLAVDKQWHLRCLKCCECKLALESELTCFAKDGSIYCKEDYYRRFSVQRCARCHLGISASEMVMRARDSVYHLSCFTCSTCNKTLTTGDHFGMKDSLVYCRAHFETLLQGEYPPQLSYTELAAKSGGLALPYFNGTGTVQKGRPRKRKSPALGVDIVNYNSGCNENEADHLDRDQQPYPPSQKTKRMRTSFKHHQLRTMKSYFAINHNPDAKDLKQLAQKTGLTKRVLQVWFQNARAKFRRNLLRQENGGVDKADGTSLPAPPSADSGALTPPGTATTLTDLTNPTITVVTSVTSNMDSHESGSPSQTTLTNLF

SEQ ID NO: 15246 - protein, 382 aa, Homo Sapiens
MLDGLKMEENFQSAIDTSASFSSLLGRAVSPKSVCEGCQRVILDRFLLRLNDSFWHEQCVQCASCKEPLETTCFYRDKKLYCKYDYEKLFAVKCGGCFEAIAPNEFVMRAQKSVYHLSCFCCCVCERQLQKGDEFVLKEGQLLCKGDYEKERELLSLVSPAASDSGKSDDEESLCKSAHGAGKGTAEEGKDHKRPKRPRTILTTQQRRAFKASFEVSSKPCRKVRETLAAETGLSVRVVQVWFQNQRAKMKKLARRQQQQQQDQQNTQRLSSAQTNGGGSAGMEGIMNPYTALPTPQQLLAIEQSVYSSDPFRQGLTPPQMPGDHMHPYGAEPLFHDLDSDDTSLSNLGDCFLATSEAGPLQSRVGNPIDHLYSMQNSYFTS

SEQ ID NO: 15247 - protein, 402 aa, Homo Sapiens
MDIATGPESLERCFPRGQTDCAKMLDGIKMEEHALRPGPATLGVLLGSDCPHPAVCEGCQRPISDRFLMRVNESSWHEECLQCAACQQALTTSCYFRDRKLYCKQDYQQLFAAKCSGCMEKIAPTEFVMRALECVYHLGCFCCCVCERQLRKGDEFVLKEGQLLCKGDYEKEKDLLSSVSPDESDSVKSEDEDGDMKPAKGQGSQSKGSGDDGKDPRRPKRPRTILTTQQRRAFKASFEVSSKPCRKVRETLAAETGLSVRVVQVWFQNQRAKMKKLARRHQQQQEQQNSQRLGQEVLSSRMEGMMASYTPLAPPQQQIVAMEQSPYGSSDPFQQGLTPPQMPGDHMNPYGNDSIFHDIDSDTSLTSLSDCFLGSSDVGSLQARVGNPIDRLYSMQSSYFAS

SEQ ID NO: 15248 - protein, 808 aa, Homo Sapiens
MTSPAAAQSREIDCLSPEAQKLAEARLAAKRAARAEAREIRMKELERQQKEEDSERYSRRSRRNTSASDEDERMSVGSRGSLRVEERPEKDFTEKGSRNMPGLSAATLASLGGTSSRRGSGDTSISIDTEASIREIKELNELKDQIQDVEGKYMQGLKEMKDSLAEVEEKYKKAMVSNAQLDNEKTNFMYQVDTLKDMLLELEEQLAESRRQYEEKNKEFEREKHAHSILQFQFAEVKEALKQREEMLEKHGIILNSEIATNGETSDTLNNVGYQGPTKMTKEELNALKSTGDGTLGRASEVEVKNEIVANVGKREILHNTEKEQHTEDTVKDCVDIEVFPAGENTEDQKSSEDTAPFLGTLAGATYEEQVQSQILESSSLPENTVQVESNEVMGAPDDRTRTPLEPSNCWSDLDGGNHTENVGEAAVTQVEEQAGTVASCPLGHSDDTVYHDDKCMVEVPQELETSTGHSLEKEFTNQEAAEPKEVPAHSTEVGRDHNEEEGEETGLRDEKPIKTEVPGSPAGTEGNCQEATGPSTVDTQNEPLDMKEPDEEKSDQQGEALDSSQKKTKNKKKKNKKKKSPVPVETLKDVKKELTYQNTDLSEIKEEEQVKSTDRKSAVEAQNEVTENPKQKIAAESSENVDCPENPKIKLDGKLDQEGDDVQTAAEEVLADGDTLDFEDDTVQSSGPRAGGEELDEGVAKDNAKIDGATQSSPAEPKSEDADRCTLPEHESPSQDISDACEAESTERCEMSEHPSQTVRKALDSNSLENDDLSAPGREPGHFNPESREDTRGGNEKGKSKEDCTMS

SEQ ID NO: 15249 - protein, 721 aa, Homo Sapiens
MGTPASGRKRTPVKDRFSAEDEALSNIAREAEARLAAKRAARAEARDIRMRELERQQKEYSLHSFDRKWGQIQKWLEDSERARYSHRSSHHRPYLGVEDALSIRSVGSHRYDMFKDRSSRLSSLNHSYSHSHGMKKRSSDSHKDLLSGLYFDQRNYSSLRHSKPTSAYYTRQSSSLYSDPLATYKSDRASPTANSGLLRSASLASLYNGGLYNPYGPRTPSECSYYSSRISSARSSPGFTNDDTASIVSSDRASRGRRESVVSAADYFSRSNRRGSVVSEVDDISIPDLSSLDEKSDKQYAENYTRPSSRNSASATTPLSGNSSRRGSGDTSSLIDPDTSLSELRDIYDLKDQIQDVEGRYMQGLKELKESLSEVEEKYKKAMVSNAQLDNEKNNLIYQVDTLKDVIEEQEEQMAEFYRENEEKSKELERQKHMCSVLQHKMEELKEGLRQRDELIEEKQRMQQKIDTMTKEVFDLQETLLWKDKKIGALEKQKEYIACLRNERDMLREELADLQETVKTGEKHGLVIIPDGTPNGDVSHEPVAGAITVVSQEAAQVLESAGEGPLDVRLRKLAGEKEELLSQIRKLKLQLEEERQKCSRNDGTVGDLAGLQNGSDLQFIEMQRDANRQISEYKFKLSKAEQDITTLEQSISRLEGQVLRYKTAAENAEKVEDELKAEKRKLQRELRTALDKIEEMEMTNSHLAKRLEKMKANRTALLAQQ

SEQ ID NO: 15250 - protein, 379 aa, Homo Sapiens
MVFFTCNACGESVKKIQVEKHVSVCRNCECLSCIDCGKDFWGDDYKNHVKCISEDQKYGGKGYEGKTHKGDIKQQAWIQKISELIKRPNVSPKVRELLEQISAFDNVPRKKAKFQNWMKNSLKVHNESILDQVWNIFSEASNSEPVNKEQDQRPLHPVANPHAEISTKVPASKVKDAVEQQGEVKKNKRERKEERQKKRKREKKELKLENHQENSRNQKPKKRKKGQEADLEAGGEEVPEANGSAGKRSKKKKQRKDSASEEEAHVGAGKRKRRHSEVETDSKKKKMKLPEHPEGGEPEDDEAPAKGKFNWKGTIKAILKQAPDNEITIKKLRKKVLAQYYTVTDEHHRSEEELLVIFNKKISKNPTFKLLKDKVKLVK

SEQ ID NO: 15251 - protein, 280 aa, Homo Sapiens
MCPPQAQAEVGPTMTEKAEMVCAPSPAPAPPPKPASPGPPQVEEVGHRGGSSPPRLPPGVPVISLGHSRPPGVAMPTTELGTLRPPLLQLSTLGTAPPTLALHYHPHPFLNSVYIGPAGPFSIFPSSRLKRRPSHCELDLAEGHQPQKVARRVFTNSRERWRQQNVNGAFAELRKLLPTHPPDRKLSKNEVLRLAMKYIGFLVRLLRDQAAALAAGPTPPGPRKRPVHRVPDDGARRGSGRRAEAAARSQPAPPADPDGSPGGAARPIKMEQTALSPEVR

SEQ ID NO: 15252 - protein, 434 aa, Homo Sapiens
MPNRKASRNAYYFFVQEKIPELRRRGLPVARVADAIPYCSSDWALLREEEKEKYAEMAREWRAAQGKDPGPSEKQKPVFTPLRRPGMLVPKQNVSPPDMSALSLKGDQALLGGIFYFLNIFSHGELPPHCEQRFLPCEIGCVKYSLQEGIMADFHSFINPGEIPRGFRFHCQAASDSSHKIPISNFERGHNQATVLQNLYRFIHPNPGNWPPIYCKSDDRTRVNWCLKHMAKASEIRQDLQLLTVEDLVVGIYQQKFLKEPSKTWIRSLLDVAMWDYSSNTRCKWHEENDILFCALAVCKKIAYCISNSLATLFGIQLTEAHVPLQDYEASNSVTPKMVVLDAGRYQKLRVGSSGFSHFNSSNEEQRSNTPIGDYPSRAKISGQNSSVRGRGITRLLESISNSSSNIHKFSNCDTSLSPYMSQKDGYKSFSSLS

SEQ ID NO: 15253 - protein, 373 aa, Homo Sapiens
MASELAMSNSDLPTSPLAMEYVNDFDLMKFEVKKEPVETDRIISQCGRLIAGGSLSSTPMSTPCSSVPPSPSFSAPSPGSGSEQKAHLEDYYWMTGYPQQLNPEALGFSPEDAVEALISNSHQLQGGFDGYARGAQQLAAAAGAGAGASLGGSGEEMGPAAAVVSAVIAAAAAQSGAGPHYHHHHHHAAGHHHHPTAGAPGAAGSAAASAGGAGGAGGGGPASAGGGGGGGGGGGGGGAAGAGGALHPHHAAGGLHFDDRFSDEQLVTMSVRELNRQLRGVSKEEVIRLKQKRRTLKNRGYAQSCRFKRVQQRHVLESEKNQLLQQVDHLKQEISRLVRERDAYKEKYEKLVSSGFRENGSSSDNPSSPEFFM

SEQ ID NO: 15254 - protein, 256 aa, Homo Sapiens
MKLLENSSFEAINSQLTVETGDAHIIGRIESYSCKMAGDDKHMFKQFCQEGQPHVLEALSPPQTSGLSPSRLSKSQGGEEEGPLSDKCSRKTLFYLIATLNESFRPDYDFSTARSHEFSREPSLSWVVNAVNCSLFSAVREDFKDLKPQLWNAVDEEICLAECDIYSYNPDLDSDPFGEDGSLWSFNYFFYNKRLKRIVFFSCRSISGSTYTPSEAGNELDMELGEEEVEEESRSGGSGAEETSTMEEDRVPVICI

SEQ ID NO: 15255 - protein, 353 aa, Homo Sapiens
MAAELAMGAELPSSPLAIEYVNDFDLMKFEVKKEPPEAERFCHRLPPGSLSSTPLSTPCSSVPSSPSFCAPSPGTGGGGGAGGGGGSSQAGGAPGPPSGGPGAVGGTSGKPALEDLYWMSGYQHHLNPEALNLTPEDAVEALIGSGHHGAHHGAHHPAAAAAYEAFRGPGFAGGGGADDMGAGHHHGAHHAAHHHHAAHHHHHHHHHHGGAGHGGGAGHHVRLEERFSDDQLVSMSVRELNRQLRGFSKEEVIRLKQKRRTLKNRGYAQSCRFKRVQQRHILESEKCQLQSQVEQLKLEVGRLAKERDLYKEKYEKLAGRGGPGSAGGAGFPREPSPPQAGPGGAKGTADFFL

SEQ ID NO: 15256 - protein, 195 aa, Homo Sapiens
MTDSVIYSMLELPTATQAQNDYGPQQKSSSSRPSCSCLVAIALGLLTAVLLSVLLYQWILCQGSNYSTCASCPSCPDRWMKYGNHCYYFSVEEKDWNSSLEFCLARDSHLLVITDNQEMSLLQVFLSEAFCWIGLRNNSGWRWEDGSPLNFSRISSNSFVQTCGAINKNGLQASSCEVPLHWVCKKCPFADQALF

SEQ ID NO: 15257 - protein, 323 aa, Homo Sapiens
MAAELSMGPELPTSPLAMEYVNDFDLLKFDVKKEPLGRAERPGRPCTRLQPAGSVSSTPLSTPCSSVPSSPSFSPTEQKTHLEDLYWMASNYQQMNPEALNLTPEDAVEALIGSHPVPQPLQSFDSFRGAHHHHHHHHPHPHHAYPGAGVAHDELGPHAHPHHHHHHQASPPPSSAASPAQQLPTSHPGPGPHATASATAAGGNGSVEDRFSDDQLVSMSVRELNRHLRGFTKDEVIRLKQKRRTLKNRGYAQSCRYKRVQQKHHLENEKTQLIQQVEQLKQEVSRLARERDAYKVKCEKLANSGFREAGSTSDSPSSPEFFL

SEQ ID NO: 15258 - protein, 164 aa, Homo Sapiens
MSVDPLSSKALKIKRELSENTPHLSDEALMGLSVRELNRHLRGLSAEEVTRLKQRRRTLKNRGYAASCRVKRVCQKEELQKQKSELEREVDKLARENAAMRLELDALRGKCEALQGFARSVAAARGPATLVAPASVITIVKSTPGSGSGPAHGPDPAHGPASCS

SEQ ID NO: 15259 - protein, 162 aa, Homo Sapiens
MTTPNKGNKALKVKREPGENGTSLTDEELVTMSVRELNQHLRGLSKEEIVQLKQRRRTLKNRGYAASCRVKRVTQKEELEKQKAELQQEVEKLASENASMKLELDALRSKYEALQTFARTVARSPVAPARGPLAAGLGPLVPGKVAATSVITIVKSKTDARS

SEQ ID NO: 15260 - protein, 156 aa, Homo Sapiens
MTTNPKPNKALKVKKEAGENAPVLSDDELVSMSVRELNQHLRGLTKEEVTRLKQRRRTLKNRGYAASCRIKRVTQKEELERQRVELQQEVEKLARENSSMRLELDALRSKYEALQTFARTVARGPVAPSKVATTSVITIVKSTELSSTSVPFSAAS

SEQ ID NO: 15261 - protein, 847 aa, Homo Sapiens; identical to SEQ ID NO: 8367

SEQ ID NO: 15262 - protein, 160 aa, Homo Sapiens
MSDNDDIEVESDEEQPRFQSAADKRAHHNALERKRRDHIKDSFHSLRDSVPSLQGEKASRAQILDKATEYIQYMRRKNHTHQQDIDDLKRQNALLEQQVRALEKARSSAQLQTNYPSSDNSLYTNAKGSTISAFDGGSDSSSESEPEEPQSRKKLRMEAS

SEQ ID NO: 15263 - protein, 477 aa, Homo Sapiens; identical to SEQ ID NO: 8384

SEQ ID NO: 15264 - protein, 605 aa, Homo Sapiens
MAEDWLDCPALGPGWKRREVFRKSGATCGRSDTYYQSPTGDRIRSKVELTRYLGPACDLTLFDFKQGILCYPAPKAHPVAVASKKRKKPSRPAKTRKRQVGPQSGEVRKEAPRDETKADTDTAPASFPAPGCCENCGISFSGDGTQRQRLKTLCKDCRAQRIAFNREQRMFKRVGCGECAACQVTEDCGACSTCLLQLPHDVASGLFCKCERRRCLRIVERSRGCGVCRGCQTQEDCGHCPICLRPPRPGLRRQWKCVQRRCLRGKHARRKGGCDSKMAARRRPGAQPLPPPPPSQSPEPTEPHPRALAPSPPAEFIYYCVDEDELQPYTNRRQNRKCGACAACLRRMDCGRCDFCCDKPKFGGSNQKRQKCRWRQCLQFAMKRLLPSVWSESEDGAGSPPPYRRRKRPSSARRHHLGPTLKPTLATRTAQPDHTQAPTKQEAGGGFVLPPPGTDLVFLREGASSPVQVPGPVAASTEALLQEAQCSGLSWVVALPQVKQEKADTQDEWTPGTAVLTSPVLVPGCPSKAVDPGLPSVKQEPPDPEEDKEENKDDSASKLAPEEEAGGAGTPVITEIFSLGGTRFRDTAVWLPRSKDLKKPGARKQ

SEQ ID NO: 15265 - protein, 411 aa, Homo Sapiens
MRAHPGGGRCCPEQEEGESAAGGSGAGGDSAIEQGGQGSALAPSPVSGVRREGARGGGRGRGRWKQAGRGGGVCGRGRGRGRGRGRGRGRGRGRGRPPSGGSGLGGDGGGCGGGGSGGGGAPRREPVPFPSGSAGPGPRGPRATESGKRMDCPALPPGWKKEEVIRKSGLSAGKSDVYYFSPSGKKFRSKPQLARYLGNTVDLSSFDFRTGKMMPSKLQKNKQRLRNDPLNQNKGKPDLNTTLPIRQTASIFKQPVTKVTNHPSNKVKSDPQRMNEQPRQLFWEKRLQGLSASDVTEQIIKTMELPKGLQGVGPGSNDETLLSAVASALHTSSAPITGQVSAAVEKNPAVWLNTSQPLCKAFIVTDEDIRKQEERVQQVRKKLEEALMADILSRAADTEEMDIEMDSGDEA

SEQ ID NO: 15266 - protein, 291 aa, Homo Sapiens
MERKRWECPALPQGWEREEVPRRSGLSAGHRDVFYYSPSGKKFRSKPQLARYLGGSMDLSTFDFRTGKMLMSKMNKSRQRVRYDSSNQVKGKPDLNTALPVRQTASIFKQPVTKITNHPSNKVKSDPQKAVDQPRQLFWEKKLSGLNAFDIAEELVKTMDLPKGLQGVGPGCTDETLLSAIASALHTSTMPITGQLSAAVEKNPGVWLNTTQPLCKAFMVTDEDIRKQEELVQQVRKRLEEALMADMLAHVEELARDGEAPLDKACAEDDDEEDEEEEEEEPDPDPEMEHV

SEQ ID NO: 15267 - protein, 194 aa, Homo Sapiens
MAKSSQRKQRDCVNQCKSKPGLSTSIPLRMSSYTFKRPVTRITPHPGNEVRYHQWEESLEKPQQVCWQRRLQGLQAYSSAGELSSTLDLANTLQKLVPSYTGGSLLEDLASGLEHSCPMPHLACSSDAVEIIPAEGVGISQLLCKQFLVTEEDIRKQEGKVKTVRERLAIALIADGLANEAEKVRDQEGRPEKR

SEQ ID NO: 15268 - protein, 208 aa, Homo Sapiens
MGEPAFTSFPSLPVLGKLKRNMMPWALQKKREIHMAKAHRRRAARSALPMRLTSCIFRRPVTRIRSHPDNQVRRRKGDEHLEKPQQLCAYRRLQALQPCSSQGEGSSPLHLESVLSILAPGTAGESLDRAGAERVRSPLEPTPGRFPAVAGGPTPGMGCQLPPPLSGQLVTPADIRRQARRVKKARERLAKALQADRLARRAEMLTGG

SEQ ID NO: 15269 - protein, 580 aa, Homo Sapiens
MGTTGLESLSLGDRGAAPTVTSSERLVPDPPNDLRKEDVAMELERVGEDEEQMMIKRSSECNPLLQEPIASAQFGATAGTECRKSVPCGWERVVKQRLFGKTAGRFDVYFISPQGLKFRSKSSLANYLHKNGETSLKPEDFDFTVLSKRGIKSRYKDCSMAALTSHLQNQSNNSNWNLRTRSKCKKDVFMPPSSSSELQESRGLSNFTSTHLLLKEDEGVDDVNFRKVRKPKGKVTILKGIPIKKTKKGCRKSCSGFVQSDSKRESVCNKADAESEPVAQKSQLDRTVCISDAGACGETLSVTSEENSLVKKKERSLSSGSNFCSEQKTSGIINKFCSAKDSEHNEKYEDTFLESEEIGTKVEVVERKEHLHTDILKRGSEMDNNCSPTRKDFTGEKIFQEDTIPRTQIERRKTSLYFSSKYNKEALSPPRRKAFKKWTPPRSPFNLVQETLFHDPWKLLIATIFLNRTSGKMAIPVLWKFLEKYPSAEVARTADWRDVSELLKPLGLYDLRAKTIVKFSDEYLTKQWKYPIELHGIGKYGNDSYRIFCVNEWKQVHPEDHKLNKYHDWLWENHEKLSLS

SEQ ID NO: 15270 - protein, 1494 aa, Homo Sapiens
MNGGKECDGGDKEGGLPAIQVPVGWQRRVDQNGVLYVSPSGSLLSCLEQVKTYLLTDGTCKCGLECPLILPKVFNFDPGAAVKQRTAEDVKADEDVTKLCIHKRKIIAVATLHKSMEAPHPSLVLTSPGGGTNATPVVPSRAATPRSVRNKSHEGITNSVMPECKNPFKLMIGSSNAMGRLYVQELPGSQQQELHPVYPRQRLGSSEHGQKSPFRGSHGGLPSPASSGSQIYGDGSISPRTDPLGSPDVFTRSNPGFHGAPNSSPIHLNRTPLSPPSVMLHGSPVQSSCAMAGRTNIPLSPTLTTKSPVMKKPMCNFSTNMEIPRAMFHHKPPQGPPPPPPPSCALQKKPLTSEKDPLGILDPIPSKPVNQNPVIINPTSFHSNVHSQVPMMNVSMPPAVVPLPSNLPLPTVKPGHMNHGSHVQRVQHSASTSLSPSPVTSPVHMMGTGIGRIEASPQRSRSSSTSSDHGNFMMPPVGPQATSSGIKVPPRSPRSTIGSPRPSMPSSPSTKSDGHHQYKDIPNPLIAGISNVLNTPSSAAFPTASAGSSSVKSQPGLLGMPLNQILNQHNAASFPASSLLSAAAKAQLANQNKLAGNNSSSSSNSGAVAGSGNTEGHSTLNTMFPPTANMLLPTGEGQSGRAALRDKLMSQQKDALRKRKQPPTTVLSLLRQSQMDSSAVPKPGPDLLRKQGQGSFPISSMSQLLQSMSCQSSHLSSNSTPGCGASNTALPCSANQLHFTDPSMNSSVLQNIPLRGEAVHCHNANTNFVHSNSPVPNHHLAGLINQIQASGNCGMLSQSGMALGNSLHPNPPQSRISTSSTPVIPNSIVSSYNQTSSEAGGSGPSSSIAIAGTNHPAITKTTSVLQDGVIVTTAAGNPLQSQLPIGSDFPFVGQEHALHFPSNSTSNNHLPHPLNPSLLSSLPISLPVNQQHLLNQNLLNILQPSAGEGDMSSINNTLSNHQLTHLQSLLNNNQMFPPNQQQQQLLQGYQNLQAFQGQSTIPCPANNNPMACLFQNFQVRMQEDAALLNKRISTQPGLTALPENPNTTLPPFQDTPCELQPRIDPSLGQQVKDGLVVGGPGDASVDAIYKAVVDAASKGMQVVITTAVNSTTQISPIPALSAMSAFTASIGDPLNLSSAVSAVIHGRNMGGVDHDGRLRNSRGARLPKNLDHGKNVNEGDGFEYFKSASCHTSKKQWDGEQSPRGERNRWKYEEFLDHPGHIHSSPCHERPNNVSTLPFLPGEQHPILLPPRNCPGDKILEENFRYNNYKRTMMSFKERLENTVERCAHINGNRPRQSRGFGELLSTAKQDLVLEEQSPSSSNSLENSLVKDYIHYNGDFNAKSVNGCVPSPSDAKSISSEDDLRNPDSPSSNELIHYRPRTFNVGDLVWGQIKGLTSWPGKLVREDDVHNSCQQSPEEGKVEPEKLKTLTEGLEAYSRVRKRNRKSGKLNNHLEAAIHEAMSELDKMSGTVHQIPQGDRQMRPPKPKRRKISR

SEQ ID NO: 15271 - protein, 1003 aa, Homo Sapiens; identical to SEQ ID NO: 8402

SEQ ID NO: 15272 - protein, 354 aa, Homo Sapiens
MTAVNVALIRDTKWLTLEVCREFQRGTCSRADADCKFAHPPRVCHVENGRVVACFDSLKGRCTRENCKYLHPPPHLKTQLEINGRNNLIQQKTAAAMFAQQMQLMLQNAQMSSLGSFPMTPSIPANPPMAFNPYIPHPGMGLVPAELVPNTPVLIPGNPPLAMPGAVGPKLMRSDKLEVCREFQRGNCTRGENDCRYAHPTDASMIEASDNTVTICMDYIKGRCSREKCKYFHPPAHLQARLKAAHHQMNHSAASAMALQPGTLQLIPKRSALEKPNGATPVFNPTVFHCQQALTNLQLPQPAFIPAGPILCMAPASNIVPMMHGATPTTVSAATTPATSVPFAAPTTGNQLKF

SEQ ID NO: 15273 - protein, 1230 aa, Homo Sapiens
MRSKGRARKLATNNECVYGNYPEIPLEEMPDADGVASTPSLNIQEPCSPATSSEAFTPKEGSPYKAPIYIPDDIPIPAEFELRESNMPGAGLGIWTKRKIEVGEKFGPYVGEQRSNLKDPSYGWEILDEFYNVKFCIDASQPDVGSWLKYIRFAGCYDQHNLVACQINDQIFYRVVADIAPGEELLLFMKSEDYPHETMAPDIHEERQYRCEDCDQLFESKAELADHQKFPCSTPHSAFSMVEEDFQQKLESENDLQEIHTIQECKECDQVFPDLQSLEKHMLSHTEEREYKCDQCPKAFNWKSNLIRHQMSHDSGKHYECENCAKVFTDPSNLQRHIRSQHVGARAHACPECGKTFATSSGLKQHKHIHSSVKPFICEVCHKSYTQFSNLCRHKRMHADCRTQIKCKDCGQMFSTTSSLNKHRRFCEGKNHFAAGGFFGQGISLPGTPAMDKTSMVNMSHANPGLADYFGANRHPAGLTFPTAPGFSFSFPGLFPSGLYHRPPLIPASSPVKGLSSTEQTNKSQSPLMTHPQILPATQDILKALSKHPSVGDNKPVELQPERSSEERPFEKISDQSESSDLDDVSTPSGSDLETTSGSDLESDIESDKEKFKENGKMFKDKVSPLQNLASINNKKEYSNHSIFSPSLEEQTAVSGAVNDSIKAIASIAEKYFGSTGLVGLQDKKVGALPYPSMFPLPFFPAFSQSMYPFPDRDLRSLPLKMEPQSPGEVKKLQKGSSESPFDLTTKRKDEKPLTPVPSKPPVTPATSQDQPLDLSMGSRSRASGTKLTEPRKNHVFGGKKGSNVESRPASDGSLQHARPTPFFMDPIYRVEKRKLTDPLEALKEKYLRPSPGFLFHPQMSAIENMAEKLESFSALKPEASELLQSVPSMFNFRAPPNALPENLLRKGKERYTCRYCGKIFPRSANLTRHLRTHTGEQPYRCKYCDRSFSISSNLQRHVRNIHNKEKPFKCHLCDRCFGQQTNLDRHLKKHENGNMSGTATSSPHSELESTGAILDDKEDAYFTEIRNFIGNSNHGSQSPRNVEERMNGSHFKDEKALVTSQNSDLLDDEEVEDEVLLDEEDEDNDITGKTGKEPVTSNLHEGNPEDDYEETSALEMSCKTSPVRYKEEEYKSGLSALDHIRHFTDSLKMRKMEDNQYSEAELSSFSTSHVPEELKQPLHRKSKSQAYAMMLSLSDKESLHSTSHSSSNVWHSMARAAAESSAIQSISHV

SEQ ID NO: 15274 - protein, 486 aa, Homo Sapiens
MVAGMLGLREEKSEDQDLQGLKDKPLKFKKVKKDKKEEKEGKHEPVQPSAHHSAEPAEAGKAETSEGSGSAPAVPEASASPKQRRSIIRDRGPMYDDPTLPEGWTRKLKQRKSGRSAGKYDVYLINPQGKAFRSKVELIAYFEKVGDTSLDPNDFDFTVTGRGSPSRREQKPPKKPKSPKAPGTGRGRGRPKGSGTTRPKAATSEGVQVKRVLEKSPGKLLVKMPFQTSPGGKAEGGGATTSTQVMVIKRPGRKRKAEADPQAIPKKRGRKPGSVVAAAAAEAKKKAVKESSIRSVQETVLPIKKRKTRETVSIEVKEVVKPLLVSTLGEKSGKGLKTCKSPGRKSKESSPKGRSSSASSPPKKEHHHHHHHSESPKAPVPLLPPLPPPPPEPESSEDPTSPPEPQDLSSSVCKEEKMPRGGSLESDGCPKEPAKTQPAVATAATAAEKYKHRGEGERKDIVSSSMPRPNREEPVDSRTPVTERVS

SEQ ID NO: 15275 - protein, 507 aa, Homo Sapiens
MGRKKIQITRIMDERNRQVTFTKRKFGLMKKAYELSVLCDCEIALIIFNSSNKLFQYASTDMDKVLLKYTEYNEPHESRTNSDIVEALNKKEHRGCDSPDPDTSYVLTPHTEEKYKKINEEFDNMMRNHKIAPGLPPQNFSMSVTVPVTSPNALSYTNPGSSLVSPSLAASSTLTDSSMLSPPQTTLHRNVSPGAPQRPPSTGNAGGMLSTTDLTVPNGAGSSPVGNGFVNSRASPNLIGATGANSLGKVMPTKSPPPPGGGNLGMNSRKPDLRVVIPPSSKGMMPPLSEEEELELNTQRISSSQATQPLATPVVSVTTPSLPPQGLVYSAMPTAYNTDYSLTSADLSALQGFNSPGMLSLGQVSAWQQHHLGQAALSSLVAGGQLSQGSNLSINTNQNISIKSEPISPPRDRMTPSGFQQQQQQQQQQQPPPPPQPQPQPPQPQPRQEMGRSPVDSLSSSSSSYDGSDREDPRGDFHSPIVLGRPPNTEDRESPSVKRMRMDAWVT

SEQ ID NO: 15276 - protein, 365 aa, Homo Sapiens
MGRKKIQISRILDQRNRQVTFTKRKFGLMKKAYELSVLCDCEIALIIFNSANRLFQYASTDMDRVLLKYTEYSEPHESRTNTDILETLKRRGIGLDGPELEPDEGPEEPGEKFRRLAGEGGDPALPRPRLYPAAPAMPSPDVVYGALPPPGCDPSGLGEALPAQSRPSPFRPAAPKAGPPGLVHPLFSPSHLTSKTPPPLYLPTEGRRSDLPGGLAGPRGGLNTSRSLYSGLQNPCSTATPGPPLGSFPFLPGGPPVGAEAWARRVPQPAAPPRRPPQSASSLSASLRPPGAPATFLRPSPIPCSSPGPWQSLCGLGPPCAGCPWPTAGPGRRSPGGTSPERSPGTARARGDPTSLQASSEKTQQ

SEQ ID NO: 15277 - protein, 473 aa, Homo Sapiens
MGRKKIQITRIMDERNRQVTFTKRKFGLMKKAYELSVLCDCEIALIIFNSTNKLFQYASTDMDKVLLKYTEYNEPHESRTNSDIVETLRKKGLNGCDSPDPDADDSVGHSPESEDKYRKINEDIDLMISRQRLCAVPPPNFEMPVSIPVSSHNSLVYSNPVSSLGNPNLLPLAHPSLQRNSMSPGVTHRPPSAGNTGGLMGGDLTSGAGTSAGNGYGNPRNSPGLLVSPGNLNKNMQAKSPPPMNLGMNNRKPDLRVLIPPGSKNTMPSVSEDVDLLLNQRINNSQSAQSLATPVVSVATPTLPGQGMGGYPSAISTTYGTEYSLSSADLSSLSGFNTASALHLGSVTGWQQQHLHNMPPSALSQLGACTSTHLSQSSNLSLPSTQSLNIKSEPVSPPRDRTTTPSRYPQHTRHEAGRSPVDSLSSCSSSYDGSDREDHRNEFHSPIGLTRPSPDERESPSVKRMRLSEGWAT

SEQ ID NO: 15278 - protein, 521 aa, Homo Sapiens
MGRKKIQIQRITDERNRQVTFTKRKFGLMKKAYELSVLCDCEIALIIFNHSNKLFQYASTDMDKVLLKYTEYNEPHESRTNADIIETLRKKGFNGCDSPEPDGEDSLEQSPLLEDKYRRASEELDGLFRRYGSTVPAPNFAMPVTVPVSNQSSLQFSNPSGSLVTPSLVTSSLTDPRLLSPQQPALQRNSVSPGLPQRPASAGAMLGGDLNSANGACPSPVGNGYVSARASPGLLPVANGNSLNKVIPAKSPPPPTHSTQLGAPSRKPDLRVITSQAGKGLMHHLTEDHLDLNNAQRLGVSQSTHSLTTPVVSVATPSLLSQGLPFSSMPTAYNTDYQLTSAELSSLPAFSSPGGLSLGNVTAWQQPQQPQQPQQPQPPQQQPPQPQQPQPQQPQQPQQPPQQQSHLVPVSLSNLIPGSPLPHVGAALTVTTHPHISIKSEPVSPSRERSPAPPPPAVFPAARPEPGDGLSSPAGGSYETGDRDDGRGDFGPTLGLLRPAPEPEAEGSAVKRMRLDTWTLK

SEQ ID NO: 15279 - protein, 390 aa, Homo Sapiens; identical to SEQ ID NO: 8520

SEQ ID NO: 15280 - protein, 477 aa, Homo Sapiens
MAQRYDELPHYGGMDGVGVPASMYGDPHAPRPIPPVHHLNHGPPLHATQHYGAHAPHPNVMPASMGSAVNDALKRDKDAIYGHPLFPLLALVFEKCELATCTPREPGVAGGDVCSSDSFNEDIAVFAKQVRAEKPLFSSNPELDNLMIQAIQVLRFHLLELEKVHELCDNFCHRYISCLKGKMPIDLVIDERDGSSKSDHEELSGSSTNLADHNPSSWRDHDDATSTHSAGTPGPSSGGHASQSGDNSSEQGDGLDNSVASPGTGDDDDPDKDKKRQKKRGIFPKVATNIMRAWLFQHLTHPYPSEEQKKQLAQDTGLTILQVNNWFINARRRIVQPMIDQSNRAGFLLDPSVSQGAAYSPEGQPMGSFVLDGQQHMGIRPAGLQSMPGDYVSQGGPMGMSMAQPSYTPPQMTPHPTQLRHGPPMHSYLPSHPHHPAMMMHGGPPTHPGMTMSAQSPTMLNSVDPNVGGQVMDIHAQ

SEQ ID NO: 15281 - protein, 375 aa, Homo Sapiens; identical to SEQ ID NO: 8528

SEQ ID NO: 15282 - protein, 274 aa, Homo Sapiens
MGPELGWGHPRGGDVCSSDSFNEDNTAFAKQVRSERPFFSSNPELDNLMIQAIQVLRFHLLELEKGKMPIDLVIEDRDGGCREDFEDYPASCPSLPDQNNIWIRDHEDSGSVHLGTPGPSSGGLASQSGDNSSDQGVGLDTSVASPSSGGEDEDLDQEPRRNKKRGIFPKVATNIMRAWLFQHLSHPYPSEEQKKQLAQDTGLTILQVNNWFINARRRIVQPMIDQSNRTGQGAAFSPEGQPIGGYTETEPHVAFRAPASVGMSLNSEGEWHYL

SEQ ID NO: 15283 - protein, 358 aa, Homo Sapiens
MARRYDELPHYPSIADGPAALAGFPEAVPAAPGPYGPHRPPQPLPPGLDSDGLKRDKDEIYGHPLFPLLALVFEKCELATCSPRDGAGAGLGTPRGGDVCSSDSFNEDNTAFAKQVRSERPFFSSNPELDNLMIQAIQVLRFHLLELEKGKMPIDLVIEDRDGGCREDFEDYPASCLSLPDQNNIWIRDHEDSGSVHLGTPGPSSGGLASQSGDNSSDQGVGLDTSVASPSSGGEDEDLDQEPRRNKKRGIFPKVATNIMRAWLFQHLWHPYPSEEQKKQLVQDTGLTILQVNNWFINARRRMVQPMIDQSNRIGQGAAFSPEGQPIGGYTETEPHVAFRPPASVGMSLNLEGEWHYL

SEQ ID NO: 15284 - protein, 254 aa, Homo Sapiens
MDPAASSCMRSLQPPAPVWGCLRNPHSEGNGASGLPHYPPTPFSFHQKPDFLATATAAYPDFSASCLAATPHSLPQEEHIFTEQHPAFPQSPNWHFPVSDARRRPNSGPAGGSKEMGTSSLGLVDTTGGPGDDYGVLGSTANETEKKSSRRRKESSDNQENRGKPEGSSKARKERTAFTKEQLRELEAEFAHHNYLTRLRRYEIAVNLDLSERQVKVWFQNRRMKWKRVKGGQPISPNGQDPEDGDSTASPSSE

SEQ ID NO: 15285 - protein, 304 aa, Homo Sapiens
MEHPLFGCLRSPHATAQGLHPFSQSSLALHGRSDHMSYPELSTSSSSCIIAGYPNEEGMFASQHHRGHHHHHHHHHHHHHQQQQHQALQTNWHLPQMSSPPSAARHSLCLQPDSGGPPELGSSPPVLCSNSSSLGSSTPTGAACAPGDYGRQALSPAEAEKRSGGKRKSDSSDSQEGNYKSEVNSKPRKERTAFTKEQIRELEAEFAHHNYLTRLRRYEIAVNLDLTERQVKVWFQNRRMKWKRVKGGQQGAAAREKELVNVKKGTLLPSELSGIGAATLQQTGDSIANEDSHDSDHSSEHAHL

SEQ ID NO: 15286 - protein, 268 aa, Homo Sapiens
MAQPLCPPLSESWMLSAAWGPTRRPPPSDKDCGRSLVSSPDSWGSTPADSPVASPARPGTLRDPRAPSVGRRGARSSRLGSGQRQSASEREKLRMRTLARALHELRRFLPPSVAPAGQSLTKIETLRLAIRYIGHLSAVLGLSEESLQRRCRQRGDAGSPRGCPLCPDDCPAQMQTRTQAEGQGQGRGLGLVSAVRAGASWGSPPACPGARAAPEPRDPPALFAEAACPEGQAMEPSPPSPLLPGDVLALLETWMPLSPLEWLPEEPK

SEQ ID NO: 15287 - protein, 397 aa, Homo Sapiens
MAQSPPPQSLLGHDHWIFAQGWGWAGHWDSTSPASSSDSSGSCPCDGARGLPQPQPPSCSSRAAEAAATTPRRARTGPAGGQRQSASEREKLRMRTLARALHELRRFLPPSLAPAGQSLTKIETLRLAIRYIGHLSAVLGLSEESLQCRRRQRGDAGSPWGCPLCPDRGPAEAQTQAEGQGQGQGQGQGQGQGQGQGQGQGQGQGRRPGLVSAVLAEASWGSPSACPGAQAAPERLGRGVHDTDPWATPPYCPKIQSPPYSSQGTTSDASLWTPPQGCPWTQSSPEPRNPPVPWTAAPATLELAAVYQGLSVSPEPCLSLGAPSLLPHPSCQRLQPQTPGRCWSHSAEVVPNSEDQGPGAAFQLSEASPPQSSGLRFSGCPELWQEDLEGARLGIFY

SEQ ID NO: 15288 - protein, 1857 aa, Homo Sapiens
MARKKLKKFTTLEIVLSVLLLVLFIISIVLIVLLAKESLKSTAPDPGTTGTPDPGTTGTPDPGTTGTTHARTTGPPDPGTTGTTPVSAECPVVNELERINCIPDQPPTKATCDQRGCCWNPQGAVSVPWCYYSKNHSYHVEGNLVNTNAGFTARLKNLPSSPVFGSNVDNVLLTAEYQTSNRFHFKLTDQTNNRFEVPHEHVQSFSGNAAASLTYQVEISRQPFSIKVTRRSNNRVLFDSSIGPLLFADQFLQLSTRLPSTNVYGLGEHVHQQYRHDMNWKTWPIFNRDTTPNGNGTNLYGAQTFFLCLEDASGLSFGVFLMNSNAMEVVLQPAPAITYRTIGGILDFYVFLGNTPEQVVQEYLELIGRPALPSYWALGFHLSRYEYGTLDNMREVVERNRAAQLPYDVQHADIDYMDERRDFTYDSVDFKGFPEFVNELHNNGQKLVIIVDPAISNNSSSSKPYGPYDRGSDMKIWVNSSDGVTPLIGEVWPGQTVFPDYTNPNCAVWWTKEFELFHNQVEFDGIWIDMNEVSNFVDGSVSGCSTNNLNNPPFTPRILDGYLFCKTLCMDAVQHWGKQYDIHNLYGYSMAVATAEAAKTVFPNKRSFILTRSTFAGSGKFAAHWLGDNTATWDDLRWSIPGVLEFNLFGIPMVGPDICGFALDTPEELCRRWMQLGAFYPFSRNHNGQGYKDQDPASFGADSLLLNSSRHYLNIRYTLLPYLYTLFFRAHSRGDTVARPLLHEFYEDNSTWDVHQQFLWGPGLLITPVLDEGAEKVMAYVPDAVWYDYETGSQVRWRKQKVEMELPGDKIGLHLRGGYIFPTQQPNTTTLASRKNPLGLIIALDENKEAKGELFWDNGETKDTVANKVYLLCEFSVTQNRLEVNISQSTYKDPNNLAFNEIKILGTEEPSNVTVKHNGVPSQTSPTVTYDSNLKVAIITDIDLLLGEAYTVEWSIKIRDEEKIDCYPDENGASAENCTARGCIWEASNSSGVPFCYFVNDLYSVSDVQYNSHGATADISLKSSVYANAFPSTPVNPLRLDVTYHKNEMLQFKIYDPNKNRYEVPVPLNIPSMPSSTPEGQLYDVLIKKNPFGIEIRRKSTGTIIWDSQLLGFTFSDMFIRISTRLPSKYLYGFGETEHRSYRRDLEWHTWGMFSRDQPPGYKKNSYGVHPYYMGLEEDGSAHGVLLLNSNAMDVTFQPLPALTYRTTGGVLDFYVFLGPTPELVTQQYTELIGRPVMVPYWSLGFQLCRYGYQNDSEIASLYDEMVAAQIPYDVQYSDIDYMERQLDFTLSPKFAGFPALINRMKADGMRVILILDPAISGNETQPYPAFTRGVEDDVFIKYPNDGDIVWGKVWPDFPDVVVNGSLDWDSQVELYRAYVAFPDFFRNSTAKWWKREIEELYNNPQNPERSLKFDGMWIDMNEPSSFVNGAVSPGCRDASLNHPPYMPHLESRDRGLSSKTLCMESQQILPDGSLVQHYNVHNLYGWSQTRPTYEAVQEVTGQRGVVITRSTFPSSGRWAGHWLGDNTAAWDQLKKSIIGMMEFSLFGISYTGADICGFFQDAEYEMCVRWMQLGAFYPFSRNHNTIGTRRQDPVSWDVAFVNISRTVLQTRYTLLPYLYTLMHKAHTEGVTVVRPLLHEFVSDQVTWDIDSQFLLGPAFLVSPVLERNARNVTAYFPRARWYDYYTGVDINARGEWKTLPAPLDHINLHVRGGYILPWQEPALNTHLSRQKFMGFKIALDDEGTAGGWLFWDDGQSIDTYGKGLYYLASFSASQNTMQSHIIFNNYITGTNPLKLGYIEIWGVGSVPVTSVSISVSGMVITPSFNNDPTTQVLSIDVTDRNISLHNFTSLTWISTL

SEQ ID NO: 15289 - protein, 3026 aa, Homo Sapiens
MEEKQQIILANQDGGTVAGAAPTFFVILKQPGNGKTDQGILVTNQDACALASSVSSPVKSKGKICLPADCTVGGITVTLDNNSMWNEFYHRSTEMILTKQGRRMFPYCRYWITGLDSNLKYILVMDISPVDNHRYKWNGRWWEPSGKAEPHVLGRVFIHPESPSTGHYWMHQPVSFYKLKLTNNTLDQEGHIILHSMHRYLPRLHLVPAEKAVEVIQLNGPGVHTFTFPQTEFFAVTAYQNIQITQLKIDYNPFAKGFRDDGLNNKPQRDGKQKNSSDQEGNNISSSSGHRVRLTEGQGSEIQPGDLDPLSRGHETSGKGLEKTSLNIKRDFLGFMDTDSALSEVPQLKQEISECLIASSFEDDSRVASPLDQNGSFNVVIKEEPLDDYDYELGECPEGVTVKQEETDEETDVYSNSDDDPILEKQLKRHNKVDNPEADHLSSKWLPSSPSGVAKAKMFKLDTGKMPVVYLEPCAVTRSTVKISELPDNMLSTSRKDKSSMLAELEYLPTYIENSNETAFCLGKESENGLRKHSPDLRVVQKYPLLKEPQWKYPDISDSISTERILDDSKDSVGDSLSGKEDLGRKRTTMLKIATAAKVVNANQNASPNVPGKRGRPRKLKLCKAGRPPKNTGKSLISTKNTPVSPGSTFPDVKPDLEDVDGVLFVSFESKEALDIHAVDGTTEESSSLQASTTNDSGYRARISQLEKELIEDLKTLRHKQVIHPGLQEVGLKLNSVDPTMSIDLKYLGVQLPLAPATSFPFWNLTGTNPASPDAGFPFVSRTGKTNDFTKIKGWRGKFHSASASRNEGGNSESSLKNRSAFCSDKLDEYLENEGKLMETSMGFSSNAPTSPVVYQLPTKSTSYVRTLDSVLKKQSTISPSTSYSLKPHSVPPVSRKAKSQNRQATFSGRTKSSYKSILPYPVSPKQKYSHVILGDKVTKNSSGIISENQANNFVVPTLDENIFPKQISLRQAQQQQQQQQGSRPPGLSKSQVKLMDLEDCALWEGKPRTYITEERADVSLTTLLTAQASLKTKPIHTIIRKRAPPCNNDFCRLGCVCSSLALEKRQPAHCRRPDCMFGCTCLKRKVVLVKGGSKTKHFQRKAAHRDPVFYDTLGEEAREEEEGIREEEEQLKEKKKRKKLEYTICETEPEQPVRHYPLWVKVEGEVDPEPVYIPTPSVIEPMKPLLLPQPEVLSPTVKGKLLTGIKSPRSYTPKPNPVIREEDKDPVYLYFESMMTCARVRVYERKKEDQRQPSSSSSPSPSFQQQTSCHSSPENHNNAKEPDSEQQPLKQLTCDLEDDSDKLQEKSWKSSCNEGESSSTSYMHQRSPGGPTKLIEIISDCNWEEDRNKILSILSQHINSNMPQSLKVGSFIIELASQRKSRGEKNPPVYSSRVKISMPSCQDQDDMAEKSGSETPDGPLSPGKMEDISPVQTDALDSVRERLHGGKGLPFYAGLSPAGKLVAYKRKPSSSTSGLIQVASNAKVAASRKPRTLLPSTSNSKMASSSGTATNRPGKNLKAFVPAKRPIAARPSPGGVFTQFVMSKVGALQQKIPGVSTPQTLAGTQKFSIRPSPVMVVTPVVSSEPVQVCSPVTAAVTTTTPQVFLENTTAVTPMTAISDVETKETTYSSGATTTGVVEVSETNTSTSVTSTQSTATVNLTKTTGITTPVASVAFPKSLVASPSTITLPVASTASTSLVVVTAAASSSMVTTPTSSLGSVPIILSGINGSPPVSQRPENAAQIPVATPQVSPNTVKRAGPRLLHPNGQIVQLLPLHQLRGSNTQPNLQPVMFRNPGSVMGIRLPAPSKPSETPPSSTSSSAFSVMNPVIQAVGSSSAVNVITQAPSLLSSGASFVSQAGTLTLRISPPEPQSFASKTGSETKITYSSGGQPVGTASLIPLQSGSFALLQLPGQKPVPSSILQHVASLQMKRESQNPDQKDETNSIKREQETKKVLQSEGEAVDPEANVIKQNSGAATSEETLNDSLEDRGDHLDEECLPEEGCATVKPSEHSCITGSHTDQDYKDVNEEYGARNRKSSKEKVAVLEVRTISEKASNKTVQNLSKVQHQKLGDVKVEQQKGFDNPEENSSEFPVTFKEESKFELSGSKVMEQQSNLQPEAKEKECGDSLEKDRERWRKHLKGPLTRKCVGASQECKKEADEQLIKETKTCQENSDVFQQEQGISDLLGKSGITEDARVLKTECDSWSRISNPSAFSIVPRRAAKSSRGNGHFQGHLLLPGEQIQPKQEKKGGRSSADFTVLDLEEDDEDDNEKTDDSIDEIVDVVSDYQSEEVDDVEKNNCVEYIEDDEEHVDIETVEELSEEINVAHLKTTAAHTQSFKQPSCTHISADEKAAERSRKAPPIPLKLKPDYWSDKLQKEAEAFAYYRRTHTANERRRRGEMRDLFEKLKITLGLLHSSKVSKSLILTRAFSEIQGLTDQADKLIGQKNLLTRKRNILIRKVSSLSGKTEEVVLKKLEYIYAKQQALEAQKRKKKMGSDEFDISPRISKQQEGSSASSVDLGQMFINNRRGKPLILSRKKDQATENTSPLNTPHTSANLVMTPQGQLLTLKGPLFSGPVVAVSPDLLESDLKPQVAGSAVALPENDDLFMMPRIVNVTSLATEGGLVDMGGSKYPHEVPDSKPSDHLKDTVRNEDNSLEDKGRISSRGNRDGRVTLGPTQVFLANKDSGYPQIVDVSNMQKAQEFLPKKISGDMRGIQYKWKESESRGERVKSKDSSFHKLKMKDLKDSSIEMELRKVTSAIEEAALDSSELLTNMEDEDDTDETLTSLLNEIAFLNQQLNDDSVGLAELPSSMDTEFPGDARRAFISKVPPGSRATFQVEHLGTGLKELPDVQGESDSISPLLLHLEDDDFSENEKQLAEPASEPDVLKIVIDSEIKDSLLSNKKAIDGGKNTSGLPAEPESVSSPPTLHMKTGLENSNSTDTLWRPMPKLAPLGLKVANPSSDADGQSLKVMPCLAPIAAKVGSVGHKMNLTGNDQEGRESKVMPTLAPVVAKLGNSGASPSSAGK

SEQ ID NO: 15290 - protein, 512 aa, Homo Sapiens; identical to SEQ ID NO: 8725

SEQ ID NO: 15291 - protein, 545 aa, Homo Sapiens
MAEASSLGRQSPRVVSCLEHSLCPGEPGLQTTAVVSMGSGDHQFNLAEILSQNYSVRGECEEASRCPDKPKEELEKDFISQSNDMPFDELLALYGYEASDPISDRESEGGDVAPNLPDMTLDKEQIAKDLLSGEEEEETQSSADDLTPSVTSHEASDLFPNRSGSRFLADEDREPGSSASSDTEEDSLPANKCKKEIMVGPQFQADLSNLHLNRHCEKIYENEDQLLWDPSVLPEREVEEFLYRAVKRRWHEMAGPQLPEGEAVKDSEQALYELVKCNFNVEEALRRLRFNVKVIRDGLCAWSEEECRNFEHGFRVHGKNFHLIQANKVRTRSVGECVEYYYLWKKSERYDYFAQQTRLGRRKYVPSGTTDADQDLDGSDPDGPGRPRPEQDTLTGMRTDPLSVDGTAGGLDEPGVASDGLPSSEPGPCSFQQLDESPAVPLSHRPPALADPASYQPAVTAPEPDASPRLAVDFALPKELPLISSHVDLSGDPEETVAPAQVALSVTEFGLIGIGDVNPFLAAHPTCPAPGLHSEPLSHCNVMTC

SEQ ID NO: 15292 - protein, 550 aa, Homo Sapiens
MAEASFGSSSPVGSLSSEDHDFDPTAEMLVHDYDDERTLEEEEMMDEGKNFSSEIEDLEKEGTMPLEDLLAFYGYEPTIPAVANSSANSSPSELADELPDMTLDKEEIAKDLLSGDDEETQSSADDLTPSVTSHETSDFFPRPLRSNTACDGDKESEVEDVETDSGNSPEDLRKEIMIGLQYQAEIPPYLGEYDGNEKVYENEDQLLWCPDVVLESKVKEYLVETSLRTGSEKIMDRISAGTHTRDNEQALYELLKCNHNIKEAIERYCCNGKASQEGMTAWTEEECRSFEHALMLFGKDFHLIQKNKVRTRTVAECVAFYYMWKKSERYDYFAQQTRFGKKRYNHHPGVTDYMDRLVDETEALGGTVNASALTSNRPEPIPDQQLNILNSFTASDLTALTNSVATVCDPTDVNCLDDSFPPLGNTPRGQVNHVPVVTEELLTLPSNGESDCFNLFETGFYHSELNPMNMCSEESERPAKRLKMGIAVPESFMNEVSVNNLGVDFENHTHHITSAKMAVSVADFGSLSANETNGFISAHALHQHAALHSE

SEQ ID NO: 15293 - protein, 1132 aa, Homo Sapiens
MIATPLKHSRIYLPPEASSQRRNLPMDAIFFDSIPSGTLTPVKDLVKYQNSSLKLNDHKKNQFLKMTTFNNKNIFQSTMLTEATTSNSSLDISAIKPNKDGLKNKANYESPGKIFLRMKEKVLRDKQEQPSRNSSLLEPQKSGNNETFTPNRVEKKKLQHTYLCEEKENNKSFQSDDSSLRASVQGVPLESSNNDIFLPVKQKIQCQQEKKAPLHNLTYELPTLNQEQENFLAVEARNKTLTRAQLAKQIFHSKESIVATTKSKKDTFVLESVDSADEQFQNTNAETLSTNCIPIKNGSLLMVSDSERTTEGTSQQKVKEGNGKTVPGETGLPGSMKDTCKIVLATPRLHITIPRRSKRNISKLSPPRIFQTVTNGLKKNQVVQLQEWMIKSINNNTAICVEGKLIDVTNIYWHSNVIIERIEHNKLRTISGNVYILKGMIDQISMKEAGYPNYLIRKFMFGFPENWKEHIDNFLEQLRAGEKNREKTKQKQKTGRSVRDIRKSMKNDARENQTDTAQRATTTYDFDCDNLELKSNKHSESPGATELNMCHSNCQNKPTLRFPDDQVNNTIQNGGGDDLSNQELIGKKEYKMSSKKLKIGERTNERIIKSQKQETTEELDVSIDILTSREQFFSDEERKYMAINQKKAYILVTPLKSRKVIEQRCMRYNLSAGTIKAVTDFVIPECQKKSPISKSMGTLENTFEGHKSKNKEDCDERDLLTVNRKIKISNLEKEQMLTSDFKKNTRLLPKLKKIENQVAMSFYKHQSSPDLSSEESETEKEIKRKAEVKKTKAGNTKEAVVHLRKSTRNTSNIPVILEPETEESENEFYIKQKKARPSVKETLQKSGVRKEFPITEAVGSDKTNRHPLECLPGLIQDKEWNEKELQKLHCAFASLPKHKPGFWSEVAAAVGSRSPEECQRKYMENPRGKGSQKHVTKKKPANSKGQNGKRGDADQKQTIKITAKVGTLKRKQQMREFLEQLPKDDHDDFFSTTPLQHQRILLPSFQDSEDDDDILPNMDKNPTTPSSVIFPLVKTPQCQHVSPGMLGSINRNDCDKYVFRMQKYHKSNGGIVWGNIKKKLVETDFSTPTPRRKTPFNTDLGENSGIGKLFTNAVESLDEEEKDYYFSNSDSA

SEQ ID NO: 15294 - protein, 526 aa, Homo Sapiens
MQSESGIVPDFEVGEEFHEEPKTYYELKSQPLKSSSSAEHPGASKPPISSSSMTSRILLRQQLMREQMQEQERREQQQKLQAAQFMQQRVPVSQTPAINVSVPTTLPSATQVPMEVLKVQTHLENPTKYHIQQAQRQQVKQYLSTTLANKHANQVLSLPCPNQPGDHVMPPVPGSSAPNSPMAMLTLNSNCEKEGFYKFEEQNRAESECPGMNTHSRASCMQMDDVIDDIISLESSYNEEILGLMDPALQMANTLPVSGNLIDLYGNQGLPPPGLTISNSCPANLPNIKRELTACIFPTESEARALAKERQKKDNHNLIERRRRFNINDRIKELGTLIPKSNDPDMRWNKGTILKASVDYIRKLQREQQRAKELENRQKKLEHANRHLLLRIQELEMQARAHGLSLIPSTGLCSPDLVNRIIKQEPVLENCSQDLLQHHADLTCTTTLDLTDGTITFNNNLGTGTEANQAYSVPTKMGSKLEDILMDDTLSPVGVTDPLLSSVSPGASKTSSRRSSMSMEETEHTC

SEQ ID NO: 15295 - protein, 232 aa, Homo Sapiens
MATAESRALQFAEGAAFPAYRAPHAGGALLPPPSPAAALLPAPPAGPGPATFAGFLGRDPGPAPPPPASLGSPAPPKGAAAPSASQRRKRTSFSAEQLQLLELVFRRTRYPDIHLRERLAALTLLPESRIQVWFQNRRAKSRRQSGKSFQPLARPEIILNHCAPGTETKCLKPQLPLEVDVNCLPEPNGVGGGISDSSSQGQNFETCSPLSEDIGSKLDSWEEHIFSAFGNF

SEQ ID NO: 15296 - protein, 352 aa, Homo Sapiens
MNTIVFNKLSGAVLFEDGGASERERGGRPYSGVLDSPHARPEVGIPDGPPLKDNLGLRHRRTGARQNGGKVRHKRQALQDMARPLKQWLYKHRDNPYPTKTEKILLALGSQMTLVQVSNWFANARRRLKNTVRQPDLSWALRIKLYNKYVQGNAERLSVSSDDSCSEDGENPPRTHMNEGGYNTPVHHPVIKSENSVIKAGVRPESRASEDYVAPPKYKSSLLNRYLNDSLRHVMATNTTMMGKTRQRNHSGSFSSNEFEEELVSPSSSETEGNFVYRTDTLENGSNKGESAANRKGPSKDDTYWKEINAAMALTNLAQGKDKLQGTTSCIIQKSSHIAEVKTVKVPLVQQF

SEQ ID NO: 15297 - protein, 559 aa, Homo Sapiens
MDNQCTVQVRLELGHRAQLRKKPTTEGFTHDWMVFVRGPEQCDIQHFVEKVVFWLHDSFPKPRRVCKEPPYKVEESGYAGFIMPIEVHFKNKEEPRKVCFTYDLFLNLEGNPPVNHLRCEKLTFNNPTTEFRYKLLRAGGVMVMPEGADTVSRPSPDYPMLPTIPLSAFSDPKKTKPSHGSKDANKESSKTSKPHKVTKEHRERPRKDSESKSSSKELEREQAKSSKDTSRKLGEGRLPKEEKAPPPKAAFKEPKMALKETKLESTSPKGGPPPPPPPPPRASSKRPATADSPKPSAKKQKKSSSKGSRSAPGTSPRTSSSSSFSDKKPAKDKSSTRGEKVKAESEPREAKKALEVEESNSEDEASFKSESAQSSPSNSSSSSDSSSDSDFEPSQNHSQGPLRSMVEDLQSEESDEDDSSSGEEAAGKTNPGRDSRLSFSDSESDNSADSSLPSREPPPPQKPPPPNSKVSGRRSPESCSKPEKILKKGTYDKAYTDELVELHRRLMALRERNVLQQIVNLIEETGHFNVTNTTFDFDLFSLDETTVRKLQSCLEAVAT

SEQ ID NO: 15298 - protein, 1068 aa, Homo Sapiens
MVSSDRPVSLEDEVSHSMKEMIGGCCVCSDERGWAENPLVYCDGHGCSVAVHQACYGIVQVPTGPWFCRKCESQERAARVRCELCPHKDGALKRTDNGGWAHVVCALYIPEVQFANVSTMEPIVLQSVPHDRYNKTCYICDEQGRESKAATGACMTCNKHGCRQAFHVTCAQFAGLLCEEEGNGADNVQYCGYCKYHFSKLKKSKRGSNRSYDQSLSDSSSHSQDKHHEKEKKKYKEKDKHKQKHKKQPEPSPALVPSLTVTTEKTYTSTSNNSISGSLKRLEDTTARFTNANFQEVSAHTSSGKDVSETRGSEGKGKKSSAHSSGQRGRKPGGGRNPGTTVSAASPFPQGSFSGTPGSVKSSSGSSVQSPQDFLSFTDSDLRNDSYSHSQQSSATKDVHKGESGSQEGGVNSFSTLIGLPSTSAVTSQPKSFENSPGDLGNSSLPTAGYKRAQTSGIEEETVKEKKRKGNKQSKHGPGRPKGNKNQENVSHLSVSSASPTSSVASAAGSITSSSLQKSPTLLRNGSLQSLSVGSSPVGSEISMQYRHDGACPTTTFSELLNAIHNGIYNSNDVAVSFPNVVSGSGSSTPVSSSHLPQQSSGHLQQVGALSPSAVSSAAPAVATTQANTLSGSSLSQAPSHMYGNRSNSSMAALIAQSENNQTDQDLGDNSRNLVGRGSSPRGSLSPRSPVSSLQIRYDQPGNSSLENLPPVAASIEQLLERQWSEGQQFLLEQGTPSDILGMLKSLHQLQVENRRLEEQIKNLTAKKERLQLLNAQLSVPFPTITANPSPSHQIHTFSAQTAPTTDSLNSSKSPHIGNSFLPDNSLPVLNQDLTSSGQSTSSSSALSTPPPAGQSPAQQGSGVSGVQQVNGVTVGALASGMQPVTSTIPAVSAVGGIIGALPGNQLAINGIVGALNGVMQTPVTMSQNPTPLTHTTVPPNATHPMPATLTNSASGLGLLSDQQRQILIHQQQFQQLLNSQQLTPEQHQAFLYQLMQHHHQQHHQPELQQLQIPGPTQIPINNLLAGTQAPPLHTATTNPFLTIHGDNASQKVARLSDKTGPVAQEKS

SEQ ID NO: 15299 - protein, 90 aa, Homo Sapiens
MRDPVSSQYSSFLFWRMPIPELDLSELEGLGLSDTATYKVKDSSVGKMIGQATAADQEKNPEGDGLLEYSTFNFWRAPIASIHSFELDLL

SEQ ID NO: 15300 - protein, 568 aa, Homo Sapiens
MASSCAVQVKLELGHRAQVRKKPTVEGFTHDWMVFVRGPEHSNIQHFVEKVVFHLHESFPRPKRVCKDPPYKVEESGYAGFILPIEVYFKNKEEPRKVRFDYDLFLHLEGHPPVNHLRCEKLTFNNPTEDFRRKLLKAGGDPNRSIHTSSSSSSSSSSSSSSSSSSSSSSSSSSSSSSSSSSSSSSSSSSTSFSKPHKLMKEHKEKPSKDSREHKSAFKEPSRDHNKSSKESSKKPKENKPLKEEKIVPKMAFKEPKPMSKEPKPDSNLLTITSGQDKKAPSKRPPISDSEELSAKKRKKSSSEALFKSFSSAPPLILTCSADKKQIKDKSHVKMGKVKIESETSEKKKSTLPPFDDIVDPNDSDVEENISSKSDSEQPSPASSSSSSSSSFTPSQTRQQGPLRSIMKDLHSDDNEEESDEVEDNDNDSEMERPVNRGGSRSRRVSLSDGSDSESSSASSPLHHEPPPPLLKTNNNQILEVKSPIKQSKSDKQIKNGECDKAYLDELVELHRRLMTLRERHILQQIVNLIEETGHFHITNTTFDFDLCSLDKTTVRKLQSYLETSGTS

SEQ ID NO: 15301 - protein, 1824 aa, Homo Sapiens
MSAGGRDEERRKLADIIHHWNANRLDLFEISQPTEDLEFHGVMRFYFQDKAAGNFATKCIRVSSTATTQDVIETLAEKFRPDMRMLSSPKYSLYEVHVSGERRLDIDEKPLVVQLNWNKDDREGRFVLKNENDAIPPKKAQSNGPEKQEKEGVIQNFKRTLSKKEKKEKKKREKEALRQASDKDDRPFQGEDVENSRLAAEVYKDMPETSFTRTISNPEVVMKRRRQQKLEKRMQEFRSSDGRPDSGGTLRIYADSLKPNIPYKTILLSTTDPADFAVAEALEKYGLEKENPKDYCIARVMLPPGAQHSDEKGAKEIILDDDECPLQIFREWPSDKGILVFQLKRRPPDHIPKKTKKHLEGKTPKGKERADGSGYGSTLPPEKLPYLVELSPGRRNHFAYYNYHTYEDGSDSRDKPKLYRLQLSVTEVGTEKLDDNSIQLFGPGIQPHHCDLTNMDGVVTVTPRSMDAETYVEGQRISETTMLQSGMKVQFGASHVFKFVDPSQDHALAKRSVDGGLMVKGPRHKPGIVQETTFDLGGDIHSGTALPTSKSTTRLDSDRVSSASSTAERGMVKPMIRVEQQPDYRRQESRTQDASGPELILPASIEFRESSEDSFLSAIINYTNSSTVHFKLSPTYVLYMACRYVLSNQYRPDISPTERTHKVIAVVNKMVSMMEGVIQKQKNIAGALAFWMANASELLNFIKQDRDLSRITLDAQDVLAHLVQMAFKYLVHCLQSELNNYMPAFLDDPEENSLQRPKIDDVLHTLTGAMSLLRRCRVNAALTIQLFSQLFHFINMWLFNRLVTDPDSGLCSHYWGAIIRQQLGHIEAWAEKQGLELAADCHLSRIVQATTLLTMDKYAPDDIPNINSTCFKLNSLQLQALLQNYHCAPDEPFIPTDLIENVVTVAENTADELARSDGREVQLEEDPDLQLPFLLPEDGYSCDVVRNIPNGLQEFLDPLCQRGFCRLIPHTRSPGTWTIYFEGADYESHLLRENTELAQPLRKEPEIITVTLKKQNGMGLSIVAAKGAGQDKLGIYVKSVVKGGAADVDGRLAAGDQLLSVDGRSLVGLSQERAAELMTRTSSVVTLEVAKQGAIYHGLATLLNQPSPMMQRISDRRGSGKPRPKSEGFELYNNSTQNGSPESPQLPWAEYSEPKKLPGDDRLMKNRADHRSSPNVANQPPSPGGKSAYASGTTAKITSVSTGNLCTEEQTPPPRPEAYPIPTQTYTREYFTFPASKSQDRMAPPQNQWPNYEEKPHMHTDSNHSSIAIQRVTRSQEELREDKAYQLERHRIEAAMDRKSDSDMWINQSSSLDSSTSSQEHLNHSSKSVTPASTLTKSGPGRWKTPAAIPATPVAVSQPIRTDLPPPPPPPPVHYAGDFDGMSMDLPLPPPPSANQIGLPSAQVAAAERRKREEHQRWYEKEKARLEEERERKRREQERKLGQMRTQSLNPAPFSPLTAQQMKPEKPSTLQRPQETVIRELQPQQQPRTIERRDLQYITVSKEELSSGDSLSPDPWKRDAKEKLEKQQQMHIVDMLSKEIQELQSKPDRSAEESDRLRKLMLEWQFQKRLQESKQKDEDDEEEEDDDVDTMLIMQRLEAERRARLQDEERRRQQQLEEMRKREAEDRARQEEERRRQEEERTKRDAEEKRRQEEGYYSRLEAERRRQHDEAARRLLEPEAPGLCRPPLPRDYEPPSPSPAPGAPPPPPQRNASYLKTQVLSPDSLFTAKFVAYNEEEEEEDCSLAGPNSYPGSTGAAVGAHDACRDAKEKRSKSQDADSPGSSGAPENLTFKERQRLFSQGQDVSNKVKASRKLTELENELNTK

SEQ ID NO: 15302 - protein, 1093 aa, Homo Sapiens
MKEMVGGCCVCSDERGWAENPLVYCDGHACSVAVHQACYGIVQVPTGPWFCRKCESQERAARVRCELCPHKDGALKRTDNGGWAHVVCALYIPEVQFANVLTMEPIVLQYVPHDRFNKTCYICEEQGRESKAASGACMTCNRHGCRQAFHVTCAQMAGLLCEEEVLEVDNVKYCGYCKYHFSKMKTSRHSSGGGGGGAGGGGGSMGGGGSGFISGRRSRSASPSTQQEKHPTHHERGQKKSRKDKERLKQKHKKRPESPPSILTPPVVPTADKVSSSASSSSHHEASTQETSESSRESKGKKSSSHSLSHKGKKLSSGKGVSSFTSASSSSSSSSSSSGGPFQPAVSSLQSSPDFSAFPKLEQPEEDKYSKPTAPAPSAPPSPSAPEPPKADLFEQKVVFSGFGPIMRFSTTTSSSGRARAPSPGDYKSPHVTGSGASAGTHKRMPALSATPVPADETPETGLKEKKHKASKRSRHGPGRPKGSRNKEGTGGPAAPSLPSAQLAGFTATAASPFSGGSLVSSGLGGLSSRTFGPSGSLPSLSLESPLLGAGIYTSNKDPISHSGGMLRAVCSTPLSSSLLGPPGTSALPRLSRSPFTSTLPSSSASISTTQVFSLAGSTFSLPSTHIFGTPMGAVNPLLSQAESSHTEPDLEDCSFRCRGTSPQESLSSMSPISSLPALFDQTASAPCGGGQLDPAAPGTTNMEQLLEKQGDGEAGVNIVEMLKALHALQKENQRLQEQILSLTAKKERLQILNVQLSVPFPALPAALPAANGPVPGPYGLPPQAGSSDSLSTSKSPPGKSSLGLDNSLSTSSEDPHSGCPSRSSSSLSFHSTPPPLPLLQQSPATLPLALPGAPAPLPPQPQNGLGRAPGAAGLGAMPMAEGLLGGLAGSGGLPLNGLLGGLNGAAAPNPASLSQAGGAPTLQLPGCLNSLTEQQRHLLQQQEQQLQQLQQLLASPQLTPEHQTVVYQMIQQIQQKRELQRLQMAGGSQLPMASLLAGSSTPLLSAGTPGLLPTASAPPLLPAGALVAPSLGNNTSLMAAAAAAAAVAAAGGPPVLTAQTNPFLSLSGAEGSGGGPKGGTADKGASANQEKG

SEQ ID NO: 15303 - protein, 298 aa, Homo Sapiens
MTEPGASPEDPWVKASPVGAHAGEGRAGRARARRGAGRRGASLLSPKSPTLSVPRGCREDSSHPACAKVEYAYSDNSLDPGLFVESTRKGSVVSRANSIGSTSASSVPNTDDEDSDYHQEAYKESYKDRRRRAHTQAEQKRRDAIKRGYDDLQTIVPTCQQQDFSIGSQKLSKAIVLQKTIDYIQFLHKEKKKQEEEVSTLRKDVTALKIMKVNYEQIVKAHQDNPHEGEDQVSDQVKFNVFQGIMDSLFQSFNASISVASFQELSACVFSWIEEHCKPQTLREIVIGVLHQLKNQLY

SEQ ID NO: 15304 - protein, 919 aa, Homo Sapiens; identical to SEQ ID NO: 8747

SEQ ID NO: 15305 - protein, 852 aa, Homo Sapiens; identical to SEQ ID NO: 8755

SEQ ID NO: 15306 - protein, 582 aa, Homo Sapiens
MSIETLLEAARFLEWQAQQQQRAREEQERLRLEQEREQEQKKANSLARLAHTLPVEEPRMEAPPLPLSPPAPPPAPPPPLATPAPLTVIPIPVVTNSPQPLPPPPPLPAAAQPLPLAPRQPALVGAPGLSIKEPAPLPSRPQVPTPAPLLPDSKATIPPNGSPKPLQPLPTPVLTIAPHPGVQPQLAPQQPPPPTLGTLKLAPAEEVKSSEQKKRPGGIGTREVHNKLEKNRRAHLKECFETLKRNIPNVDDKKTSNLSVLRTALRYIQSLKRKEKEYEHEMERLAREKIATQQRLAELKHELSQWMDVLEIDRVLRQTGQPEDDQASTSTASEGEDNIDEDMEEDRAGLGPPKLSHRPQPELLKSTLPPPSTTPAPLPPHPHPHPHSVALPPAHLPVQQQQPQQKTPLPAPPPPPAAPAQTLVPAPAHLVATAGGGSTVIAHTATTHASVIQTVNHVLQGPGGKHIAHIAPSAPSPAVQLAPATPPIGHITVHPATLNHVAHLGSQLPLYPQPVAVSHIAHTLSHQQVNGTAGLGPPATVMAKPAVGAQVVHHPQLVGQTVLNPVTMVTMPSFPVSTLKLA

SEQ ID NO: 15307 - protein, 401 aa, Homo Sapiens
MEKSKNFRIDALLAVDPPRAASAQSAPLALVTSLAAAASGTGGGGGGGGASGGTSGSCSPASSEPPAAPADRLRAESPSPPRLLAAHCALLPKPGFLGAGGGGGGTGGGHGGPHHHAHPGAAAAAAAAAAAAAAGGLALGLHPGGAQGGAGLPAQAALYGHPVYGYSAAAAAAALAGQHPALSYSYPQVQGAHPAHPADPIKLGAGTFQLDQWLRASTAGMILPKMPDFNSQAQSNLLGKCRRPRTAFTSQQLLELEHQFKLNKYLSRPKRFEVATSLMLTETQVKIWFQNRRMKWKRSKKAKEQAAQEAEKQKGGGGGAGKGGAEEPGAEELLGPPAPGDKGSGRRLRDLRDSDPEEDEDEDDEDHFPYSNGASVHAASSDCSSEDDSPPPRPSHQPAPQ

SEQ ID NO: 15308 - protein, 206 aa, Homo Sapiens
MSTGSVSDPEEMELRGLQREYPVPASKRPPLRGVERSYASPSDNSSAEEEDPDGEEERCALGTAGSAEGCKRKRPRVAGGGGAGGSAGGGGKKPLPAKGSAAECKQSQRNAANARERARMRVLSKAFSRLKTSLPWVPPDTKLSKLDTLRLASSYIAHLRQLLQEDRYENGYVHPVNLTWPFVVSGRPDSDTKEVSAANRLCGTTA

SEQ ID NO: 15309 - protein, 193 aa, Homo Sapiens
MDNLRETFLSLEDGLGSSDSPGLLSSWDWKDRAGPFELNQASPSQSLSPAPSLESYSSSPCPAVAGLPCEHGGASSGGSEGCSVGGASGLVEVDYNMLAFQPTHLQGGGGPKAQKGTKVRMSVQRRRKASEREKLRMRTLADALHTLRNYLPPVYSQRGQPLTKIQTLKYTIKYIGELTDLLNRGREPRAQSA

SEQ ID NO: 15310 - protein, 303 aa, Homo Sapiens
MAPAADMTSLPLGVKVEDSAFGKPAGGGAGQAPSAAAATAAAMGADEEGAKPKVSPSLLPFSVEALMADHRKPGAKESALAPSEGVQAAGGSAQPLGVPPGSLGAPDAPSSPRPLGHFSVGGLLKLPEDALVKAESPEKPERTPWMQSPRFSPPPARRLSPPACTLRKHKTNRKPRTPFTTAQLLALERKFRQKQYLSIAERAEFSSSLSLTETQVKIWFQNRRAKAKRLQEAELEKLKMAAKPMLPPAAFGLSFPLGGPAAVAAAAGASLYGASGPFQRAALPVAPVGLYTAHVGYSMYHLT

SEQ ID NO: 15311 - protein, 267 aa, Homo Sapiens
MASPSKGNDLFSPDEEGPAVVAGPGPGPGGAEGAAEERRVKVSSLPFSVEALMSDKKPPKEASPLPAESASAGATLRPLLLSGHGAREAHSPGPLVKPFETASVKSENSEDGAAWMQEPGRYSPPPRHMSPTTCTLRKHKTNRKPRTPFTTSQLLALERKFRQKQYLSIAERAEFSSSLNLTETQVKIWFQNRRAKAKRLQEAELEKLKMAAKPMLPSSFSLPFPISSPLQAASIYGASYPFHRPVLPIPPVGLYATPVGYGMYHLS

SEQ ID NO: 15312 - protein, 715 aa, Homo Sapiens
MAANMYRVGDYVYFENSSSNPYLIRRIEELNKTANGNVEAKVVCFYRRRDISSTLIALADKHATLSVCYKAGPGADNGEEGEIEEEMENPEMVDLPEKLKHQLRHRELFLSRQLESLPATHIRGKCSVTLLNETESLKSYLEREDFFFYSLVYDPQQKTLLADKGEIRVGNRYQADITDLLKEGEEDGRDQSRLETQVWEAHNPLTDKQIDQFLVVARSVGTFARALDCSSSVRQPSLHMSAAAASRDITLFHAMDTLHKNIYDISKAISALVPQGGPVLCRDEMEEWSASEANLFEEALEKYGKDFTDIQQDFLPWKSLTSIIEYYYMWKTTDRYVQQKRLKAAEAESKLKQVYIPNYNKPNPNQISVNNVKAGVVNGTGAPGQSPGAGRACESCYTTQSYQWYSWGPPNMQCRLCASCWTYWKKYGGLKMPTRLDGERPGPNRSNMSPHGLPARSSGSPKFAMKTRQAFYLHTTKLTRIARRLCREILRPWHAARHPYLPINSAAIKAECTARLPEASQSPLVLKQAVRKPLEAVLRYLETHPRPPKPDPVKSVSSVLSSLTPAKVAPVINNGSPTILGKRSYEQHNGVDGNMKKRLLMPSRGLANHGQARHMGPSRNLLLNGKSYPTKVRLIRGGSLPPVKRRRMNWIDAPDDVFYMATEETRKIRKLLSSSETKRAARRPYKPIALRQSQALPPRPPPPAPVNDEPIVIED

SEQ ID NO: 15313 - protein, 668 aa, Homo Sapiens
MAANMYRVGDYVYFENSSSNPYLVRRIEELNKTANGNVEAKVVCLFRRRDISSSLNSLADSNAREFEEESKQPGVSEQQRHQLKHRELFLSRQFESLPATHIRGKCSVTLLNETDILSQYLEKEDCFFYSLVFDPVQKTLLADQGEIRVGCKYQAEIPDRLVEGESDNRNQQKMEMKVWDPDNPLTDRQIDQFLVVARAVGTFARALDCSSSIRQPSLHMSAAAASRDITLFHAMDTLQRNGYDLAKAMSTLVPQGGPVLCRDEMEEWSASEAMLFEEALEKYGKDFNDIRQDFLPWKSLASIVQFYYMWKTTDRYIQQKRLKAAEADSKLKQVYIPTYTKPNPNQIISVGSKPGMNGAGFQKGLTCESCHTTQSAQWYAWGPPNMQCRLCASCWIYWKKYGGLKTPTQLEGATRGTTEPHSRGHLSRPEAQSLSPYTTSANRAKLLAKNRQTFLLQTTKLTRLARRMCRDLLQPRRAARRPYAPINANAIKAECSIRLPKAAKTPLKIHPLVRLPLATIVKDLVAQAPLKPKTPRGTKTPINRNQLSQNRGLGGIMVKRAYETMAGAGVPFSANGRPLASGIRSSSQPAAKRQKLNPADAPNPVVFVATKDTRALRKALTHLEMRRAARRPNLPLKVKPTLIAVRPPVPLPAPSHPASTNEPIVLED

SEQ ID NO: 15314 - protein, 594 aa, Homo Sapiens
MAANMYRVGDYVYFENSSSNPYLIRRIEELNKTASGNVEAKVVCFYRRRDISNTLIMLADKHAKEIEEESETTVEADLTDKQKHQLKHRELFLSRQYESLPATHIRGKCSVALLNETESVLSYLDKEDTFFYSLVYDPSLKTLLADKGEIRVGPRYQADIPEMLLEGESDEREQSKLEVKVWDPNSPLTDRQIDQFLVVARAVGTFARALDCSSSVRQPSLHMSAAAASRDITLFHAMDTLYRHSYDLSSAISVLVPLGGPVLCRDEMEEWSASEASLFEEALEKYGKDFNDIRQDFLPWKSLTSIIEYYYMWKTTDRYVQQKRLKAAEAESKLKQVYIPTYSKPNPNQISTSNGKPGAVNGAVGTTFQPQNPLLGRACESCYATQSHQWYSWGPPNMQCRLCAICWLYWKKYGGLKMPTQSEEEKLSPSPTTEDPRVRSHVSRQAMQGMPVRNTGSPKSAVKTRQAFFLHTTYFTKFARQVCKNTLRLRQAARRPFVAINYAAIRAEYADRHAELSGSPLKSKSTRKPLACIIGYLEIHPAKKPNVIRSTPSLQTPTTKRMLTTPNHTSLSILGKRNYSHHNGLDELTCCVSD

SEQ ID NO: 15315 - protein, 753 aa, Homo Sapiens
MGEHSPDNNIIYFEAEEDELTPDDKMLRFVDKNGLVPSSSGTVYDRTTVLIEQDPGTLEDEDDDGQCGEHLPFLVGGEEGFHLIDHEAMSQGYVQHIISPDQIHLTINPGSTPMPRNIEGATLTLQSECPETKRKEVKRYQCTFEGCPRTYSTAGNLRTHQKTHRGEYTFVCNQEGCGKAFLTSYSLRIHVRVHTKEKPFECDVQGCEKAFNTLYRLKAHQRLHTGKTFNCESEGCSKYFTTLSDLRKHIRTHTGEKPFRCDHDGCGKAFAASHHLKTHVRTHTGERPFFCPSNGCEKTFSTQYSLKSHMKGHDNKGHSYNALPQHNGSEDTNHSLCLSDLSLLSTDSELRENSSTTQGQDLSTISPAIIFESMFQNSDDTAIQEDPQQTASLTESFNGDAESVSDVPPSTGNSASLSLPLVLQPGLSEPPQPLLPASAPSAPPPAPSLGPGSQQAAFGNPPALLQPPEVPVPHSTQFAANHQEFLPHPQAPQPIVPGLSVVAGASASAAAVASAVAAPAPPQSTTEPLPAMVQTLPLGANSVLTNNPTITITPTPNTAILQSSLVMGEQNLQWILNGATSSPQNQEQIQQASKVEKVFFTTAVPVASSPGSSVQQIGLSVPVIIIKQEEACQCQCACRDSAKERASSRRKGCSSPPPPEPSPQAPDGPSLQLPAQTFSSAPVPGSSSSTLPSSCEQSRQAETPSDPQTETLSAMDVSEFLSLQSLDTPSNLIPIEALLQGEEEMGLTSSFSK

SEQ ID NO: 15316 - protein, 593 aa, Homo Sapiens
MRDSTGAGNSLVHKRSPLRRNQKTPTSLTKLSLQDGHKAKKPACKFEEGQDVLARWSDGLFYLGTIKKINILKQSCFIIFEDSSKSWVLWKDIQTGATGSGEMVCTICQEEYSEAPNEMVICDKCGQGYHQLCHTPHIDSSVIDSDEKWLCRQCVFATTTKRGGALKKGPNAKALQVMKQTLPYSVADLEWDAGHKTNVQQCYCYCGGPGDWYLKMLQCCKCKQWFHEACVQCLQKPMLFGDRFYTFICSVCSSGPEYLKRLPLQWVDIAHLCLYNLSVIHKKKYFDSELELMTYINENWDRLHPGELADTPKSERYEHVLEALNDYKTMFMSGKEIKKKKHLFGLRIRVPPVPPNVAFKAEKEPEGTSHEFKIKGRKASKPISDSREVSNGIEKKGKKKSVGRPPGPYTRKMIQKTAEPLLDKESISENPTLDLPCSIGRTEGTAHSSNTSDVDFTGASSAKETTSSSISRHYGLSDSRKRTRTGRSWPAAIPHLRRRRGRLPRRALQTQNSEIVKDDEGKEDYQFDELNTEILNNLADQELQLNHLKNSITSYFGAAGRIACGEKYRVLARRVTLDGKVQYLVEWEGATAS

SEQ ID NO: 15317 - protein, 221 aa, Homo Sapiens
MAAAVRMNIQMLLEAADYLERREREAEHGYASMLPYNNKDRDALKRRNKSKKNNSSSRSTHNEMEKNRRAHLRLCLEKLKGLVPLGPESSRHTTLSLLTKAKLHIKKLEDCDRKAVHQIDQLQREQRHLKRQLEKLGIERIRMDSIGSTVSSERSDSDREEIDVDVESTDYLTGDLDWSSSSVSDSDERGSMQSLGSDEGYSSTSIKRIKLQDSHKACLGL

SEQ ID NO: 15318 - protein, 206 aa, Homo Sapiens
MEPLASNIQVLLQAAEFLERREREAEHGYASLCPHRSPGPIHRRKKRPPQAPGAQDSGRSVHNELEKRRRAQLKRCLERLKQQMPLGADCARYTTLSLLRRARMHIQKLEDQEQRARQLKERLRSKQQSLQRQLEQLRGLAGAAERERLRADSLDSSGLSSERSDSDQEELEVDVESLVFGGEAELLRGFVAGQEHSYSHGGGAWL

SEQ ID NO: 15319 - protein, 209 aa, Homo Sapiens
MELNSLLILLEAAEYLERRDREAEHGYASVLPFDGDFAREKTKAAGLVRKAPNNRSSHNELEKHRRAKLRLYLEQLKQLVPLGPDSTRHTTLSLLKRAKVHIKKLEEQDRRALSIKEQLQQEHRFLKRRLEQLSVQSVERVRTDSTGSAVSTDDSEQEVDIEGMEFGPGELDSVGSSSDADDHYSLQSGTGGDSGFGPHCRRLGRPALS

SEQ ID NO: 15320 - protein, 228 aa, Homo Sapiens
MERVKMINVQRLLEAAEFLERRERECEHGYASSFPSMPSPRLQHSKPPRRLSRAQKHSSGSSNTSTANRSTHNELEKNRRAHLRLCLERLKVLIPLGPDCTRHTTLGLLNKAKAHIKKLEEAERKSQHQLENLEREQRFLKWRLEQLQGPQEMERIRMDSIGSTISSDRSDSEREEIEVDVESTEFSHGEVDNISTTSISDIDDHSSLPSIGSDEGYSSASVKLSFTS

SEQ ID NO: 15321 - protein, 640 aa, Homo Sapiens
MARRPRHSIYSSDEDDEDFEMCDHDYDGLLPKSGKRHLGKTRWTREEDEKLKKLVEQNGTDDWKVIANYLPNRTDVQCQHRWQKVLNPELIKGPWTKEEDQRVIELVQKYGPKRWSVIAKHLKGRIGKQCRERWHNHLNPEVKKTSWTEEEDRIIYQAHKRLGNRWAEIAKLLPGRTDNAIKNHWNSTMRRKVEQEGYLQESSKASQPAVATSFQKNSHLMGFAQAPPTAQLPATGQPTVNNDYSYYHISEAQNVSSHVPYPVALHVNIVNVPQPAAAAIQRHYNDEDPEKEKRIKELELLLMSTENELKGQQVLPTQNHTCSYPGWHSTTIADHTRPHGDSAPVSCLGEHHSTPSLPADPGSLPEESASPARCMIVHQGTILDNVKNLLEFAETLQFIDSFLNTSSNHENSDLEMPSLTSTPLIGHKLTVTTPFHRDQTVKTQKENTVFRTPAIKRSILESSPRTPTPFKHALAAQEIKYGPLKMLPQTPSHLVEDLQDVIKQESDESGIVAEFQENGPPLLKKIKQEVESPTDKSGNFFCSHHWEGDSLNTQLFTQTSPVADAPNILTSSVLMAPASEDEDNVLKAFTVPKNRSLASPLQPCSSTWEPASCGKMEEQMTSSSQARKYVNAFSARTLVM

SEQ ID NO: 15322 - protein, 752 aa, Homo Sapiens
MAKRSRSEDEDDDLQYADHDYEVPQQKGLKKLWNRVKWTRDEDDKLKKLVEQHGTDDWTLIASHLQNRSDFQCQHRWQKVLNPELIKGPWTKEEDQRVIELVQKYGPKRWSLIAKHLKGRIGKQCRERWHNHLNPEVKKSSWTEEEDRIIYEAHKRLGNRWAEIAKLLPGRTDNSIKNHWNSTMRRKVEQEGYLQDGIKSERSSSKLQHKPCAAMDHMQTQNQFYIPVQIPGYQYVSPEGNCIEHVQPTSAFIQQPFIDEDPDKEKKIKELEMLLMSAENEVRRKRIPSQPGSFSSWSGSFLMDDNMSNTLNSLDEHTSEFYSMDENQPVSAQQNSPTKFLAVEANAVLSSLQTIPEFAETLELIESDPVAWSDVTSFDISDAAASPIKSTPVKLMRIQHNEGAMECQFNVSLVLEGKKNTCNGGNSEAVPLTSPNIAKFSTPPAILRKKRKMRVGHSPGSELRDGSLNDGGNMALKHTPLKTLPFSPSQFFNTCPGNEQLNIENPSFTSTPICGQKALITTPLHKETTPKDQKENVGFRTPTIRRSILGTTPRTPTPFKNALAAQEKKYGPLKIVSQPLAFLEEDIREVLKEETGTDLFLKEEDEPAYKSCKQENTASGKKVRKSLVLDNWEKEESGTQLLTEDISDMQSENRFTTSLLMIPLLEIHDNRCNLIPEKQDINSTNKTYTLTKKKPNPNTSKVVKLEKNLQSNCEWETVVYGKTEDQLIMTEQARRYLSTYTATSSTSRALIL

SEQ ID NO: 15323 - protein, 700 aa, Homo Sapiens
MSRRTRCEDLDELHYQDTDSDVPEQRDSKCKVKWTHEEDEQLRALVRQFGQQDWKFLASHFPNRTDQQCQYRWLRVLNPDLVKGPWTKEEDQKVIELVKKYGTKQWTLIAKHLKGRLGKQCRERWHNHLNPEVKKSCWTEEEDRIICEAHKVLGNRWAEIAKMLPGRTDNAVKNHWNSTIKRKVDTGGFLSESKDCKPPVYLLLELEDKDGLQSAQPTEGQGSLLTNWPSVPPTIKEEENSEEELAAATTSKEQEPIGTDLDAVRTPEPLEEFPKREDQEGSPPETSLPYKWVVEAANLLIPAVGSSLSEALDLIESDPDAWCDLSKFDLPEEPSAEDSINNSLVQLQASHQQQVLPPRQPSALVPSVTEYRLDGHTISDLSRSSRGELIPISPSTEVGGSGIGTPPSVLKRQRKRRVALSPVTENSTSLSFLDSCNSLTPKSTPVKTLPFSPSQFLNFWNKQDTLELESPSLTSTPVCSQKVVVTTPLHRDKTPLHQKHAAFVTPDQKYSMDNTPHTPTPFKNALEKYGPLKPLPQTPHLEEDLKEVLRSEAGIELIIEDDIRPEKQKRKPGLRRSPIKKVRKSLALDIVDEDVKLMMSTLPKSLSLPTTAPSNSSSLTLSGIKEDNSLLNQGFLQAKPEKAAVAQKPRSHFTTPAPMSSAWKTVACGGTRDQLFMQEKARQLLGRLKPSHTSRTLILS

SEQ ID NO: 15324 - protein, 439 aa, Homo Sapiens
MPLNVSFTNRNYDLDYDSVQPYFYCDEEENFYQQQQQSELQPPAPSEDIWKKFELLPTPPLSPSRRSGLCSPSYVAVTPFSLRGDNDGGGGSFSTADQLEMVTELLGGDMVNQSFICDPDDETFIKNIIIQDCMWSGFSAAAKLVSEKLASYQAARKDSGSPNPARGHSVCSTSSLYLQDLSAAASECIDPSVVFPYPLNDSSSPKSCASQDSSAFSPSSDSLLSSTESSPQGSPEPLVLHEETPPTTSSDSEEEQEDEEEIDVVSVEKRQAPGKRSESGSPSAGGHSKPPHSPLVLKRCHVSTHQHNYAAPPSTRKDYPAAKRVKLDSVRVLRQISNNRKCTSPRSSDTEENVKRRTHNVLERQRRNELKRSFFALRDQIPELENNEKAPKVVILKKATAYILSVQAEEQKLISEEDLLRKRREQLKHKLEQLRNSCA

SEQ ID NO: 15325 - protein, 364 aa, Homo Sapiens
MDYDSYQHYFYDYDCGEDFYRSTAPSEDIWKKFELVPSPPTSPPWGLGPGAGDPAPGIGPPEPWPGGCTGDEAESRGHSKGWGRNYASIIRRDCMWSGFSARERLERAVSDRLAPGAPRGNPPKASAAPDCTPSLEAGNPAPAAPCPLGEPKTQACSGSESPSDSENEEIDVVTVEKRQSLGIRKPVTITVRADPLDPCMKHFHISIHQQQHNYAARFPPESCSQEEASERGPQEEVLERDAAGEKEDEEDEEIVSPPPVESEAAQSCHPKPVSSDTEDVTKRKNHNFLERKRRNDLRSRFLALRDQVPTLASCSKAPKVVILSKALEYLQALVGAEKRMATEKRQLRCRQQQLQKRIAYLTGY

SEQ ID NO: 15326 - protein, 358 aa, Homo Sapiens
MDRDSYHHYFYDYDGGEDFYRSTTPSEDIWKKFELVPPPWDLGPAAGNPALSFGLLEPWPVGCAGDETESQDYWKAWDANYASLIRRDCMWSGFSTQEPLERAVSDLLAVGAPSGYSPKEFATPDYTPELEAGNLAPIFPCLLGEPKIQACSRSESPSDSEGEEIDVTVKKRQSLSTRKPVIIAVRADLLDPRMNLFHISIHQQQHNYAAPFPPESCFQEGAPKRMPPKEALEREAPGGKDDKEDEEIVSLPPVESEAAQSCQPKPIHYDTENWTKKKYHSYLERKRRNDQRSRFLALRDEVPALASCSRVSKVMILVKATEYLHELAEAEERMATEKRQLECQRRQLQKRIEYLSSY

SEQ ID NO: 15327 - protein, 464 aa, Homo Sapiens
MPSCSTSTMPGMICKNPDLEFDSLQPCFYPDEDDFYFGGPDSTPPGEDIWKKFELLPTPPLSPSRGFAEHSSEPPSWVTEMLLENELWGSPAEEDAFGLGGLGGLTPNPVILQDCMWSGFSAREKLERAVSEKLQHGRGPPTAGSTAQSPGAGAASPAGRGHGGAAGAGRAGAALPAELAHPAAECVDPAVVFPFPVNKREPAPVPAAPASAPAAGPAVASGAGIAAPAGAPGVAPPRPGGRQTSGGDHKALSTSGEDTLSDSDDEDDEEEDEEEEIDVVTVEKRRSSSNTKAVTTFTITVRPKNAALGPGRAQSSELILKRCLPIHQQHNYAAPSPYVESEDAPPQKKIKSEASPRPLKSVIPPKAKSLSPRNSDSEDSERRRNHNILERQRRNDLRSSFLTLRDHVPELVKNEKAAKVVILKKATEYVHSLQAEEHQLLLEKEKLQARQQQLLKKIEHARTC

SEQ ID NO: 15328 - protein, 255 aa, Homo Sapiens
MDVMDGCQFSPSEYFYDGSCIPSPEGEFGDEFVPRVAAFGAHKAELQGSDEDEHVRAPTGHHQAGHCLMWACKACKRKSTTMDRRKAATMRERRRLKKVNQAFETLKRCTTTNPNQRLPKVEILRNAIRYIESLQELLREQVENYYSLPGQSCSEPTSPTSNCSDGMPECNSPVWSRKSSTFDSIYCPDVSNVYATDKNSLSSLDCLSNIVDRITSSEQPGLPLQDLASLSPVASTDSQPATPGASSSRLIYHVL

SEQ ID NO: 15329 - protein, 242 aa, Homo Sapiens
MMMDLFETGSYFFYLDGENVTLQPLEVAEGSPLYPGSDGTLSPCQDQMPPEAGSDSSGEEHVLAPPGLQPPHCPGQCLIWACKTCKRKSAPTDRRKAATLRERRRLKKINEAFEALKRRTVANPNQRLPKVEILRSAISYIERLQDLLHRLDQQEKMQELGVDPFSYRPKQENLEGADFLRTCSSQWPSVSDHSRGLVITAKEGGASIDSSASSSLRCLSSIVDSISSEERKLPCVEEVVEK

SEQ ID NO: 15330 - protein, 610 aa, Homo Sapiens
MQYSHHCEHLLERLNKQREAGFLCDCTIVIGEFQFKAHRNVLASFSEYFGAIYRSTSENNVFLDQSQVKADGFQKLLEFIYTGTLNLDSWNVKEIHQAADYLKVEEVVTKCKIKMEDFAFIANPSSTEISSITGNIELNQQTCLLTLRDYNNREKSEVSTDLIQANPKQGALAKKSSQTKKKKKAFNSPKTGQNKTVQYPSDILENASVELFLDANKLPTPVVEQVAQINDNSELELTSVVENTFPAQDIVHTVTVKRKRGKSQPNCALKEHSMSNIASVKSPYEAENSGEELDQRYSKAKPMCNTCGKVFSEASSLRRHMRIHKGVKPYVCHLCGKAFTQCNQLKTHVRTHTGEKPYKCELCDKGFAQKCQLVFHSRMHHGEEKPYKCDVCNLQFATSSNLKIHARKHSGEKPYVCDRCGQRFAQASTLTYHVRRHTGEKPYVCDTCGKAFAVSSSLITHSRKHTGEKPYICGICGKSFISSGELNKHFRSHTGERPFICELCGNSYTDIKNLKKHKTKVHSGADKTLDSSAEDHTLSEQDSIQKSPLSETMDVKPSDMTLPLALPLGTEDHHMLLPVTDTQSPTSDTLLRSTVNGYSEPQLIFLQQLY

SEQ ID NO: 15331 - protein, 320 aa, Homo Sapiens
MELLSPPLRDVDLTAPDGSLCSFATTDDFYDDPCFDSPDLRFFEDLDPRLMHVGALLKPEEHSHFPAAVHPAPGAREDEHVRAPSGHHQAGRCLLWACKACKRKTTNADRRKAATMRERRRLSKVNEAFETLKRCTSSNPNQRLPKVEILRNAIRYIEGLQALLRDQDAAPPGAAAAFYAPGPLPPGRGGEHYSGDSDASSPRSNCSDGMMDYSGPPSGARRRNCYEGAYYNEAPSEPRPGKSAAVSSLDCLSSIVERISTESPAAPALLLADVPSESPPRRQEAAAPSEGESSGDPTQSPDAAPQCPAGANPNPIYQVL

SEQ ID NO: 15332 - protein, 224 aa, Homo Sapiens
MELYETSPYFYQEPRFYDGENYLPVHLQGFEPPGYERTELTLSPEAPGPLEDKGLGTPEHCPGQCLPWACKVCKRKSVSVDRRRAATLREKRRLKKVNEAFEALKRSTLLNPNQRLPKVEILRSAIQYIERLQALLSSLNQEERDLRYRGGGGPQPGVPSECSSHSASCSPEWGSALEFSANPGDHLLTADPTDAHNLHSLTSIVDSITVEDVSVAFPDETMPN

SEQ ID NO: 15333 - protein, 1151 aa, Homo Sapiens
MEVVDETEALQRFFEGHDINGALEPSNIDTSILEEYISKEDASDLCFPDISAPASSASYSHGQPAMPGSSGVHHLSPPGGGPSPGRHGPLPPPGYGTPLNCNNNNGMGAAPKPFPGGTGPPIKAEPKAPYAPGTLPDSPPDSGSEAYSPQQVNEPHLLRTITPETLCHVGVPSRLEHPPPPPAHLPGPPPPPPPPPHYPVLQRDLYMKAEPPIPHYAAMGQGLVPTDLHHTQQSQMLHQLLQQHGAELPTHPSKKRKHSESPPSTLNAQMLNGMIKQEPGTVTALPLHPTRAPSPPWPPQGPLSPGPGSLPLSIARVQTPPWHPPGAPSPGLLQDSDSLSGSYLDPNYQSIKWQPHQQNKWATLYDANYKELPMLTYRVDADKGFNFSVGDDAFVCQKKNHFQVTVYIGMLGEPKYVKTPEGLKPLDCFYLKLHGVKLEALNQSINIEQSQSDRSKRPFNPVTVNLPPEQVTKVTVGRLHFSETTANNMRKKGKPNPDQRYFMLVVALQAHAQNQNYTLAAQISERIIVRASNPGQFESDSDVLWQRAQVPDTVFHHGRVGINTDRPDEALVVHGNVKVMGSLMHPSDLRAKEHVQEVDTTEQLKRISRMRLVHYRYKPEFAASAGIEATAPETGVIAQEVKEILPEAVKDTGDMVFANGKTIENFLVVNKERIFMENVGAVKELCKLTDNLETRIDELERWSHKLAKLRRLDSLKSTGSSGAFSHAGSQFSRAGSVPHKKRPPKVASKSSSVVPDQACISQRFLQGTIIALVVVMAFSVVSMSTLYVLSLRTEEDLVDTDGSFAVSTSCLLALLRPQPPGGSEALCPWSSQSFGTTQLRQSPLTTGLPGIQPSLLLVTTSLTSSAPGSAVRTLDMCSSHPCPVICCSSPTTNPTTGPSLGPSFNPGHVLSPSPSPSTNRSGPSQMALLPVTNIRAKSWGLSVNGIGHSKHHKSLEPLASPAVPFPGGQGKAKNSPSLGFHGRARRGALQSSVGPAEPTWAQGQSASLLAEPVPSLTSIQVLENSMSITSQYCAPGDACRPGNFTYHIPVSSGTPLHLSLTLQMNSSSPVSVVLCSLRSKEEPCEEGSLPQSLHTHQDTQGTSHRWPITILSFREFTYHFRVALLGQANCSSEALAQPATDYHFHFYRLCD

SEQ ID NO: 15334 - protein, 828 aa, Homo Sapiens
MAAEEADVDIEGDVVAAAGAQPGSGENTASVLQKDHYLDSSWRTENGLIPWTLDNTISEENRAVIEKMLLEEEYYLSKKSQPEKVWLDQKEDDKKYMKSLQKTAKIMVHSPTKPASYSVKWTIEEKELFEQGLAKFGRRWTKISKLIGSRTVLQVKSYARQYFKNKVKCGLDKETPNQKTGHNLQVKNEDKGTKAWTPSCLRGRADPNLNAVKIEKLSDDEEVDITDEVDELSSQTPQKNSSSDLLLDFPNSKMHETNQGEFITSDSQEALFSKSSRGCLQNEKQDETLSSSEITLWTEKQSNGDKKSIELNDQKFNELIKNCNKHDGRGIIVDARQLPSPEPCEIQKNLNDNEMLFHSCQMVEESHEEEELKPPEQEIEIDRNIIQEEEKQAIPEFFEGRQAKTPERYLKIRNYILDQWEICKPKYLNKTSVRPGLKNCGDVNCIGRIHTYLELIGAINFGCEQAVYNRPQTVDKVRIRDRKDAVEAYQLAQRLQSMRTRRRRVRDPWGNWCDAKDLEGQTFEHLSAEELAKRREEEKGRPVKSLKVPRPTKSSFDPFQLIPCNFFSEEKQEPFQVKVASEALLIMDLHAHVSMAEVIGLLGGRYSEVDKVVEVCAAEPCNSLSTGLQCEMDPVSQTQASETLAVRGFSVIGWYHSHPAFDPNPSLRDIDTQAKYQSYFSRGGAKFIGMIVSPYNRNNPLPYSQITCLVISEEISPDGSYRLPYKFEVQQMLEEPQWGLVFEKTRWIIEKYRLSHSSVPMDKIFRRDSDLTCLQKLLECMRKTLSKVTNCFMAEEFLTEIENLFLSNYKSNQENGVTEENCTKELLM

SEQ ID NO: 15335 - protein, 1121 aa, Homo Sapiens
MSLENEDKRARTRSKALRGPPETTAADLSCPTPGCTGSGHVRGKYSRHRSLQSCPLAKKRKLEGAEAEHLVSKRKSHPLKLALDEGYGVDSDGSEDTEVKDASVSDESEGTLEGAEAETSGQDEIHRPETAEGRSPVKSHFGSNPIGSATASSKGSYSSYQGIIATSLLNLGQIAEETLVEEDLGQAAKPGPGIVHLLQEAAEGAASEEGEKGLFIQPEDAEEVVEVTTERSQDLCPQSLEDAASEESSKQKGILSHEEEDEEEEEEEEEEEEDEEEEEEEEEEEEEEEEEEEEEEEEEEEEEEEEAAPDVIFQEDTSHTSAQKAPELRGPESPSPKPEYSVIVEVRSDDDKDEDTHSRKSTVTDESEMQDMMTRGNLGLLEQAIALKAEQVRTVCEPGCPPAEQSQLGLGEPGKAAKPLDTVRKSYYSKDPSRAEKREIKCPTPGCDGTGHVTGLYPHHRSLSGCPHKDRIPPEILAMHENVLKCPTPGCTGQGHVNSNRNTHRSLSGCPIAAAEKLAKSHEKQQPQTGDPSKSSSNSDRILRPMCFVKQLEVPPYGSYRPNVAPATPRANLAKELEKFSKVTFDYASFDAQVFGKRMLAPKIQTSETSPKAFQCFDYSQDAEAAHMAATAILNLSTRCWEMPENLSTKPQDLPSKSVDIEVDENGTLDLSMHKHRKRENAFPSSSSCSSSPGVKSPDASQRHSSTSAPSSSMTSPQSSQASRQDEWDRPLDYTKPSRLREEEPEESEPAAHSFASSEADDQEVSEENFEERKYPGEVTLTNFKLKFLSKDIKKELLTCPTPGCDGSGHITGNYASHRSLSGCPLADKSLRNLMAAHSADLKCPTPGCDGSGHITGNYASHRSLSGCPRAKKSGVKVAPTKDDKEDPELMKCPVPGCVGLGHISGKYASHRSASGCPLAARRQKEGSLNGSSFSWKSLKNEGPTCPTPGCDGSGHANGSFLTHRSLSGCPRATFAGKKGKLSGDEVLSPKFKTSDVLENDEEIKQLNQEIRDLNESNSEMEAAMVQLQSQISSMEKNLKNIEEENKLIEEQNEALFLELSGLSQALIQSLANIRLPHMEPICEQNFDAYVSTLTDMYSNQDPENKDLLESIKQAVRGIQV

SEQ ID NO: 15336 - protein, 499 aa, Homo Sapiens
MLERPPALAMPMPTEGTPPPLSGTPIPVPAYFRHAEPGFSLKRPRGLSRSLPPPPPAKGSIPISRLFPPRTPGWHQLQPRRVSFRGEASETLQSPGYDPSRPESFFQQSFQRLSRLGHGSYGEVFKVRSKEDGRLYAVKRSMSPFRGPKDRARKLAEVGSHEKVGQHPCCVRLEQAWEEGGILYLQTELCGPSLQQHCEAWGASLPEAQVWGYLRDTLLALAHLHSQGLVHLDVKPANIFLGPRGRCKLGDFGLLVELGTAGAGEVQEGDPRYMAPELLQGSYGTAADVFSLGLTILEVACNMELPHGGEGWQQLRQGYLPPEFTAGLSSELRSVLVMMLEPDPKLRATAEALLALPVLRQPRAWGVLWCMAAEALSRGWALWQALLALLCWLWHGLAHPASWLQPLGPPATPPGSPPCSLLLDSSLSSNWDDDSLGPSLSPEAVLARTVGSTSTPRSRCTPRDALDLSDINSEPPRGSFPSFEPRNLLSLFEDTLDPT

SEQ ID NO: 15337 - protein, 1186 aa, Homo Sapiens
MEVDTEEKRHRTRSKGVRVPVEPAIQELFSCPTPGCDGSGHVSGKYARHRSVYGCPLAKKRKTQDKQPQEPAPKRKPFAVKADSSSVDECDDSDGTEDMDEKEEDEGEEYSEDNDEPGDEDEEDEEGDREEEEEIEEEDEDDDEDGEDVEDEEEEEEEEEEEEEEEENEDHQMNCHNTRIMQDTEKDDNNNDEYDNYDELVAKSLLNLGKIAEDAAYRARTESEMNSNTSNSLEDDSDKNENLGRKSELSLDLDSDVVRETVDSLKLLAQGHGVVLSENMNDRNYADSMSQQDSRNMNYVMLGKPMNNGLMEKMVEESDEEVCLSSLECLRNQCFDLARKLSETNPQERNPQQNMNIRQHVRPEEDFPGRTPDRNYSDMLNLMRLEEQLSPRSRVFASCAKEDGCHERDDDTTSVNSDRSEEVFDMTKGNLTLLEKAIALETERAKAMREKMAMEAGRRDNMRSYEDQSPRQLPGEDRKPKSSDSHVKKPYYGKDPSRTEKKESKCPTPGCDGTGHVTGLYPHHRSLSGCPHKDRVPPEILAMHESVLKCPTPGCTGRGHVNSNRNSHRSLSGCPIAAAEKLAKAQEKHQSCDVSKSSQASDRVLRPMCFVKQLEIPQYGYRNNVPTTTPRSNLAKELEKYSKTSFEYNSYDNHTYGKRAIAPKVQTRDISPKGYDDAKRYCKDPSPSSSSTSSYAPSSSSNLSCGGGSSASSTCSKSSFDYTHDMEAAHMAATAILNLSTRCREMPQNLSTKPQDLCATRNPDMEVDENGTLDLSMNKQRPRDSCCPILTPLEPMSPQQQAVMNNRCFQLGEGDCWDLPVDYTKMKPRRIDEDESKDITPEDLDPFQEALEERRYPGEVTIPSPKPKYPQCKESKKDLITLSGCPLADKSIRSMLATSSQELKCPTPGCDGSGHITGNYASHRSLSGCPRAKKSGIRIAQSKEDKEDQEPIRCPVPGCDGQGHITGKYASHRSASGCPLAAKRQKDGYLNGSQFSWKSVKTEGMSCPTPGCDGSGHVSGSFLTHRSLSGCPRATSAMKKAKLSGEQMLTIKQRASNGIENDEEIKQLDEEIKELNESNSQMEADMIKLRTQITTMESNLKTIEEENKVIEQQNESLLHELANLSQSLIHSLANIQLPHMDPINEQNFDAYVTTLTEMYTNQDRYQSPENKALLENIKQAVRGIQV

SEQ ID NO: 15338 - protein, 734 aa, Homo Sapiens
MRPAVLGSPDRAPPEDEGPVMVKLEDSEEEGEAALWDPGPEAARLRFRCFRYEEATGPQEALAQLRELCRQWLRPEVRSKEQMLELLVLEQFLGALPPEIQARVQGQRPGSPEEAAALVDGLRREPGGPRRWVTVQVQGQEVLSEKMEPSSFQPLPETEPPTPEPGPKTPPRTMQESPLGLQVKEESEVTEDSDFLESGPLAATQESVPTLLPEEAQRCGTVLDQIFPHSKTGPEGPSWREHPRALWHEEAGGIFSPGFALQLGSISAGPGSVSPHLHVPWDLGMAGLSGQIQSPSREGGFAHALLLPSDLRSEQDPTDEDPCRGVGPALITTRWRSPRGRSRGRPSTGGGVVRGGRCDVCGKVFSQRSNLLRHQKIHTGERPFVCSECGRSFSRSSHLLRHQLTHTEERPFVCGDCGQGFVRSARLEEHRRVHTGEQPFRCAECGQSFRQRSNLLQHQRIHGDPPGPGAKPPAPPGAPEPPGPFPCSECRESFARRAVLLEHQAVHTGDKSFGCVECGERFGRRSVLLQHRRVHSGERPFACAECGQSFRQRSNLTQHRRIHTGERPFACAECGKAFRQRPTLTQHLRVHTGEKPFACPECGQRFSQRLKLTRHQRTHTGEKPYHCGECGLGFTQVSRLTEHQRIHTGERPFACPECGQSFRQHANLTQHRRIHTGERPYACPECGKAFRQRPTLTQHLRTHRREKPFACQDCGRRFHQSTKLIQHQRVHSAE

SEQ ID NO: 15339 - protein, 305 aa, Homo Sapiens
MSVDPACPQSLPCFEASDCKESSPMPVICGPEENYPSLQMSSAEMPHTETVSPLPSSMDLLIQDSPDSSTSPKGKQPTSAEKSVAKKEDKVPVKKQKTRTVFSSTQLCVLNDRFQRQKYLSLQQMQELSNILNLSYKQVKTWFQNQRMKSKRWQKNNWPKNSNGVTQKASAPTYPSLYSSYHQGCLVNPTGNLPMWSNQTWNNSTWSNQTQNIQSWSNHSWNTQTWCTQSWNNQAWNSPFYNCGEESLQSCMQFQPNSPASDLEAALEAAGEGLNVIQQTTRYFSTPQTMDLFLNYSMNMQPEDV

SEQ ID NO: 15340 - protein, 188 aa, Homo Sapiens
MHRARWLTPVIPALWEAEAGRSRGQEIETILANKKQSAMPWDQDPEQSTGNYSEDEQNGKQKWREEGEAGRKREREKEEKNEKELQDEQENKRKRENEKQKQYPEKRLVSKSLMHTLWAKFKLNRCPTIQESLSLSFEFDMTHKQISQWFCKTRKKYNKEMSKRKHKKKHMRWRSLCCQGWSRTPALK

SEQ ID NO: 15341 - protein, 232 aa, Homo Sapiens
MDLPIQDSHDSSTSPKGKQPTTAEKSATKKEDKVPVKKQKTRTVFSSTQLCVLNDRFQRQKYLSLQQMQELSNILNLSYKQVKTWFQNQRMKSKRWQKNNWLKNSNGVTQGCLVNPTGNLPMWSNQTWNNSTWSNQTQNIQSWSNHSWNTQTWCTQSWNNQAWNSPFYNCGEESLQSCMQFQPNSPASDLQAALEAAGEGLNVIQQTTRYFNTPQTMDLFLNYSMNMQPEDV

SEQ ID NO: 15342 - protein, 305 aa, Homo Sapiens
MSVDPACPQSLPCFEESDCKESSPMPVICGPEENYPSLQMSSAEMPHTETVSPLPSSMDLLIQDSPDSSTSPKGKQPTSAENSVAKKEDKVPVKKQKTRTVFSSTQLCVLNDRFQRQKYLSLQQMQELSNILNLSYKQVKTWFQNQRMKSKRWQKNNWPKNSNGVTQKASAPTYPSLYSSYHQGCLVNPTGNLPMWSNQTWNNSTWSNQTQNIQSWSNHSWNTQTWCTQSWNNQAWNSPFYNCGEESLQSCMHFQPNSPASDLEAALEAAGEGLNVIQQTTRYFSTPQTMDLFLNYSMNMQPEDV

SEQ ID NO: 15343 - protein, 1441 aa, Homo Sapiens
MSGLGDSSSDPANPDSHKRKGSPCDTLASSTEKRRREQENKYLEELAELLSANISDIDSLSVKPDKCKILKKTVDQIQLMKRMEQEKSTTDDDVQKSDISSSSQGVIEKESLGPLLLEALDGFFFVVNCEGRIVFVSENVTSYLGYNQEELMNTSVYSILHVGDHAEFVKNLLPKSLVNGVPWPQEATRRNSHTFNCRMLIHPPDEPGTENQEACQRYEVMQCFTVSQPKSIQEDGEDFQSCLICIARRLPRPPAITGVESFMTKQDTTGKIISIDTSSLRAAGRTGWEDLVRKCIYAFFQPQGREPSYARQLFQEVMTRGTASSPSYRFILNDGTMLSAHTKCKLCYPQSPDMQPFIMGIHIIDREHSGLSPQDDTNSGMSIPRVNPSVNPSISPAHGVARSSTLPPSNSNMVSTRINRQQSSDLHSSSHSNSSNSQGSFGCSPGSQIVANVALNQGQASSQSSNPSLNLNNSPMEGTGISLAQFMSPRRQVTSGLATRPRMPNNSFPPNISTLSSPVGMTSSACNNNNRSYSNIPVTSLQGMNEGPNNSVGFSASSPVLRQMSSQNSPSRLNIQPAKAESKDNKEIASILNEMIQSDNSSSDGKPLDSGLLHNNDRLSDGDSKYSQTSHKLVQLLTTTAEQQLRHADIDTSCKDVLSCTGTSNSASANSSGGSCPSSHSSLTERHKILHRLLQEGSPSDITTLSVEPDKKDSASTSVSVTGQVQGNSSIKLELDASKKKESKDHQLLRYLLDKDEKDLRSTPNLSLDDVKVKVEKKEQMDPCNTNPTPMTKPTPEEIKLEAQSQFTADLDQFDQLLPTLEKAAQLPGLCETDRMDGAVTSVTIKSEILPASLQSATARPTSRLNRLPELELEAIDNQFGQPGTGDQIPWTNNTVTAINQSKSEDQCISSQLDELLCPPTTVEGRNDEKALLEQLVSFLSGKDETELAELDRALGIDKLVQGGGLDVLSERFPPQQATPPLIMEERPNLYSQPYSSPSPTANLPSPFQGMVRQKPSLGTMPVQVTPPRGAFSPGMGMQPRQTLNRPPAAPNQLRLQLQQRLQGQQQLIHQNRQAILNQFAATAPVGINMRSGMQQQITPQPPLNAQMLAQRQRELYSQQHRQRQLIQQQRAMLMRQQSFGNNLPPSSGLPVQMGNPRLPQGAPQQFPYPPNYGTNPGTPPASTSPFSQLAANPEASLANRNSMVSRGMTGNIGGQFGTGINPQMQQNVFQYPGAGMVPQGEANFAPSLSPGSSMVPMPIPPPQSSLLQQTPPASGYQSPDMKAWQQGAIGNNNVFSQAVQNQPTPAQPGVYNNMSITVSMAGGNTNVQNMNPMMAQMQMSSLQMPGMNTVCPEQINDPALRHTGLYCNQLSSTDLLKTEADGTQQVQQVQVFADVQCTVNLVGGDPYLNQPGPLGTQKPTSGPQTPQAQQKSLLQQLLTE

SEQ ID NO: 15344 - protein, 1464 aa, Homo Sapiens
MSGMGENTSDPSRAETRKRKECPDQLGPSPKRNTEKRNREQENKYIEELAELIFANFNDIDNFNFKPDKCAILKETVKQIRQIKEQEKAAAANIDEVQKSDVSSTGQGVIDKDALGPMMLEALDGFFFVVNLEGNVVFVSENVTQYLRYNQEELMNKSVYSILHVGDHTEFVKNLLPKSIVNGGSWSGEPPRRNSHTFNCRMLVKPLPDSEEEGHDNQEAHQKYETMQCFAVSQPKSIKEEGEDLQSCLICVARRVPMKERPVLPSSESFTTRQDLQGKITSLDTSTMRAAMKPGWEDLVRRCIQKFHAQHEGESVSYAKRHHHEVLRQGLAFSQIYRFSLSDGTLVAAQTKSKLIRSQTTNEPQLVISLHMLHREQNVCVMNPDLTGQTMGKPLNPISSNSPAHQALCSGNPGQDMTLSSNINFPINGPKEQMGMPMGRFGGSGGMNHVSGMQATTPQGSNYALKMNSPSQSSPGMNPGQPTSMLSPRHRMSPGVAGSPRIPPSQFSPAGSLHSPVGVCSSTGNSHSYTNSSLNALQALSEGHGVSLGSSLASPDLKMGNLQNSPVNMNPPPLSKMGSLDSKDCFGLYGEPSEGTTGQAESSCHPGEQKETNDPNLPPAVSSERADGQSRLHDSKGQTKLLQLLTTKSDQMEPSPLASSLSDTNKDSTGSLPGSGSTHGTSLKEKHKILHRLLQDSSSPVDLAKLTAEATGKDLSQESSSTAPGSEVTIKQEPVSPKKKENALLRYLLDKDDTKDIGLPEITPKLERLDSKTDPASNTKLIAMKTEKEEMSFEPGDQPGSELDNLEEILDDLQNSQLPQLFPDTRPGAPAGSVDKQAIINDLMQLTAENSPVTPVGAQKTALRISQSTFNNPRPGQLGRLLPNQNLPLDITLQSPTGAGPFPPIRNSSPYSVIPQPGMMGNQGMIGNQGNLGNSSTGMIGNSASRPTMPSGEWAPQSSAVRVTCAATTSAMNRPVQGGMIRNPAASIPMRPSSQPGQRQTLQSQVMNIGPSELEMNMGGPQYSQQQAPPNQTAPWPESILPIDQASFASQNRQPFGSSPDDLLCPHPAAESPSDEGALLDQLYLALRNFDGLEEIDRALGIPELVSQSQAVDPEQFSSQDSNIMLEQKAPVFPQQYASQAQMAQGSYSPMQDPNFHTMGQRPSYATLRMQPRPGLRPTGLVQNQPNQLRLQLQHRLQAQQNRQPLMNQISNVSNVNLTLRPGVPTQAPINAQMLAQRQREILNQHLRQRQMHQQQQVQQRTLMMRGQGLNMTPSMVAPSGMPATMSNPRIPQANAQQFPFPPNYGISQQPDPGFTGATTPQSPLMSPRMAHTQSPMMQQSQANPAYQAPSDINGWAQGNMGGNSMFSQQSPPHFGQQANTSMYSNNMNINVSMATNTGGMSSMNQMTGQISMTSVTSVPTSGLSSMGPEQVNDPALRGGNLFPNQLPGMDMIKQEGDTTRKYC

SEQ ID NO: 15345 - protein, 1424 aa, Homo Sapiens
MSGLGENLDPLASDSRKRKLPCDTPGQGLTCSGEKRRREQESKYIEELAELISANLSDIDNFNVKPDKCAILKETVRQIRQIKEQGKTISNDDDVQKADVSSTGQGVIDKDSLGPLLLQALDGFLFVVNRDGNIVFVSENVTQYLQYKQEDLVNTSVYNILHEEDRKDFLKNLPKSTVNGVSWTNETQRQKSHTFNCRMLMKTPHDILEDINASPEMRQRYETMQCFALSQPRAMMEEGEDLQSCMICVARRITTGERTFPSNPESFITRHDLSGKVVNIDTNSLRSSMRPGFEDIIRRCIQRFFSLNDGQSWSQKRHYQEAYLNGHAETPVYRFSLADGTIVTAQTKSKLFRNPVTNDRHGFVSTHFLQREQNGYRPNPNPVGQGIRPPMAGCNSSVGGMSMSPNQGLQMPSSRAYGLADPSTTGQMSGARYGGSSNIASLTPGPGMQSPSSYQNNNYGLNMSSPPHGSPGLAPNQQNIMISPRNRGSPKIASHQFSPVAGVHSPMASSGNTGNHSFSSSSLSALQAISEGVGTSLLSTLSSPGPKLDNSPNMNITQPSKVSNQDSKSPLGFYCDQNPVESSMCQSNSRDHLSDKESKESSVEGAENQRGPLESKGHKKLLQLLTCSSDDRGHSSLTNSPLDSSCKESSVSVTSPSGVSSSTSGGVSSTSNMHGSLLQEKHRILHKLLQNGNSPAEVAKITAEATGKDTSSITSCGDGNVVKQEQLSPKKKENNALLRYLLDRDDPSDALSKELQPQVEGVDNKMSQCTSSTIPSSSQEKDPKIKTETSEEGSGDLDNLDAILGDLTSSDFYNNSISSNGSHLGTKQQVFQGTNSLGLKSSQSVQSIRPPYNRAVSLDSPVSVGSSPPVKNISAFPMLPKQPMLGGNPRMMDSQENYGSSMGGPNRNVTVTQTPSSGDWGLPNSKAGRMEPMNSNSMGRPGGDYNTSLPRPALGGSIPTLPLRSNSIPGARPVLQQQQQMLQMRPGEIPMGMGANPYGQAAASNQLGSWPDGMLSMEQVSHGTQNRPLLRNSLDDLVGPPSNLEGQSDERALLDQLHTLLSNTDATGLEEIDRALGIPELVNQGQALEPKQDAFQGQEAAVMMDQKAGLYGQTYPAQGPPMQGGFHLQGQSPSFNSMMNQMNQQGNFPLQGMHPRANIMRPRTNTPKQLRMQLQQRLQGQQFLNQSRQALELKMENPTAGGAAVMRPMMQPQVSSQQGFLNAQMVAQRSRELLSHHFRQQRVAMMMQQQQQQQQQQQQQQQQQQQQQQQQQQQQQTQAFSPPPNVTASPSMDGLLAGPTMPQAPPQQFPYQPNYGMGQQPDPAFGRVSSPPNAMMSSRMGPSQNPMMQHPQAASIYQSSEMKGWPSGNLARNSSFSQQQFAHQGNPAVYSMVHMNGSSGHMGQMNMNPMPMSGMPMGPDQKYC

SEQ ID NO: 15346 - protein, 614 aa, Homo Sapiens
MNTFQDQSGSSSNREPLLRCSDARRDLELAIGGVLRAEQQIKDNLREVKAQIHSCISRHLECLRSREVWLYEQVDLIYQLKEETLQQQAQQLYSLLGQFNCLTHQLECTQNKDLANQVSVCLERLGSLTLKPEDSTVLLFEADTITLRQTITTFGSLKTIQIPEHLMAHASSANIGPFLEKRGCISMPEQKSASGIVAVPFSEWLLGSKPASGYQAPYIPSTDPQDWLTQKQTLENSQTSSRACNFFNNVGGNLKGLENWLLKSEKSSYQKCNSHSTTSSFSIEMEKVGDQELPDQDEMDLSDWLVTPQESHKLRKPENGSRETSEKFKLLFQSYNVNDWLVKTDSCTNCQGNQPKGVEIENLGNLKCLNDHLEAKKPLSTPSMVTEDWLVQNHQDPCKVEEVCRANEPCTSFAECVCDENCEKEALYKWLLKKEGKDKNGMPVEPKPEPEKHKDSLNMWLCPRKEVIEQTKAPKAMTPSRIADSFQVIKNSPLSEWLIRPPYKEGSPKEVPGTEDRAGKQKFKSPMNTSWCSFNTADWVLPGKKMGNLSQLSSGEDKWLLRKKAQEVLLNSPLQEEHNFPPDHYGLPAVCDLFACMQLKVDKEKWLYRTPLQM

SEQ ID NO: 15347 - protein, 579 aa, Homo Sapiens
MNTAPSRPSPTRRDPYGFGDSRDSRRDRSPIRGSPRREPRDGRNGRDARDSRDIRDPRDLRDHRHSRDLRDHRDSRSVRDVRDVRDLRDFRDLRDSRDFRDQRDPMYDRYRDMRDSRDPMYRREGSYDRYLRMDDYCRRKDDSYFDRYRDSFDGRGPPGPESQSRAKERLKREERRREELYRQYFEEIQRRFDAERPVDCSVIVVNKQTKDYAESVGRKVRDLGMVVDLIFLNTEVSLSQALEDVSRGGSPFAIVITQQHQIHRSCTVNIMFGTPQEHRNMPQADAMVLVARNYERYKNECREKEREEIARQAAKMADEAILQERERGGPEEGVRGGHPPAIQSLINLLADNRYLTAEETDKIINYLRERKERLMRSSTDSLPGPISRQPLGATSGASLKTQPSSQPLQSGQVLPSATPTPSAPPTSQQELQAKILSLFNSGTVTANSSSASPSVAAGNTPNQNFSTAANSQPQQRSQASGNQPPSILGQGGSAQNMGPRPGAPSQGLFGQPSSRLAPASNMTSQRPVSSTGINFDNPSVQKALDTLIQSGPALSHLVSQTTAQMGQPQAPMGSYQRHY

SEQ ID NO: 15348 - protein, 2063 aa, Homo Sapiens
MVLDDLPNLEDIYTSLCSSTMEDSEMDFDSGLEDDDTKSDSILEDSTIFVAFKGNIDDKDFKWKLDAILKNVPNLLHMESSKLKVQKVEPWNSVRVTFNIPREAAERLRILAQSNNQQLRDLGILSVQIEGEGAINLALAQNRSQDVRMNGPMGAGNSVRMEAGFPMASGPGIIRMNNPATVMIPPGGNVSSSMMAPGPNPELQPRTPRPASQSDAMDPLLSGLHIQQQSHPSGSLAPPHHPMQPVSVNRQMNPANFPQLQQQQQQQQQQQQQQQQQQQQQQQQQLQARPPQQHQQQQPQGIRPQFTAPTQVPVPPGWNQLPSGALQPPPAQGSLGTMTANQGWKKAPLPGPMQQQLQARPSLATVQTPSHPPPPYPFGSQQASQAHTNFPQMSNPGQFTAPQMKSLQGGPSRVPTPLQQPHLTNKSPASSPSSFQQGSPASSPTVNQTQQQMGPRPPQNNPLPQGFQQPVSSPGRNPMVQQGNVPPNFMVMQQQPPNQGPQSLHPGLGGMPKRLPPGFSAGQANPNFMQGQVPSTTATTPGNSGAPQLQANQNVQHAGGQGAGPPQNQMQVSHGPPNMMQPSLMGIHGNMNNQQAGTSGVPQVNLSNMQGQPQQGPPSQLMGMHQQIVPSQGQMVQQQGTLNPQNPMILSRAQLMPQGQMMVNPPSQNLGPSPQRMTPPKQMLSQQGPQMMAPHNQMMGPQGQVLLQQNPMIEQIMTNQMQGNKQQFNTQNQSNVMPGPAQIMRGPTPNMQGNMVQFTGQMSGQMLPQQGPVNNSPSQVMGIQGQVLRPPGPSPHMAQQHGDPATTANNDVSLSQMMPDVSIQQTNMVPPHVQAMQGNSASGNHFSGHGMSFNAPFSGAPNGNQMSCGQNPGFPVNKDVTLTSPLLVNLLQSDISAGHFGVNNKQNNTNANKPKKKKPPRKKKNSQQDLNTPDTRPAGLEEADQPPLPGEQGINLDNSGPKLPEFSNRPPGYPSQPVEQRPLQQMPPQLMQHVAPPPQPPQQQPQPQLPQQQQPPPPSQPQSQQQQQQQQQMMMMLMMQQDPKSVRLPVSQNVHPPRGPLNPDSQRMPMQQSGSVPVMVSLQGPASVPPSPDKQRMPMPVNTPLGSNSRKMVYQESPQNPSSSPLAEMASLPEASGSEAPSVPGGPNNMPSHVVLPQNQLMMTGPKPGPSPLSATQGATPQQPPVNSLPSSHGHHFPNVAAPTQTSRPKTPNRASPRPYYPQTPNNRPPSTEPSEISLSPERLNASIAGLFPPQINIPLPPRPNLNRGFDQQGLNPTTLKAIGQAPSNLTMNPSNFATPQTHKLDSVVVNSGKQSNSGATKRASPSNSRRSSPGSSRKTTPSPGRQNSKAPKLTLASQTNAALLQNVELPRNVLVSPTPLANPPVPGSFPNNSGLNPQNSTVSVAAVGGVVEDNKESLNVPQDSDCQNSQSRKEQVNIELKAVPAQEVKMVVPEDQSKKDGQPSDPNKLPSVEENKNLVSPAMREAPTSLSQLLDNSGAPNVTIKPPGLTDLEVTPPVVSGEDLKKASVIPTLQDLSSSKEPSNSLNLPHSNELCSSLVHPELSEVSSNVAPSIPPVMSRPVSSSSISTPLPPNQITVFVTSNPITTSANTSAALPTHLQSALMSTVVTMPNAGSKVMVSEGQSAAQSNARPQFITPVFINSSSIIQVMKGSQPSTIPAAPLTTNSGLMPPSVAVVGPLHIPQNIKFSSAPVPPNALSSSPAPNIQTGRPLVLSSRATPVQLPSPPCTSSPVVPSHPPVQQVKELNPDEASPQVNTSADQNTLPSSQSTTMVSPLLTNSPGSSGNRRSPVSSSKGKGKVDKIGQILLTKACKKVTGSLEKGEEQYGADGETEGQGLDTTAPGLMGTEQLSTELDSKTPTPPAPTLLKMTSSPVGPGTASAGPSLPGGALPTSVRSIVTTLVPSELISAVPTTKSNHGGIASESLAGGLVEEKVGSHPELLPSIAPSQNLVSKETSTTALQASVARPELEVNAAIVSGQSSEPKEIVEKSKIPGRRNSRTEEPTVASESVENGHRKRSSRPASASSSTKDITSAVQSKRRKSK

SEQ ID NO: 15349 - protein, 942 aa, Homo Sapiens
MDTKEEKKERKQSYFARLKKKKQAKQNAETASAVATRTHTGKEDNNTVVLEPDKCNIAVEEEYMTDEKKKRKSNQLKEIRRTELKRYYSIDDNQNKTHDKKEKKMVVQKPHGTMEYTAGNQDTLNSIALKFNITPNKLVELNKLFTHTIVPGQVLFVPDANSPSSTLRLSSSSPGATVSPSSSDAEYDKLPDADLARKALKPIERVLSSTSEEDEPGVVKFLKMNCRYFTDGKGVVGGVMIVTPNNIMFDPHKSDPLVIENGCEEYGLICPMEEVVSIALYNDISHMKIKDALPSDLPQDLCPLYRPGEWEDLASEKDINPFSKFKSINKEKRQQNGEKIMTSDSRPIVPLEKSTGHTPTKPSGSSVSEKLKKLDSSRETSHGSPTVTKLSKEPSDTSSAFESTAKENFLGEDDDFVDLEELSSQTGGGMHKKDTLKECLSLDPEERKKAESQINNSAVEMQVQSALAFLGTENDVELKGALDLETCEKQDIMPEVDKQSGSPESRVENTLNIHEDLDKVKLIEYYLTKNKEGPQVSENLQKTELSDGKSIEPGGIDITLSSSLSQAGDPITEGNKEPDKTWVKKGEPLPVKLNSSTEANVIKEALDSSLESTLDNSCQGAQMDNKSEVQLWLLKRIQVPIEDILPSKEEKSKTPPMFLCIKVGKPMRKSFATHTAAMVQQYGKRRKQPEYWFAVPRERVDHLYTFFVQWSPDVYGKDAKEQGFVVVEKEELNMIDNFFSEPTTKSWEIITVEEAKRRKSTCSYYEDEDEEVLPVLRPHSALLENMHIEQLARRLPARVQGYPWRLAYSTLEHGTSLKTLYRKSASLDSPVLLVIKDMDNQIFGAYATHPFKFSDHYYGTGETFLYTFSPHFKVFKWSGENSYFINGDISSLELGGGGGRFGLWLDADLYHGRSNSCSTFNNDILSKKEDFIVQDLEVWAFD

SEQ ID NO: 15350 - protein, 2440 aa, Homo Sapiens
MSSSGYPPNQGAFSTEQSRYPPHSVQYTFPNTRHQQEFAVPDYRSSHLEVSQASQLLQQQQQQQLRRRPSLLSEFHPGSDRPQERRTSYEPFHPGPSPVDHDSLESKRPRLEQVSDSHFQRVSAAVLPLVHPLPEGLRASADAKKDPAFGGKHEAPSSPISGQPCGDDQNASPSKLSKEELIQSMDRVDREIAKVEQQILKLKKKQQQLEEEAAKPPEPEKPVSPPPVEQKHRSIVQIIYDENRKKAEEAHKIFEGLGPKVELPLYNQPSDTKVYHENIKTNQVMRKKLILFFKRRNHARKQREQKICQRYDQLMEAWEKKVDRIENNPRRKAKESKTREYYEKQFPEIRKQREQQERFQRVGQRGAGLSATIARSEHEISEIIDGLSEQENNEKQMRQLSVIPPMMFDAEQRRVKFINMNGLMEDPMKVYKDRQFMNVWTDHEKEIFKDKFIQHPKNFGLIASYLERKSVPDCVLYYYLTKKNENYKALVRRNYGKRRGRNQQIARPSQEEKVEEKEEDKAEKTEKKEEEKKDEEEKDEKEDSKENTKEKDKIDGTAEETEEREQATPRGRKTANSQGRRKGRITRSMTNEAAAASAAAAAATEEPPPPLPPPPEPISTEPVETSRWTEEEMEVAKKGLVEHGRNWAAIAKMVGTKSEAQCKNFYFNYKRRHNLDNLLQQHKQKTSRKPREERDVSQCESVASTVSAQEDEDIEASNEEENPEDSEVEAVKPSEDSPENATSRGNTEPAVELEPTTETAPSTSPSLAVPSTKPAEDESVETQVNDSISAETAEQMDVDQQEHSAEEGSVCDPPPATKADSVDVEVRVPENHASKVEGDNTKERDLDRASEKVEPRDEDLVVAQQINAQRPEPQSDNDSSATCSADEDVDGEPERQRMFPMDSKPSLLNPTGSILVSSPLKPNPLDLPQLQHRAAVIPPMVSCTPCNIPIGTPVSGYALYQRHIKAMHESALLEEQRQRQEQIDLECRSSTSPCGTSKSPNREWEVLQPAPHQVITNLPEGVRLPTTRPTRPPPPLIPSSKTTVASEKPSFIMGGSISQGTPGTYLTSHNQASYTQETPKPSVGSISLGLPRQQESAKSATLPYIKQEEFSPRSQNSQPEGLLVRAQHEGVVRGTAGAIQEGSITRGTPTSKISVESIPSLRGSITQGTPALPQTGIPTEALVKGSISRMPIEDSSPEKGREEAASKGHVIYEGKSGHILSYDNIKNAREGTRSPRTAHEISLKRSYESVEGNIKQGMSMRESPVSAPLEGLICRALPRGSPHSDLKERTVLSGSIMQGTPRATTESFEDGLKYPKQIKRESPPIRAFEGAITKGKPYDGITTIKEMGRSIHEIPRQDILTQESRKTPEVVQSTRPIIEGSISQGTPIKFDNNSGQSAIKHNVKSLITGPSKLSRGMPPLEIVPENIKVVERGKYEDVKAGETVRSRHTSVVSSGPSVLRSTLHEAPKAQLSPGIYDDTSARRTPVSYQNTMSRGSPMMNRTSDVTISSNKSTNHERKSTLTPTQRESIPAKSPVPGVDPVVSHSPFDPHHRGSTAGEVYRSHLPTHLDPAMPFHRALDPAAAAYLFQRQLSPTPGYPSQYQLYAMENTRQTILNDYITSQQMQVNLRPDVARGLSPREQPLGLPYPATRGIIDLTNMPPTILVPHPGGTSTPPMDRITYIPGTQITFPPRPYNSASMSPGHPTHLAAAASAEREREREREKERERERIAAASSDLYLRPGSEQPGRPGSHGYVRSPSPSVRTQETMLQQRPSVFQGTNGTSVITPLDPTAQLRIMPLPAGGPSISQGLPASRYNTAADALAALVDAAASAPQMDVSKTKESKHEAARLEENLRSRSAAVSEQQQLEQKTLEVEKRSVQCLYTSSAFPSGKPQPHSSVVYSEAGKDKGPPPKSRYEEELRTRGKTTITAANFIDVIITRQIASDKDARERGSQSSDSSSSLSSHRYETPSDAIEVISPASSPAPPQEKLQTYQPEVVKANQAENDPTRQYEGPLHHYRPQQESPSPQQQLPPSSQAEGMGQVPRTHRLITLADHICQIITQDFARNQVSSQTPQQPPTSTFQNSPSALVSTPVRTKTSNRYSPESQAQSVHHQRPGSRVSPENLVDKSRGSRPGKSPERSHVSSEPYEPISPPQVPVVHEKQDSLLLLSQRGAEPAEQRNDARSPGSISYLPSFFTKLENTSPMVKSKKQEIFRKLNSSGGGDSDMAAAQPGTEIFNLPAVTTSGSVSSRGHSFADPASNLGLEDIIRKALMGSFDDKVEDHGVVMSQPMGVVPGTANTSVVTSGETRREEGDPSPHSGGVCKPKLISKSNSRKSKSPIPGQGYLGTERPSSVSSVHSEGDYHRQTPGWAWEDRPSSTGSTQFPYNPLTMRMLSSTPPTPIACAPSAVNQAAPHQQNRIWEREPAPLLSAQYETLSDSDD

SEQ ID NO: 15351 - protein, 2525 aa, Homo Sapiens
MSGSTQPVAQTWRATEPRYPPHSLSYPVQIARTHTDVGLLEYQHHSRDYASHLSPGSIIQPQRRRPSLLSEFQPGNERSQELHLRPESHSYLPELGKSEMEFIESKRPRLELLPDPLLRPSPLLATGQPAGSEDLTKDRSLTGKLEPVSPPSPPHTDPELELVPPRLSKEELIQNMDRVDREITMVEQQISKLKKKQQQLEEEAAKPPEPEKPVSPPPIESKHRSLVQIIYDENRKKAEAAHRILEGLGPQVELPLYNQPSDTRQYHENIKINQAMRKKLILYFKRRNHARKQWEQKFCQRYDQLMEAWEKKVERIENNPRRRAKESKVREYYEKQFPEIRKQRELQERMQSRVGQRGSGLSMSAARSEHEVSEIIDGLSEQENLEKQMRQLAVIPPMLYDADQQRIKFINMNGLMADPMKVYKDRQVMNMWSEQEKETFREKFMQHPKNFGLIASFLERKTVAECVLYYYLTKKNENYKSLVRRSYRRRGKSQQQQQQQQQQQQQQQQQPMPRSSQEEKDEKEKEKEAEKEEEKPEVENDKEDLLKEKTDDTSGEDNDEKEAVASKGRKTANSQGRRKGRITRSMANEANSEEAITPQQSAELASMELNESSRWTEEEMETAKKGLLEHGRNWSAIARMVGSKTVSQCKNFYFNYKKRQNLDEILQQHKLKMEKERNARRKKKKAPAAASEEAAFPPVVEDEEMEASGVSGNEEEMVEEAEALHASGNEVPRGECSGPATVNNSSDTESIPSPHTEAAKDTGQNGPKPPATLGADGPPPGPPTPPPEDIPAPTEPTPASEATGAPTPPPAPPSPSAPPPVVPKEEKEEETAAAPPVEEGEEQKPPAAEELAVDTGKAEEPVKSECTEEAEEGPAKGKDAEAAEATAEGALKAEKKEGGSGRATTAKSSGAPQDSDSSATCSADEVDEAEGGDKNRLLSPRPSLLTPTGDPRANASPQKPLDLKQLKQRAAAIPPIQVTKVHEPPREDAAPTKPAPPAPPPPQNLQPESDAPQQPGSSPRGKSRSPAPPADKEAEKPVFFPAFAAEAQKLPGDPPCWTSGLPFPVPPREVIKASPHAPDPSAFSYAPPGHPLPLGLHDTARPVLPRPPTISNPPPLISSAKHPSVLERQIGAISQGMSVQLHVPYSEHAKAPVGPVTMGLPLPMDPKKLAPFSGVKQEQLSPRGQAGPPESLGVPTAQEASVLRGTALGSVPGGSITKGIPSTRVPSDSAITYRGSITHGTPADVLYKGTITRIIGEDSPSRLDRGREDSLPKGHVIYEGKKGHVLSYEGGMSVTQCSKEDGRSSSGPPHETAAPKRTYDMMEGRVGRAISSASIEGLMGRAIPPERHSPHHLKEQHHIRGSITQGIPRSYVEAQEDYLRREAKLLKREGTPPPPPPSRDLTEAYKTQALGPLKLKPAHEGLVATVKEAGRSIHEIPREELRHTPELPLAPRPLKEGSITQGTPLKYDTGASTTGSKKHDVRSLIGSPGRTFPPVHPLDVMADARALERACYEESLKSRPGTASSSGGSIARGAPVIVPELGKPRQSPLTYEDHGAPFAGHLPRGSPVTTREPTPRLQEGSLSSSKASQDRKLTSTPREIAKSPHSTVPEHHPHPISPYEHLLRGVSGVDLYRSHIPLAFDPTSIPRGIPLDAAAAYYLPRHLAPNPTYPHLYPPYLIRGYPDTAALENRQTIINDYITSQQMHHNAATAMAQRADMLRGLSPRESSLALNYAAGPRGIIDLSQVPHLPVLVPPTPGTPATAMDRLAYLPTAPQPFSSRHSSSPLSPGGPTHLTKPTTTSSSERERDRDRERDRDREREKSILTSTTTVEHAPIWRPGTEQSSGSSGSSGGGGGSSSRPASHSHAHQHSPISPRTQDALQQRPSVLHNTGMKGIITAVEPSTPTVLRSTSTSSPVRPAATFPPATHCPLGGTLDGVYPTLMEPVLLPKEAPRVARPERPRADTGHAFLAKPPARSGLEPASSPSKGSEPRPLVPPVSGHATIARTPAKNLAPHHASPDPPAPPASASDPHREKTQSKPFSIQELELRSLGYHGSSYSPEGVEPVSPVSSPSLTHDKGLPKHLEELDKSHLEGELRPKQPGPVKLGGEAAHLPHLRPLPESQPSSSPLLQTAPGVKGHQRVVTLAQHISEVITQDYTRHHPQQLSAPLPAPLYSFPGASCPVLDLRRPPSDLYLPPPDHGAPARGSPHSEGGKRSPEPNKTSVLGGGEDGIEPVSPPEGMTEPGHSRSAVYPLLYRDGEQTEPSRMGSKSPGNTSQPPAFFSKLTESNSAMVKSKKQEINKKLNTHNRNEPEYNISQPGTEIFNMPAITGTGLMTYRSQAVQEHASTNMGLEAIIRKALMGKYDQWEESPPLSANAFNPLNASASLPAAMPITAADGRSDHTLTSPGGGGKAKVSGRPSSRKAKSPAPGLASGDRPPSVSSVHSEGDCNRRTPLTNRVWEDRPSSAGSTPFPYNPLIMRLQAGVMASPPPPGLPAGSGPLAGPHHAWDEEPKPLLCSQYETLSDSE

SEQ ID NO: 15352 - protein, 356 aa, Homo Sapiens
MTKSYSESGLMGEPQPQGPPSWTDECLSSQDEEHEADKKEDDLETMNAEEDSLRNGGEEEDEDEDLEEEEEEEEEDDDQKPKRRGPKKKKMTKARLERFKLRRMKANARERNRMHGLNAALDNLRKVVPCYSKTQKLSKIETLRLAKNYIWALSEILRSGKSPDLVSFVQTLCKGLSQPTTNLVAGCLQLNPRTFLPEQNQDMPPHLPTASASFPVHPYSYQSPGLPSPPYGTMDSSHVFHVKPPPHAYSAALEPFFESPLTDCTSPSFDGPLSPPLSINGNFSFKHEPSAEFEKNYAFTMHYPAATLAGAQSHGSIFSGTAAPRCEIPIDNIMSFDSHSHHERVMSAQLNAIFHD

SEQ ID NO: 15353 - protein, 382 aa, Homo Sapiens
MLTRLFSEPGLLSDVPKFASWGDGEDDEPRSDKGDAPPPPPPAPGPGAPGPARAAKPVPLRGEEGTEATLAEVKEEGELGGEEEEEEEEEEGLDEAEGERPKKRGPKKRKMTKARLERSKLRRQKANARERNRMHDLNAALDNLRKVVPCYSKTQKLSKIETLRLAKNYIWALSEILRSGKRPDLVSYVQTLCKGLSQPTTNLVAGCLQLNSRNFLTEQGADGAGRFHGSGGPFAMHPYPYPCSRLAGAQCQAAGGLGGGAAHALRTHGYCAAYETLYAAAGGGGASPDYNSSEYEGPLSPPLCLNGNFSLKQDSSPDHEKSYHYSMHYSALPGSRPTGHGLVFGSSAVRGGVHSENLLSYDMHLHHDRGPMYEELNAFFHN

SEQ ID NO: 15354 - protein, 331 aa, Homo Sapiens
MSKTFVKSKEMGELVNTPSWMDKGLGSQNEVKEEESRPGTYGMLSSLTEEHDSIEEEEEEEEDGEKPKRRGPKKKKMTKARLERFRARRVKANARERTRMHGLNDALDNLRRVMPCYSKTQKLSKIETLRLARNYIWALSEVLETGQTPEGKGFVEMLCKGLSQPTSNLVAGCLQLGPQSVLLEKHEDKSPICDSAISVHNFNYQSPGLPSPPYGHMETHLLHLKPQVFKSLGESSFGSHLPDCSTPPYEGPLTPPLSISGNFSLKQDGSPDLEKSYSFMPHYPSSSLSSGHVHSTPFQAGTPRYDVPIDMSYDSYPHHGIGTQLNTVFTE

SEQ ID NO: 15355 - protein, 337 aa, Homo Sapiens
MLTLPFDESVVMPESQMCRKFSRECEDQKQIKKPESFSKQIVLRGKSIKRAPGEETEKEEEEEDREEEDENGLPRRRGLRKKKTTKLRLERVKFRRQEANARERNRMHGLNDALDNLRKVVPCYSKTQKLSKIETLRLAKNYIWALSEILRIGKRPDLLTFVQNLCKGLSQPTTNLVAGCLQLNARSFLMGQGGEAAHHTRSPYSTFYPPYHSPELTTPPGHGTLDNSKSMKPYNYCSAYESFYESTSPECASPQFEGPLSPPPINYNGIFSLKQEETLDYGKNYNYGMHYCAVPPRGPLGQGAMFRLPTDSHFPYDLHLRSQSLTMQDELNAVFHN

SEQ ID NO: 15356 - protein, 237 aa, Homo Sapiens
MPARLETCISDLDCASSSGSDLSGFLTDEEDCARLQQAASASGPPAPARRGAPNISRASEVPGAQDDEQERRRRRGRTRVRSEALLHSLRRSRRVKANDRERNRMHNLNAALDALRSVLPSFPDDTKLTKIETLRFAYNYIWALAETLRLADQGLPGGGARERLLPPQCVPCLPGPPSPASDAESWGSGAAAASPLSDPSSPAASEDFTYRPGDPVFSFPSLPKDLLHTTPCFIPYH

SEQ ID NO: 15357 - protein, 272 aa, Homo Sapiens
MFVKSETLELKEEEDVLVLLGSASPALAALTPLSSSADEEEEEEPGASGGARRQRGAEAGQGARGGVAAGAEGCRPARLLGLVHDCKRRPSRARAVSRGAKTAETVQRIKKTRRLKANNRERNRMHNLNAALDALREVLPTFPEDAKLTKIETLRFAHNYIWALTETLRLADHCGGGGGGLPGALFSEAVLLSPGGASAALSSSGDSPSPASTWSCTNSPAPSSSVSSNSTSPYSCTLSPASPAGSDMDYWQPPPPDKHRYAPHLPIARDCI

SEQ ID NO: 15358 - protein, 214 aa, Homo Sapiens
MTPQPSGAPTVQVTRETERSFPRASEDEVTCPTSAPPSPTRTRGNCAEAEEGGCRGAPRKLRARRGGRSRPKSELALSKQRRSRRKKANDRERNRMHNLNSALDALRGVLPTFPDDAKLTKIETLRFAHNYIWALTQTLRIADHSLYALEPPAPHCGELGSPGGSPGDWGSLYSPVSQAGSLSPAASLEERPGLLGATFSACLSPGSLAFSDFL

SEQ ID NO: 15359 - protein, 1531 aa, Homo Sapiens
MPSDFISLLSADLDLESPKSLYSRESVYDLLPKELQLPPSRETSVASMSQTSGGEAGSPPPAVVAADASSAPSSSSMGGACSSFTTSSSPTIYSTSVTDSKAMQVESCSSAVGVSNRGVSEKQLTSNTVQQHPSTPKRHTVLYISPPPEDLLDNSRMSCQDEGCGLESEQSCSMWMEDSPSNFSNMSTSSYNDNTEVPRKSRKRNPKQRPGVKRRDCEESNMDIFDADSAKAPHYVLSQLTTDNKGNSKAGNGTLENQKGTGVKKSPMLCGQYPVKSEGKELKIVVQPETQHRARYLTEGSRGSVKDRTQQGFPTVKLEGHNEPVVLQVFVGNDSGRVKPHGFYQACRVTGRNTTPCKEVDIEGTTVIEVGLDPSNNMTLAVDCVGILKLRNADVEARIGIAGSKKKSTRARLVFRVNIMRKDGSTLTLQTPSSPILCTQPAGVPEILKKSLHSCSVKGEEEVFLIGKNFLKGTKVIFQENVSDENSWKSEAEIDMELFHQNHLIVKVPPYHDQHITLPVSVGIYVVTNAGRSHDVQPFTYTPDPAAAGALNVNVKKEISSPARPCSFEEAMKAMKTTGCNLDKVNIIPNALMTPLIPSSMIKSEDVTPMEVTAEKRSSTIFKTTKSVGSTQQTLENISNIAGNGSFSSPSSSHLPSENEKQQQIQPKAYNPETLTTIQTQDISQPGTFPAVSASSQLPNSDALLQQATQFQTRETQSREILQSDGTVVNLSQLTEASQQQQQSPLQEQAQTLQQQISSNIFPSPNSVSQLQNTIQQLQAGSFTGSTASGSSGSVDLVQQVLEAQQQLSSVLFSAPDGNENVQEQLSADIFQQVSQIQSGVSPGMFSSTEPTVHTRPDNLLPGRAESVHPQSENTLSNQQQQQQQQQQVMESSAAMVMEMQQSICQAAAQIQSELFPSTASANGNLQQSPVYQQTSHMMSALSTNEDMQMQCELFSSPPAVSGNETSTTTTQQVATPGTTMFQTSSSGDGEETGTQAKQIQNSVFQTMVQMQHSGDNQPQVNLFSSTKSMMSVQNSGTQQQGNGLFQQGNEMMSLQSGNFLQQSSHSQAQLFHPQNPIADAQNLSQETQGSLFHSPNPIVHSQTSTTSSEQMQPPMFHSQSTIAVLQGSSVPQDQQSTNIFLSQSPMNNLQTNTVAQEAFFAAPNSISPLQSTSNSEQQAAFQQQAPISHIQTPMLSQEQAQPPQQGLFQPQVALGSLPPNPMPQSQQGTMFQSQHSIVAMQSNSPSQEQQQQQQQQQQQQQQQQQSILFSNQNTMATMASPKQPPPNMIFNPNQNPMANQEQQNQSIFHQQSNMAPMNQEQQPMQFQSQSTVSSLQNPGPTQSESSQTPLFHSSPQIQLVQGSPSSQEQQVTLFLSPASMSALQTSINQQDMQQSPLYSPQNNMPGIQGATSSPQPQATLFHNTAGGTMNQLQNSPGSSQQTSGMFLFGIQNNCSQLLTSGPATLPDQLMAISQPGQPQNEGQPPVTTLLSQQMPENSPLASSINTNQNIEKIDLLVSLQNQGNNLTGSF

SEQ ID NO: 15360 - protein, 943 aa, Homo Sapiens
MPSTSFPVPSKFPLGPAAAVFGRGETLGPAPRAGGTMKSAEEEHYGYASSNVSPALPLPTAHSTLPAPCHNLQTSTPGIIPPADHPSGYGAALDGGPAGYFLSSGHTRPDGAPALESPRIEITSCLGLYHNNNQFFHDVEVEDVLPSSKRSPSTATLSLPSLEAYRDPSCLSPASSLSSRSCNSEASSYESNYSYPYASPQTSPWQSPCVSPKTTDPEEGFPRGLGACTLLGSPRHSPSTSPRASVTEESWLGARSSRPASPCNKRKYSLNGRQPPYSPHHSPTPSPHGSPRVSVTDDSWLGNTTQYTSSAIVAAINALTTDSSLDLGDGVPVKSRKTTLEQPPSVALKVEPVGEDLGSPPPPADFAPEDYSSFQHIRKGGFCDQYLAVPQHPYQWAKPKPLSPTSYMSPTLPALDWQLPSHSGPYELRIEVQPKSHHRAHYETEGSRGAVKASAGGHPIVQLHGYLENEPLMLQLFIGTADDRLLRPHAFYQVHRITGKTVSTTSHEAILSNTKVLEIPLLPENSMRAVIDCAGILKLRNSDIELRKGETDIGRKNTRVRLVFRVHVPQPSGRTLSLQVASNPIECSQRSAQELPLVEKQSTDSYPVVGGKKMVLSGHNFLQDSKVIFVEKAPDGHHVWEMEAKTDRDLCKPNSLVVEIPPFRNQRITSPVHVSFYVCNGKRKRSQYQRFTYLPANVPIIKTEPTDDYEPAPTCGPVSQGLSPLPRPYYSQQLAMPPDPSSCLVAGFPPCPQRSTLMPAAPGVSPKLHDLSPAAYTKGVASPGHCHLGLPQPAGEAPAVQDVPRPVATHPGSPGQPPPALLPQQVSAPPSSSCPPGLEHSLCPSSPSPPLPPATQEPTCLQPCSPACPPATGRPQHLPSTVRRDESPTAGPRLLPEVHEDGSPNLAPIPVTVKREPEELDQLYLDDVNEIIRNDLSSTSTHS

SEQ ID NO: 15361 - protein, 925 aa, Homo Sapiens
MNAPERQPQPDGGDAPGHEPGGSPQDELDFSILFDYEYLNPNEEEPNAHKVASPPSGPAYPDDVLDYGLKPYSPLASLSGEPPGRFGEPDRVGPQKFLSAAKPAGASGLSPRIEITPSHELIQAVGPLRMRDAGLLVEQPPLAGVAASPRFTLPVPGFEGYREPLCLSPASSGSSASFISDTFSPYTSPCVSPNNGGPDDLCPQFQNIPAHYSPRTSPIMSPRTSLAEDSCLGRHSPVPRPASRSSSPGAKRRHSCAEALVALPPGASPQRSRSPSPQPSSHVAPQDHGSPAGYPPVAGSAVIMDALNSLATDSPCGIPPKMWKTSPDPSPVSAAPSKAGLPRHIYPAVEFLGPCEQGERRNSAPESILLVPPTWPKPLVPAIPICSIPVTASLPPLEWPLSSQSGSYELRIEVQPKPHHRAHYETEGSRGAVKAPTGGHPVVQLHGYMENKPLGLQIFIGTADERILKPHAFYQVHRITGKTVTTTSYEKIVGNTKVLEIPLEPKNNMRATIDCAGILKLRNADIELRKGETDIGRKNTRVRLVFRVHIPESSGRIVSLQTASNPIECSQRSAHELPMVERQDTDSCLVYGGQQMILTGQNFTSESKVVFTEKTTDGQQIWEMEATVDKDKSQPNMLFVEIPEYRNKHIRTPVKVNFYVINGKRKRSQPQHFTYHPVPAIKTEPTDEYDPTLICSPTHGGLGSQPYYPQHPMVAESPSCLVATMAPCQQFRTGLSSPDARYQQQNPAAVLYQRSKSLSPSLLGYQQPALMAAPLSLADAHRSVLVHAGSQGQSSALLHPSPTNQQASPVIHYSPTNQQLRCGSHQEFQHIMYCENFAPGTTRPGPPPVSQGQRLSPGSYPTVIQQQNATSQRAAKNGPPVSDQKEVLPAGVTIKQEQNLDQTYLDDVNEIIRKEFSGPPARNQT

SEQ ID NO: 15362 - protein, 1075 aa, Homo Sapiens
MTTANCGAHDELDFKLVFGEDGAPAPPPPGSRPADLEPDDCASIYIFNVDPPPSTLTTPLCLPHHGLPSHSSVLSPSFQLQSHKNYEGTCEIPESKYSPLGGPKPFECPSIQITSISPNCHQELDAHEDDLQINDPEREFLERPSRDHLYLPLEPSYRESSLSPSPASSISSRSWFSDASSCESLSHIYDDVDSELNEAAARFTLGSPLTSPGGSPGGCPGEETWHQQYGLGHSLSPRQSPCHSPRSSVTDENWLSPRPASGPSSRPTSPCGKRRHSSAEVCYAGSLSPHHSPVPSPGHSPRGSVTEDTWLNASVHGGSGLGPAVFPFQYCVETDIPLKTRKTSEDQAAILPGKLELCSDDQGSLSPARETSIDDGLGSQYPLKKDSCGDQFLSVPSPFTWSKPKPGHTPIFRTSSLPPLDWPLPAHFGQCELKIEVQPKTHHRAHYETEGSRGAVKASTGGHPVVKLLGYNEKPINLQMFIGTADDRYLRPHAFYQVHRITGKTVATASQEIIIASTKVLEIPLLPENNMSASIDCAGILKLRNSDIELRKGETDIGRKNTRVRLVFRVHIPQPSGKVLSLQIASIPVECSQRSAQELPHIEKYSINSCSVNGGHEMVVTGSNFLPESKIIFLEKGQDGRPQWEVEGKIIREKCQGAHIVLEVPPYHNPAVTAAVQVHFYLCNGKRKKSQSQRFTYTPVLMKQEHREEIDLSSVPSLPVPHPAQTQRPSSDSGCSHDSVLSGQRSLICSIPQTYASMVTSSHLPQLQCRDESVSKEQHMIPSPIVHQPFQVTPTPPVGSSYQPMQTNVVYNGPTCLPINAASSQEFDSVLFQQDATLSGLVNLGCQPLSSIPFHSSNSGSTGHLLAHTPHSVHTLPHLQSMGYHCSNTGQRSLSSPVADQITGQPSSQLQPITYGPSHSGSATTASPAASHPLASSPLSGPPSPQLQPMPYQSPSSGTASSPSPATRMHSGQHSTQAQSTGQGGLSAPSSLICHSLCDPASFPPDGATVSIKPEPEDREPNFATIGLQDITLDDVNEIIGRDMSQISVSQGAGVSRQAPLPSPESLDLGRSDGL

SEQ ID NO: 15363 - protein, 902 aa, Homo Sapiens
MGAASCEDEELEFKLVFGEEKEAPPLGAGGLGEELDSEDAPPCCRLALGEPPPYGAAPIGIPRPPPPRPGMHSPPPRPAPSPGTWESQPARSVRLGGPGGGAGGAGGGRVLECPSIRITSISPTPEPPAALEDNPDAWGDGSPRDYPPPEGFGGYREAGGQGGGAFFSPSPGSSSLSSWSFFSDASDEAALYAACDEVESELNEAASRFGLGSPLPSPRASPRPWTPEDPWSLYGPSPGGRGPEDSWLLLSAPGPTPASPRPASPCGKRRYSSSGTPSSASPALSRRGSLGEEGSEPPPPPPLPLARDPGSPGPFDYVGAPPAESIPQKTRRTSSEQAVALPRSEEPASCNGKLPLGAEESVAPPGGSRKEVAGMDYLAVPSPLAWSKARIGGHSPIFRTSALPPLDWPLPSQYEQLELRIEVQPRAHHRAHYETEGSRGAVKAAPGGHPVVKLLGYSEKPLTLQMFIGTADERNLRPHAFYQVHRITGKMVATASYEAVVSGTKVLEMTLLPENNMAANIDCAGILKLRNSDIELRKGETDIGRKNTRVRLVFRVHVPQGGGKVVSVQAASVPIECSQRSAQELPQVEAYSPSACSVRGGEELVLTGSNFLPDSKVVFIERGPDGKLQWEEEATVNRLQSNEVTLTLTVPEYSNKRVSRPVQVYFYVSNGRRKRSPTQSFRFLPVICKEEPLPDSSLRGFPSASATPFGTDMDFSPPRPPYPSYPHEDPACETPYLSEGFGYGMPPLYPQTGPPPSYRPGLRMFPETRGTTGCAQPPAVSFLPRPFPSDPYGGRGSSFSLGLPFSPPAPFRPPPLPASPPLEGPFPSQSDVHPLPAEGYNKVGPGYGPGEGAPEQEKSRGGYSSGFRDSVPIQGITLEEVSEIIGRDLSGFPAPPGEEPPA

SEQ ID NO: 15364 - protein, 373 aa, Homo Sapiens
MSPCPPQQSRNRVIQLSTSELGEMELTWQEIMSITELQGLNAPSEPSFEPQAPAPYLGPPPPTTYCPCSIHPDSGFPLPPPPYELPASTSHVPDPPYSYGNMAIPVSKPLSLSGLLSEPLQDPLALLDIGLPAGPPKPQEDPESDSGLSLNYSDAESLELEGTEAGRRRSEYVEMYPVEYPYSLMPNSLAHSNYTLPAAETPLALEPSSGPVRAKPTARGEAGSRDERRALAMKIPFPTDKIVNLPVDDFNELLARYPLTESQLALVRDIRRRGKNKVAAQNCRKRKLETIVQLERELERLTNERERLLRARGEADRTLEVMRQQLTELYRDIFQHLRDESGNSYSPEEYALQQAADGTIFLVPRGTKMEATD

SEQ ID NO: 15365 - protein, 772 aa, Homo Sapiens; identical to SEQ ID NO: 9337

SEQ ID NO: 15366 - protein, 605 aa, Homo Sapiens
MMDLELPPPGLPSQQDMDLIDILWRQDIDLGVSREVFDFSQRRKEYELEKQKKLEKERQEQLQKEQEKAFFAQLQLDEETGEFLPIQPAQHIQSETSGSANYSQVAHIPKSDALYFDDCMQLLAQTFPFVDDNEVSSATFQSLVPDIPGHIESPVFIATNQAQSPETSVAQVAPVDLDGMQQDIEQVWEELLSIPELQCLNIENDKLVETTMVPSPEAKLTEVDNYHFYSSIPSMEKEVGNCSPHFLNAFEDSFSSILSTEDPNQLTVNSLNSDATVNTDFGDEFYSAFIAEPSISNSMPSPATLSHSLSELLNGPIDVSDLSLCKAFNQNHPESTAEFNDSDSGISLNTSPSVASPEHSVESSSYGDTLLGLSDSEVEELDSAPGSVKQNGPKTPVHSSGDMVQPLSPSQGQSTHVHDAQCENTPEKELPVSPGHRKTPFTKDKHSSRLEAHLTRDELRAKALHIPFPVEKIINLPVVDFNEMMSKEQFNEAQLALIRDIRRRGKNKVAAQNCRKRKLENIVELEQDLDHLKDEKEKLLKEKGENDKSLHLLKKQLSTLYLEVFSMLRDEDGKPYSPSEYSLQQTRDGNVFLVPKSKKPDVKKN

SEQ ID NO: 15367 - protein, 694 aa, Homo Sapiens; identical to SEQ ID NO: 9347

SEQ ID NO: 15368 - protein, 509 aa, Homo Sapiens
MYSPLCLTQDEFHPFIEALLPHVRAFAYTWFNLQARKRKYFKKHEKRMSKEEERAVKDELLSEKPEVKQKWASRLLAKLRKDIRPEYREDFVLTVTGKKPPCCVLSNPDQKGKMRRIDCLRQADKVWRLDLVMVILFKGIPLESTDGERLVKSPQCSNPGLCVQPHHIGVSVKELDLYLAYFVHAADSSQSESPSQPSDADIKDQPENGHLGFQDSFVTSGVFSVTELVRVSQTPIAAGTGPNFSLSDLESSSYYSMSPGAMRRSLPSTSSTSSTKRLKSVEDEMDSPGEEPFYTGQGRSPGSGSQSSGWHEVEPGMPSPTTLKKSEKSGFSSPSPSQTSSLGTAFTQHHRPVITGPRASPHATPSTLHFPTSPIIQQPGPYFSHPAIRYHPQETLKEFVQLVCPDAGQQAGQVGFLNPNGSSQGKVHNPFLPTPMLPPPPPPPMARPVPLPVPDTKPPTTSTEGGAASPTSPTYSTPSTSPANRFVSVGPRDPSFVNIPQQTQSWYLG

SEQ ID NO: 15369 - protein, 420 aa, Homo Sapiens
MMYSPICLTQDEFHPFIEALLPHVRAIAYTWFNLQARKRKYFKKHEKRMSKDEERAVKDELLSEKPEIKQKWASRLLAKLRKDIRQEYREDFVLTVTGKKHPCCVLSNPDQKGKIRRIDCLRQADKVWRLDLVMVILFKGIPLESTDGERLMKSPHCTNPALCVQPHHITVSVKELDLFLAYYVQEQDSGQSGSPSHNDPAKNPPGYLEDSFVKSGVFNVSELVRVSRTPITQGTGVNFPIGEIPSQPYYHDMNSGVNLQRSLSSPPSSKRPKTISIDENMEPSPTGDFYPSPSSPAAGSRTWHERDQDMSSPTTMKKPEKPLFSSASPQDSSPRLSTFPQHHHPGIPGVAHSVISTRTPPPPSPLPFPTQAILPPAPSSYFSHPTIRYPPHLNPQDTLKNYVPSYDPSSPQTSQSWYLG

SEQ ID NO: 15370 - protein, 508 aa, Homo Sapiens
MYSSPLCLTQDEFHPFIEALLPHVRAFAYTWFNLQARKRKYFKKHEKRMSKDEERAVKDELLGEKPEVKQKWASRLLAKLRKDIRPECREDFVLSITGKKAPGCVLSNPDQKGKMRRIDCLRQADKVWRLDLVMVILFKGIPLESTDGERLVKAAQCGHPVLCVQPHHIGVAVKELDLYLAYFVRERDAEQSGSPRTGMGSDQEDSKPITLDTTDFQESFVTSGVFSVTELIQVSRTPVVTGTGPNFSLGELQGHLAYDLNPASTGLRRTLPSTSSSGSKRHKSGSMEEDVDTSPGGDYYTSPSSPTSSSRNWTEDMEGGISSPVKKTEMDKSPFNSPSPQDSPRLSSFTQHHRPVIAVHSGIARSPHPSSALHFPTTSILPQTASTYFPHTAIRYPPHLNPQDPLKDLVSLACDPASQQPGPLNGSGQLKMPSHCLSAQMLAPPPPGLPRLALPPATKPATTSEGGATSPTSPSYSPPDTSPANRSFVGLGPRDPAGIYQAQSWYLG

SEQ ID NO: 15371 - protein, 462 aa, Homo Sapiens
MQLRKMQTVKKEQASLDASSNVDKMMVLNSALTEVSEDSTTGEELLLSEGSVGKNKSSACRRKREFIPDEKKDAMYWEKRRKNNEAAKRSREKRRLNDLVLENKLIALGEENATLKAELLSLKLKFGLISSTAYAQEIQKLSNSTAVYFQDYQTSKSNVSSFVDEHEPSMVSSSCISVIKHSPQSSLSDVSEVSSVEHTQESSVQGSCRSPENKFQIIKQEPMELESYTREPRDDRGSYTASIYQNYMGNSFSGYSHSPPLLQVNRSSSNSPRTSETDDGVVGKSSDGEDEQQVPKGPIHSPVELKHVHATVVKVPEVNSSALPHKLRIKAKAMQIKVEAFDNEFEATQKLSSPIDMTSKRHFELEKHSAPSMVHSSLTPFSVQVTNIQDWSLKSEHWHQKELSGKTQNSFKTGVVEMKDSGYKVSDPENLYLKQGIANLSAEVVSLKRLIATQPISASDSG

SEQ ID NO: 15372 - protein, 502 aa, Homo Sapiens
MYSPYCLTQDEFHPFIEALLPHVRAFSYTWFNLQARKRKYFKKHEKRMSKDEERAVKDELLGEKPEIKQKWASRLLAKLRKDIRPEFREDFVLTITGKKPPCCVLSNPDQKGKIRRIDCLRQADKVWRLDLVMVILFKGIPLESTDGERLYKSPQCSNPGLCVQPHHIGVTIKELDLYLAYFVHTPESGQSDSSNQQGDADIKPLPNGHLSFQDCFVTSGVWNVTELVRVSQTPVATASGPNFSLADLESPSYYNINQVTLGRRSITSPPSTSTTKRPKSIDDSEMESPVDDVFYPGTGRSPAAGSSQSSGWPNDVDAGPASLKKSGKLDFCSALSSQGSSPRMAFTHHPLPVLAGVRPGSPRATASALHFPSTSIIQQSSPYFTHPTIRYHHHHGQDSLKEFVQFVCSDGSGQATGQPNGSGQGKVPGSFLLPPPPPVARPVPLPMPDSKSTSTAPDGAALTPPSPSFATTGASSANRFVSIGPRDGNFLNIPQQSQSWFL

SEQ ID NO: 15373 - protein, 968 aa, Homo Sapiens
MAEDDPYLGRPEQMFHLDPSLTHTIFNPEVFQPQMALPTDGPYLQILEQPKQRGFRFRYVCEGPSHGGLPGASSEKNKKSYPQVKICNYVGPAKVIVQLVTNGKNIHLHAHSLVGKHCEDGICTVTAGPKDMVVGFANLGILHVTKKKVFETLEARMTEACIRGYNPGLLVHPDLAYLQAEGGGDRQLGDREKELIRQAALQQTKEMDLSVVRLMFTAFLPDSTGSFTRRLEPVVSDAIYDSKAPNASNLKIVRMDRTAGCVTGGEEIYLLCDKVQKDDIQIRFYEEEENGGVWEGFGDFSPTDVHRQFAIVFKTPKYKDINITKPASVFVQLRRKSDLETSEPKPFLYYPEIKDKEEVQRKRQKLMPNFSDSFGGGSGAGAGGGGMFGSGGGGGGTGSTGPGYSFPHYGFPTYGGITFHPGTTKSNAGMKHGTMDTESKKDPEGCDKSDDKNTVNLFGKVIETTEQDQEPSEATVGNGEVTLTYATGTKEESAGVQDNLFLEKAMQLAKRHANALFDYAVTGDVKMLLAVQRHLTAVQDENGDSVLHLAIIHLHSQLVRDLLEVTSGLISDDIINMRNDLYQTPLHLAVITKQEDVVEDLLRAGADLSLLDRLGNSVLHLAAKEGHDKVLSILLKHKKAALLLDHPNGDGLNAIHLAMMSNSLPCLLLLVAAGADVNAQEQKSGRTALHLAVEHDNISLAGCLLLEGDAHVDSTTYDGTTPLHIAAGRGSTRLAALLKAAGADPLVENFEPLYDLDDSWENAGEDEGVVPGTTPLDMATSWQVFDILNGKPYEPEFTSDDLLAQGDMKQLAEDVKLQLYKLLEIPDPDKNWATLAQKLGLGILNNAFRLSPAPSKTLMDNYEVSGGTVRELVEALRQMGYTEAIEVIQAASSPVKTTSQAHSLPLSPASTRQQIDELRDSDSVCDSGVETSFRKLSFTESLTSGASLLTLNKMPHDYGQEGPLEGKI

SEQ ID NO: 15374 - protein, 900 aa, Homo Sapiens
MESCYNPGLDGIIEYDDFKLNSSIVEPKEPAPETADGPYLVIVEQPKQRGFRFRYGCEGPSHGGLPGASSEKGRKTYPTVKICNYEGPAKIEVDLVTHSDPPRAHAHSLVGKQCSELGICAVSVGPKDMTAQFNNLGVLHVTKKNMMGTMIQKLQRQRLRSRPQGLTEAEQRELEQEAKELKKVMDLSIVRLRFSAFLRASDGSFSLPLKPVISQPIHDSKSPGASNLKISRMDKTAGSVRGGDEVYLLCDKVQKDDIEVRFYEDDENGWQAFGDFSPTDVHKQYAIVFRTPPYHKMKIERPVTVFLQLKRKRGGDVSDSKQFTYYPLVEDKEEVQRKRRKALPTFSQPFGGGSHMGGGSGGAAGGYGGAGGGGSLGFFPSSLAYSPYQSGAGPMGCYPGGGGGAQMAATVPSRDSGEEAAEPSAPSRTPQCEPQAPEMLQRAREYNARLFGLAQRSARALLDYGVTADARALLAGQRHLLTAQDENGDTPLHLAIIHGQTSVIEQIVYVIHHAQDLGVVNLTNHLHQTPLHLAVITGQTSVVSFLLRVGADPALLDRHGDSAMHLALRAGAGAPELLRALLQSGAPAVPQLLHMPDFEGLYPVHLAVRARSPECLDLLVDSGAEVEATERQGGRTALHLATEMEELGLVTHLVTKLRANVNARTFAGNTPLHLAAGLGYPTLTRLLLKAGADIHAENEEPLCPLPSPPTSDSDSDSEGPEKDTRSSFRGHTPLDLTCSTKVKTLLLNAAQNTMEPPLTPPSPAGPGLSLGDTALQNLEQLLDGPEAQGSWAELAERLGLRSLVDTYRQTTSPSGSLLRSYELAGGDLAGLLEALSDMGLEEGVRLLRGPETRDKLPSTAEVKEDSAYGSQSVEQEAEKLGPPPEPPGGLCHGHPQPQVH

SEQ ID NO: 15375 - protein, 317 aa, Homo Sapiens
MFQAAERPQEWAMEGPRDGLKKERLLDDRHDSGLDSMKDEEYEQMVKELQEIRLEPQEVPRGSEPWKQQLTEDGDSFLHLAIIHEEKALTMEVIRQVKGDLAFLNFQNNLQQTPLHLAVITNQPEIAEALLGAGCDPELRDFRGNTPLHLACEQGCLASVGVLTQSCTTPHLHSILKATNYNGHTCLHLASIHGYLGIVELLVSLGADVNAQEPCNGRTALHLAVDLQNPDLVSLLLKCGADVNRVTYQGYSPYQLTWGRPSTRIQQQLGQLTLENLQMLPESEDEESYDTESEFTEFTEDELPYDDCVFGGQRLTL

SEQ ID NO: 15376 - protein, 356 aa, Homo Sapiens
MAGVACLGKAADADEWCDSGLGSLGPDAAAPGGPGLGAELGPGLSWAPLVFGYVTEDGDTALHLAVIHQHEPFLDFLLGFSAGTEYMDLQNDLGQTALHLAAILGETSTVEKLYAAGAGLCVAERRGHTALHLACRVGAHACARALLQPRPRRPREAPDTYLAQGPDRTPDTNHTPVALYPDSDLEKEEEESEEDWKLQLEAENYEGHTPLHVAVIHKDVEMVRLLRDAGADLDKPEPTCGRSPLHLAVEAQAADVLELLLRAGANPAARMYGGRTPLGSAMLRPNPILARLLRAHGAPEPEGEDEKSGPCSSSSDSDSGDEGDEYDDIVVHSSRSQTRLPPTPASKPLPDDPRPV

SEQ ID NO: 15377 - protein, 313 aa, Homo Sapiens
MEAGPWRVSAPPSGPPQFPAVVPGPSLEVARAHMLALGPQQLLAQDEEGDTLLHLFAARGLRWAAYAAAEVLQVYRRLDIREHKGKTPLLVAAAANQPLIVEDLLNLGAEPNAADHQGRSVLHVAATYGLPGVLLAVLNSGVQVDLEARDFEGLTPLHTAILALNVAMRPSDLCPRVLSTQARDRLDCVHMLLQMGANHTSQEIKSNKTVLHLAVQAANPTLVQLLLELPRGDLRTFVNMKAHGNTALHMAAALPPGPAQEAIVRHLLAAGADPTLRNLENEQPVHLLRPGPGPEGLRQLLKRSRVAPPGLSS

SEQ ID NO: 15378 - protein, 500 aa, Homo Sapiens
MNQRRSESRPGNHRLQAYAEPGKGDSGGAGPLSGSARRGRGGGGAIRVRRPCWSGGAGRGGGPAWAVRLPTVTAGWTWPALRTLSSLRAGPSEPHSPGRRPPRAGRPLCQADPQPGKAARRSLEPDPAQTGPRPARAAGMSEARKGPDEAEESQYDSGIESLRSLRSLPESTSAPASGPSDGSPQPCTHPPGPVKEPQEKEDADGERADSTYGSSSLTYTLSLLGGPEAEDPAPRLPLPHVGALSPQQLEALTYISEDGDTLVHLAVIHEAPAVLLCCLALLPQEVLDIQNNLYQTALHLAVHLDQPGAVRALVLKGASRALQDRHGDTALHVACQRQHLACARCLLEGRPEPGRGTSHSLDLQLQNWQGLACLHIATLQKNQPLMELLLRNGADIDVQEGTSGKTALHLAVETQERGLVQFLLQAGAQVDARMLNGCTPLHLAAGRGLMGISSTLCKAGADSLLRNVEDETPQDLTEESLVLLPFDDLKISGKLLLCTD

SEQ ID NO: 15379 - protein, 381 aa, Homo Sapiens
MSNPSPQVPEEEASTSVCRPKSSMASTSRRQRRERRFRRYLSAGRLVRAQALLQRHPGLDVDAGQPPPLHRACARHDAPALCLLLRLGADPAHQDRHGDTALHAAARQGPDAYTDFFLPLLSRCPSAMGIKNKDGETPGQILGWGPPWDSAEEEEEDDASKEREWRQKLQGELEDEWQEVMGRFEGDASHETQEPESFSAWSDRLAREHAQKCQQQQREAEGSCRPPRAEGSSQSWRQQEEEQRLFRERARAKEEELRESRARRAQEALGDREPKPTRAGPREEHPRGAGRGSLWRFGDVPWPCPGGGDPEAMAAALVARGPPLEEQGALRRYLRVQQVRWHPDRFLQRFRSQIETWELGRVMGAVTALSQALNRHAEALK

SEQ ID NO: 15380 - protein, 718 aa, Homo Sapiens
MIVDKLLDDSRGGEGLRDAAGGCGLMTSPLNLSYFYGASPPAAAPGACDASCSVLGPSAPGSPGSDSSDFSSASSVSSCGAVESRSRGGARAERQPVEPHMGVGRQQRGPFQGVRVKNSVKELLLHIRSHKQKASGQAVDDFKTQGVNIEQFRELKNTVSYSGKRKGPDSLSDGPACKRPALLHSQFLTPPQTPTPGESMEDVHLNEPKQESSADLLQNIINIKNECSPVSLNTVQVSWLNPVVVPQSSPAEQCQDFHGGQVFSPPQKCQPFQVRGSQQMIDQASLYQYSPQNQHVEQQPHYTHKPTLEYSPFPIPPQSPAYEPNLFDGPESQFCPNQSLVSLLGDQRESENIANPMQTSSSVQQQNDAHLHSFSMMPSSACEAMVGHEMASDSSNTSLPFSNMGNPMNTTQLGKSLFQWQVEQEESKLANISQDQFLSKDADGDTFLHIAVAQGRRALSYVLARKMNALHMLDIKEHNGQSAFQVAVAANQHLIVQDLVNIGAQVNTTDCWGRTPLHVCAEKGHSQVLQAIQKGAVGSNQFVDLEATNYDGLTPLHCAVIAHNAVVHELQRNQQPHSPEVQELLLKNKSLVDTIKCLIQMGAAVEAKDRKSGRTALHLAAEEANLELIRLFLELPSCLSFVNAKAYNGNTALHVAASLQYRLTQLDAVRLLMRKGADPSTRNLENEQPVHLVPDGPVGEQIRRILKGKSIQQRAPPY

SEQ ID NO: 15381 - protein, 1299 aa, Homo Sapiens [sequence omitted]

SEQ ID NO: 15382 - protein, 1120 aa, Homo Sapiens
MAEAPPVSGTFKFNTDAAEFIPQEKKNSGLNCGTQRRLDSNRIGRRNYSSPPPCHLSRQVPYDEISAVHQHSYHPSGSKPKSQQTSFQSSPCNKSPKSHGLQNQPWQKLRNEKHHIRVKKAQSLAEQTSDTAGLESSTRSESGTDLREHSPSESEKEVVGADPRGAKPKKATQFVYSYGRGPKVKGKLKCEWSNRTTPKPEDAGPESTKPVGVFHPDSSEASSRKGVLDGYGARRNEQRRYPQKRPPWEVEGARPRPGRNPPKQEGHRHTNAGHRNNMGPIPKDDLNERPAKSTCDSENLAVINKSSRRVDQEKCTVRRQDPQVVSPFSRGKQNHVLKNVETHTGSLIEQLTTEKYECMVCCELVRVTAPVWSCQSCYHVFHLNCIKKWARSPASQADGQSGWRCPACQNVSAHVPNTYTCFCGKVKNPEWSRNEIPHSCGEVCRKKQPGQDCPHSCNLLCHPGPCPPCPAFMTKTCECGRTRHTVRCGQAVSVHCSNPCENILNCGQHQCAELCHGGQCQPCQIILNQVCYCGSTSRDVLCGTDVGKSDGFGDFSCLKICGKDLKCGNHTCSQVCHPQPCQQCPRLPQLVRCCPCGQTPLSQLLELGSSSRKTCMDPVPSCGKVCGKPLPCGSLDFIHTCEKLCHEGDCGPCSRTSVISCRCSFRTKELPCTSLKSEDATFMCDKRCNKKRLCGRHKCNEICCVDKEHKCPLICGRKLRCGLHRCEEPCHRGNCQTCWQASFDELTCHCGASVIYPPVPCGTRPPECTQTCARVHECDHPVYHSCHSEEKCPPCTFLTQKWCMGKHEFRSNIPCHLVDISCGLPCSATLPCGMHKCQRLCHKGECLVDEPCKQPCTTPRADCGHPCMAPCHTSSPCPVTACKAKVELQCECGRRKEMVICSEASSTYQRIAAISMASKITDMQLGGSVEISKLITKKEVHQARLECDEECSALERKKRLAEAFHISEDSDPFNIRSSGSKFSDSLKEDARKDLKFVSDVEKEMETLVEAVNKGKNSKKSHSFPPMNRDHRRIIHDLAQVYGLESVSYDSEPKRNVVVTAIRGKSVCPPTTLTGVLEREMQARPPPPIPHHRHQSDKNPGSSNLQKITKEPIIDYFDVQD

SEQ ID NO: 15383 - protein, 911 aa, Homo Sapiens
MEASWRQVAGGRGRSRGRATAAPSGNGVHLRGAGGGREKGSVGAVPSGTSPGGVATTAAAGSRHSPAGSQALQTTAASELMSQKKFEEIKKANQAAARKLVEEQFSSSSEEGDEDFEGKQGKILANTFITYTTQTDGDTRELERTKQYVNEAFQAGAMTCLICIASVKRNQAVWSCSGCFCIFHMPCIQKWAKDSQFLVSSVTDDDFGKKDCPWPCPKCRFEYKRSETPSRYYCYCGKVEDPPLDPWLVPHSCGQVCEREFKPPCGHKCLLLCHPGPCPPCPKMVTTTCYCKKAKPIPRRCSAKEWSCQLPCGQKLLCGQHKCENPCHAGSCQPCPRVSRQKCVCGKKVAERSCASPLWHCDQVCGKTLPCGNHTCEQVCHVGACGECPRSGKRFCPCQKSKFSLPCTEDVPTCGDSCDKVLECGIHRCSQRCHRGPCETCRQEVEKHCRCGKHTKRMPCHKPYLCETKCVKMRDCQKHQCRRKCCPGNCPPCDQNCGRTLGCRNHKCPSVCHRGSCYPCPETVDVKCNCGNTKVTVPCGRERTTRPPKCKEQCSRPPTCHHTSQEKHRCHFGSCPPCHQPCQKVLEKCGHLCPAPCHDQALIKQTGRHQPTGPWEQPSEPAFIQTALPCPPCQVPIPMECLGKHEVSPLPCHAVGPYSCKRVCGRILDCQNHTCMKECHKVTKTDGCTGKNKAGPECLHCEEGCSKSRPLGCLHPCILRCHPGECPPCVQMLRIKCHCKITSLYVECRKITTADVNEKNLLSCCKNQCPKELPCGHRCKEMCHPGECPFNCNQKVKLRCPCKRIKKELQCNKVRENQVSIECDTTCKEMKRKASEIKEAEAKAALEEEKRRQQAELEAFENRLKGRRKKNRKRDEVAVELSLWQKHKYYLISVCGVVVVVFAWYITHDVN

SEQ ID NO: 15384 - protein, 347 aa, Homo Sapiens
MEQYTANSNSSTEQIVVQAGQIQQQQQGGVTAVQLQTEAQVASASGQQVQTLQVVQGQPLMVQVSGGQLITSTGQPIMVQAVPGGQGQTIMQVPVSGTQGLQQIQLVPPGQIQIQGGQAVQVQGQQGQTQQIIIQQPQTAVTAGQTQTQQQIAVQGQQVAQTAEGQTIVYQPVNADGTILQQVTVPVSGMITIPAASLAGAQIVQTGANTNTTSSGQGTVTVTLPVAGNVVNSGGMVMMVPGAGSVPAIQRIPLPGAEMLEEEPLYVNAKQYHRILKRRQARAKLEAEGKIPKERRKYLHESRHRHAMARKRGEGGRFFSPKEKDSPHMQDPNQADEEAMTQIIRVS

SEQ ID NO: 15385 - protein, 207 aa, Homo Sapiens
MTMDGDSSTTDASQLGISADYIGGSHYVIQPHDDTEDSMNDHEDTNGSKESFREQDIYLPIANVARIMKNAIPQTGKIAKDAKECVQECVSEFISFITSEASERCHQEKRKTINGEDILFAMSTLGFDSYVEPLKLYLQKFREAMKGEKGIGGAVTATDGLSEELTEEAFTNQLPAGLITTDGQQQNVMVYTTSYQQISGVQQIQFS

SEQ ID NO: 15386 - protein, 458 aa, Homo Sapiens
MSTEGGFGGTSSSDAQQSLQSFWPRVMEEIRNLTVKDFRVQELPLARIKKIMKLDEDVKMISAEAPVLFAKAAQIFITELTLRAWIHTEDNKRRTLQRNDIAMAITKFDQFDFLIDIVPRDELKPPKRQEEVRQSVTPAEPVQYYFTLAQQPTAVQVQGQQQGQQTTSSTTTIQPGQIIIAQPQQGQTTPVTMQVGEGQQVQIVQAQPQGQAQQAQSGTGQTMQVMQQIITNTGEIQQIPVQLNAGQLQYIRLAQPVSGTQVVQGQIQTLATNAQQGQRNASQGKPRRCLKETLQITQTEVQQGQQQFSQFTDGQRNSVQQARVSELTGEAEPREVKATGNSTPCTSSLPTTHPPSHRAGASCVCCSQPQQSSTSPPPSDALQWVVVEVSGTPNQLETHRELHAPLPGMTSLSPLHPSQQLYQIQQVTMPAGQDLAQPMFIQSANQPSDGQAPQVTGD

SEQ ID NO: 15387 - protein, 133 aa, Homo Sapiens
MMLNSDTMELDLPPTHSETESGFSDCGGGAGPDGAGPGGPGGGQARGPEPGEPGRKDLQHLSREERRRRRRATAKYRTAHATRERIRVEAFNLAFAELRKLLPTLPPDKKLSKIEILRLAICYISYLNHVLDV

SEQ ID NO: 15388 - protein, 135 aa, Homo Sapiens
MMLSPDQAADSDHPSSAHSDPESLGGTDTKVLGSVSDLEPVEEAEGDGKGGSRAALYPHPQQLSREEKRRRRRATAKYRSAHATRERIRVEAFNLAFAELRKLLPTLPPDKKLSKIEILRLAICYISYLNHVLDV

SEQ ID NO: 15389 - protein, 690 aa, Homo Sapiens
MEKILQMAEGIDIGEMPSYDLVLSKPSKGQKRHLSTCDGQNPPKKQAGSKFHARPRFEPVHFVASSSKDERQEDPYGPQTKEVNEQTHFASMPRDIYQDYTQDSFSIQDGNSQYCDSSGFILTKDQPVTANMYFDSGNPAPSTTSQQANSQSTPEPSPSQTFPESVVAEKQYFIEKLTATIWKNLSNPEMTSGSDKINYTYMLTRCIQACKTNPEYIYAPLKEIPPADIPKNKKLLTDGYACEVRCQNIYLTTGYAGSKNGSRDRATELAVKLLQKRIEVRVVRRKFKHTFGEDLVVCQIGMSSYEFPPALKPPEDLVVLGKDASGQPIFNASAKHWTNFVITENANDAIGILNNSASFNKMSIEYKYEMMPNRTWRCRVFLQDHCLAEGYGTKKTSKHAAADEALKILQKTQPTYPSVKSSQCHTGSSPRGSGKKKDIKDLVVYENSSNPVCTLNDTAQFNRMTVEYVYERMTGLRWKCKVILESEVIAEAVGVKKTVKYEAAGEAVKTLKKTQPTVINNLKKGAVEDVISRNEIQGRSAEEAYKQQIKEDNIGNQLLRKMGWTGGGLGKSGEGIREPISVKEQHKREGLGLDVERVNKIAKRDIEQIIRNYARSESHTDLTFSRELTNDERKQIHQIAQKYGLKSKSHGVGHDRYLVVGRKRRKEDLLDQLKQEGQVGHYELVMPQAN

SEQ ID NO: 15390 - protein, 411 aa, Homo Sapiens
MDGRAELPAFPRAGAPPLAASDTVPAAPEGAGAARPAAPLRPTSFSVLDILDPNKFNSRRRRCVLLGPVAPAACAPCASAPCAPAPAASGRPPRAEELERRALAGAGGVGAAGAEPPNAGDPFKAGEAETNDTNGYSSGGGGHSPSADSGDEVPDDEDDDEDEAPETEAARGAEEARGGGGGLGARGSGCQGAAETDASPGATVDEAAAPGPRENSPVAQGPPGGAAAPGGAGTTPQGTATAAKPKRKRTGSDSKSGKPRRARTAFTYEQLVALENKFKATRYLSVCERLNLALSLSLTETQVKIWFQNRRTKWKKQNPGADTSAPTGGGGGPGPGAGPGTGLPGGLSPLSPSPPMGAPLGMHGPAGYPAHGPGGLVCAAQLPFLSSPAVLSPFVLGSQTYGAPAFYAPHL

SEQ ID NO: 15391 - protein, 310 aa, Homo Sapiens
MLAWQDGGAKAAPSHHKISFSVLDILDPQKFTRAALPAVRPAPREARKSLAEVEAGKDASSRDPVRQLETPDAAGPGAGQASPLEGSEAEEEEDAEDPRRPRLRERAARLLPGLARSPDAPAGALASGEPCEDGGGGPVRSPPGSPGSPRPRRRRLEPNCAKPRRARTAFTYEQLVALENKFRATRYLSVCERLNLALSLSLTETQVKIWFQNRRTKWKKQNPGADGAAQVGGGAPQPGAAGGGGGGGSGGSPGPPGTGALHFQTFPSYSAANVLFPSAASFPLTAAAPGSPFAPFLGPSYLTPFYAPRL

SEQ ID NO: 15392 - protein, 371 aa, Homo Sapiens
MSMSPKHTTPFSVSDILSPLEESYKKVGMEGGGLGAPLAAYRQGQAAPPTAAMQQHAVGHHGAVTAAYHMTAAGVPQLSHSAVGGYCNGNLGNMSELPPYQDTMRNSASGPGWYGANPDPRFPAISRFMGPASGMNMSGMGGLGSLGDVSKNMAPLPSAPRRKRRVLFSQAQVYELERRFKQQKYLSAPEREHLASMIHLTPTQVKIWFQNHRYKMKRQAKDKAAQQQLQQDSGGGGGGGGTGCPQQQQAQQQSPRRVAVPVLVKDGKPCQAGAPAPGAASLQGHAQQQAQHQAQAAQAAAAAISVGSGGAGLGAHPGHQPGSAGQSPDLAHHAASPAALQGQVSSLSHLNSSGSDYGTMSCSTLLYGRTW

SEQ ID NO: 15393 - protein, 273 aa, Homo Sapiens
MSLTNTKTGFSVKDILDLPDTNDEEGSVAEGPEEENEGPEPAKRAGPLGQGALDAVQSLPLKNPFYDSSDNPYTRWLASTEGLQYSLHGLAAGAPPQDSSSKSPEPSADESPDNDKETPGGGGDAGKKRKRRVLFSKAQTYELERRFRQQRYLSAPEREHLASLIRLTPTQVKIWFQNHRYKMKRARAEKGMEVTPLPSPRRVAVPVLVRDGKPCHALKAQDLAAATFQAGIPFSAYSAQSLQHMQYNAQYSSASTPQYPTAHPLVQAQQWTW

SEQ ID NO: 15394 - protein, 364 aa, Homo Sapiens
MMLPSPVTSTPFSVKDILNLEQQHQHFHGAHLQADLEHHFHSAPCMLAAAEGTQFSDGGEEDEEDEGEKLSYLNSLAAADGHGDSGLCPQGYVHTVLRDSCSEPKEHEEEPEVVRDRSQKSCQLKKSLETAGDCKAAEESERPKPRSRRKPRVLFSQAQVFELERRFKQQRYLSAPEREHLASSLKLTSTQVKIWFQNRRYKCKRQRQDKSLELGAHAPPPPPRRVAVPVLVRDGKPCVTPSAQAYGAPYSVGASAYSYNSFPAYGYGNSAAAAAAAAAAAAAAAAYSSSYGCAYPAGGGGGGGGTSAATTAMQPACSAAGGGPFVNVSNLGGFGSGGSAQPLHQGTAAGAACAQGTLQGIRAW

SEQ ID NO: 15395 - protein, 354 aa, Homo Sapiens
MSLSPKHTTPFSVSDILSPIEETYKKFSGAMDGAPPGLGAPLGAAAAYRAPPPGPSSQAATVAGMQPSHAMAGHNAAAAAAAAAAAAAAAATYHMPPGVSQFPHGAMGSYCNGGLGNMGELPAYTDGMRGGAATGWYGANPDPRYSSISRFMGPSAGVNVAGMGSLTGIADAAKSLGPLHAAAAAAAPRRKRRVLFSQAQVYELERRFKQQKYLSAPEREHLASMIHLTPTQVKIWFQNHRYKMKRQAKDKAAQQLQQEGGLGPPPPPPPSPRRVAVPVLVKDGKPCQNGASTPTPGQAGPQPPAPTPAPELEELSPSPPALHGPGGGLAALDAAAGEYSGGVLGANLLYGRTW

SEQ ID NO: 15396 - protein, 324 aa, Homo Sapiens
MFPSPALTPTPFSVKDILNLEQQQRSLAAAGELSARLEATLAPSSCMLAAFKPEAYAGPEAAAPGLPELRAELGRAPSPAKCASAFPAAPAFYPRAYSDPDPAKDPRAEKKELCALQKAVELEKTEADNAERPRARRRRKPRVLFSQAQVYELERRFKQQRYLSAPERDQLASVLKLTSTQVKIWFQNRRYKCKRQRQDQTLELVGLPPPPPPPARRIAVPVLVRDGKPCLGDSAPYAPAYGVGLNPYGYNAYPAYPGYGGAACSPGYSCTAAYPAGPSPAQPATAAANNNFVNFGVGDLNAVQSPGIPQSNSGVSTLHGIRAW

SEQ ID NO: 15397 - protein, 301 aa, Homo Sapiens
MLLSPVTSTPFSVKDILRLERERSCPAASPHPRVRKSPENFQYLRMDAEPRGSEVHNAGGGGGDRKLDGSEPPGGPCEAVLEMDAERMGEPQPGLNAASPLGGGTRVPERGVGNSGDSVRGGRSEQPKARQRRKPRVLFSQAQVLALERRFKQQRYLSAPEREHLASALQLTSTQVKIWFQNRRYKCKRQRQDKSLELAGHPLTPRRVAVPVLVRDGKPCLGPGPGAPAFPSPYSAAVSPYSCYGGYSGAPYGAGYGTCYAGAPSGPAPHTPLASAGFGHGGQNATPQGHLAATLQGVRAW

SEQ ID NO: 15398 - protein, 239 aa, Homo Sapiens
MATSGRLSFTVRSLLDLPEQDAQHLPRREPEPRAPQPDPCAAWLDSERGHYPSSDESSLETSPPDSSQRPSARPASPGSDAEKRKKRRVLFSKAQTLELERRFRQQRYLSAPEREQLASLLRLTPTQVKIWFQNHRYKLKRARAPGAAESPDLAASAELHAAPGLLRRVVVPVLVRDGQPCGGGGGGEVGTAAAQEKCGAPPAAACPLPGYPAFGPGSALGLFPAYQHLASPALVSWNW

SEQ ID NO: 15399 - protein, 234 aa, Homo Sapiens
MLRVPEPRPGEAKAEGAAPPTPSKPLTSFLIQDILRDGAQRQGGRTSSQRQRDPEPEPEPEPEGGRSRAGAQNDQLSTGPRAAPEEAETLAETEPERHLGSYLLDSENTSGALPRLPQTPKQPQKRSRAAFSHTQVIELERKFSHQKYLSAPERAHLAKNLKLTETQVKIWFQNRRYKTKRKQLSSELGDLEKHSSLPALKEEAFSRASLVSVYNSYPYYPYLYCVGSWSPAFW

SEQ ID NO: 15400 - protein, 333 aa, Homo Sapiens
MAVRGANTLTSFSIQAILNKKEERGGLAAPEGRPAPGGTAASVAAAPAVCCWRLFGERDAGALGGAEDSLLASPAGTRTAAGRTAESPEGWDSDSALSEENESRRRCADARGASGAGLAGGSLSLGQPVCELAASKDLEEEAAGRSDSEMSASVSGDRSPRTEDDGVGPRGAHVSALCSGAGGGGGSGPAGVAEEEEEPAAPKPRKKRSRAAFSHAQVFELERRFNHQRYLSGPERADLAASLKLTETQVKIWFQNRRYKTKRRQMAADLLASAPAAKKVAVKVLVRDDQRQYLPGEVLRPPSLLPLQPSYYYPYYCLPGWALSTCAAAAGTQ

SEQ ID NO: 15401 - protein, 367 aa, Homo Sapiens
MLAVGAMEGTRQSAFLLSSPPLAALHSMAEMKTPLYPAAYPPLPAGPPSSSSSSSSSSSPSPPLGTHNPGGLKPPATGGLSSLGSPPQQLSAATPHGINDILSRPSMPVASGAALPSASPSGSSSSSSSSASASSASAAAAAAAAAAAAASSPAGLLAGLPRFSSLSPPPPPPGLYFSPSAAAVAAVGRYPKPLAELPGRTPIFWPGVMQSPPWRDARLACTPHQGSILLDKDGKRKHTRPTFSGQQIFALEKTFEQTKYLAGPERARLAYSLGMTESQVKVWFQNRRTKWRKKHAAEMATAKKKQDSETERLKGASENEEEDDDYNKPLDPNSDDEKITQLLKKHKSSSGGGGGLLLHASEPESSS

SEQ ID NO: 15402 - protein, 277 aa, Homo Sapiens
MDTNRPGAFVLSSAPLAALHNMAEMKTSLFPYALQGPAGFKAPALGGLGAQLPLGTPHGISDILGRPVGAAGGGLLGGLPRLNGLASSAGVYFGPAAAVARGYPKPLAELPGRPPIFWPGVVQGAPWRDPRLAGPAPAGGVLDKDGKKKHSRPTFSGQQIFALEKTFEQTKYLAGPERARLAYSLGMTESQVKVWFQNRRTKWRKRHAVEMASAKKKQDSDAEKLKVGGSDAEDDDEYNRPLDPNSDDEKITRLLKKHKPSNLALVSPCGGGAGDAL

SEQ ID NO: 15403 - protein, 265 aa, Homo Sapiens
MESNLQGTFLLNNTPLAQFPEMKAPVCQYSVQNSFYKLSPPGLGPQLAAGTPHGITDILSRPVAAPNNSLLSGYPHVAGFGGLSSQGVYYSPQVGNFSKAGNEYPTRTRNCWADTGQDWRGGRQCSNTPDPLSDSIHKKKHTRPTFTGHQIFALEKTFEQTKYLAGPERARLAYSLGMTESQVKVWFQNRRTKWRKKSALEPSSSTPRAPGGAGAGAGGDRAPSENEDDEYNKPLDPDSDDEKIRLLLRKHRAAFSVLSLGAHSV

SEQ ID NO: 15404 - protein, 691 aa, Homo Sapiens
MALLLTLTSPDLEGTWDTRDKDGFKAQEGPPLAVPEFPVCGLYRIYGVCGSFSSFFIIRCSLCALETLKSPQHDPLEIPEQSLKLIPLVSGKRELTRGQKAGEKPLAAGPGEEELLRGSAPHAQDTQSEELPPSCTISGEKKPPAVSGEATGADAGRLCPPPRSRAPHKDRTLARSRPQTQGEDCSLPVGEVKIGKRSYSPAPGKQKKPNAMGLAPTSSPGAPNSARATHNPVPCGSGRGPCHLANLLSTLAQSNQNRDHKQGPPEVTCQIRKKTRTLYRSDQLEELEKIFQEDHYPDSDKRREIAQTVGVTPQRIMVKGAGSLVAGWSGGGPTIETLELQSERSAVAWVWFQNRRAKWRKMEKLNGKESKDNPAAPGPASSQCSSAAEILPAVPMEPKPDPFPQESPLDTFPEPPMLLTSDQTLAPTQPSEGAQRVVTPPLFSPPPVRRADLPFPLGPVHTPQLMPLLMDVAGSDSSHKDGPCGSWGTSITLPPPCSYLEELEPQDYQQSNQPGPFQFSQAPQPPLFQSPQPKLPYLPTFPFSMPSSLTLPPPEDSLFMFPCGPSGGTSQGYCPGASSGQILMQPPAGNIGTASWSDPCLPELPFPGPFCPQALGHPPGGDGYFPDLFPTPCPQALGRQPSSALSWMPEGARPGTGPLLSKAKEEPPAASLDQPSALEEARGDDKNSHVP

SEQ ID NO: 15405 - protein, 800 aa, Homo Sapiens
MKARRNKKQIPSFRKLIKTSKVKLENKLKNKQFKQQSTLKKYRKEQRKLRQAVKDAVSKKPIPLENPKEKRPGKRIEREEEEEEEALPLDMMDEDDLQLMKDLGQRVSFLTRDLSSSEPVHAKKRKHERIIDKYEKIPRTLQTAPEKELIHLLPIKDKSGIIPQTREKPVTDSNKDEEDQEEERELEEEIIEDPIQELTIEEHLIERKKKLQEKKMHIAALASAILSDPENNIKKLKELRSMLMEQDPDVAVTVRKLVIVSLMELFKDITPSYKIRPLTEAEKSTKTRKETQKLREFEEGLVSQYKFYLENLEQMVKDWKQRKLKKSNVVSLKAYKGLAEVAVKSLCELLVALPHFNFHNNIIVLIVPLMNDMSKLISEMCCEAVKKLFKQDKLGQASLGVIKVISGFVKGRNYEVRPEMLKTFLCLRIKEVEVKKDTEDINKPKKFMTFKEKRKSLSRMQRKWKKAEEKLERELREAEASESTEKKLKLHTETLNIVFVTYFRILKKAQRSPLLPAVLEGLAKFAHLINVEFFDDLLVVLHTLIESGDLSYQESLHCVQTAFHILSGQGDVLNIDPLKFYTHLYKTLFKLHAGATNEGVEIVLQCLDVMLTKRRKQVSQQRALAFIKRLCTLALHVLPNSSIGILATTRILMHTFPKTDLLLDSESQGSGVFLPELDEPEYCNAQNTALWELHALRRHYHPIVQRFAAHLIAGAPSEGSGALKPELSRRSATELFEAYSMAEMTFNPPVESSNPKIKGKFLQGDSFLNEDLNQLIKRYSSEVATESPLDFTKYLKTSLH

SEQ ID NO: 15406 - protein, 516 aa, Homo Sapiens
MEREPGAAGVRRALGRRLEAVLASRSEANAVFDILAVLQSEDQEEIQEAVRTCSRLFGALLERGELFVGQLPSEEMVMTGSQGATRKYKVWMRHRYHSCCNRLGELLGHPSFQVKELALSALLKFVQLEGAHPLEKSKWEGNYLFPRELFKLVVGGLLSPEEDQSLLLSQFREYLDYDDTRYHTMQAAVDAVARVTGQHPEVPPAFWNNAFTLLSAVSLPRREPTVSSFYVKRAELWDTWKVAHLKEHRRVFQAMWLSFLKHKLPLSLYKKVLLIVHDAILPQLAQPTLMIDFLTRACDLGGALSLLALNGLFILIHKHNLEYPDFYRKLYGLLDPSVFHVKYRARFFHLADLFLSSSHLPAYLVAAFAKRLARLALTAPPEALLMVLPFICNLLRRHPACRVLVHRPHGPELDADPYDPGEEDPAQSRALESSLWELQALQRHYHPEVSKAASVINQALSMPEVSIAPLLELTAYEIFERDLKKKGPEPVPLEFIPAQGLLGRPGELCAQHFTLS

SEQ ID NO: 15407 - protein, 471 aa, Homo Sapiens
MQSNKTFNLEKQNHTPRKHHQHHHQQQHHQQQQQQPPPPPIPANGQQASSQNEGLTIDLKNFRKPGEKTFTQRSRLFVGNLPPDITEEEMRKLFEKYGKAGEVFIHKDKGFGFIRLETRTLAEIAKVELDNMPLRGKQLRVRFACHSASLTVRNLPQYVSNELLEEAFSVFGQVERAVVIVDDRGRPSGKGIVEFSGKPAARKALDRCSEGSFLLTTFPRPVTVEPMDQLDDEEGLPEKLVIKNQQFHKEREQPPRFAQPGSFEYEYAMRWKALIEMEKQQQDQVDRNIKEAREKLEMEMEAARHEHQVMLMRQDLMRRQEELRRMEELHNQEVQKRKQLELRQEEERRRREEEMRRQQEEMMRRQQEGFKGTFPDAREQEIRMGQMAMGGAMGINNRGAMPPAPVPAGTPAPPGPATMMPDGTLGLTPPTTERFGQAATMEGIGAIGGTPPAFNRAAPGAEFAPNKRRRY

SEQ ID NO: 15408 - protein, 251 aa, Homo Sapiens
MPSPRPRGSPPPAPSGSRVRPPRSGRSPAPRSPTGPNTPRAPGRFESPFSVEAILARPDPCAPAASQPSGSACVHPAFWTAASLCATGGLPWACPTSWLPAYLSVGFYPVPGPRVAPVCGLLGFGVTGLELAHCSGLWAFPDWAPTEDLQDTERQQKRVRTMFNLEQLEELEKVFAKQHNLVGKKRAQLAARLKLTENQVRVWFQNRRVKYQKQQKLRAAVTSAEAASLDEPSSSSIASIQSDDAESGVDG

SEQ ID NO: 15409 - protein, 590 aa, Homo Sapiens
MAAPYPGSGGGSEVKCVGGRGASVPWDFLPGLMVKAPSGPCLQAQRKEKSRNAARSRRGKENLEFFELAKLLPLPGAISSQLDKASIVRLSVTYLRLRRFAALGAPPWGLRAAGPPAGLAPGRRGPAALVSEVFEQHLGGHILQSLDGFVFALNQEGKFLYISETVSIYLGLSQVEMTGSSVFDYIHPGDHSEVLEQLGLRTPTPGPPTPPSVSSSSSSSSSLADTPEIEASLTKVPPSSLVQERSFFVRMKSTLTKRGLHVKASGYKVIHVTGRLRAHALGLVALGHTLPPAPLAELPLHGHMIVFRLSLGLTILACESRVSDHMDLGPSELVGRSCYQFVHGQDATRIRQSHVDLLDKGQVMTGYYRWLQRAGGFVWLQSVATVAGSGKSPGEHHVLWVSHVLSQAEGGQTPLDAFQLPASVACEEASSPGPEPTEPEPPTEGKQAAPAENEAPQTQGKRIKVEPGPRETKGSEDSGDEDPSSHPATPRPEFTSVIRAGVLKQDPVRPWGLAPPGDPPPTLLHAGFLPPVVRGLCTPGTIRYGPAELGLVYPHLQRLGPGPALPEAFYPPLGLPYPGPAGTRLPRKGD

SEQ ID NO: 15410 - protein, 824 aa, Homo Sapiens
MDEDEKDRAKRASRNKSEKKRRDQFNVLIKELSSMLPGNTRKMDKTTVLEKVIGFLQKHNEVSAQTEICDIQQDWKPSFLSNEEFTQLMLEALDGFIIAVTTDGSIIYVSDSITPLLGHLPSDVMDQNLLNFLPEQEHSEVYKILSSHMLVTDSPSPEYLKSDSDLEFYCHLLRGSLNPKEFPTYEYIKFVGNFRSYNNVPSPSCNGFDNTLSRPCRVPLGKEVCFIATVRLATPQFLKEMCIVDEPLEEFTSRHSLEWKFLFLDHRAPPIIGYLPFEVLGTSGYDYYHIDDLELLARCHQHLMQFGKGKSCCYRFLTKGQQWIWLQTHYYITYHQWNSKPEFIVCTHSVVSYADVRVERRQELALEDPPSEALHSSALKDKGSSLEPRQHFNTLDVGASGLNTSHSPSASSRSSHKSSHTAMSEPTSTPTKLMAEASTPALPRSATLPQELPVPGLSQAATMPAPLPSPSSCDLTQQLLPQTVLQSTPAPMAQFSAQFSMFQTIKDQLEQRTRILQANIRWQQEELHKIQEQLCLVQDSNVQMFLQQPAVSLSFSSTQRPEAQQQLQQRSAAVTQPQLGAGPQLPGQISSAQVTSQHLLRESSVISTQGPKPMRSSQLMQSSGRSGSSLVSPFSSATAALPPSLNLTTPASTSQDASQCQPSPDFSHDRQLRLLLSQPIQPMMPGSCDARQPSEVSRTGRQVKYAQSQTVFQNPDAHPANSSSAPMPVLLMGQAVLHPSFPASQPSPLQPAQARQQPPQHYLQVQAPTSLHSEQQDSLLLSTYSQQPGTLGYPQPPPAQPQPLRPPRRVSSLSESSGLQQPPR

SEQ ID NO: 15411 - protein, 933 aa, Homo Sapiens
MAPTKPSFQQDPSRRERITAQHPLPNQSECRKIYRYDGIYCESTYQNLQALRKEKSRDAARSRRGKENFEFYELAKLLPLPAAITSQLDKASIIRLTISYLKMRDFANQGDPPWNLRMEGPPPNTSVKVIGAQRRRSPSALAIEVFEAHLGSHILQSLDGFVFALNQEGKFLYISETVSIYLGLSQVELTGSSVFDYVHPGDHVEMAEQLGMKLPPGRGLLSQGTAEDGASSASSSSQSETPEPVESTSPSLLTTDNTLERSFFIRMKSTLTKRGVHIKSSGYKVIHITGRLRLRVSLSHGRTVPSQIMGLVVVAHALPPPTINEVRIDCHMFVTRVNMDLNIIYCENRISDYMDLTPVDIVGKRCYHFIHAEDVEGIRHSHLDLLNKGQCVTKYYRWMQKNGGYIWIQSSATIAINAKNANEKNIIWVNYLLSNPEYKDTPMDIAQLPHLPEKTSESSETSDSESDSKDTSGITEDNENSKSDEKGNQSENSEDPEPDRKKSGNACDNDMNCNDDGHSSSNPDSRDSDDSFEHSDFENPKAGEDGFGALGAMQIKVERYVESESDLRLQNCESLTSDSAKDSDSAGEAGAQASSKHQKRKKRRKRQKGGSASRRRLSSASSPGGLDAGLVEPPRLLSSPNSASVLKIKTEISEPINFDNDSSIWNYPPNREISRNESPYSMTKPPSSEHFPSPQGGGGGGGGGGGLHVAIPDSVLTPPGADGAAARKTQFGASATAALAPVASDPLSPPLSASPRDKHPGNGGGGGGGGGGAGGGGPSASNSLLYTGDLEALQRLQAGNVVLPLVHRVTGTLAATSTAAQRVYTTGTIRYAPAEVTLAMQSNLLPNAHAVNFVDVNSPGFGLDPKTPMEMLYHHVHRLNMSGPFGGAVSAASLTQMPAGNVFTTAEGLFSTLPFPVYSNGIHAAQTLERKED

SEQ ID NO: 15412 - protein, 802 aa, Homo Sapiens
MYRSTKGASKARRDQINAEIRNLKELLPLAEADKVRLSYLHIMSLACIYTRKGVFFAGGTPLAGPTGLLSAQELEDIVAALPGFLLVFTAEGKLLYLSESVSEHLGHSMVDLVAQGDSIYDIIDPADHLTVRQQLTLPSALDTDRLFRCRFNTSKSLRRQSAGNKLVLIRGRFHAHPPGAYWAGNPVFTAFCAPLEPRPRPGPGPGPGPASLFLAMFQSRHAKDLALLDISESVLIYLGFERSELLCKSWYGLLHPEDLAHASAQHYRLLAESGDIQAEMVVRLQAKTGGWAWIYCLLYSEGPEGPITANNYPISDMEAWSLRQQLNSEDTQAAYVLGTPTMLPSFPENILSQEECSSTNPLFTAALGAPRSTSFPSAPELSVVSASEELPRPSKELDFSYLTFPSGPEPSLQAELSKDLVCTPPYTPHQPGGCAFLFSLHEPFQTHLPTPSSTLQEQLTPSTATFSDQLTPSSATFPDPLTSPLQGQLTETSVRSYEDQLTPCTSTFPDQLLPSTATFPEPLGSPAHEQLTPPSTAFQAHLDSPSQTFPEQLSPNPTKTYFAQEGCSFLYEKLPPSPSSPGNGDCTLLALAQLRGPLSVDVPLVPEGLLTPEASPVKQSFFHYSEKEQNEIDRLIQQISQLAQGMDRPFSAEAGTGGLEPLGGLEPLDSNLSLSGAGPPVLSLDLKPWKCQELDFLADPDNMFLEETPVEDIFMDLSTPDPSEEWGSGDPEAEGPGGAPSPCNNLSPEDHSFLEDLATYETAFETGVSAFPYDGFTDELHQLQSQVQDSFHEDGSGGEPTF

SEQ ID NO: 15413 - protein, 470 aa, Homo Sapiens
MAGENHQWQGSILYNMLMSAKQTRAAPEAPETRLVDQCWGCSCGDEPGVGREGLLGGRNVALLYRCCFCGKDHPRQGSILYSMLTSAKQTYAAPKAPEATLGPCWGCSCGSDPGVGRAGLPGGRPVALLYRCCFCGEDHPRQGSILYSLLTSSKQTHVAPAAPEARPGGAWWDRSYFAQRPGGKEALPGGRATALLYRCCFCGEDHPQQGSTLYCVPTSTNQAQAAPEERPRAPWWDTSSGALRPVALKSPQVVCEAASAGLLKTLRFVKYLPCFQVLPLDQQLVLVRNCWASLLMLELAQDRLQFETVEVSEPSMLQKILTTRRRETGGNEPLPVPTLQHHLAPPAEARKVPSASQVQAIKCFLSKCWSLNISTKEYAYLKGTVLFNPDVPGLQCVKYIQGLQWGTQQILSEHTRMTHQGPHDRFIELNSTLFLLRFINANVIAELFFRPIIGTVSMDDMMLEMLCTKI

SEQ ID NO: 15414 - protein, 257 aa, Homo Sapiens
MSTSQPGACPCQGAASRPAILYALLSSSLKAVPRPRSRCLCRQHRPVQLCAPHRTCREALDVLAKTVAFLRNLPSFWQLPPQDQRRLLQGCWGPLFLLGLAQDAVTFEVAEAPVPSILKKILLEEPSSSGGSGQLPDRPQPSLAAVQWLQCCLESFWSLELSPKEYACLKGTILFNPDVPGLQAASHIGHLQQEAHWVLCEVLEPWCPAAQGRLTRVLLTASTLKSIPTSLLGDLFFRPIIGDVDIAGLLGDMLLLR

SEQ ID NO: 15415 - protein, 614 aa, Homo Sapiens
MTTLDSNNNTGGVITYIGSSGSSPSRTSPESLYSDNSNGSFQSLTQGCPTYFPPSPTGSLTQDPARSFGSIPPSLSDDGSPSSSSSSSSSSSSFYNGSPPGSLQVAMEDSSRVSPSKSTSNITKLNGMVLLCKVCGDVASGFHYGVHACEGCKGFFRRSIQQNIQYKRCLKNENCSIVRINRNRCQQCRFKKCLSVGMSRDAVRFGRIPKREKQRMLAEMQSAMNLANNQLSSQCPLETSPTQHPTPGPMGPSPPPAPVPSPLVGFSQFPQQLTPPRSPSPEPTVEDVISQVARAHREIFTYAHDKLGSSPGNFNANHASGSPPATTPHRWENQGCPPAPNDNNTLAAQRHNEALNGLRQAPSSYPPTWPPGPAHHSCHQSNSNGHRLCPTHVYAAPEGKAPANSPRQGNSKNVLLACPMNMYPHGRSGRTVQEIWEDFSMSFTPAVREVVEFAKHIPGFRDLSQHDQVTLLKAGTFEVLMVRFASLFNVKDQTVMFLSRTTYSLQELGAMGMGDLLSAMFDFSEKLNSLALTEEELGLFTAVVLVSADRSGMENSASVEQLQETLLRALRALVLKNRPLETSRFTKLLLKLPDLRTLNNMHSEKLLSFRVDAQ

SEQ ID NO: 15416 - protein, 579 aa, Homo Sapiens
MEVNAGGVIAYISSSSSASSPASCHSEGSENSFQSSSSSVPSSPNSSNSDTNGNPKNGDLANIEGILKNDRIDCSMKTSKSSAPGMTKSHSGVTKFSGMVLLCKVCGDVASGFHYGVHACEGCKGFFRRSIQQNIQYKKCLKNENCSIMRMNRNRCQQCRFKKCLSVGMSRDAVRFGRIPKREKQRMLIEMQSAMKTMMNSQFSGHLQNDTLVEHHEQTALPAQEQLRPKPQLEQENIKSSSPPSSDFAKEEVIGMVTRAHKDTFMYNQEQQENSAESMQPQRGERIPKNMEQYNLNHDHCGNGLSSHFPCSESQQHLNGQFKGRNIMHYPNGHAICIANGHCMNFSNAYTQRVCDRVPIDGFSQNENKNSYLCNTGGRMHLVCPLSKSPYVDPHKSGHEIWEEFSMSFTPAVKEVVEFAKRIPGFRDLSQHDQVNLLKAGTFEVLMVRFASLFDAKERTVTFLSGKKYSVDDLHSMGAGDLLNSMFEFSEKLNALQLSDEEMSLFTAVVLVSADRSGIENVNSVEALQETLIRALRTLIMKNHPNEASIFTKLLLKLPDLRSLNNMHSEELLAFKVHP

SEQ ID NO: 15417 - protein, 460 aa, Homo Sapiens
MSSPTTSSLDTPLPGNGPPQPGAPSSSPTVKEEGPEPWPGGPDPDVPGTDEASSACSTDWVIPDPEEEPERKRKKGPAPKMLGHELCRVCGDKASGFHYNVLSCEGCKGFFRRSVVRGGARRYACRGGGTCQMDAFMRRKCQQCRLRKCKEAGMREQCVLSEEQIRKKKIRKQQQESQSQSQSPVGPQGSSSSASGPGASPGGSEAGSQGSGEGEGVQLTAAQELMIQQLVAAQLQCNKRSFSDQPKVTPWPLGADPQSRDARQQRFAHFTELAIISVQEIVDFAKQVPGFLQLGREDQIALLKASTIEIMLLETARRYNHETECITFLKDFTYSKDDFHRAGLQVEFINPIFEFSRAMRRLGLDDAEYALLIAINIFSADRPNVQEPGRVEALQQPYVEALLSYTRIKRPQDQLRFPRMLMKLVSLRTLSSVHSEQVFALRLQDKKLPPLLSEIWDVHE

SEQ ID NO: 15418 - protein, 447 aa, Homo Sapiens
MSLWLGAPVPDIPPDSAVELWKPGAQDASSQAQGGSSCILREEARMPHSAGGTAGVGLEAAEPTALLTRAEPPSEPTEIRPQKRKKGPAPKMLGNELCSVCGDKASGFHYNVLSCEGCKGFFRRSVIKGAHYICHSGGHCPMDTYMRRKCQECRLRKCRQAGMREECVLSEEQIRLKKLKRQEEEQAHATSLPPRASSPPQILPQLSPEQLGMIEKLVAAQQQCNRRSFSDRLRVTPWPMAPDPHSREARQQRFAHFTELAIVSVQEIVDFAKQLPGFLQLSREDQIALLKTSAIEVMLLETSRRYNPGSESITFLKDFSYNREDFAKAGLQVEFINPIFEFSRAMNELQLNDAEFALLIAISIFSADRPNVQDQLQVERLQHTYVEALHAYVSIHHPHDRLMFPRMLMKLVSLRTLSSVHSEQVFALRLQDKKLPPLLSEIWDVHE

SEQ ID NO: 15419 - protein, 486 aa, Homo Sapiens
MVMQFQGLENPIQISPHCSCTPSGFFMEMMSMKPAKGVLTEQVAGPLGQNLEVEPYSQYSNVQFPQVQPQISSSSYYSNLGFYPQQPEEWYSPGIYELRRMPAETLYQGETEVAEMPVTKKPRMGASAGRIKGDELCVVCGDRASGYHYNALTCEGCKGFFRRSITKNAVYKCKNGGNCVMDMYMRRKCQECRLRKCKEMGMLAECMYTGLLTEIQCKSKRLRKNVKQHADQTVNEDSEGRDLRQVTSTTKSCREKTELTPDQQTLLHFIMDSYNKQRMPQEITNKILKEEFSAEENFLILTEMATNHVQVLVEFTKKLPGFQTLDHEDQIALLKGSAVEAMFLRSAEIFNKKLPSGHSDLLEERIRNSGISDEYITPMFSFYKSIGELKMTQEEYALLTAIVILSPDRQYIKDREAVEKLQEPLLDVLQKLCKIHQPENPQHFACLLGRLTELRTFNHHHAEMLMSWRVNDHKFTPLLCEIWDVQ

SEQ ID NO: 15420 - protein, 434 aa, Homo Sapiens
MEVRPKESWNHADFVHCEDTESVPGKPSVNADEEVGGPQICRVCGDKATGYHFNVMTCEGCKGFFRRAMKRNARLRCPFRKGACEITRKTRRQCQACRLRKCLESGMKKEMIMSDEAVEERRALIKRKKSERTGTQPLGVQGLTEEQRMMIRELMDAQMKTFDTTFSHFKNFRLPGVLSSGCELPESLQAPSREEAAKWSQVRKDLCSLKVSLQLRGEDGSVWNYKPPADSGGKEIFSLLPHMADMSTYMFKGIISFAKVISYFRDLPIEDQISLLKGAAFELCQLRFNTVFNAETGTWECGRLSYCLEDTAGGFQQLLLEPMLKFHYMLKKLQLHEEEYVLMQAISLFSPDRPGVLQHRVVDQLQEQFAITLKSYIECNRPQPAHRFLFLKIMAMLTELRSINAQHTQRLLRIQDIHPFATPLMQELFGITGS

SEQ ID NO: 15421 - protein, 352 aa, Homo Sapiens
MASREDELRNCVVCGDQATGYHFNALTCEGCKGFFRRTVSKSIGPTCPFAGSCEVSKTQRRHCPACRLQKCLDAGMRKDMILSAEALALRRAKQAQRRAQQTPVQLSKEQEELIRTLLGAHTRHMGTMFEQFVQFRPPAHLFIHHQPLPTLAPVLPLVTHFADINTFMVLQVIKFTKDLPVFRSLPIEDQISLLKGAAVEICHIVLNTTFCLQTQNFLCGPLRYTIEDGARVSPTVGFQVEFLELLFHFHGTLRKLQLQEPEYVLLAAMALFSPDRPGVTQRDEIDQLQEEMALTLQSYIKGQQRRPRDRFLYAKLLGLLAELRSINEAYGYQIQHIQGLSAMMPLLQEICS

SEQ ID NO: 15422 - protein, 603 aa, Homo Sapiens
MATIEEIAHQIIEQQMGEIVTEQQTGQKIQIVTALDHNTQGKQFILTNHDGSTPSKVILARQDSTPGKVFLTTPDAAGVNQLFFTTPDLSAQHLQLLTDNSPDQGPNKVFDLCVVCGDKASGRHYGAVTCEGCKGFFKRSIRKNLVYSCRGSKDCIINKHHRNRCQYCRLQRCIAFGMKQDSVQCERKPIEVSREKSSNCAASTEKIYIRKDLRSPLTATPTFVTDSESTRSTGLLDSGMFMNIHPSGVKTESAVLMTSDKAESCQGDLSTLANVVTSLANLGKTKDLSQNSNEMSMIESLSNDDTSLCEFQEMQTNGDVSRAFDTLAKALNPGESTACQSSVAGMEGSVHLITGDSSINYTEKEGPLLSDSHVAFRLTMPSPMPEYLNVHYIGESASRLLFLSMHWALSIPSFQALGQENSISLVKAYWNELFTLGLAQCWQVMNVATILATFVNCLHNSLQQDKMSTERRKLLMEHIFKLQEFCNSMVKLCIDGYEYAYLKAIVLFSPDHPSLENMEQIEKFQEKAYVEFQDYITKTYPDDTYRLSRLLLRLPALRLMNATITEELFFKGLIGNIRIDSVIPHILKMEPADYNSQIIGHSI

SEQ ID NO: 15423 - protein, 596 aa, Homo Sapiens
MTSPSPRIQIISTDSAVASPQRIQIVTDQQTGQKIQIVTAVDASGSPKQQFILTSPDGAGTGKVILASPETSSAKQLIFTTSDNLVPGRIQIVTDSASVERLLGKTDVQRPQVVEYCVVCGDKASGRHYGAVSCEGCKGFFKRSVRKNLTYSCRSNQDCIINKHHRNRCQFCRLKKCLEMGMKMESVQSERKPFDVQREKPSNCAASTEKIYIRKDLRSPLIATPTFVADKDGARQTGLLDPGMLVNIQQPLIREDGTVLLATDSKAETSQGALGTLANVVTSLANLSESLNNGDTSEIQPEDQSASEITRAFDTLAKALNTTDSSSSPSLADGIDTSGGGSIHVISRDQSTPIIEVEGPLLSDTHVTFKLTMPSPMPEYLNVHYICESASRLLFLSMHWARSIPAFQALGQDCNTSLVRACWNELFTLGLAQCAQVMSLSTILAAIVNHLQNSIQEDKLSGDRIKQVMEHIWKLQEFCNSMAKLDIDGYEYAYLKAIVLFSPDHPGLTSTSQIEKFQEKAQMELQDYVQKTYSEDTYRLARILVRLPALRLMSSNITEELFFTGLIGNVSIDSIIPYILKMETAEYNGQITGASL

SEQ ID NO: 15424 - protein, 385 aa, Homo Sapiens
MSKPAGSTSRILDIPCKVCGDRSSGKHYGVYACDGCSGFFKRSIRRNRTYVCKSGNQGGCPVDKTHRNQCRACRLKKCLEVNMNKDAVQHERGPRTSTIRKQVALYFRGHKEENGAAAHFPSAALPAPAFFTAVTQLEPHGLELAAVSTTPERQTLVSLAQPTPKYPHEVNGTPMYLYEVATESVCESAARLLFMSIKWAKSVPAFSTLSLQDQLMLLEDAWRELFVLGIAQWAIPVDANTLLAVSGMNGDNTDSQKLNKIISEIQALQEVVARFRQLRLDATEFACLKCIVTFKAVPTHSGSELRSFRNAAAIAALQDEAQLTLNSYIHTRYPTQPCRFGKLLLLLPALRSISPSTIEEVFFKKTIGNVPITRLLSDMYKSSDI

SEQ ID NO: 15425 - protein, 410 aa, Homo Sapiens
METRPTALMSSTVAAAAPAAGAASRKESPGRWGLGEDPTGVSPSLQCRVCGDSSSGKHYGIYACNGCSGFFKRSVRRRLIYRCQVGAGMCPVDKAHRNQCQACRLKKCLQAGMNQDAVQNERQPRSTAQVHLDSMESNTESRPESLVAPPAPAGRSPRGPTPMSAARALGHHFMASLITAETCAKLEPEDADENIDVTSNDPEFPSSPYSSSSPCGLDSIHETSARLLFMAVKWAKNLPVFSSLPFRDQVILLEEAWSELFLLGAIQWSLPLDSCPLLAPPEASAAGGAQGRLTLASMETRVLQETISRFRALAVDPTEFACMKALVLFKPETRGLKDPEHVEALQDQSQVMLSQHSKAHHPSQPVRFGKLLLLLPSLRFITAERIELLFFRKTIGNTPMEKLLCDMFKN

SEQ ID NO: 15426 - protein, 423 aa, Homo Sapiens
MAMVVSSWRDPQDDVAGGNPGGPNPAAQAARGGGGGAGEQQQQAGSGAPHTPQTPGQPGAPATPGTAGDKGQGPPGSGQSQQHIECVVCGDKSSGKHYGQFTCEGCKSFFKRSVRRNLTYTCRANRNCPIDQHHRNQCQYCRLKKCLKVGMRREAVQRGRMPPTQPNPGQYALTNGDPLNGHCYLSGYISLLLRAEPYPTSRYGSQCMQPNNIMGIENICELAARLLFSAVEWARNIPFFPDLQITDQVSLLRLTWSELFVLNAAQCSMPLHVAPLLAAAGLHASPMSADRVVAFMDHIRIFQEQVEKLKALHVDSAEYSCLKAIVLFTSDACGLSDAAHIESLQEKSQCALEEYVRSQYPNQPSRFGKLLLRLPSLRTVSSSVIEQLFFVRLVGKTPIETLIRDMLLSGSSFNWPYMSIQCS

SEQ ID NO: 15427 - protein, 414 aa, Homo Sapiens
MAMVVSTWRDPQDEVPGSQGSQASQAPPVPGPPPGAPHTPQTPGQGGPASTPAQTAAGGQGGPGGPGSDKQQQQQHIECVVCGDKSSGKHYGQFTCEGCKSFFKRSVRRNLSYTCRANRNCPIDQHHRNQCQYCRLKKCLKVGMRREAVQRGRMPPTQPTHGQFALTNGDPLNCHSYLSGYISLLLRAEPYPTSRFGSQCMQPNNIMGIENICELAARMLFSAVEWARNIPFFPDLQITDQVALLRLTWSELFVLNAAQCSMPLHVAPLLAAAGLHASPMSADRVVAFMDHIRIFQEQVEKLKALHVDSAEYSCLKAIVLFTSDACGLSDVAHVESLQEKSQCALEEYVRSQYPNQPTRFGKLLLRLPSLRTVSSSVIEQLFFVRLVGKTPIETLIRDMLLSGSSFNWPYMAIQ

SEQ ID NO: 15428 - protein, 404 aa, Homo Sapiens
MAMVTGGWGGPGGDTNGVDKAGGYPRAAEDDSASPPGAASDAEPGDEERPGLQVDCVVCGDKSSGKHYGVFTCEGCKSFFKRSIRRNLSYTCRSNRDCQIDQHHRNQCQYCRLKKCFRVGMRKEAVQRGRIPHSLPGAVAASSGSPPGSALAAVASGGDLFPGQPVSELIAQLLRAEPYPAAAGRFGAGGGAAGAVLGIDNVCELAARLLFSTVEWARHAPFFPELPVADQVALLRLSWSELFVLNAAQAALPLHTAPLLAAAGLHAAPMAAERAVAFMDQVRAFQEQVDKLGRLQVDSAEYGCLKAIALFTPDACGLSDPAHVESLQEKAQVALTEYVRAQYPSQPQRFGRLLLRLPALRAVPASLISQLFFMRLVGKTPIETLIRDMLLSGSTFNWPYGSGQ

SEQ ID NO: 15429 - protein, 777 aa, Homo Sapiens
MDSKESLTPGREENPSSVLAQERGDVMDFYKTLRGGATVKVSASSPSLAVASQSDSKQRRLLVDFPKGSVSNAQQPDLSKAVSLSMGLYMGETETKVMGNDLGFPQQGQISLSSGETDLKLLEESIANLNRSTSVPENPKSSASTAVSAAPTEKEFPKTHSDVSSEQQHLKGQTGTNGGNVKLYTTDQSTFDILQDLEFSSGSPGKETNESPWRSDLLIDENCLLSPLAGEDDSFLLEGNSNEDCKPLILPDTKPKIKDNGDLVLSSPSNVTLPQVKTEKEDFIELCTPGVIKQEKLGTVYCQASFPGANIIGNKMSAISVHGVSTSGGQMYHYDMNTASLSQQQDQKPIFNVIPPIPVGSENWNRCQGSGDDNLTSLGTLNFPGRTVFSNGYSSPSMRPDVSSPPSSSSTATTGPPPKLCLVCSDEASGCHYGVLTCGSCKVFFKRAVEGQHNYLCAGRNDCIIDKIRRKNCPACRYRKCLQAGMNLEARKTKKKIKGIQQATTGVSQETSENPGNKTIVPATLPQLTPTLVSLLEVIEPEVLYAGYDSSVPDSTWRIMTTLNMLGGRQVIAAVKWAKAIPGFRNLHLDDQMTLLQYSWMFLMAFALGWRSYRQSSANLLCFAPDLIINEQRMTLPCMYDQCKHMLYVSSELHRLQVSYEEYLCMKTLLLLSSVPKDGLKSQELFDEIRMTYIKELGKAIVKREGNSSQNWQRFYQLTKLLDSMHEVVENLLNYCFQTFLDKTMSIEFPEMLAEIITNQIPKYSNGNIKKLLFHQK

SEQ ID NO: 15430 - protein, 984 aa, Homo Sapiens
METKGYHSLPEGLDMERRWGQVSQAVERSSLGPTERTDENNYMEIVNVSCVSGAIPNNSTQGSSKEKQELLPCLQQDNNRPGILTSDIKTELESKELSATVAESMGLYMDSVRDADYSYEQQNQQGSMSPAKIYQNVEQLVKFYKGNGHRPSTLSCVNTPLRSFMSDSGSSVNGGVMRAIVKSPIMCHEKSPSVCSPLNMTSSVCSPAGINSVSSTTASFGSFPVHSPITQGTPLTCSPNAENRGSRSHSPAHASNVGSPLSSPLSSMKSSISSPPSHCSVKSPVSSPNNVTLRSSVSSPANINNSRCSVSSPSNTNNRSTLSSPAASTVGSICSPVNNAFSYTASGTSAGSSTLRDVVPSPDTQEKGAQEVPFPKTEEVESAISNGVTGQLNIVQYIKPEPDGAFSSSCLGGNSKINSDSSFSVPIKQESTKHSCSGTSFKGNPTVNPFPFMDGSYFSFMDDKDYYSLSGILGPPVPGFDGNCEGSGFPVGIKQEPDDGSYYPEASIPSSAIVGVNSGGQSFHYRIGAQGTISLSRSARDQSFQHLSSFPPVNTLVESWKSHGDLSSRRSDGYPVLEYIPENVSSSTLRSVSTGSSRPSKICLVCGDEASGCHYGVVTCGSCKVFFKRAVEGQHNYLCAGRNDCIIDKIRRKNCPACRLQKCLQAGMNLGARKSKKLGKLKGIHEEQPQQQQPPPPPPPPQSPEEGTTYIAPAKEPSVNTALVPQLSTISRALTPSPVMVLENIEPEIVYAGYDSSKPDTAENLLSTLNRLAGKQMIQVVKWAKVLPGFKNLPLEDQITLIQYSWMCLSSFALSWRSYKHTNSQFLYFAPDLVFNEEKMHQSAMYELCQGMHQISLQFVRLQLTFEEYTIMKVLLLLSTIPKDGLKSQAAFEEMRTNYIKELRKMVTKCPNNSGQSWQRFYQLTKLLDSMHDLVSDLLEFCFYTFRESHALKVEFPAMLVEIISDQLPKVESGNAKPLYFHRK

SEQ ID NO: 15431 - protein, 598 aa, Homo Sapiens
MPCIQAQYGTPAPSPGPRDHLASDPLTPEFIKPTMDLASPEAAPAAPTALPSFSTFMDGYTGEFDTFLYQLPGTVQPCSSASSSASSTSSSSATSPASASFKFEDFQVYGCYPGPLSGPVDEALSSSGSDYYGSPCSAPSPSTPSFQPPQLSPWDGSFGHFSPSQTYEGLRAWTEQLPKASGPPQPPAFFSFSPPTGPSPSLAQSPLKLFPSQATHQLGEGESYSMPTAFPGLAPTSPHLEGSGILDTPVTSTKARSGAPGGSEGRCAVCGDNASCQHYGVRTCEGCKGFFKRTVQKNAKYICLANKDCPVDKRRRNRCQFCRFQKCLAVGMVKEVVRTDSLKGRRGRLPSKPKQPPDASPANLLTSLVRAHLDSGPSTAKLDYSKFQELVLPHFGKEDAGDVQQFYDLLSGSLEVIRKWAEKIPGFAELSPADQDLLLESAFLELFILRLAYRSKPGEGKLIFCSGLVLHRLQCARGFGDWIDSILAFSRSLHSLLVDVPAFACLSALVLITDRHGLQEPRRVEELQNRIASCLKEHVAAVAGEPQPASCLSRLLGKLPELRTLCTQGLQRIFYLKLEDLVPPPPIIDKIFMDTLPF

SEQ ID NO: 15432 - protein, 598 aa, Homo Sapiens
MPCVQAQYGSSPQGASPASQSYSYHSSGEYSSDFLTPEFVKFSMDLTNTEITATTSLPSFSTFMDNYSTGYDVKPPCLYQMPLSGQQSSIKVEDIQMHNYQQHSHLPPQSEEMMPHSGSVYYKPSSPPTPTTPGFQVQHSPMWDDPGSLHNFHQNYVATTHMIEQRKTPVSRLSLFSFKQSPPGTPVSSCQMRFDGPLHVPMNPEPAGSHHVVDGQTFAVPNPIRKPASMGFPGLQIGHASQLLDTQVPSPPSRGSPSNEGLCAVCGDNAACQHYGVRTCEGCKGFFKRTVQKNAKYVCLANKNCPVDKRRRNRCQYCRFQKCLAVGMVKEVVRTDSLKGRRGRLPSKPKSPQEPSPPSPPVSLISALVRAHVDSNPAMTSLDYSRFQANPDYQMSGDDTQHIQQFYDLLTGSMEIIRGWAEKIPGFADLPKADQDLLFESAFLELFVLRLAYRSNPVEGKLIFCNGVVLHRLQCVRGFGEWIDSIVEFSSNLQNMNIDISAFSCIAALAMVTERHGLKEPKRVEELQNKIVNCLKDHVTFNNGGLNRPNYLSKLLGKLPELRTLCTQGLQRIFYLKLEDLVPPPAIIDKLFLDTLPF

SEQ ID NO: 15433 - protein, 626 aa, Homo Sapiens
MPCVQAQYSPSPPGSSYAAQTYSSEYTTEIMNPDYTKLTMDLGSTEITATATTSLPSISTFVEGYSSNYELKPSCVYQMQRPLIKVEEGRAPSYHHHHHHHHHHHHHHQQQHQQPSIPPASSPEDEVLPSTSMYFKQSPPSTPTTPAFPPQAGALWDEALPSAPGCIAPGPLLDPPMKAVPTVAGARFPLFHFKPSPPHPPAPSPAGGHHLGYDPTAAAALSLPLGAAAAAGSQAAALESHPYGLPLAKRAAPLAFPPLGLTPSPTASSLLGESPSLPSPPSRSSSSGEGTCAVCGDNAACQHYGVRTCEGCKGFFKRTVQKNAKYVCLANKNCPVDKRRRNRCQYCRFQKCLSVGMVKEVVRTDSLKGRRGRLPSKPKSPLQQEPSQPSPPSPPICMMNALVRALTDSTPRDLDYSRYCPTDQAAAGTDAEHVQQFYNLLTASIDVSRSWAEKIPGFTDLPKEDQTLLIESAFLELFVLRLSIRSNTAEDKFVFCNGLVLHRLQCLRGFGEWLDSIKDFSLNLQSLNLDIQALACLSALSMITERHGLKEPKRVEELCNKITSSLKDHQSKGQALEPTESKVLGALVELRKICTLGLQRIFYLKLEDLVSPPSIIDKLFLDTLPF

SEQ ID NO: 15434 - protein, 461 aa, Homo Sapiens
MDYSYDEDLDELCPVCGDKVSGYHYGLLTCESCKGFFKRTVQNNKHYTCTESQSCKIDKTQRKRCPFCRFQKCLTVGMRLEAVRADRMRGGRNKFGPMYKRDRALKQQKKAQIRANGFKLETGPPMGVPPPPPPAPDYVLPPSLHGPEPKGLAAGPPAGPLGDFGAPALPMAVPGAHGPLAGYLYPAFPGRAIKSEYPEPYASPPQPGLPYGYPEPFSGGPNVPELILQLLQLEPDEDQVRARILGCLQEPTKSRPDQPAAFGLLCRMADQTFISIVDWARRCMVFKELEVADQMTLLQNCWSELLVFDHIYRQVQHGKEGSILLVTGQEVELTTVATQAGSLLHSLVLRAQELVLQLLALQLDRQEFVCLKFIILFSLDLKFLNNHILVKDAQEKANAALLDYTLCHYPHCGDKFQQLLLCLVEVRALSMQAKEYLYHKHLGNEMPRNNLLIEMLQAKQT

SEQ ID NO: 15435 - protein, 541 aa, Homo Sapiens
MSSNSDTGDLQESLKHGLTPIGAGLPDRHGSPIPARGRLVMLPKVETEALGLARSHGEQGQMPENMQVSQFKMVNYSYDEDLEELCPVCGDKVSGYHYGLLTCESCKGFFKRTVQNNKRYTCIENQNCQIDKTQRKRCPYCRFQKCLSVGMKLEAVRADRMRGGRNKFGPMYKRDRALKQQKKALIRANGLKLEAMSQVIQAMPSDLTISSAIQNIHSASKGLPLNHAALPPTDYDRSPFVTSPISMTMPPHGSLQGYQTYGHFPSRAIKSEYPDPYTSSPESIMGYSYMDSYQTSSPASIPHLILELLKCEPDEPQVQAKIMAYLQQEQANRSKHEKLSTFGLMCKMADQTLFSIVEWARSSIFFRELKVDDQMKLLQNCWSELLILDHIYRQVVHGKEGSIFLVTGQQVDYSIIASQAGATLNNLMSHAQELVAKLRSLQFDQREFVCLKFLVLFSLDVKNLENFQLVEGVQEQVNAALLDYTMCNYPQQTEKFGQLLLRLPEIRAISMQAEEYLYYKHLNGDVPYNNLLIEMLHAKRA

SEQ ID NO: 15436 - protein, 480 aa, Homo Sapiens
MERDEPPPSGGGGGGGSAGFLEPPAALPPPPRNGFCQDELAELDPGTISVSDDRAEQRTCLICGDRATGLHYGIISCEGCKGFFKRSICNKRVYRCSRDKNCVMSRKQRNRCQYCRLLKCLQMGMNRKAIREDGMPGGRNKSIGPVQISEEEIERIMSGQEFEEEANHWSNHGDSDHSSPGNRASESNQPSPGSTLSSSRSVELNGFMAFREQYMGMSVPPHYQYIPHLFSYSGHSPLLPQQARSLDPQSYSLIHQLLSAEDLEPLGTPMLIEDGYAVTQAELFALLCRLADELLFRQIAWIKKLPFFCELSIKDYTCLLSSTWQELILLSSLTVYSKQIFGELADVTAKYSPSDEELHRFSDEGMEVIERLIYLYHKFHQLKVSNEEYACMKAINFLNQDIRGLTSASQLEQLNKRYWYICQDFTEYKYTHQPNRFPDLMMCLPEIRYIAGKMVNVPLEQLPLLFKVVLHSCKTSVGKE

SEQ ID NO: 15437 - protein, 772 aa, Homo Sapiens; identical to SEQ ID NO: 9337

SEQ ID NO: 15438 - protein, 503 aa, Homo Sapiens
MEEHGVTQTEHMATIEAHAVAQQVQQVHVATYTEHSMLSADEDSPSSPEDTSYDDSDILNSTAADEVTAHLAAAGPVGMAAAAAVATGKKRKRPHVFESNPSIRKRQQTRLLRKLRATLDEYTTRVGQQAIVLCISPSKPNPVFKVFGAAPLENVVRKYKSMILEDLESALAEHAPAPQEVNSELPPLTIDGIPVSVDKMTQAQLRAFIPEMLKYSTGRGKPGWGKESCKPIWWPEDIPWANVRSDVRTEEQKQRVSWTQALRTIVKNCYKQHGREDLLYAFEDQQTQTQATATHSIAHLVPSQTVVQTFSNPDGTVSLIQVGTGATVATLADASELPTTVTVAQVNYSAVADGEVEQNWATLQGGEMTIQTTQASEATQAVASLAEAAVAASQEMQQGATVTMALNSEAAAHAVATLAEATLQGGGQIVLSGETAAAVGALTGVQDANGLVQIPVSMYQTVVTSLAQGNGPVQVAMAPVTTRISDSAVTMDGQAVEVVTLEQ

SEQ ID NO: 15439 - protein, 237 aa, Homo Sapiens
MALPPSPLAMEYVNDFDLMKFEVKREPSEGRPGPPTASLGSTPYSSVPPSPTFSEPGMVGATEGTRPGLEELYWLATLQQQLGAGEALGLSPEEAMELLQGQGPVPVDGPHGYYPGSPEETGAQHVQLAERFSDAALVSMSVRELNRQLRGCGRDEALRLKQRRRTLKNRGYAQACRSKRLQQRRGLEAERARLAAQLDALRAEVARLARERDLYKARCDRLTSSGPGSGDPSHLFL

SEQ ID NO: 15440 - protein, 271 aa, Homo Sapiens
MYYAVSQARVNAVPGTMLRPQRPGDLQLGASLYELVGYRQPPSSSSSSTSSTSSTSSSSTTAPLLPKAAREKPEAPAEPPGPGPGSGAHPGGSARPDAKEEQQQQLRRKINSRERKRMQDLNLAMDALREVILPYSAAHCQGAPGRKLSKIATLLLARNYILLLGSSLQELRRALGEGAGPAAPRLLLAGLPLLAAAPGSVLLAPGAVGPPDALRPAKYLSLALDEPPCGQFALPGGGAGGPGLCTCAVCKFPHLVPASLGLAAVQAQFSK

SEQ ID NO: 15441 - protein, 323 aa, Homo Sapiens
MDSDASLVSSRPSSPEPDDLFLPARSKGSSGSAFTGGTVSSSTPSDCPPELSAELRGAMGSAGAHPGDKLGGSGFKSSSSSTSSSTSSAAASSTKKDKKQMTEPELQQLRLKINSRERKRMHDLNIAMDGLREVMPYAHGPSVRKLSKIATLLLARNYILMLTNSLEEMKRLVSEIYGGHHAGFHPSACGGLAHSAPLPAATAHPAAAAHAAHHPAVHHPILPPAAAAAAAAAAAAAVSSASLPGSGLPSVGSIRPPHGLLKSPSAAAAAPLGGGGGGSGASGGFQHWGGMPCPCSMCQVPPPHHHVSAMGAGSLPRLTSDAK

SEQ ID NO: 15442 - protein, 272 aa, Homo Sapiens
MNSDSSSVSSRASSPDMDEMYLRDHHHRHHHHQESRLNSVSSTQGDMMQKMPGESLSRAGAKAAGESSKYKIKKQLSEQDLQQLRLKINGRERKRMHDLNLAMDGLREVMPYAHGPSVRKLSKIATLLLARNYILMLTSSLEEMKRLVGEIYGGHHSAFHCGTVGHSAGHPAHAANSVHPVHPILGGALSSGNASSPLSAASLPAIGTIRPPHSLLKAPSTPPALQLGSGFQHWAGLPCPCTICQMPPPPHLSALSTANMARLSAESKDLLK

SEQ ID NO: 15443 - protein, 465 aa, Homo Sapiens
MNAQLTMEAIGELHGVSHEPVPAPADLLGGSPHARSSVAHRGSHLPPAHPRSMGMASLLDGGSGGGDYHHHHRAPEHSLAGPLHPTMTMACETPPGMSMPTTYTTLTPLQPLPPISTVSDKFPHHHHHHHHHHHPHHHQRLAGNVSGSFTLMRDERGLASMNNLYTPYHKDVAGMGQSLSPLSSSGLGSIHNSQQGLPHYAHPGAAMPTDKMLTPNGFEAHHPAMLGRHGEQHLTPTSAGMVPINGLPPHHPHAHLNAQGHGQLLGTAREPNPSVTGAQVSNGSNSGQMEEINTKEVAQRITTELKRYSIPQAIFAQRVLCRSQGTLSDLLRNPKPWSKLKSGRETFRRMWKWLQEPEFQRMSALRLAACKRKEQEHGKDRGNTPKKPRLVFTDVQRRTLHAIFKENKRPSKELQITISQQLGLELSTVSNFFMNARRRSLDKWQDEGSSNSGNSSSSSSTCTKA

SEQ ID NO: 15444 - protein, 504 aa, Homo Sapiens
MKAAYTAYRCLTKDLEGCAMNPELTMESLGTLHGPAGGGSGGGGGGGGGGGGGGPGHEQELLASPSPHHAGRGAAGSLRGPPPPPTAHQELGTAAAAAAAASRSAMVTSMASILDGGDYRPELSIPLHHAMSMSCDSSPPGMGMSNTYTTLTPLQPLPPISTVSDKFHHPHPHHHPHHHHHHHHQRLSGNVSGSFTLMRDERGLPAMNNLYSPYKEMPGMSQSLSPLAATPLGNGLGGLHNAQQSLPNYGPPGHDKMLSPNFDAHHTAMLTRGEQHLSRGLGTPPAAMMSHLNGLHHPGHTQSHGPVLAPSRERPPSSSSGSQVATSGQLEEINTKEVAQRITAELKRYSIPQAIFAQRVLCRSQGTLSDLLRNPKPWSKLKSGRETFRRMWKWLQEPEFQRMSALRLAACKRKEQEPNKDRNNSQKKSRLVFTDLQRRTLFAIFKENKRPSKEMQITISQQLGLELTTVSNFFMNARRRSLEKWQDDLSTGGSSSTSSTCTKA

SEQ ID NO: 15445 - protein, 494 aa, Homo Sapiens
MELSLESLGGLHSVAHAQAGELLSPGHARSAAAQHRGLVAPGRPGLVAGMASLLDGGGGGGGGGAGGAGGAGSAGGGADFRGELAGPLHPAMGMACEAPGLGGTYTTLTPLQHLPPLAAVADKFHQHAAAAAVAGAHGGHPHAHPHPAAAPPPPPPPQRLAASVSGSFTLMRDERAALASVGHLYGPYGKELPAMGSPLSPLPNALPPALHGAPQPPPPPPPPPLAAYGPPGHLAGDKLLPPAAFEPHAALLGRAEDALARGLPGGGGGTGSGGAGSGSAAGLLAPLGGLAAAGAHGPHGGGGGPGGSGGGPSAGAAAEEINTKEVAQRITAELKRYSIPQAIFAQRILCRSQGTLSDLLRNPKPWSKLKSGRETFRRMWKWLQEPEFQRMSALRLAACKRKEQEQQKERALQPKKQRLVFTDLQRRTLIAIFKENKRPSKEMQVTISQQLGLELNTVSNFFMNARRRCMNRWAEEPSTAPGGPAGATATFSKA

SEQ ID NO: 15446 - protein, 266 aa, Homo Sapiens
MGSKTLPAPVPIHPSLQLTNYSFLQAVNGLPTVPSDHLPNLYGFSALHAVHLHQWTLGYPAMHLPRSSFSKVPGTVSSLVDARFQLPAFPWFPHVIQPKPEITAGGSVPALKTKPRFDFANLALAATQEDPAKLGRGEGPGSPAGGLGALLDVTKLSPEKKPTRGRLPSKTKKEFVCKFCGRHFTKSYNLLIHERTHTDERPYTCDICHKAFRRQDHLRDHRYIHSKEKPFKCQECGKGFCQSRTLAVHKTLHSQVKELKTSKIKC

SEQ ID NO: 15447 - protein, 312 aa, Homo Sapiens
MGSKALPAPIPLHPSLQLTNYSFLQAVNTFPATVDHLQGLYGLSAVQTMHMNHWTLGYPNVHEITRSTITEMAAAQGLVDARFPFPALPFTTHLFHPKQGAIAHVLPALHKDRPRFDFANLAVAATQEDPPKMGDLSKLSPGLGSPISGLSKLTPDRKPSRGRLPSKTKKEFICKFCGRHFTKSYNLLIHERTHTDERPYTCDICHKAFRRQDHLRDHRYIHSKEKPFKCQECGKGFCQSRTLAVHKTLHMQESPHKCPTCGRTFNQRSNLKTHLLTHTDIKPYSCEQCGKVFRRNCDLRRHSLTHTPRQDF

SEQ ID NO: 15448 - protein, 325 aa, Homo Sapiens
MLSHADLLDARLGMKDAAELLGHREAVKCRLGVGGSDPGGHPGDLAPNSDPVEGATLLPGEDITTVGSTPASLAVSAKDPDKQPGPQGGPNPSQAGQQQGQQKQKRHRTRFTPAQLNELERSFAKTHYPDIFMREELALRIGLTESRVQVWFQNRRAKWKKRKKTTNVFRAPGTLLPTPGLPQFPSAAAAAAAAMGDSLCSFHANDTRWAAAAMPGVSQLPLPPALGRQQAMAQSLSQCSLAAGPPPNSMGLSNSLAGSNGAGLQSHLYQPAFPGMVPASLPGPSNVSGSPQLCSSPDSSDVWRGTSIASLRRKALEHTVSMSFT

SEQ ID NO: 15449 - protein, 354 aa, Homo Sapiens
MMSYLKQPPYGMNGLGLAGPAMDLLHPSVGYPATPRKQRRERTTFTRSQLDVLEALFAKTRYPDIFMREEVALKINLPESRVQVWFKNRRAKCRQQQQSGSGTKSRPAKKKSSPVRESSGSESSGQFTPPAVSSSASSSSSASSSSANPAAAAAAGLGGNPVAAASSLSTPAASSIWSPASISPGSAPASVSVPEPLAAPSNTSCMQRSVAAGAATAAASYPMSYGQGGSYGQGYPTPSSSYFGGVDCSSYLAPMHSHHHPHQLSPMAPSSMAGHHHHHPHAHHPLSQSSGHHHHHHHHHHQGYGGSGLAFNSADCLDYKEPGAAAASSAWKLNFNSPDCLDYKDQASWRFQVL

SEQ ID NO: 15450 - protein, 289 aa, Homo Sapiens
MMSYLKQPPYAVNGLSLTTSGMDLLHPSVGYPATPRKQRRERTTFTRAQLDVLEALFAKTRYPDIFMREEVALKINLPESRVQVWFKNRRAKCRQQQQQQQNGGQNKVRPAKKKTSPAREVSSESGTSGQFTPPSSTSVPTIASSSAPVSIWSPASISPLSDPLSTSSSCMQRSYPMTYTQASGYSQGYAGSTSYFGGMDCGSYLTPMHHQLPGPGATLSPMGTNAVTSHLNQSPASLSTQGYGASSLGFNSTTDCLDYKDQTASWKLNFNADCLDYKDQTSSWKFQVL

SEQ ID NO: 15451 - protein, 267 aa, Homo Sapiens
MPRAFLVKKPCVSTCKRNWSELPDEERGEIYVPVSLGFCPPQPYREPEPSVAEPPSCPLALNMSLRDSSYSMAPGPCVVAQLPSEDMGHLTDPQSRDHGFLRTKMKVTLGDSPSGDLFTCRVCQKAFTYQRMLNRHMKCHNDVKRHLCTYCGKGFNDTFDLKRHVRTHTGVRPYKCSLCDKAFTQRCSLESHLKKIHGVQQKYAYKERRAKLYVCEECGCTSESQEGHVLHLKEHHPDSPLLRKTSKKVAVALQNTVTSLLQGSPHL

SEQ ID NO: 15452 - protein, 275 aa, Homo Sapiens
MPKVFLVKRRSLGVSVRSWDELPDEKRADTYIPVGLGRLLHDPPEDCRSDGGSSSGSGSSSAGEPGGAESSSSPHAPESETPEPGDAEGPDGHLATKQRPVARSKIKFTTGTCSDSVVHSCDLCGKGFRLQRMLNRHLKCHNQVKRHLCTFCGKGFNDTFDLKRHVRTHTGIRPYKCNVCNKAFTQRCSLESHLKKIHGVQQQYAYKQRRDKLYVCEDCGYTGPTQEDLYLHVNSAHPGSSFLKKTSKKLAALLQGKLTSAHQENTSLSEEEERK

SEQ ID NO: 15453 - protein, 214 aa, Homo Sapiens
MPRAFLVRSRRPQPPNWGHLPDQLRGDAYIPGGPLTVPGGKGQERRSVTIWLFSSDCSSLGGPPAQQSSSVRDPWTAQPTQGNLTSAPRGPGTLGCPLCPKAFPLQRMLTRHLKCHSPVRRHLCRCCGKGFHDAFDLKRHMRTHTGIRPFRCSACGKAFTQRCSLEAHLAKVHGQPASYAYRERREKLHVCEDCGFTSSRPDTYAQHRALHRAA

SEQ ID NO: 15454 - protein, 1014 aa, Homo Sapiens
MAESSDKLYRVEYAKSGRASCKKCSESIPKDSLRMAIMVQSPMFDGKVPHWYHFSCFWKVGHSIRHPDVEVDGFSELRWDDQQKVKKTAEAGGVTGKGQDGIGSKAEKTLGDFAAEYAKSNRSTCKGCMEKIEKGQVRLSKKMVDPEKPQLGMIDRWYHPGCFVKNREELGFRPEYSASQLKGFSLLATEDKEALKKQLPGVKSEGKRKGDEVDGVDEVAKKKSKKEKDKDSKLEKALKAQNDLIWNIKDELKKVCSTNDLKELLIFNKQQVPSGESAILDRVADGMVFGALLPCEECSGQLVFKSDAYYCTGDVTAWTKCMVKTQTPNRKEWVTPKEFREISYLKKLKVKKQDRIFPPETSASVAATPPPSTASAPAAVNSSASADKPLSNMKILTLGKLSRNKDEVKAMIEKLGGKLTGTANKASLCISTKKEVEKMNKKMEEVKEANIRVVSEDFLQDVSASTKSLQELFLAHILSPWGAEVKAEPVEVVAPRGKSGAALSKKSKGQVKEEGINKSEKRMKLTLKGGAAVDPDSGLEHSAHVLEKGGKVFSATLGLVDIVKGTNSYYKLQLLEDDKENRYWIFRSWGRVGTVIGSNKLEQMPSKEDAIEHFMKLYEEKTGNAWHSKNFTKYPKKFYPLEIDYGQDEEAVKKLTVNPGTKSKLPKPVQDLIKMIFDVESMKKAMVEYEIDLQKMPLGKLSKRQIQAAYSILSEVQQAVSQGSSDSQILDLSNRFYTLIPHDFGMKKPPLLNNADSVQAKVEMLDNLLDIEVAYSLLRGGSDDSSKDPIDVNYEKLKTDIKVVDRDSEEAEIIRKYVKNTHATTHNAYDLEVIDIFKIEREGECQRYKPFKQLHNRRLLWHGSRTTNFAGILSQGLRIAPPEAPVTGYMFGKGIYFADMVSKSANYCHTSQGDPIGLILLGEVALGNMYELKHASHISKLPKGKHSVKGLGKTTPDPSANISLDGVDVPLGTGISSGVNDTSLLYNEYIVYDIAQVNLKYLLKLKFNFKTSLW

SEQ ID NO: 15455 - protein, 701 aa, Homo Sapiens
MAQAGVVGEVTQVLCAAGGALELPELRRRLRMGLSADALERLLRQRGRFVVAVRAGGAAAAPERVVLAASPLRLCRAHQGSKPGCVGLCAQLHLCRFMVYGACKFLRAGKNCRNSHSLTTEHNLSVLRTHGVDHLSYNELCQLLFQNDPWLLPEICQHYNKGDGPHGSCAFQKQCIKLHICQYFLQGECKFGTSCKRSHDFSNSENLEKLEKLGMSSDLVSRLPTIYRNAHDIKNKSSAPSRVPPLFVPQGTSERKDSSGSVSPNTLSQEEGDQICLYHIRKSCSFQDKCHRVHFHLPYRWQFLDRGKWEDLDNMELIEEAYCNPKIERILCSESASTFHSHCLNFNAMTYGATQARRLSTASSVTKPPHFILTTDWIWYWSDEFGSWQEYGRQGTVHPVTTVSSSDVEKAYLAYCTPGSDGQAATLKFQAGKHNYELDFKAFVQKNLVYGTTKKVCRRPKYVSPQDVTTMQTCNTKFPGPKSIPDYWDSSALPDPGFQKITLSSSSEEYQKVWNLFNRTLPFYFVQKIERVQNLALWEVYQWQKGQMQKQNGGKAVDERQLFHGTSAIFVDAICQQNFDWRVCGVHGTSYGKGSYFARDAAYSHHYSKSDTQTHTMFLARVLVGEFVRGNASFVRPPAKEGWSNAFYDSCVNSVSDPSIFVIFEKHQVYPEYVIQYTTSSKPSVTPSILLALGSLFSSRQ

SEQ ID NO: 15456 - protein, 687 aa, Homo Sapiens
MERVNDASCGPSGCYTYQVSRHSTEMLHNLNQQRKNGGRFCDVLLRVGDESFPAHRAVLAACSEYFESVFSAQLGDGGAADGGPADVGGATAAPGGGAGGSRELEMHTISSKVFGDILDFAYTSRIVVRLESFPELMTAAKFLLMRSVIEICQEVIKQSNVQILVPPARADIMLFRPPGTSDLGFPLDMTNGAALAANSNGIAGSMQPEEEAARAAGAAIAGQASLPVLPGVDRLPMVAGPLSPQLLTSPFPSVASSAPPLTGKRGRGRPRKANLLDSMFGSPGGLREAGILPCGLCGKVFTDANRLRQHEAQHGVTSLQLGYIDLPPPRLGENGLPISEDPDGPRKRSRTRKQVACEICGKIFRDVYHLNRHKLSHSGEKPYSCPVCGLRFKRKDRMSYHVRSHDGSVGKPYICQSCGKGFSRPDHLNGHIKQVHTSERPHKCQTCNASFATRDRLRSHLACHEDKVPCQVCGKYLRAAYMADHLKKHSEGPSNFCSICNRGFSSASYLKVHVKTHHGVPLPQVSRHQEPILNGGAAFHCARTYGNKEGQKCSHQDPIESSDSYGDLSDASDLKTPEKQSANGSFSCDMAVPKNKMESDGEKKYPCPECGSFFRSKSYLNKHIQKVHVRALGGPLGDLGPALGSPFSPQQNMSLLESFGFQIVQSAFASSLVDPEVDQQPMGPEGK

SEQ ID NO: 15457 - protein, 340 aa, Homo Sapiens
MATGGYRTSSGLGGSTTDFLEEWKAKREKMRAKQNPPGPAPPGGGSSDAAGKPPAGALGTPAAAAANELNNNLPGGAPAAPAVPGPGGVNCAVGSAMLTRAAPGPRRSEDEPPAASASAAPPPQRDEEEPDGVPEKGKSSGPSARKGKGQIEKRKLREKRRSTGVVNIPAAECLDEYEDDEAGQKERKREDAITQQNTIQNEAVNLLDPGSSYLLQEPPRTVSGRYKSTTSVSEEDVSSRYSRTDRSGFPRYNRDANVSGTLVSSSTLEKKIEDLEKEVVRERQENLRLVRLMQDKEEMIGKLKEEIDLLNRDLDDIEDENEQLKQENKTLLKVVGQLTR

SEQ ID NO: 15458 - protein, 534 aa, Homo Sapiens
MKFTLGLGSRAWRVSWEGAAAAAAGPGAGGSALRCRAQRVSSPRLGRRGSRLSGALPLCLSRGGGGAQALPDCAGPSPGHPGHPGARQLAGPLAMEQTYGEVNQLGGVFVNGRPLPNAIRLRIVELAQLGIRPCDISRQLRVSHGCVSKILARYNETGSILPGAIGGSKPRVTTPNVVKHIRDYKQGDPGIFAWEIRDRLLADGVCDKYNVPSVSSISRILRNKIGSLAQPGPYEASKQPPSQPTLPYNHIYQYPYPSPVSPTGAKMGSHPGVPGTAGHVSIPRSWPSAHSVSNILGIRTFMEQTGALAGSEGTAYSPKMEDWAGVNRTAFPATPAVNGLEKPALEADIKYTQSASTLSAVGGFLPACAYPASNQHGVYSAPGGGYLAPGPPWPPAQGPPLAPPGAGVAVHGGELAAAMTFKHPSREGSLPAPAARPRTPSVAYTDCPSRPRPPRGSSPRTRARRERQADPGAQVCAAAPAIGTGRIGGLAEEEASAGPRGARPASPQAQPCLWPDPPHFLYWSGFLGFSELGF

SEQ ID NO: 15459 - protein, 417 aa, Homo Sapiens; identical to SEQ ID NO: 10021

SEQ ID NO: 15460 - protein, 479 aa, Homo Sapiens
MTTLAGAVPRMMRPGPGQNYPRSGFPLEVSTPLGQGRVNQLGGVFINGRPLPNHIRHKIVEMAHHGIRPCVISRQLRVSHGCVSKILCRYQETGSIRPGAIGGSKPKQVTTPDVEKKIEEYKRENPGMFSWEIRDKLLKDAVCDRNTVPSVSSISRILRSKFGKGEEEEADLERKEAEESEKKAKHSIDGILSERASAPQSDEGSDIDSEPDLPLKRKQRRSRTTFTAEQLEELERAFERTHYPDIYTREELAQRAKLTEARVQVWFSNRRARWRKQAGANQLMAFNHLIPGGFPPTAMPTLPTYQLSETSYQPTSIPQAVSDPSSTVHRPQPLPPSTVHQSTIPSNPDSSSAYCLPSTRHGFSSYTDSFVPPSGPSNPMNPTIGNGLSPQVMGLLTNHGGVPHQPQTDYALSPLTGGLEPTTTVSASCSQRLDHMKSLDSLPTSQSYCPPTYSTTGYSMDPVTGYQYGQYGQSKPWTF

SEQ ID NO: 15461 - protein, 350 aa, Homo Sapiens
MHQDGISSMNQLGGLFVNGRPLPLDTRQQIVRLAVSGMRPCDISRILKVSNGCVSKILGRYYRTGVLEPKGIGGSKPRLATPPVVARIAQLKGECPALFAWEIQRQLCAEGLCTQDKTPSVSSINRVLRALQEDQGLPCTRLRSPAVLAPAVLTPHSGSETPRGTHPGTGHRNRTIFSPSQAEALEKEFQRGQYPDSVARGKLATATSLPEDTVRVWFSNRRAKWRRQEKLKWEMQLPGASQGLTVPRVAPGIISAQQSPGSVPTAALPALEPLGPSCYQLCWATAPERCLSDTPPKACLKPCWDCGSFLLPVIAPSCVDVAWPCLDASLAHHLIGGAGKATPTHFSHWP

SEQ ID NO: 15462 - protein, 391 aa, Homo Sapiens
MDLEKNYPTPRTSRTGHGGVNQLGGVFVNGRPLPDVVRQRIVELAHQGVRPCDISRQLRVSHGCVSKILGRYYETGSIKPGVIGGSKPKVATPKVVEKIAEYKRQNPTMFAWEIRDRLLAERVCDNDTVPSVSSINRIIRTKVQQPPNQPVPASSHSIVSTGSVTQVSSVSTDSAGSSYSISGILGITSPSADTNKRKRDEGIQESPVPNGHSLPGRDFLRKQMRGDLFTQQQLEVLDRVFERQHYSDIFTTTEPIKPEQTTEYSAMASLAGGLDDMKANLASPTPADIGSSVPGPQSYPIVTGRDLASTTLPGYPPHVPPAGQGSYSAPTLTGMVPGSEFSGSPYSHPQYSSYNDSWRFPNPGLLGSPYYYSAAARGAAPPAAATAYDRH

SEQ ID NO: 15463 - protein, 422 aa, Homo Sapiens [sequence omitted]

SEQ ID NO: 15464 - protein, 505 aa, Homo Sapiens
MAALPGTVPRMMRPAPGQNYPRTGFPLEVSTPLGQGRVNQLGGVFINGRPLPNHIRHKIVEMAHHGIRPCVISRQLRVSHGCVSKILCRYQETGSIRPGAIGGSKPRQVATPDVEKKIEEYKRENPGMFSWEIRDRLLKDGHCDRSTVPSGLVSSISRVLRIKFGKKEEEDEADKKEDDGEKKAKHSIDGILGDKGNRLDEGSDVESEPDLPLKRKQRRSRTTFTAEQLEELEKAFERTHYPDIYTREELAQRTKLTEARVQVWFSNRRARWRKQAGANQLAAFNHLLPGGFPPTGMPTLPPYQLPDSTYPTTTISQDGGSTVHRPQPLPPSTMHQGGLAAAAAAADTSSAYGARHSFSSYSDSFMNPAAPSNHMNPVSNGLSPQVMSILGNPSAVPPQPQADFSISPLHGGLDSATSISASCSQRADSIKPGDSLPTSQAYCPPTYSTTGYSVDPVAGYQYGQYGQTAVDYLAKNVSLSTQRRMKLGEHSAVLGLLPVETGQAY

SEQ ID NO: 15465 - protein, 450 aa, Homo Sapiens
MPHNSIRSGHGGLNQLGGAFVNGRPLPEVVRQRIVDLAHQGVRPCDISRQLRVSHGCVSKILGRYYETGSIRPGVIGGSKPKVATPKVVEKIGDYKRQNPTMFAWEIRDRLLAEGVCDNDTVPSVSSINRIIRTKVQQPFNLPMDSCVATKSLSPGHTLIPSSAVTPPESPQSDSLGSTYSINGLLGIAQPGSDKRKMDDSDQDSCRLSIDSQSSSSGPRKHLRTDAFSQHHLEPLECPFERQHYPEAYASPSHTKGEQGLYPLPLLNSTLDDGKATLTPSNTPLGRNLSTHQTYPVVADPHSPFAIKQETPEVSSSSSTPSSLSSSAFLDLQQVGSGVPPFNAFPHAASVYGQFTGQALLSGREMVGPTLPGYPPHIPTSGQGSYASSAIAGMVAGSEYSGNAYGHTPYSSYSEAWRFPNSSLLSSPYYYSSTSRPSAPPTTATAFDHL

SEQ ID NO: 15466 - protein, 341 aa, Homo Sapiens
MEPAFGEVNQLGGVFVNGRPLPNAIRLRIVELAQLGIRPCDISRQLRVSHGCVSKILARYNETGSILPGAIGGSKPRVTTPTVVKHIRTYKQRDPGIFAWEIRDRLLADGVCDKYNVPSVSSISRILRNKIGNLAQQGHYDSYKQHQPTPQPALPYNHIYSYPSPITAAAAKVPTPPGVPAIPGSVAMPRTWPSSHSVTDILGIRSITDQVSDSSPYHSPKVEEWSSLGRNNFPAAAPHAVNGLEKGALEQEAKYGQAPNGLPAVGSFVSASSMAPYPTPAQVSPYMTYSAAPSGYVAGHGWQHAGGTSLSPHNCDIPASLAFKGMQAAREGSHSVTASAL

SEQ ID NO: 15467 - protein, 917 aa, Homo Sapiens
MFRKARRVNVRKRNDSEEEERERDEEQEPPPLLPPPGTGEEAGPGGGDRAPGGESLLGPGPSPPSALTPGLGAEAGGGFPGGAEPGNGLKPRKRPRENKEVPRASLLSFQDEEEENEEVFKVKKSSYSKKIVKLLKKEYKEDLEKSKIKTELNSSAESEQPLDKTGHVKDTNQEDGVIISEHGEDEMDMESEKEEEKPKTGGAFSNALSSLNVLRPGEIPDAAFIHAARKKRQMARELGDFTPHDNEPGKGRLVREDENDASDDEDDDEKRRIVFSVKEKSQRQKIAEEIGIEGSDDDALVTGEQDEELSRWEQEQIRKGINIPQVQASQPAEVNMYYQNTYQTMPYGSSYGIPYSYTAYGSSDAKSQKTDNTVPFKTPSNEMTPVTIDLVKKQLKDRLDSMKELHKTNRQQHEKHLQSRVDSTRAIERLEGSSGGIGERYKFLQEMRGYVQDLLECFSEKVPLINELESAIHQLYKQRASRLVQRRQDDIKDESSEFSSHSNKALMAPNLDSFGRDRALYQEHAKRRIAEREARRTRRRQAREQTGKMADHLEGLSSDDEETSTDITNFNLEKDRISKESGKVFEDVLESFYSIDCIKSQFEAWRSKYYTSYKDAYIGLCLPKLFNPLIRLQLLTWTPLEAKCRDFENMLWFESLLFYGCEEREQEKDDVDVALLPTIVEKVILPKLTVIAENMWDPFSTTQTSRMVGITLKLINGYPSVVNAENKNTQVYLKALLLRMRRTLDDDVFMPLYPKNVLENKNSGPYLFFQRQFWSSVKLLGNFLQWYGIFSNKTLQELSIDGLLNRYILMAFQNSEYGDDSIKKAQNVINCFPKQWFMNLKGERTISQLENFCRYLVHLADTIYRNSIGCSDVEKRNARENIKQIVKLLASVRALDHAMSVASDHNVKEFKSLIEGK

SEQ ID NO: 15468 - protein, 1689 aa, Homo Sapiens
MGSKRRRATSPSSSVSGDFDDGHHSVSTPGPSRKRRRLSNLPTVDPIAVCHELYNTIRDYKDEQGRLLCELFIRAPKRRNQPDYYEVVSQPIDLMKIQQKLKMEEYDDVNLLTADFQLLFNNAKSYYKPDSPEYKAACKLWDLYLRTRNEFVQKGEADDEDDDEDGQDNQGTVTEGSSPAYLKEILEQLLEAIVVATNPSGRLISELFQKLPSKVQYPDYYAIIKEPIDLKTIAQRIQNGSYKSIHAMAKDIDLLAKNAKTYNEPGSQVFKDANSIKKIFYMKKAEIEHHEMAKSSLRMRTPSNLAAARLTGPSHSKGSLGEERNPTSKYYRNKRAVQGGRLSAITMALQYGSESEEDAALAAARYEEGESEAESITSFMDVSNPFYQLYDTVRSCRNNQGQLIAEPFYHLPSKKKYPDYYQQIKMPISLQQIRTKLKNQEYETLDHLECDLNLMFENAKRYNVPNSAIYKRVLKLQQVMQAKKKELARRDDIEDGDSMISSATSDTGSAKRKSKKNIRKQRMKILFNVVLEAREPGSGRRLCDLFMVKPSKKDYPDYYKIILEPMDLKIIEHNIRNDKYAGEEGMIEDMKLMFRNARHYNEEGSQVYNDAHILEKLLKEKRKELGPLPDDDDMASPKLKLSRKSGISPKKSKYMTPMQQKLNEVYEAVKNYTDKRGRRLSAIFLRLPSRSELPDYYLTIKKPMDMEKIRSHMMANKYQDIDSMVEDFVMMFNNACTYNEPESLIYKDALVLHKVLLETRRDLEGDEDSHVPNVTLLIQELIHNLFVSVMSHQDDEGRCYSDSLAEIPAVDPNFPNKPPLTFDIIRKNVENNRYRRLDLFQEHMFEVLERARRMNRTDSEIYEDAVELQQFFIKIRDELCKNGEILLSPALSYTTKHLHNDVEKERKEKLPKEIEEDKLKREEEKREAEKSEDSSGAAGLSGLHRTYSQDCSFKNSMYHVGDYVYVEPAEANLQPHIVCIERLWEDSAGEKWLYGCWFYRPNETFHLATRKFLEKEVFKSDYYNKVPVSKILGKCVVMFVKEYFKLCPENFRDEDVFVCESRYSAKTKSFKKIKLWTMPISSVRFVPRDVPLPVVRVASVFANADKGDDEKNTDNSEDSRAEDNFNLEKEKEDVPVEMSNGEPGCHYFEQLHYNDMWLKVGDCVFIKSHGLVRPRVGRIEKVWVRDGAAYFYGPIFIHPEETEHEPTKMFYKKEVFLSNLEETCPMTCILGKCAVLSFKDFLSCRPTEIPENDILLCESRYNESDKQMKKFKGLKRFSLSAKVVDDEIYYFRKPIVPQKEPSPLLEKKIQLLEAKFAELEGGDDDIEEMGEEDSEVIEPPSLPQLQTPLASELDLMPYTPPQSTPKSAKGSAKKEGSKRKINMSGYILFSSEMRAVIKAQHPDYSFGELSRLVGTEWRNLETAKKAEYEERAAKVAEQQERERAAQQQQPSASPRAGTPVGALMGVVPPPTPMGMLNQQLTPVAGMMGGYPPGLPPLQGPVDGLVSMGSMQPLHPGGPPPHHLPPGVPGLPGIPPPGVMNQGVAPMVGTPAPGGSPYGQQVGVLGPPGQQAPPPYPGPHPAGPPVIQQPTTPMFVAPPPKTQRLLHSEAYLKYIEGLSAESNSISKWDQTLAARRRDVHLSKEQESRLPSHWLKSKGAHTTMADALWRLRDLMLRDTLNIRQAYNLENV

SEQ ID NO: 15469 - protein, 430 aa, Homo Sapiens
MDEQPRLMHSHAGVGMAGHPGLSQHLQDGAGGTEGEGGRKQDIGDILQQIMTITDQSLDEAQARKHALNCHRMKPALFNVLCEIKEKTVLSIRGAQEEEPTDPQLMRLDNMLLAEGVAGPEKGGGSAAAAAAAAASGGAGSDNSVEHSDYRAKLSQIRQIYHTELEKYEQACNEFTTHVMNLLREQSRTRPISPKEIERMVSIIHRKFSSIQMQLKQSTCEAVMILRSRFLDARRKRRNFNKQATEILNEYFYSHLSNPYPSEEAKEELAKKCGITVSQVSNWFGNKRIRYKKNIGKFQEEANIYAAKTAVTATNVSAHGSQANSPSTPNSAGSSSSFNMSNSGDLFMSVQSLNGDSYQGAQVGANVQSQVDTLRHVISQTGGYSDGLAASQMYSPQGISANGGWQDATTPSSVTSPTEGPGSVHSDTSN

SEQ ID NO: 15470 - protein, 430 aa, Homo Sapiens
MDERLLGPPPPGGGRGGLGLVSGEPGGPGEPPGGGDPGGGSGGVPGGRGKQDIGDILQQIMTITDQSLDEAQAKKHALNCHRMKPALFSVLCEIKEKTGLSIRSSQEEEPVDPQLMRLDNMLLAEGVAGPEKGGGSAAAAAAAAASGGGVSPDNSIEHSDYRSKLAQIRHIYHSELEKYEQACNEFTTHVMNLLREQSRTRPVAPKEMERMVSIIHRKFSAIQMQLKQSTCEAVMILRSRFLDARRKRRNFSKQATEVLNEYFYSHLSNPYPSEEAKEELAKKCGITVSQVSNWFGNKRIRYKKNIGKFQEEANIYAVKTAVSVTQGGHSRTSSPTPPSSAGSGGSFNLSGSGDMFLGMPGLNGDSYSASQVESLRHSMGPGGYGDNLGGGQMYSPREMRANGSWQEAVTPSSVTSPTEGPGSVHSDTSN

SEQ ID NO: 15471 - protein, 434 aa, Homo Sapiens
MDDQSRMLQTLAGVNLAGHSVQGGMALPPPPHGHEGADGDGRKQDIGDILHQIMTITDQSLDEAQAKKHALNCHRMKPALFSVLCEIKEKTGLSIRGAQEEDPPDPQLMRLDNMLLAEGVSGPEKGGGSAAAAAAAAASGGSSDNSIEHSDYRAKLTQIRQIYHTELEKYEQACNEFTTHVMNLLREQSRTRPISPKEIERMVGIIHRKFSSIQMQLKQSTCEAVMILRSRFLDARRKRRNFSKQATEILNEYFYSHLSNPYPSEEAKEELAKKCSITVSQVSNWFGNKRIRYKKNIGKFQEEANLYAAKTAVTAAHAVAAAVQNNQTNSPTTPNSGSSGSFNLPNSGDMFMNMQSLNGDSYQGSQVGANVQSQVDTLRHVINQTGGYSDGLGGNSLYSPHNLNANGGWQDATTPSSVTSPTEGPGSVHSDTSN

SEQ ID NO: 15472 - protein, 374 aa, Homo Sapiens
MAAPPRPAPSPPAPRRLDTSDVLQQIMAITDQSLDEAQARKHALNCHRMKPALFSVLCEIKEKTVVSIRGIQDEDPPDAQLLRLDNMLLAEGVCRPEKRGRGGAVARAGTATPGGCPNDNSIEHSDYRAKLSQIRQIYHSELEKYEQACREFTTHVTNLLQEQSRMRPVSPKEIERMVGAIHGKFSAIQMQLKQSTCEAVMTLRSRLLDARRKRRNFSKQATEVLNEYFYSHLNNPYPSEEAKEELARKGGLTISQVSNWFGNKRIRYKKNMGKFQEEATIYTGKTAVDTTEVGVPGNHASCLSTPSSGSSGPFPLPSAGDAFLTLRTLASLQPPPGGGCLQSQAQGSWQGATPQPATASPAGDPGSINSSTSN

SEQ ID NO: 15473 - protein, 356 aa, Homo Sapiens
MDAGVTESGLNVTLTIRLLMHGKEVGSIIGKKGESVKRIREESGARINISEGNCPERIITLTGPTNAIFKAFAMIIDKLEEDINSSMTNSTAASRPPVTLRLVVPATQCGSLIGKGGCKIKEIRESTGAQVQVAGDMLPNSTERAITIAGVPQSVTECVKQICLVMLETLSQSPQGRVMTIPYQPMPASSPVICAGGQDRCSDAAGYPHATHDLEGPPLDAYSIQGQHTISPLDLAKLNQVARQQSHFAMMHGGTGFAGIDSSSPEVKGYWASLDASTQTTHELTIPNNLIGCIIGRQGANINEIRQMSGAQIKIANPVEGSSGRQVTITGSAASISLAQYLINARLSSEKGMGCS

SEQ ID NO: 15474 - protein, 365 aa, Homo Sapiens
MDTGVIEGGLNVTLTIRLLMHGKEVGSIIGKKGESVKKMREESGARINISEGNCPERIITLAGPTNAIFKAFAMIIDKLEEDISSSMTNSTAASRPPVTLRLVVPASQCGSLIGKGGCKIKEIRESTGAQVQVAGDMLPNSTERAITIAGIPQSIIECVKQICVVMLETLSQSPPKGVTIPYRPKPSSSPVIFAGGQDRYSTGSDSASFPHTTPSMCLNPDLEGPPLEAYTIQGQYAIPQPDLTKLHQLAMQQSHFPMTHGNTGFSGIESSSPEVKGYWGLDASAQTTSHELTIPNDLIGCIIGRQGAKINEIRQMSGAQIKIANPVEGSTDRQVTITGSAASISLAQYLINVRLSSETGGMGSS

SEQ ID NO: 15475 - protein, 371 aa, Homo Sapiens
MGEGDAFWAPSVLPHSTLSTLSHHPQPQFGRRMESKVSEGGLNVTLTIRLLMHGKEVGSIIGKKGETVKKMREESGARINISEGNCPERIVTITGPTDAIFKAFAMIAYKFEEDIINSMSNSPATSKPPVTLRLVVPASQCGSLIGKGGSKIKEIRESTGAQVQVAGDMLPNSTERAVTISGTPDAIIQCVKQICVVMLESPPKGATIPYRPKPASTPVIFAGGQAYTIQGQYAIPHPDQLTKLHQLAMQQTPFPPLGQTNPAFPGEKLPLHSSEEAQNLMGQSSGLDASPPASTHELTIPNDLIGCIIGRQGTKINEIRQMSGAQIKIANATEGSSERQITITGTPANISLAQYLINARLTSEVTGMGTL

SEQ ID NO: 15476 - protein, 403 aa, Homo Sapiens
MSGSDGGLEEEPELSITLTLRMLMHGKEVGSIIGKKGETVKRIREQSSARITISEGSCPERITTITGSTAAVFHAVSMIAFKLDEDLCAAPANGGNVSRPPVTLRLVIPASQCGSLIGKAGTKIKEIRETTGAQVQVAGDLLPNSTERAVTVSGVPDAIILCVRQICAVILESPPKGATIPYHPSLSLGTVLLSANQGFSVQGQYGAVTPAEVTKLQQLSSHAVPFATPSVVPGLDPGTQTSSQEFLVPNDLIGCVIGRQGSKISEIRQMSGAHIKIGNQAEGAGERHVTITGSPVSIALAQYLITACLETAKSTSGGTPSSAPADLPAPFSPPLTALPTAPPGLLGTPYAISLSNFIGLKPMPFLALPPASPGPPPGLAAYTAKMAAANGSKKAERQKFSPY

SEQ ID NO: 15477 - protein, 350 aa, Homo Sapiens
MEGVAVVTAGSVGAAKTEGAAALPPPPPVSPPALTPAPAAGEEGPAPLSETGAPGCSGSRPPELEPERSLGRFRGRFEDEDEELEEEEELEEEEEEEEEDMSHFSLRLEGGRQDSEDEEERLINLSELTPYILCSICKGYLIDATTITECLHTFCKSCIVRHFYYSNRCPKCNIVVHQTQPLYNIRLDRQLQDIVYKLVINLEEREKKQMHDFYKERGLEVPKPAVPQPVPSSKGRSKKVLESVFRIPPELDMSLLLEFIGANEGTGHFKPLEKKFVRVSGEATIGHVEKFLRRKMGLDPACQVDIICGDHLLEQYQTLREIRRAIGDAAMQDGLLVLHYGLVVSPLKIT

SEQ ID NO: 15478 - protein, 501 aa, Homo Sapiens
MAASWRLGCDPRLLRYLVGFPGRRSVGLVKGALGWSVSRGANWRWFHSTQWLRGDPIKILMPSLSPTMEEGNIVKWLKKEGEAVSAGDALCEIETDKAVVTLDASDDGILAKIVVEEGSKNIRLGSLIGLIVEEGEDWKHVEIPKDVGPPPPVSKPSEPRPSPEPQISIPVKKEHIPGTLRFRLSPAARNILEKHSLDASQGTATGPRGIFTKEDALKLVQLKQTGKITESRPTPAPTATPTAPSPLQATAGPSYPRPVIPPVSTPGQPNAVGTFTEIPASNIRRVIAKRLTESKSTVPHAYATADCDLGAVLKVRQDLVKDDIKVSVNDFIIKAAAVTLKQMPDVNVSWDGEGPKQLPFIDISVAVATDKGLLTPIIKDAAAKGIQEIADSVKALSKKARDGKLLPEEYQGGSFSISNLGMFGIDEFTAVINPPQACILAVGRFRPVLKLTEDEEGNAKLQQRQLITVTMSSDSRVVDDELATRFLKSFKANLENPIRLA

SEQ ID NO: 15479 - protein, 283 aa, Homo Sapiens
MNGEEQYYAATQLYKDPCAFQRGPAPEFSASPPACLYMGRQPPPPPPHPFPGALGALEQGSPPDISPYEVPPLADDPAVAHLHHHLPAQLALPHPPAGPFPEGAEPGVLEEPNRVQLPFPWMKSTKAHAWKGQWAGGAYAAEPEENKRTRTAYTRAQLLELEKEFLFNKYISRPRRVELAVMLNLTERHIKIWFQNRRMKWKKEEDKKRGGGTAVGGGGVAEPEQDCAVTSGEELLALPPPPPPGGAVPPAAPVAAREGRLPPGLSASPQPSSVAPRRPQEPR

SEQ ID NO: 15480 - protein, 1588 aa, Homo Sapiens
MLPPKHLSATKPKKSWAPNLYELDSDLTKEPDVIIGEGPTDSEFFHQRFRNLIYVEFVGPRKTLIKLRNLCLDWLQPETRTKEEIIELLVLEQYLTIIPEKLKPWVRAKKPENCEKLVTLLENYKEMYQPEDDNNSDVTSDDDMTRNRRESSPPHSVHSFSDRDWDRRGRSRDMEPRDRWSHTRNPRSRMPPRDLSLPVVAKTSFEMDREDDRDSRAYESRSQDAESYQNVVDLAEDRKPHNTIQDNMENYRKLLSLVQLAEDDGHSHMTQGHSSRSKRSAYPSTSRGLKTMPEAKKSTHRRGICEDESSHGVIMEKFIKDVSRSSKSGRARESSDRSQRFPRMSDDNWKDISLNKRESVIQQRVYEGNAFRGGFRFNSTLVSRKRVLERKRRYHFDTDGKGSIHDQKGCPRKKPFECGSEMRKAMSVSSLSSLSSPSFTESQPIDFGAMPYVCDECGRSFSVISEFVEHQIMHTRENLYEYGESFIHSVAVSEVQKSQVGGKRFECKDCGETFNKSAALAEHRKIHARGYLVECKNQECEEAFMPSPTFSELQKIYGKDKFYECRVCKETFLHSSALIEHQKIHFGDDKDNEREHERERERERGETFRPSPALNEFQKMYGKEKMYECKVCGETFLHSSSLKEHQKIHTRGNPFENKGKVCEETFIPGQSLKRRQKTYNKEKLCDFTDGRDAFMQSSELSEHQKIHSRKNLFEGRGYEKSVIHSGPFTESQKSHTITRPLESDEDEKAFTISSNPYENQKIPTKENVYEAKSYERSVIHSLASVEAQKSHSVAGPSKPKVMAESTIQSFDAINHQRVRAGGNTSEGREYSRSVIHSLVASKPPRSHNGNELVESNEKGESSIYISDLNDKRQKIPARENPCEGGSKNRNYEDSVIQSVFRAKPQKSVPGEGSGEFKKDGEFSVPSSNVREYQKARAKKKYIEHRSNETSVIHSLPFGEQTFRPRGMLYECQECGECFAHSSDLTEHQKIHDREKPSGSRNYEWSVIRSLAPTDPQTSYAQEQYAKEQARNKCKDFRQFFATSEDLNTNQKIYDQEKSHGEESQGENTDGEETHSEETHGQETIEDPVIQGSDMEDPQKDDPDDKIYECEDCGLGFVDLTDLTDHQKVHSRKCLVDSREYTHSVIHTHSISEYQRDYTGEQLYECPKCGESFIHSSFLFEHQRIHEQDQLYSMKGCDDGFIALLPMKPRRNRAAERNPALAGSAIRCLLCGQGFIHSSALNEHMRLHREDDLLEQSQMAEEAIIPGLALTEFQRSQTEERLFECAVCGESFVNPAELADHVTVHKNEPYEYGSSYTHTSFLTEPLKGAIPFYECKDCGKSFIHSTVLTKHKELHLEEEEEDEAAAAAAAAAQEVEANVHVPQVVLRIQGLNVEAAEPEVEAAEPEVEAAEPEVEAAEPNGEAEGPDGEAAEPIGEAGQPNGEAEQPNGDADEPDGAGIEDPEERAEEPEGKAEEPEGDADEPDGVGIEDPEEGEDQEIQVEEPYYDCHECTETFTSSTAFSEHLKTHASMIIFEPANAFGECSGYIERASTSTGGANQADEKYFKCDVCGQLFNDRLSLARHQNTHTG

SEQ ID NO: 15481 - protein, 933 aa, Homo Sapiens
MTELKAKGPRAPHVAGGPPSPEVGSPLLCRPAAGPFPGSQTSDTLPEVSAIPISLDGLLFPRPCQGQDPSDEKTQDQQSLSDVEGAYSRAEATRGAGGSSSSPPEKDSGLLDSVLDTLLAPSGPGQSQPSPPACEVTSSWCLFGPELPEDPPAAPATQRVLSPLMSRSGCKVGDSSGTAAAHKVLPRGLSPARQLLLPASESPHWSGAPVKPSPQAAAVEVEEEDGSESEESAGPLLKGKPRALGGAAAGGGAAAVPPGAAAGGVALVPKEDSRFSAPRVALVEQDAPMAPGRSPLATTVMDFIHVPILPLNHALLAARTRQLLEDESYDGGAGAASAFAPPRSSPCASSTPVAVGDFPDCAYPPDAEPKDDAYPLYSDFQPPALKIKEEEEGAEASARSPRSYLVAGANPAAFPDFPLGPPPPLPPRATPSRPGEAAVTAAPASASVSSASSSGSTLECILYKAEGAPPQQGPFAPPPCKAPGASGCLLPRDGLPSTSASAAAAGAAPALYPALGLNGLPQLGYQAAVLKEGLPQVYPPYLNYLRPDSEASQSPQYSFESLPQKICLICGDEASGCHYGVLTCGSCKVFFKRAMEGQHNYLCAGRNDCIVDKIRRKNCPACRLRKCCQAGMVLGGRKFKKFNKVRVVRALDAVALPQPVGVPNESQALSQRFTFSPGQDIQLIPPLINLLMSIEPDVIYAGHDNTKPDTSSSLLTSLNQLGERQLLSVVKWSKSLPGFRNLHIDDQITLIQYSWMSLMVFGLGWRSYKHVSGQMLYFAPDLILNEQRMKESSFYSLCLTMWQIPQEFVKLQVSQEEFLCMKVLLLLNTIPLEGLRSQTQFEEMRSSYIRELIKAIGLRQKGVVSSSQRFYQLTKLLDNLHDLVKQLHLYCLNTFIQSRALSVEFPEMMSEVIAAQLPKILAGMVKPLLFHKK

SEQ ID NO: 15482 - protein, 272 aa, Homo Sapiens; identical to SEQ ID NO: 10322

SEQ ID NO: 15483 - protein, 299 aa, Homo Sapiens
MAQNLKDLAGRLPAGPRGMGTALKLLLGAGAVAYGVRESVFTVEGGHRAIFFNRIGGVQQDTILAEGLHFRIPWFQYPIIYDIRARPRKISSPTGSKDLQMVNISLRVLSRPNAQELPSMYQRLGLDYEERVLPSIVNEVLKSVVAKFNASQLITQRAQVSLLIRRELTERAKDFSLILDDVAITELSFSREYTAAVEAKQVAQQEAQRAQFLVEKAKQEQRQKIVQAEGEAEAAKMLGEALSKNPGYIKLRKIRAAQNISKTIATSQNRIYLTADNLVLNLQDESFTRGSDSLIKGKK

SEQ ID NO: 15484 - protein, 1012 aa, Homo Sapiens
MTKHPPNRRGISFEVGAQLEARDRLKNWYPAHIEDIDYEEGKVLIHFKRWNHRYDEWFCWDSPYLRPLEKIQLRKEGLHEEDGSSEFQINEQVLACWSDCRFYPAKVTAVNKDGTYTVKFYDGVVQTVKHIHVKAFSKDQNIVGNARPKETDHKSLSSSPDKREKFKEQRKATVNVKKDKEDKPLKTEKRPKQPDKEGKLICSEKGKVSEKSLPKNEKEDKENISENDREYSGDAQVDKKPENDIVKSPQENLREPKRKRGRPPSIAPTAVDSNSQTLQPITLELRRRKISKGCEVPLKRPRLDKNSSQEKSKNYSENTDKDLSRRRSSRLSTNGTHEILDPDLVVSDLVDTDPLQDTLSSTKESEEGQLKSALEAGQVSSALTCHSFGDGSGAAGLELNCPSMGENTMKTEPTSPLVELQEISTVEVTNTFKKTDDFGSSNAPAVDLDHKFRCKVVDCLKFFRKAKLLHYHMKYFHGMEKSLEPEESPGKRHVQTRGPSASDKPSQETLTRKRVSASSPTTKDKEKNKEKKFKEFVRVKPKKKKKKKKKTKPECPCSEEISDTSQEPSPPKAFAVTRCGSSHKPGVHMSPQLHGPESGHHKGKVKALEEDNLSESSSESFLWSDDEYGQDVDVTTNPDEELDGDDRYDFEVVRCICEVQEENDFMIQCEECQCWQHGVCMGLLEENVPEKYTCYVCQDPPGQRPGFKYWYDKEWLSRGHMHGLAFLEENYSHQNAKKIVATHQLLGDVQRVIEVLHGLQLKMSILQSREHPDLPLWCQPWKQHSGEGRSHFRNIPVTDTRSKEEAPSYRTLNGAVEKPRPLALPLPRSVEESYITSEHCYQKPRAYYPAVEQKLVVETRGSALDDAVNPLHENGDDSLSPRLGWPLDQDRSKGDSDPKPGSPKVKEYVSKKALPEEAPARKLLDRGGEGLLSSQHQWQFNLLTHVESLQDEVTHRMDSIEKELDVLESWLDYTGELEPPEPLARLPQLKHCIKQLLMDLGKVQQIALCCST

SEQ ID NO: 15485 - protein, 110 aa, Homo Sapiens
MAKHHPDLIFCRKQAGVAIGRLCEKCDGKCVICDSYVRPCTLVRICDECNYGSYQGRCVICGGPGVSDAYYCKECTIQEKDRDGCPKIVNLGSSKTDLFYERKKYGFKKR

SEQ ID NO: 15486 - protein, 284 aa, Homo Sapiens
MDYSYLNSYDSCVAAMEASAYGDFGACSQPGGFQYSPLRPAFPAAGPPCPALGSSNCALGALRDHQPAPYSAVPYKFFPEPSGLHEKRKQRRIRTTFTSAQLKELERVFAETHYPDIYTREELALKIDLTEARVQVWFQNRRAKFRKQERAASAKGAAGAAGAKKGEARCSSEDDDSKESTCSPTPDSTASLPPPPAPGLASPRLSPSPLPVALGSGPGPGPGPQPLKGALWAGVAGGGGGGPGAGAAELLKAWQPAESGPGPFSGVLSSFHRKPGPALKTNLF

SEQ ID NO: 15487 - protein, 314 aa, Homo Sapiens
MYKMEYSYLNSSAYESCMAGMDTSSLASAYADFSSCSQASGFQYNPIRTTFGATSGCPSLTPGSCSLGTLRDHQSSPYAAVPYKLFTDHGGLNEKRKQRRIRTTFTSAQLKELERVFAETHYPDIYTREELALKIDLTEARVQVWFQNRRAKFRKQERAAAAAAAAAKNGSSGKKSDSSRDDESKEAKSTDPDSTGGPGPNPNPTPSCGANGGGGGGPSPAGAPGAAGPGGPGGEPGKGGAAAAAAAAAAAAAAAAAAAAGGLAAAGGPGQGWAPGPGPITSIPDSLGGPFASVLSSLQRPNGAKAALVKSSMF

SEQ ID NO: 15488 - protein, 762 aa, Homo Sapiens
MASNERDAISWYQKKIGAYDQQIWEKSIEQTQIKGLKNKPKKMGHIKPDLIDVDLIRGSTFAKAKPEIPWTSLTRKGLVRVVFFPLFSNWWIQVTSLRIFVWLLLLYFMQVIAIVLYLMMPIVNISEVLGPLCLMLLMGTVHCQIVSTQITRPSGNNGNRRRRKLRKTVNGDGSRENGNNSSDKVRGIETLESVPIIGGFWETIFGNRIKRVKLISNKGTETDNDPSCVHPIIKRRQCRPEIRMWQTREKAKFSDGEKCRREAFRRLGNGVSDDLSSEEDGEARTQMILLRRSVEGASSDNGCEVKNRKSILSRHLNSQVKKTTTRWCHIVRDSDSLAESEFESAAFSQGSRSGVSGGSRSLNMSRRDSESTRHDSETEDMLWDDLLHGPECRSSVTSDSEGAHVNTLHSGTKRDPKEDVFQQNHLFWLQNSSPSSDRVSAIIWEGNECKKMDMSVLEISGIIMSRVNAYQQGVGYQMLGNVVTIGLAFFPFLHRLFREKSLDQLKSISAEEILTLFCGAPPVTPIIVLSIINFFERLCLTWMFFFMMCVAERTYKQRFLFAKLFSHITSARKARKYEIPHFRLKKVENIKIWLSLRSYLKRRGPQRSVDVVVSSVFLLTLSIAFICCAQVLQGHKTFLNDAYNWEFLIWETALLLFLLRLASLGSETNKKYSNVSILLTEQINLYLKMEKKPNKKEQLTLVNNVLKLSTKLLKELDTPFRLYGLTMNPLIYNITRVVILSAVSGVISDLLGFNIRLWKIKS

SEQ ID NO: 15489 - protein, 785 aa, Homo Sapiens
MASKVTDAIVWYQKKEFLSVATTAPGPQQVLPGYCQCSLKDQGLFIQCLIGAYDQQIWEKSVEQREIKFIKLGLRNKPKKTAHVKPDLIDVDLVRGSAFAKAKPESPWTSLTRKGIVRVVFFPFFFRWWLQVTSKVIFFWLLVLYLLQVAAIVLFCSTSSPHSIPLTEVIGPIWLMLLLGTVHCQIVSTRTPKPPLSTGGKRRRKLRKAAHLEVHREGDGSSTTDNTQEGAVQNHGTSTSHSVGTVFRDLWHAAFFLSGSKKAKNSIDKSTETDNGYVSLDGKKTVKSGEDGIQNHEPQCETIRPEETAWNTGTLRNGPSKDTQRTITNVSDEVSSEEGPETGYSLRRHVDRTSEGVLRNRKSHHYKKHYPNEDAPKSGTSCSSRCSSSRQDSESARPESETEDVLWEDLLHCAECHSSCTSETDVENHQINPCVKKEYRDDPFHQSHLPWLHSSHPGLEKISAIVWEGNDCKKADMSVLEISGMIMNRVNSHIPGIGYQIFGNAVSLILGLTPFVFRLSQATDLEQLTAHSASELYVIAFGSNEDVIVLSMVIISFVVRVSLVWIFFFLLCVAERTYKQRLLFAKLFGHLTSARRARKSEVPHFRLKKVQNIKMWLSLRSYLKRRGPQRSVDVIVSSAFLLTISVVFICCAQLLHVHEIFLDCHYNWELVIWCISLTLFLLRFVTLGSETSKKYSNTSILLTEQINLYLKMEKKPNKKEELTLVNNVLKLATKLLKELDSPFRLYGLTMNPLLYNITQVVILSAVSGVISDLLGFNLKLWKIKS

SEQ ID NO: 15490 - protein, 314 aa, Homo Sapiens
MDAFKGGMSLERLPEGLRPPPPPPHDMGPAFHLARPADPREPLENSASESSDTELPEKERGGEPKGPEDSGAGGTGCGGADDPAKKKKQRRQRTHFTSQQLQELEATFQRNRYPDMSMREEIAVWTNLTEPRVRVWFKNRRAKWRKRERNQQLDLCKGGYVPQFSGLVQPYEDVYAAGYSYNNWAAKSLAPAPLSTKSFTFFNSMSPLSSQSMFSAPSSISSMTMPSSMGPGAVPGMPNSGLNNINNLTGSSLNSAMSPGACPYGTPASPYSVYRDTCNSSLASLRLKSKQHSSFGYGGLQGPASGLNACQYNS

SEQ ID NO: 15491 - protein, 317 aa, Homo Sapiens
METNCRKLVSACVQLGVQPAAVECLFSKDSEIKKVEFTDSPESRKEAASSKFFPRQHPGANEKDKSQQGKNEDVGAEDPSKKKRQRRQRTHFTSQQLQELEATFQRNRYPDMSTREEIAVWTNLTEARVRVWFKNRRAKWRKRERNQQAELCKNGFGPQFNGLMQPYDDMYPGYSYNNWAAKGLTSASLSTKSFPFFNSMNVNPLSSQSMFSPPNSISSMSMSSSMVPSAVTGVPGSSLNSLNNLNNLSSPSLNSAVPTPACPYAPPTPPYVYRDTCNSSLASLRLKAKQHSSFGYASVQNPASNLSACQYAVDRPV

SEQ ID NO: 15492 - protein, 302 aa, Homo Sapiens
MEFGLLSEAEARSPALSLSDAGTPHPQLPEHGCKGQEHSDSEKASASLPGGSPEDGSLKKKQRRQRTHFTSQQLQELEATFQRNRYPDMSTREEIAVWTNLTEARVRVWFKNRRAKWRKRERSQQAELCKGSFAAPLGGLVPPYEEVYPGYSYGNWPPKALAPPLAAKTFPFAFNSVNVGPLASQPVFSPPSSIAASMVPSAAAAPGTVPGPGALQGLGGGPPGLAPAAVSSGAVSCPYASAAAAAAAAASSPYVYRDPCNSSLASLRLKAKQHASFSYPAVHGPPPAANLSPCQYAVERPV

SEQ ID NO: 15493 - protein, 436 aa, Homo Sapiens
MMATQTLSIDSYQDGQQMQVVTELKTEQDPNCSEPDAEGVSPPPVESQTPMDVDKQAIYRHPLFPLLALLFEKCEQSTQGSEGTTSASFDVDIENFVRKQEKEGKPFFCEDPETDNLMVKAIQVLRIHLLELEKVNELCKDFCSRYIACLKTKMNSETLLSGEPGSPYSPVQSQQIQSAITGTISPQGIVVPASALQQGNVAMATVAGGTVYQPVTVVTPQGQVVTQTLSPGTIRIQNSQLQLQLNQDLSILHQDDGSSKNKRGVLPKHATNVMRSWLFQHIGHPYPTEDEKKQIAAQTNLTLLQVNNWFINARRRILQPMLDSSCSETPKTKKKTAQNRPVQRFWPDSIASGVAQPPPSELTMSEGAVVTITTPVNMNVDSLQSLSSDGATLAVQQVMMAGQSEDESVDSTEEDAGALAPAHISGLVLENSDSLQ

SEQ ID NO: 15494 - protein, 472 aa, Homo Sapiens
MMQHASPAPALTMMATQNVPPPPYQDSPQMTATAQPPSKAQAVHISAPSAAASTPVPSAPIDPQAQLEADKRAVYRHPLFPLLTLLFEKCEQATQGSECITSASFDVDIENFVHQQEQEHKPFFSDDPELDNLMVKAIQVLRIHLLELEKVNELCKDFCNRYITCLKTKMHSDNLLRNDLGGPYSPNQPSINLHSQDLLQNSPNSMSGVSNNPQGIVVPASALQQGNIAMTTVNSQVVSGGALYQPVTMVTSQGQVVTQAIPQGAIQIQNTQVNLDLTSLLDNEDKKSKNKRGVLPKHATNIMRSWLFQHLMHPYPTEDEKRQIAAQTNLTLLQVNNWFINARRRILQPMLDASNPDPAPKAKKIKSQHRPTQRFWPNSIAAGVLQQQGGAPGTNPDGSINLDNLQSLSSDSATMAMQQAMMAAHDDSLDGTEEEDEDEMEEEEEEELEEEVDELQTTNVSDLGLEHSDSLE

SEQ ID NO: 15495 - protein, 500 aa, Homo Sapiens
MATVIPGDLSEVRDTQKVPSGKRKRGETKPRKNFPCQLCDKAFNSVEKLKVHSYSHTGERPYKCIQQDCTKAFVSKYKLQRHMATHSPEKTHKCNYCEKMFHRKDHLKNHLHTHDPNKETFKCEECGKNYNTKLGFKRHLALHAATSGDLTCKVCLQTFESTGVLLEHLKSHAGKSSGGVKEKKHQCEHCDRRFYTRKDVRRHMVVHTGRKDFLCQYCAQRFGRKDHLTRHMKKSHNQELLKVKTEPVDFLDPFTCNVSVPIKDELLPVMSLPSSELLSKPFTNTLQLNLYNTPFQSMQSSGSAHQMITTLPLGMTCPIDMDTVHPSHHLSFKYPFSSTSYAISIPEKEQPLKGEIESYLMELQGGVPSSSQDSQASSSSKLGLDPQIGSLDDGAGDLSLSKSSISISDPLNTPALDFSQLFNFIPLNGPPYNPLSVGSLGMSYSQEEAHSSVSQLPPQTQDLQDPANTIGLGSLHSLSAAFTSSLSTSTTLPRFHQAFQ

SEQ ID NO: 15496 - protein, 463 aa, Homo Sapiens
MATFPCQLCGKTFLTLEKFTIHNYSHSRERPYKCVQPDCGKAFVSRYKLMRHMATHSPQKSHQCAHCEKTFNRKDHLKNHLQTHDPNKMAFGCEECGKKYNTMLGYKRHLALHAASSGDLTCGVCALELGSTEVLLDHLKAHAEEKPPSGTKEKKHQCDHCERCFYTRKDVRRHLVVHTGCKDFLCQFCAQRFGRKDHLTRHTKKTHSQELMKESLQTGDLLSTFHTISPSFQLKAAALPPFPLGASAQNGLASSLPAEVHSLTLSPPEQAAQPMQPLPESLASLHPSVSPGSPPPPLPNHKYNTTSTSYSPLASLPLKADTKGFCNISLFEDLPLQEPQSPQKLNPGFDLAKGNAGKVNLPKELPADAVNLTIPASLDLSPLLGFWQLPPPATQNTFGNSTLALGPGESLPHRLSCLGQQQQEPPLAMGTVSLGQLPLPPIPHVFSAGTGSAILPHFHHAFR

SEQ ID NO: 15497 - protein, 496 aa, Homo Sapiens
MTTFFTSVPPWIQDAKQEEEVGWKLVPRPRGREAESQVKCQCEISGTPFSNGEKLRPHSLPQPEQRPYSCPQLHCGKAFASKYKLYRHMATHSAQKPHQCMYCDKMFHRKDHLRNHLQTHDPNKEALHCSECGKNYNTKLGYRRHLAMHAASSGDLSCKVCLQTFESTQALLEHLKAHSRRVAGGAKEKKHPCDHCDRRFYTRKDVRRHLVVHTGRKDFLCQYCAQRFGRKDHLTRHVKKSHSQELLKIKTEPVDMLGLLSCSSTVSVKEELSPVLCMASRDVMGTKAFPGMLPMGMYGAHIPTMPSTGVPHSLVHNTLPMGMSYPLESSPISSPAQLPPKYQLGSTSYLPDKLPKVEVDSFLAELPGSLSLSSAEPQPASPQPAAAAALLDEALLAKSPANLSEALCAANVDFSHLLGFLPLNLPPCNPPGATGGLVMGYSQAEAQPLLTTLQAQPQDSPGAGGPLNFGPLHSLPPVFTSGLSSTTLPRFHQAFQ

SEQ ID NO: 15498 - protein, 350 aa, Homo Sapiens
MEPKRIREGYLVKKGSVFNTWKPMWVVLLEDGIEFYKKKSDNSPKGMIPLKGSTLTSPCQDFGKRMFVFKITTTKQQDHFFQAAFLEERDAWVRDIKKAIKCIEGGQKFARKSTRRSIRLPETIDLGALYLSMKDTEKGIKELNLEKDKKIFNHCFTGNCVIDWLVSNQSVRNRQEGLMIASSLLNEGYLQPAGDMSKSAVDGTAENPFLDNPDAFYYFPDSGFFCEENSSDDDVILKEEFRGVIIKQGCLLKQGHRRKNWKVRKFILREDPAYLHYYDPAGAEDPLGAIHLRGCVVTSVESNSNGRKSEEENLFEIITADEVHYFLQAATPKERTEWIRAIQMASRTGK

SEQ ID NO: 15499 - protein, 673 aa, Homo Sapiens
MDLTKMGMIQLQNPSHPTGLLCKANQMRLAGTLCDVVIMVDSQEFHAHRTVLACTSKMFEILFHRNSQHYTLDFLSPKTFQQILEYAYTATLQAKAEDLDDLLYAAEILEIEYLEEQCLKMLETIQASDDNDTEATMADGGAEEEEDRKARYLKNIFISKHSSEESGYASVAGQSLPGPMVDQSPSVSTSFGLSAMSPTKAAVDSLMTIGQSLLQGTLQPPAGPEEPTLAGGGRHPGVAEVKTEMMQVDEVPSQDSPGAAESSISGGMGDKVEERGKEGPGTPTRSSVITSARELHYGREESAEQVPPPAEAGQAPTGRPEHPAPPPEKHLGIYSVLPNHKADAVLSMPSSVTSGLHVQPALAVSMDFSTYGGLLPQGFIQRELFSKLGELAVGMKSESRTIGEQCSVCGVELPDNEAVEQHRKLHSGMKTYGCELCGKRFLDSLRLRMHLLAHSAGAKAFVCDQCGAQFSKEDALETHRQTHTGTDMAVFCLLCGKRFQAQSALQQHMEVHAGVRSYICSECNRTFPSHTALKRHLRSHTGDHPYECEFCGSCFRDESTLKSHKRIHTGEKPYECNGCGKKFSLKHQLETHYRVHTGEKPFECKLCHQRSRDYSAMIKHLRTHNGASPYQCTICTEYCPSLSSMQKHMKGHKPEEIPPDWRIEKTYLYLCYV

SEQ ID NO: 15500 - protein, 1410 aa, Homo Sapiens
MADTDLFMECEEEELEPWQKISDVIEDSVVEDYNSVDKTTTVSVSQQPVSAPVPIAAHASVAGHLSTSTTVSSSGAQNSDSTKKTLVTLIANNNAGNPLVQQGGQPLILTQNPAPGLGTMVTQPVLRPVQVMQNANHVTSSPVASQPIFITTQGFPVRNVRPVQNAMNQVGIVLNVQQGQTVRPITLVPAPGTQFVKPTVGVPQVFSQMTPVRPGSTMPVRPTTNTFTTVIPATLTIRSTVPQSQSQQTKSTPSTSTTPTATQPTSLGQLAVQSPGQSNQTTNPKLAPSFPSPPAVSIASFVTVKRPGVTGENSNEVAKLVNTLNTIPSLGQSPGPVVVSNNSSAHGSQRTSGPESSMKVTSSIPVFDLQDGGRKICPRCNAQFRVTEALRGHMCYCCPEMVEYQKKGKSLDSEPSVPSAAKPPSPEKTAPVASTPSSTPIPALSPPTKVPEPNENVGDAVQTKLIMLVDDFYYGRDGGKVAQLTNFPKVATSFRCPHCTKRLKNNIRFMNHMKHHVELDQQNGEVDGHTICQHCYRQFSTPFQLQCHLENVHSPYESTTKCKICEWAFESEPLFLQHMKDTHKPGEMPYVCQVCQYRSSLYSEVDVHFRMIHEDTRHLLCPYCLKVFKNGNAFQQHYMRHQKRNVYHCNKCRLQFLFAKDKIEHKLQHHKTFRKPKQLEGLKPGTKVTIRASRGQPRTVPVSSNDTPPSALQEAAPLTSSMDPLPVFLYPPVQRSIQKRAVRKMSVMGRQTCLECSFEIPDFPNHFPTYVHCSLCRYSTCCSRAYANHMINNHVPRKSPKYLALFKNSVSGIKLACTSCTFVTSVGDAMAKHLVFNPSHRSSSILPRGLTWIAHSRHGQTRDRVHDRNVKNMYPPPSFPTNKAATVKSAGATPAEPEELLTPLAPALPSPASTATPPPTPTHPQALALPPLATEGAECLNVDDQDEGSPVTQEPELASGGGGSGGVGKKEQLSVKKLRVVLFALCCNTEQAAEHFRNPQRRIRRWLRRFQASQGENLEGKYLSFEAEEKLAEWVLTQREQQLPVNEETLFQKATKIGRSLEGGFKISYEWAVRFMLRHHLTPHARRAVAHTLPKDVAENAGLFIDFVQRQIHNQDLPLSMIVAIDEISLFLDTEVLSSDDRKENALQTVGTGEPWCDVVLAILADGTVLPTLVFYRGQMDQPANMPDSILLEAKESGYSDDEIMELWSTRVWQKHTACQRSKGMLVMDCHRTHLSEEVLAMLSASSTLPAVVPAGCSSKIQPLDVCIKRTVKNFLHKKWKEQAREMADTACDSDVLLQLVLVWLGEVLGVIGDCPELVQRSFLVASVLPGPDGNINSPTRNADMQEELIASLEEQLKLSGEHSESSTPRPRSSPEETIEPESLHQLFEGESETESFYGFEEADLDLMEI

SEQ ID NO: 15501 - protein, 291 aa, Homo Sapiens
MSCQAFTSADTFIPLNSDASATLPLIMHHSAAECLPVSNHATNVMSTATGLHYSVPSCHYGNQPSTYGVMAGSLTPCLYKFPDHTLSHGFPPIHQPLLAEDPTAADFKQELRRKSKLVEEPIDMDSPEIRELEKFANEFKVRRIKLGYTQTNVGEALAAVHGSEFSQTTICRFENLQLSFKNACKLKAILSKWLEEAEQVGALYNEKVGANERKRKRRTTISIAAKDALERHFGEQNKPSSQEIMRMAEELNLEKEVVRVWFCNRRQREKRVKTSLNQSLFSISKEHLECR

SEQ ID NO: 15502 - protein, 256 aa, Homo Sapiens
MLWQKPTAPEQAPAPARPYQGVRVKEPVKELLRRKRGHASSGAAPAPTAVVLPHQPLATYTTVGPSCLDMEGSVSAVTEEAALCAGWLSQPTPATLQPLAPWTPYTEYVPHEAVSCPYSADMYVQPVCPSYTVVGPSSVLTYASPPLITNVTTRSSATPAVGPPLEGPEHQAPLTYFPWPQPLSTLPTSTLQYQPPAPALPGPQFVQLPISIPEPVLQDMEDPRRAASSLTIDKLLLEEEDSDAYALNHTLSVEGF

SEQ ID NO: 15503 - protein, 743 aa, Homo Sapiens
MNNPSETSKPSMESGDGNTGTQTNGLDFQKQPVPVGGAISTAQAQAFLGHLHQVQLAGTSLQAAAQSLNVQSKSNEESGDSQQPSQPSQQPSVQAAIPQTQLMLAGGQITGLTLTPAQQQLLLQQAQAQAQLLAAAVQQHSASQQHSAAGATISASAATPMTQIPLSQPIQIAQDLQQLQQLQQQNLNLQQFVLVHPTTNLQPAQFIISQTPQGQQGLLQAQNLLTQLPQQSQANLLQSQPSITLTSQPATPTRTIAATPIQTLPQSQSTPKRIDTPSLEEPSDLEELEQFAKTFKQRRIKLGFTQGDVGLAMGKLYGNDFSQTTISRFEALNLSFKNMCKLKPLLEKWLNDAENLSSDSSLSSPSALNSPGIEGLSRRRKKRTSIETNIRVALEKSFLENQKPTSEEITMIADQLNMEKEVIRVWFCNRRQKEKRINPPSSGGTSSSPIKAIFPSPTSLVATTPSLVTSSAATTLTVSPVLPLTSAAVTNLSVTGTSDTTSNNTATVISTAPPASSAVTSPSLSPSPSASASTSEASSASETSTTQTTSTPLSSPLGTSQVMVTASGLQTAAAAALQGAAQLPANASLAAMAAAAGLNPSLMAPSQFAAGGALLSLNPGTLSGALSPALMSNSTLATIQALASGGSLPITSLDATGNLVFANAGGAPNIVTAPLFLNPQNLSLLTSNPVSLVSAAAASAGNSAPVASLHATSTSAESIQNSLFTVASASGAASTTTTASKAQ

SEQ ID NO: 15504 - protein, 479 aa, Homo Sapiens
MVHSSMGAPEIRMSKPLEAEKQGLDSPSEHTDTERNGPDTNHQNPQNKTSPFSVSPTGPSTKIKAEDPSGDSAPAAPLPPQPAQPHLPQAQLMLTGSQLAGDIQQLLQLQQLVLVPGHHLQPPAQFLLPQAQQSQPGLLPTPNLFQLPQQTQGALLTSQPRAGLPTQAVTRPTLPDPHLSHPQPPKCLEPPSHPEEPSDLEELEQFARTFKQRRIKLGFTQGDVGLAMGKLYGNDFSQTTISRFEALNLSFKNMCKLKPLLEKWLNDAETMSVDSSLPSPNQLSSPSLGFDGLPGRRRKKRTSIETNVRFALEKSFLANQKPTSEEILLIAEQLHMEKEVIRVWFCNRRQKEKRINPCSAAPMLPSPGKPASYSPHMVTPQGGAGTLPLSQASSSLSTTVTTLSSAVGTLHPSRTAGGGGGGGGAAPPLNSIPSVTPPPPATTNSTNPSPQGSHSAIGLSGLNPSTGPGLWWNPAPYQP

SEQ ID NO: 15505 - protein, 436 aa, Homo Sapiens
MVNLESMHTDIKMSGDVADSTDARSTLSQVEPGNDRNGLDFNRQIKTEDLSDSLQQTLSHRPCHLSQGPAMMSGNQMSGLNASPCQDMASLHPLQQLVLVPGHLQSVSQFLLSQTQPGQQGLQPNLLPFPQQQSGLLLPQTGPGLASQAFGHPGLPGSSLEPHLEASQHLPVPKHLPSSGGADEPSDLEELEKFAKTFKQRRIKLGFTQGDVGLAMGKLYGNDFSQTTISRFEALNLSFKNMCKLKPLLEKWLNDAESSPSDPSVSTPSSYPSLSEVFGRKRKKRTSIETNIRLTLEKRFQDNPKPSSEEISMIAEQLSMEKEVVRVWFCNRRQKEKRINCPVATPIKPPVYNSRLVSPSGSLGPLSVPPVHSTMPGTVTSSCSPGNNSRPSSPGSGLHASSPTASQNNSKAAVNSASSFNSSGSWYRWNHSTYLH

SEQ ID NO: 15506 - protein, 451 aa, Homo Sapiens
MATTAQYLPRGPGGGAGGTGPLMHPDAAAAAAAAAAAERLHAGAAYREVQKLMHHEWLGAGAGHPVGLAHPQWLPTGGGGGGDWAGGPHLEHGKAGGGGTGRADDGGGGGGFHARLVHQGAAHAGAAWAQGSTAHHLGPAMSPSPGASGGHQPQPLGLYAQAAYPGGGGGGLAGMLAAGGGGAGPGLHHALHEDGHEAQLEPSPPPHLGAHGHAHGHAHAGGLHAAAAHLHPGAGGGGSSVGEHSDEDAPSSDDLEQFAKQFKQRRIKLGFTQADVGLALGTLYGNVFSQTTICRFEALQLSFKNMCKLKPLLNKWLEETDSSSGSPTNLDKIAAQGRKRKKRTSIEVGVKGALESHFLKCPKPSAHEITGLADSLQLEKEVVRVWFCNRRQKEKRMTPAAGAGHPPMDDVYAPGELGPGGGGASPPSAPPPPPPAALHHHHHHTLPGSVQ

SEQ ID NO: 15507 - protein, 443 aa, Homo Sapiens
MATAASNHYSLLTSSASIVHAEPPGGMQQGAGGYREAQSLVQGDYGALQSNGHPLSHAHQWITALSHGGGGGGGGGGGGGGGGGGGGGDGSPWSTSPLGQPDIKPSVVVQQGGRGDELHGPGALQQQHQQQQQQQQQQQQQQQQQQQQQRPPHLVHHAANHHPGPGAWRSAAAAAHLPPSMGASNGGLLYSQPSFTVNGMLGAGGQPAGLHHHGLRDAHDEPHHADHHPHPHSHPHQQPPPPPPPQGPPGHPGAHHDPHSDEDTPTSDDLEQFAKQFKQRRIKLGFTQADVGLALGTLYGNVFSQTTICRFEALQLSFKNMCKLKPLLNKWLEEADSSSGSPTSIDKIAAQGRKRKKRTSIEVSVKGALESHFLKCPKPSAQEITSLADSLQLEKEVVRVWFCNRRQKEKRMTPPGGTLPGAEDVYGGSRDTPPHHGVQTPVQ

SEQ ID NO: 15508 - protein, 500 aa, Homo Sapiens
MATAASNPYLPGNSLLAAGSIVHSDAAGAGGGGGGGGGGGGGGAGGGGGGMQPGSAAVTSGAYRGDPSSVKMVQSDFMQGAMAASNGGHMLSHAHQWVTALPHAAAAAAAAAAAAVEASSPWSGSAVGMAGSPQQPPQPPPPPPQGPDVKGGAGRDDLHAGTALHHRGPPHLGPPPPPPHQGHPGGWGAAAAAAAAAAAAAAAAHLPSMAGGQQPPPQSLLYSQPGGFTVNGMLSAPPGPGGGGGGAGGGAQSLVHPGLVRGDTPELAEHHHHHHHHAHPHPPHPHHAQGPPHHGGGGGGAGPGLNSHDPHSDEDTPTSDDLEQFAKQFKQRRIKLGFTQADVGLALGTLYGNVFSQTTICRFEALQLSFKNMCKLKPLLNKWLEEADSSTGSPTSIDKIAAQGRKRKKRTSIEVSVKGALESHFLKCPKPSAQEITNLADSLQLEKEVVRVWFCNRRQKEKRMTPPGIQQQTPDDVYSQVGTVSADTPPPHHGLQTSVQ

SEQ ID NO: 15509 - protein, 361 aa, Homo Sapiens
MATAASNPYSILSSTSLVHADSAGMQQGSPFRNPQKLLQSDYLQGVPSNGHPLGHHWVTSLSDGGPWSSTLATSPLDQQDVKPGREDLQLGAIIHHRSPHVAHHSPHTNHPNAWGASPAPNPSITSSGQPLNVYSQPGFTVSGMLEHGGLTPPPAAASAQSLHPVLREPPDHGELGSHHCQDHSDEETPTSDELEQFAKQFKQRRIKLGFTQADVGLALGTLYGNVFSQTTICRFEGLQLSFKNMCKLKPLLNKWLEEADSSTGSPTSIDKIAAQGRKRKKRTSIEVSVKGVLETHFLKCPKPAAQEISSLADSLQLEKEVVRVWFCNRRQKEKRMTPPGDQQPHEVYSHTVKTDTSCHDL

SEQ ID NO: 15510 - protein, 419 aa, Homo Sapiens
MMSMNSKQPHFAMHPTLPEHKYPSLHSSSEAIRRACLPTPPLQSNLFASLDETLLARAEALAAVDIAVSQGKSHPFKPDATYHTMNSVPCTSTSTVPLAHHHHHHHHHQALEPGDLLDHISSPSLALMAGAGGAGAAAGGGGAHDGPGGGGGPGGGGGPGGGPGGGGGGGPGGGGGGPGGGLLGGSAHPHPHMHSLGHLSHPAAAAAMNMPSGLPHPGLVAAAAHHGAAAAAAAAAAGQVAAASAAAAVVGAAGLASICDSDTDPRELEAFAERFKQRRIKLGVTQADVGSALANLKIPGVGSLSQSTICRFESLTLSHNNMIALKPILQAWLEEAEGAQREKMNKPELFNGGEKKRKRTSIAAPEKRSLEAYFAVQPRPSSEKIAAIAEKLDLKKNVVRVWFCNQRQKQKRMKFSATY

SEQ ID NO: 15511 - protein, 409 aa, Homo Sapiens
MMMMSLNSKQAFSMPHGGSLHVEPKYSALHSTSPGSSAPIAPSASSPSSSSNAGGGGGGGGGGGGGGGRSSSSSSSGSSGGGGSEAMRRACLPTPPSNIFGGLDESLLARAEALAAVDIVSQSKSHHHHPPHHSPFKPDATYHTMNTIPCTSAASSSSVPISHPSALAGTHHHHHHHHHHHHQPHQALEGELLEHLSPGLALGAMAGPDGAVVSTPAHAPHMATMNPMHQAALSMAHAHGLPSHMGCMSDVDADPRDLEAFAERFKQRRIKLGVTQADVGSALANLKIPGVGSLSQSTICRFESLTLSHNNMIALKPILQAWLEEAEKSHREKLTKPELFNGAEKKRKRTSIAAPEKRSLEAYFAIQPRPSSEKIAAIAEKLDLKKNVVRVWFCNQRQKQKRMKYSAGI

SEQ ID NO: 15512 - protein, 338 aa, Homo Sapiens
MMAMNSKQPFGMHPVLQEPKFSSLHSGSEAMRRVCLPAPQLQGNIFGSFDESLLARAEALAAVDIVSHGKNHPFKPDATYHTMSSVPCTSTSSTVPISHPAALTSHPHHAVHQGLEGDLLEHISPTLSVSGLGAPEHSVMPAQIHPHHLGAMGHLHQAMGMSHPHTVAPHSAMPACLSDVESDPRELEAFAERFKQRRIKLGVTQADVGAALANLKIPGVGSLSQSTICRFESLTLSHNNMIALKPVLQAWLEEAEAAYREKNSKPELFNGSERKRKRTSIAAPEKRSLEAYFAIQPRPSSEKIAAIAEKLDLKKNVVRVWFCNQRQKQKRMKYSAVH

SEQ ID NO: 15513 - protein, 360 aa, Homo Sapiens
MAGHLASDFAFSPPPGGGGDGPGGPEPGWVDPRTWLSFQGPPGGPGIGPGVGPGSEVWGIPPCPPPYEFCGGMAYCGPQVGVGLVPQGGLETSQPEGEAGVGVESNSDGASPEPCTVTPGAVKLEKEKLEQNPEESQDIKALQKELEQFAKLLKQKRITLGYTQADVGLTLGVLFGKVFSQTTICRFEALQLSFKNMCKLRPLLQKWVEEADNNENLQEICKAETLVQARKRKRTSIENRVRGNLENLFLQCPKPTLQQISHIAQQLGLEKDVVRVWFCNRRQKGKRSSSDYAQREDFEAAGSPFSGGPVSFPLAPGPHFGTPGYGSPHFTALYSSVPFPEGEAFPPVSVTTLGSPMHSN

SEQ ID NO: 15514 - protein, 359 aa, Homo Sapiens
MAGHLASDFAFSPPPGGGGDGPWGAEPGWVDPLTWLSFQGPPGGPGIGPGVGPGSEVWGIPPCPPPYELCGGMAYCGPQVGVGLVPQGGLETSQPESEAGVGVESNSNGASPEPCTVPPGAVKLEKEKLEQNPEKSQDIKALQKELEQFAKLLKQKRITLGYTQADVGLILGVLFGKVFSQKTICRFEALQLSFKNMCKLRPLLQKWVEEADNNENLQEICKAETLMQARKRKRTSIENRVRGNLENLFLQCPKPTLQISHIAQQLGLEKDVVRVWFCNRRQKGKRSSSDYAQREDFEAAGSPFSGGPVSFPPAPGPHFGTPGYGSPHFTALYSSVPFPEGEVFPPVSVITLGSPMHSN

SEQ ID NO: 15515 - protein, 328 aa, Homo Sapiens
MAGHRPSNHFCPLPGSGGGGPRGPMPLRVDTLTWLSTQAAPGRVMVWPAVRPGICPGPDVWRIPLGPLPHEFRGWIAPCRPRLGASEAGDWLRRPSEGALPGPYIALRSIPKLPPPEDISGILKELQQLAKELRQKRLSLGYSQADVGIAVGALFGKVLSQTTICRFEAQQLSVANMWKLRPLLKKWLKEVEAENLLGLCKMEMILQQSGKWRRASRERRIGNSLEKFFQRCPKPTPQQISHIAGCLQLQKDVVRVWFYNRSKMGSRPTNDASPREIVGTAGPPCPGAPVCFHLGLGLPVDIPHYTRLYSAGVAHSSAPATTLGLLRF

SEQ ID NO: 15516 - protein, 301 aa, Homo Sapiens
MPGISSQILTNAQGQVIGTLPWVVNSASVAAPAPAQSLQVQAVTPQLLLNAQGQVIATLASSPLPPPVAVRKPSTPESPAKSEVQPIQPTPTVPQPAVVIASPAPAAKPSASAPIPITCSETPTVSQLVSKPHTPSLDEDGINLEEIREFAKNFKIRRLSLGLTQTQVGQALTATEGPAYSQSAICRFEKLDITPKSAQKLKPVLEKWLNEAELRNQEGQQNLMEFVGGEPSKKRKRRTSFTPQAIEALNAYFEKNPLPTGQEITEIAKELNYDREVVRVWFCNRRQTLKNTSKLNVFQIP

SEQ ID NO: 15517 - protein, 691 aa, Homo Sapiens
MSALLQDPMIAGQVSKPLLSVRSEMNAELRGEDKAATSDSELNEPLLAPVESNDSEDTPSKLFGARGNPALSDPGTPDQHQASQTHPPFPVGPQPLLTAQQLASAVAGVMPGGPPALNQPILIPFNMAGQLGGQQGLVLTLPTANLTNIQGLVAAAAAGGIMTLPLQNLQATSSLNSQLQQLQLQLQQQQQQQQQQPPPSTNQHPQPAPQAPSQSQQQPLQPTPPQQPPPASQQPPAPTSQLQQAPQPQQHQPHSHSQNQNQPSPTQQSSSPPQKPSQSPGHGLPSPLTPPNPLQLVNNPLASQAAAAAAAMSSIASSQAFGNALSSLQGVTGQLVTNAQGQIIGTIPLMPNPGPSSQAASGTQGLQVQPITPQLLTNAQGQIIATVIGNQILPVINTQGITLSPIKPGQQLHQPSQTSVGQAASQGNLLHLAHSQASMSQSPVRQASSSSSSSSSSSALSVGQLVSNPQTAAGEVDGVNLEEIREFAKAFKIRRLSLGLTQTQVGQALSATEGPAYSQSAICRHTILRSHFFLPQEAQENTIASSLTAKLNPGLLYPARFEKLDITPKSAQKIKPVLERWMAEAEARHRAGMQNLTEFIGSEPSKKRKRRTSFTPQALEILNAHFEKNTHPSGQEMTEIAEKLNYDREVVRVWFCNKRQALKNTIKRLKQHEPATAVPLEPLTDSLEENS

SEQ ID NO: 15518 - protein, 468 aa, Homo Sapiens
MVDTESPLCPLSPLEAGDLESPLSEEFLQEMGNIQEISQSIGEDSSGSFGFTEYQYLGSCPGSDGSVITDTLSPASSPSSVTYPVVPGSVDESPSGALNIECRICGDKASGYHYGVHACEGCKGFFRRTIRLKLVYDKCDRSCKIQKKNRNKCQYCRFHKCLSVGMSHNAIRFGRMPRSEKAKLKAEILTCEHDIEDSETADLKSLAKRIYEAYLKNFNMNKVKARVILSGKASNNPPFVIHDMETLCMAEKTLVAKLVANGIQNKEAEVRIFHCCQCTSVETVTELTEFAKAIPGFANLDLNDQVTLLKYGVYEAIFAMLSSVMNKDGMLVAYGNGFITREFLKSLRKPFCDIMEPKFDFAMKFNALELDDSDISLFVAAIICCGDRPGLLNVGHIEKMQEGIVHVLRLHLQSNHPDDIFLFPKLLQKMADLRQLVTEHAQLVQIIKKTESDAALHPLLQEIYRDMY

SEQ ID NO: 15519 - protein, 441 aa, Homo Sapiens
MEQPQEEAPEVREEEEKEEVAEAEGAPELNGGPQHALPSSSYTDLSRSSSPPSLLDQLQMGCDGASCGSLNMECRVCGDKASGFHYGVHACEGCKGFFRRTIRMKLEYEKCERSCKIQKKNRNKCQYCRFQKCLALGMSHNAIRFGRMPEAEKRKLVAGLTANEGSQYNPQVADLKAFSKHIYNAYLKNFNMTKKKARSILTGKASHTAPFVIHDIETLWQAEKGLVWKQLVNGLPPYKEISVHVFYRCQCTTVETVRELTEFAKSIPSFSSLFLNDQVTLLKYGVHEAIFAMLASIVNKDGLLVANGSGFVTREFLRSLRKPFSDIIEPKFEFAVKFNALELDDSDLALFIAAIILCGDRPGLMNVPRVEAIQDTILRALEFHLQANHPDAQYLFPKLLQKMADLRQLVTEHAQMMQRIKKTETETSLHPLLQEIYKDMY

SEQ ID NO: 15520 - protein, 505 aa, Homo Sapiens
MGETLGDSPIDPESDSFTDTLSANISQEMTMVDTEMPFWPTNFGISSVDLSVMEDHSHSFDIKPFTTVDFSSISTPHYEDIPFTRTDPVVADYKYDLKLQEYQSAIKVEPASPPYYSEKTQLYNKPHEEPSNSLMAIECRVCGDKASGFHYGVHACEGCKGFFRRTIRLKLIYDRCDLNCRIHKKSRNKCQYCRFQKCLAVGMSHNAIRFGRMPQAEKEKLLAEISSDIDQLNPESADLRALAKHLYDSYIKSFPLTKAKARAILTGKTTDKSPFVIYDMNSLMMGEDKIKFKHITPLQEQSKEVAIRIFQGCQFRSVEAVQEITEYAKSIPGFVNLDLNDQVTLLKYGVHEIIYTMLASLMNKDGVLISEGQGFMTREFLKSLRKPFGDFMEPKFEFAVKFNALELDDSDLAIFIAVIILSGDRPGLLNVKPIEDIQDNLLQALELQLKLNHPESSQLFAKLLQKMTDLRQIVTEHVQLLQVIKKTETDMSLHPLLQEIYKDLY

SEQ ID NO: 15521 - protein, 828 aa, Homo Sapiens
MDSEAFQSARDFLDMNFQSLAMKHMDLKQMELDTAAAKVDELTKQLESLWSDSPAPPGPQAGPPSRPPRYSSSSIPEPFGSRGSPRKAATDGADTPFGRSESAPTLHPYSPLSPKGRPSSPRTPLYLQPDAYGSLDRATSPRPRAFDGAGSSLGRAPSPRPGPGPLRQQGPPTPFDFLGRAGSPRGSPLAEGPQAFFPERGPSPRPPATAYDAPASAFGSSLLGSGGSAFAPPLRAQDDLTLRRRPPKAWNESDLDVAYEKKPSQTASYERLDVFARPASPSLQLLPWRESSLDGLGGTGKDNLTSATLPRNYKVSPLASDRRSDAGSYRRSLGSAGPSGTLPRSWQPVSRIPMPPSSPQPRGAPRQRPIPLSMIFKLQNAFWEHGASRAMLPGSPLFTRAPPPKLQPQPQPQPQPQSQPQPQLPPQPQTQPQTPTPAPQHPQQTWPPVNEGPPKPPTELEPEPEIEGLLTPVLEAGDVDEGPVARPLSPTRLQPALPPEAQSVPELEEVARVLAEIPRPLKRRGSMEQAPAVALPPTHKKQYQQIISRLFHRHGGPGPGGPEPELSPITEGSEARAGPPAPAPPAPIPPPAPSQSSPPEQPQSMEMRSVLRKAGSPRKARRARLNPLVLLLDAALTGELEVVQQAVKEMNDPSQPNEEGITALHNAICGANYSIVDFLITAGANVNSPDSHGWTPLHCAASCNDTVICMALVQHGAAIFATTLSDGATAFEKCDPYREGYADCATYLADVEQSMGLMNSGAVYALWDYSAEFGDELSFREGESVTVLRRDGPEETDWWWAALHGQEGYVPRNYFGLFPRVKPQRSKV

SEQ ID NO: 15522 - protein, 825 aa, Homo Sapiens; identical to SEQ ID NO: 14803

SEQ ID NO: 15523 - protein, 1147 aa, Homo Sapiens
MDSKDESSHVWPTSAEHEQNAAQVHFVPDTGTVAQIVYTDDQVRPPQQVVYTADGASYTSVDGPEHTLVYIHPVEAAQTLFTDPGQVAYVQQDATAQQASLPVHNQVLPSIESVDGSDPLATLQTPLGRLEAKEEEDEDEDEDTEEDEEEDGEDTDLDDWEPDPPRPFDPHDLWCEECNNAHASVCPKHGPLHPIPNRPVLTRARASLPLVLYIDRFLGGVFSKRRIPKRTQFGPVEGPLVRGSELKDCYIHLKVSLDKGDRKERDLHEDLWFELSDETLCNWMMFVRPAQNHLEQNLVAYQYGHHVYYTTIKNVEPKQELKVWYAASYAEFVNQKIHDISEEERKVLREQEKNWPCYECNRRFISSEQLQQHLNSHDEKLDVFSRTRGRGRGRGKRRFGPGRRPGRPPKFIRLEITSENGEKSDDGTQDLLHFPTKEQFDEAEPATLNGLDQPEQTTIPIPQLPQETQSSLEHEPETHTLHLQPQHEESVVPTQSTLTADDMRRAKRIRLELQNAALQHLFIRKSFRPFKCLQCGKAFREKDKLDQHLRFHGREGNCPLTCDLCNKGFISSTSLESHMKLHSDQKTYSCIFCPESFDRLDLLKDHVAIHINDGYFTCPTCKKRFPDFIQVKKHVRSFHSEKIYQCTECDKAFCRPDKLRLHMLRHSDRKDFLCSTCGKQFKRKDKLREHMQRMHNPEREAKKADRISRSKTFKPRITSTDYDSFTFKCRLCMMGFRRRGMLVNHLSKRHPDMKIEEVPELTLPIIKPNRDYFCQYCDKVYKSASKRKAHILKNHPGAELPPSIRKLRPAGPGEPDPMLSTHTQLTGTIATPPVCCPHCSKQYSSKTKMVQHIRKKHPEFAQLSNTIHTPLTTAVISATPAVLTTDSATGETVVTTDLLTQAMTELSQTLTTDYRTPQGDYQRIQYIPVSQSASGLQQPQHIQLQVVQVASATSPHQSQQSTVDVGQLHDPQPYPQHAIQVQHIQVSGQPLSPSAQQAQQGLSPSHIQGSSSTQGQALQQQQQQQQNSSVQHTYLPSAWNSFRGYSSEIQMMTLPPGQFVITDSGVATPVTTGQVKAVTSGHYVLSESQSELEEKQTSALSGGVQVEPPAHSDSLDPQTNSQQQTTQYIITTTTNGNGSSEVHITKP

SEQ ID NO: 15524 - protein, 511 aa, Homo Sapiens
MLKMAEPIASLMIVECRACLRCSPLFLYQREKDRMTENMKECLAQTNAAVGDMVTVVKTEVCSPLRDQEYGQPCSRRPDSSAMEVEPKKLKGKRDLIVPKSFQQVDFWFCESCQEYFVDECPNHGPPVFVSDTPVPVGIPDRAALTIPQGMEVVKDTSGESDVRCVNEVIPKGHIFGPYEGQISTQDKSAGFFSWLIVDKNNRYKSIDGSDETKANWMRYVVISREEREQNLLAFQHSERIYFRACRDIRPGEWLRVWYSEDYMKRLHSMSQETIHRNLARGEKRLQREKSEQVLDNPEDLRGPIHLSVLRQGKSPYKRGFDEGDVHPQAKKKKIDLIFKDVLEASLESAKVEAHQLALSTSLVIRKVPKYQDDAYSQCATTMTHGVQNIGQTQGEGDWKVPQGVSKEPGQLEDEEEEPSSFKADSPAEASLASDPHELPTTSFCPNCIRLKKKVRELQAELDMLKSGKLPEPPVLPPQVLELPEFSDPAGKLVWMRLLSEGRVRSGLCGG

SEQ ID NO: 15525 - protein, 367 aa, Homo Sapiens; identical to SEQ ID NO: 10751

SEQ ID NO: 15526 - protein, 707 aa, Homo Sapiens
MHGAARAPATSVSADCCIPAGLRLGPVPGTFKLGKYLSDRREPGPKKKVRMVRGELVDESGGSPLEWIGLIRAARNSQEQTLEAIADLPGGQIFYRALRDVQPGEELTVWYSNSLAQWFDIPTTATPTHDEKGEERYICWYCWRTFRYPNSLKAHLRFHCVFSGGGGGAFLHHEHAARQGAVPAADGLGLSPKPPAPDFAAPSQAGTLRPHPLGPPPVQACGAREGIKREASSAPSATSPTPGKWGQPKKGKEQLDRALDMSGAARGQGHFLGIVGGSSAGVGSLAFYPGVRSAFKPAGLARAAAAAHGDPYREESSSKQGAGLALGRLLGGGRACGRPGSGENSAAGGAGHHHHHHAHHHHHPKCLLAGDPPPPPPPGLPCSGALRGFPLLSVPPEEASAFKHVERAPPAAAALPGARYAQLPPAPGLPLERCALPPLDPGGLKAYPGGECSHLPAVMPAFTVYNGELLYGSPATTAYYPLKLHFGGLLKYPESISYFSGPAAAALSPAELGSLASIDREIAMHNQQLSEMAAGKGRGRLDSGTLPPAVAAAGGTGGGGSGGSGAGKPKTGHLCLYCGKLYSRKYGLKIHMRTHTGYKPLKCKVCLRPFGDPSNLNKHIRLHAEGNTPYRCEFCGKVLVRRRDLERHVKSRHPGQSLLAKAGDGPGAEPGYPPEPGDPKSDDSDVDVCFTDDQSDPEVGGGGERDL

SEQ ID NO: 15527 - protein, 571 aa, Homo Sapiens
MALPRPSEAVPQDKVCYPPESSPQNLAAYYTPFPSYGHYRNSLATVEEDFQPFRQLEAAASAAPAMPPFPFRMAPPLLSPGLGLQREPLYDLPWYSKLPPWYPIPHVPREVPPFLSSSHEYAGASSEDLGHQIIGGDNESGPCCGPDTLIPPPPADASLLPEGLRTSQLLPCSPSKQSEDGPKPSNQEGKSPARFQFTEEDLHFVLYGVTPSLEHPASLHHAISGLLVPPDSSGSDSLPQTLDKDSLQLPEGLCLMQTVFGEVPHFGVFCSSFIAKGVRFGPFQGKVVNASEVKTYGDNSVMWEIFEDGHLSHFIDGKGGTGNWMSYVNCARFPKEQNLVAVQCQGHIFYESCKEIHQNQELLVWYGDCYEKFLDIPVSLQVTEPGKQPSGPSEESAEGYRCERCGKVFTYKYYRDKHLKYTPCVDKGDRKFPCSLCKRSFEKRDRLRIHILHVHEKHRPHKCSTCGKCFSQSSSLNKHMRVHSGDRPYQCVYCTKRFTASSILRTHIRQHSGEKPFKCKYCGKSFASHAAHDSHVRRSHKEDDGCSCSICGKIFSDQETFYSHMKFHEDY

SEQ ID NO: 15528 - protein, 1507 aa, Homo Sapiens
MPRRRPPASGAAQFPERIATRSPDPIPLCTFQRQPRAAPVQPPCRLFFVTFAGCGHRWRSESKPGWISRSRSGIALRAARPPGSSPPRPAAPRPPPPGGVVAEAPGDVVIPRPRVQPMRVARGGPWTPNPAFREAESWSQIGNQRVSEQLLETSLGNEVSDTEPLSPASAGLRRNPALPPGPFAQNFSWGNQENLPPALGKIANGGGTGAGKAECGYETESHLLEPHEIPLNVNTHKFSDCEFPYEFCTVCFSPFKLLGMSGVEGVWNQHSRSASMHTFLNHSATGIREAGCRKDMPVSEMAEDGSEEIMFIWCEDCSQYHDSECPELGPVVMVKDSFVLSRARSWPASGHVHTQAGQGMRGYEDRDRADPQQLPEAVPAGLVRRLSGQQLPCRSTLTWGRLCHLVAQGRSSLPPNLEIRRLEDGAEGVFAITQLVKRTQFGPFESRRVAKWEKESAFPLKVFQKDGHPVCFDTSNEDDCNWMMLVRPAAEAEHQNLTAYQHGSDVYFTTSRDIPPGTELRVWYAAFYAKKMDKPMLKQAGSGVHAAGTPENSAPVESEPSQWACKVCSATFLELQLLNEHLLGHLEQAKSLPPGSQSEAAAPEKEQDTPRGEPPAVPESENVATKEQKKKPRRGRKPKVSKAEQPLVIVEDKEPTEQVAEIITEVPPDEPVSATPDERIMELVLGKLATTTTDTSSVPKFTHHQNNTITLKRSLILSSRHGIRRKLIKQLGEHKRVYQCNICSKIFQNSSNLSRHVRSHGDKLFKCEECAKLFSRKESLKQHVSYKHSRNEVDGEYRYRCGTCEKTFRIESALEFHNCRTDDKTFQCEMCFRFFSTNSNLSKHKKKHGDKKFACEVCSKMFYRKDVMLDHQRRHLEGVRRVKREDLEAGGENLVRYKKEPSGCPVCGKVFSCRSNMNKHLLTHGDKKYTCEICGRKFFRVDVLRDHIHVHFKDIALMDDHQREEFIGKIGISSEENDDNSDESADSEPHKYSCKRCQLTFGRGKEYLKHIMEVHKEKGYGCSICNRRFALKATYHAHMVIHRENLPDPNVQKYIHPCEICGRIFNSIGNLERHKLIHTGVKSHACEQCGKSFARKDMLKEHMRVHDNVREYLCAECGKGMKTKHALRHHMKLHKGIKEYECKECHRRFAQKVNMLKHCKRHTGIKDFMCELCGKTFSERNTMETHKLIHTVGKQWTCSVCDKKYVTEYMLQKHVQLTHDKVEAQSCQLCGTKVSTRASMSRHMRRKHPEVLAVRIDDLDHLPETTTIDASSIGIVQPELTLEQEDLAEGKHGKAAKRSHKRKQKPEEEAGAPVPEDATFSEYSEKETEFTGSVGDETNSAVQSIQQVVVTLGDPNVTTPSSSVGLTNITVTPITTAAATQFTNLQPVAVGHLTTPERQLQLDNSILTVTFDTVSGSAMLHNRQNDVQIHPQPEASNPQSVAHFINLTTLVNSITPLGSQLSDQHPLTWRAVPQTDVLPPSQPQAPPQQAAQPQVQAEQQQQQMYSY

SEQ ID NO: 15529 - protein, 1276 aa, Homo Sapiens
MRSKARARKLAKSDGDVVNNMYEPNRDLLASHSAEDEAEDSAMSPIPVGPPSPFPTSEDFTPKEGSPYEAPVYIPEDIPIPADFELRESSIPGAGLGVWAKRKMEAGERLGPCVVVPRAAAKETDFGWEQILTDVEVSPQEGCITKISEDLGSEKFCVDANQAGAGSWLKYIRVACSCDDQNLTMCQISEQIYYKVIKDIEPGEELLVHVKEGVYPLGTVPPGLDEEPTFRCDECDELFQSKLDLRRHKKYTCGSVGAALYEGLAEELKPEGLGGGSGQAHECKDCERMFPNKYSLEQHMVIHTEEREYKCDQCPKAFNWKSNLIRHQMSHDSGKRFECENCVKVFTDPSNLQRHIRSQHVGARAHACPDCGKTFATSSGLKQHKHIHSTVKPFICEVCHKSYTQFSNLCRHKRMHADCRTQIKCKDCGQMFSTTSSLNKHRRFCEGKNHYTPGGIFAPGLPLTPSPMMDKAKPSPSLNHASLGFNEYFPSRPHPGSLPFSTAPPTFPALTPGFPGIFPPSLYPRPPLLPPTSLLKSPLNHTQDAKLPSPLGNPALPLVSAVSNSSQGTTAAAGPEEKFESRLEDSCVEKLKTRSSDMSDGSDFEDVNTTTGTDLDTTTGTGSDLDSDVDSDPDKDKGKGKSAEGQPKFGGGLAPPGAPNSVAEVPVFYSQHSFFPPPDEQLLTATGAAGDSIKAIASIAEKYFGPGFMGMQEKKLGSLPYHSAFPFQFLPNFPHSLYPFTDRALAHNLLVKAEPKSPRDALKVGGPSAECPFDLTTKPKDVKPILPMPKGPSAPASGEEQPLDLSIGSRARASQNGGGREPRKNHVYGERKLGAGEGLPQVCPARMPQQPPLHYAKPSPFFMDPIYSRVEKRKVTDPVGALKEKYLRPSPLLFHPQMSAIETMTEKLESFAAMKADSGSSLQPLPHHPFNFRSPPPTLSDPILRKGKERYTCRYCGKIFPRSANLTRHLRTHTGEQPYRCKYCDRSFSISSNLQRHVRNIHNKEKPFKCHLCNRCFGQQTNLDRHLKKHEHENAPVSQHPGVLTNHLGTSASSPTSESDNHALLDEKEDSYFSEIRNFIANSEMNQASTRTEKRADMQIVDGSAQCPGLASEKQEDVEEEDDDDLEEDDEDSLAGKSQDDTVSPAPEPQAAYEDEEDEEPAASLAVGFDHTRRCAEDHEGGLLALEPMPTFGKGLDLRRAAEEAFEVKDVLNSTLDSEALKHTLCRQAKNQAYAMMLSLSEDTPLHTPSQGSLDAWLKVTGATSESGAFHPINHL

SEQ ID NO: 15530 - protein, 1718 aa, Homo Sapiens
MNQNTTEPVAATETLAEVPEHVLRGLPEEVRLFPSAVDKTRIGVWATKPILKGKKFGPFVGDKKKRSQVKNNVYMWEVYYPNLGWMCIDATDPEKGNWLRYVNWACSGEEQNLFPLEINRAIYYKTLKPIAPGEELLVWYNGEDNPEIAAAIEEERASARSKRSSPKSRKGKKKSQENKNKGNKIQDIQLKTSEPDFTSANMRDSAEGPKEDEEKPSASALEQPATLQEVASQEVPPELATPAPAWEPQPEPDERLEAAACEVNDLGEEEEEEEEEDEEEEEDDDDDELEDEGEEEASMPNENSVKEPEIRCDEKPEDLLEEPKTTSEETLEDCSEVTPAMQIPRTKEEANGDVFETFMFPCQHCERKFTTKQGLERHMHIHISTVNHAFKCKYCGKAFGTQINRRRHERRHEAGLKRKPSQTLQPSEDLADGKASGENVASKDDSSPPSLGPDCLIMNSEKASQDTINSSVVEENGEVKELHPCKYCKKVFGTHTNMRRHQRRVHERHLIPKGVRRKGGLEEPQPPAEQAQATQNVYVPSTEPEEEGEADDVYIMDISSNISENLNYYIDGKIQTNNNTSNCDVIEMESASADLYGINCLLTPVTVEITQNIKTTQVPVTEDLPKEPLGSTNSEAKKRRTASPPALPKIKAETDSDPMVPSCSLSLPLSISTTEAVSFHKEKSVYLSSKLKQLLQTQDKLTPAGISATEIAKLGPVCVSAPASMLPVTSSRFKRRTSSPPSSPQHSPALRDFGKPSDGKAAWTDAGLTSKKSKLESHSDSPAWSLSGRDERETVSPPCFDEYKMSKEWTASSAFSSVCNQQPLDLSSGVKQKAEGTGKTPVQWESVLDLSVHKKHCSDSEGKEFKESHSVQPTCSAVKKRKPTTCMLQKVLLNEYNGIDLPVENPADGTRSPSPCKSLEAQPDPDLGPGSGFPAPTVESTPDVCPSSPALQTPSLSSGQLPPLLIPTDPSSPPPCPPVLTVATPPPPLLPTVPLPAPSSSASPHPCPSPLSNATAQSPLPILSPTVSPSPSPIPPVEPLMSAASPGPPTLSSSSSSSSSSSSFSSSSSSSSPSPPPLSAISSVVSSGDNLEASLPMISFKQEELENEGLKPREEPQSAAEQDVVVQETFNKNFVCNVCESPFLSIKDLTKHLSIHAEEWPFKCEFCVQLFKDKTDLSEHRFLLHGVGNIFVCSVCKKEFAFLCNLQQHQRDLHPDKVCTHHEFESGTLRPQNFTDPSKAHVEHMQSLPEDPLETSKEEEELNDSSEELYTTIKIMASGIKTKDPDVRLGLNQHYPSFKPPPFQYHHRNPMGIGVTATNFTTHNIPQTFTTAIRCTKCGKGVDNMPELHKHILACASASDKKRYTPKKNPVPLKQTVQPKNGVVVLDNSGKNAFRRMGQPKRLNFSVELSKMSSNKLKLNALKKKNQLVQKAILQKNKSAKQKADLKNACESSSHICPYCNREFTYIGSLNKHAAFSCPKKPLSPPKKKVSHSSKKGGHSSPASSDKNSNSNHRRRTADAEIKMQSMQTPLGKTRARSSGPTQVPLPSSSFRSKQNVKFAASVKSKKPSSSSLRNSSPIRMAKITHVEGKKPKAVAKNHSAQLSSKTSRSLHVRVQKSKAVLQSKSTLASKKRTDRFNIKSRERSGGPVTRSLQLAAAADLSENKREDGSAKQELKDFSYSLRLASRCSPPAAPYITRQYRKVKAPAAAQFQGPFFKE

SEQ ID NO: 15531 - protein, 801 aa, Homo Sapiens
MHHRMNEMNLSPVGMEQLTSSSVSNALPVSGSHLGLAASPTHSAIPAPGLPVAIPNLGPSLSSLPSALSLMLPMGIGDRGVMCGLPERNYTLPPPPYPHLESSYFRTILPGILSYLADRPPPQYIHPNSINVDGNTALSITNNPSALDPYQSNGNVGLEPGIVSIDSRSVNTHGAQSLHPSDGHEVALDTAITMENVSRVTSPISTDGMAEELTMDGVAGEHSQIPNGSRSHEPLSVDSVSNNLAADAVGHGGVIPMHGNGLELPVVMETDHIASRVNGMSDSALSDSIHTVAMSTNSVSVALSTSHNLASLESVSLHEVGLSLEPVAVSSITQEVAMGTGHVDVSSDSLSFVSPSLQMEDSNSNKENMATLFTIWCTLCDRAYPSDCPEHGPVTFVPDTPIESRARLSLPKQLVLRQSIVGAEVGVWTGETIPVRTCFGPLIGQQSHSMEVAEWTDKAVNHIWKIYHNGVLEFCIITTDENECNWMMFVRKARNREEQNLVAYPHDGKIFFCTSQDIPPENELLFYYSRDYAQQIGVPEHPDVHLCNCGKECNSYTEFKAHLTSHIHNHLPTQGHSGSHGPSHSKERKWKCSMCPQAFISPSKLHVHFMGHMGMKPHKCDFCSKAFSDPSNLRTHLKIHTGQKNYRCTLCDKSFTQKAHLESHMVIHTGEKNLKCDYCDKLFMRRQDLKQHVLIHTQERQIKCPKCDKLFLRTNHLKKHLNSHEGKRDYVCEKCTKAYLTKYHLTRHLKTCKGPTSSSSAPEEEEEDDSEEEDLADSVGTEDCRINSAVYSADESLSAHK

SEQ ID NO: 15532 - protein, 630 aa, Homo Sapiens
MLGMYVPDRFSLKSSRVQDGMGLYTARRVRKGEKFGPFAGEKRMPEDLDENMDYRLMWEVRGSKGEVLYILDATNPRHSNWLRFVHEAPSQEQKNLAAIQEGENIFYLAVEDIETDTELLIGYLDSDMEAEEEEQQIMTVIKEGEVENSRRQSTAGRKDRLGCKEDYACPQCESSFTSEDILAEHLQTLHQKPTEEKEFKCKNCGKKFPVKQALQRHVLQCTAKSSLKESSRSFQCSVCNSSFSSASSFEQHQETCRGDARFVCKADSCGKRLKSKDALKRHQENVHTGDPKKKLICSVCNKKCSSASSLQEHRKIHEIFDCQECMKKFISANQLKRHMITHSEKRPYNCEICNKSFKRLDQVGAHKVIHSEDKPYKCKLCGKGFAHRNVYKNHKKTHSEERPFQCEECKALFRTPFSLQRHLLIHNSERTFKCHHCDATFKRKDTLNVHVQVVHERHKKYRCELCNKAFVTPSVLRSHKKTHTGEKEKICPYCGQKFASSGTLRVHIRSHTGERPYQCPYCEKGFSKNDGLKMHIRTHTREKPYKCSECSKAFSQKRGLDEHKRTHTGEKPFQCDVCDLAFSLKKMLIRHKMTHNPNRPLAECQFCHKKFTRNDYLKVHMDNIHGVADS

SEQ ID NO: 15533 - protein, 595 aa, Homo Sapiens
MLKPGDPGGSAFLKVDPAYLQHWQQLFPHGGAGPLKGSGAAGLLSAPQPLQPPPPPPPPERAEPPPDSLRPRPASLSSASSTPASSSTSASSASSCAAAAAAAALAGLSALPVSQLPVFAPLAAAAVAAEPLPPKELCLGATSGPGPVKCGGGGGGGGEGRGAPRFRCSAEELDYYLYGQQRMEIIPLNQHTSDPNNRCDMCADNRNGECPMHGPLHSLRRLVGTSSAAAAAPPPELPEWLRDLPREVCLCTSTVPGLAYGICAAQRIQQGTWIGPFQGVLLPPEKVQAGAVRNTQHLWEIYDQDGTLQHFIDGGEPSKSSWMRYIRCARHCGEQNLTVVQYRSNIFYRACIDIPRGTELLVWYNDSYTSFFGIPLQCIAQDENLNVPSTVMEAMCRQDALQPFNKSSKLAPTTQQRSVVFPQTPCSRNFSLLDKSGPIESGFNQINVKNQRVLASPTSTSQLHSEFSDWHLWKCGQCFKTFTQRILLQMHVCTQNPDRPYQCGHCSQSFSQPSELRNHVVTHSSDRPFKCGYCGRAFAGATTLNNHIRTHTGEKPFKCERCERSFTQATQLSRHQRMPNECKPITESPESIEVD

SEQ ID NO: 15534 - protein, 492 aa, Homo Sapiens
MSPERSQEESPEGDTERTERKPMVKDAFKDISIYFTKEEWAEMGDWEKTRYRNVKMNYNALITVGLRATRPAFMCHRRQAIKLQVDDTEDSDEEWTPRQQVKPPWMAFRGEQSKHQKGMPKASFNNESSLRELSGTPNLLNTSDSEQAQKPVSPPGEASTSGQHSRLKLELRRKETEGKMYSLRERKGHAYKEISEPQDDDYLYCEMCQNFFIDSCAAHGPPTFVKDSAVDKGHPNRSALSLPPGLRIGPSGIPQAGLGVWNEASDLPLGLHFGPYEGRITEDEEAANSGYSWLITKGRNCYEYVDGKDKSSANWMRYVNCARDDEEQNLVAFQYHRQIFYRTCRVIRPGCELLVWSGDEYGQELGIRSSIEPAESLGQAVNCWSGMGMSMARNWASSGAASGRKSSWQGENQSQRSIHVPHAVWPFQVKNFSVNMWNAITPLRTSQDHLQENFSNQRIPAQGIRIRSGNILIHAAVMTKPKVKRSKKGPNS

SEQ ID NO: 15535 - protein, 689 aa, Homo Sapiens
MEDTGIQRGIWDGDAKAVQQCLTDIFTSVYTTCDIPENAIFGPCVLSHTSLYDSIAFIALKSTDKRTVPYIFRVDTSAANGSSEGLMWLRLVQSARDKEEQNLEAYIKNGQLFYRSLRRIAKDEELLVWYGKELTELLLLCPSRSHNKMNGSSPYTCLECSQRFQFEFPYVAHLRFRCPKRLHSADISPQDEQGGGVGTKDHGGGGGGGKDQQQQQQEAPLGPGPKFCKAGPLHHYPSPSPESSNPSAAAGGSSAKPSTDFHNLARELENSRGGSSCSPAQSLSSGSGSGGGGGHQEAELSPDGIATGGGKGKRKFPEEAAEGGGGAGLVGGRGRFVERPLPASKEDLVCTPQQYRASGSYFGLEENGRLFAPPSPETGEAKRSAFVEVKKAARAASLQEEGTADGAGVASEDQDAGGGGGSSTPAAASPVGAEKLLAPRPGGPLPSRLEGGSPARGSAFTSVPQLGSAGSTSGGGGTGAGAAGGAGGGQGAASDERKSAFSQPARSFSQLSPLVLGQKLGALEPCHPADGVGPTRLYPAAADPLAVKLQGAADLNGGCGSLPSGGGGLPKQSPFLYATAFWPKSSAAAAAAAAAAAAGPLQLQLPSALTLLPPSFTSLCLPAQNWCAKCNASFRMTSDLVYHMRSHHKKEYAMEPLVKRRREEKLKCPICNESFRERHHLSRHMTSHN

SEQ ID NO: 15536 - protein, 894 aa, Homo Sapiens
MSPEKSQEESPEEDTERTERKPMVKDAFKDISIYFTKEEWAEMGDWEKTRYRNVKRNYNALITIGLRATRPAFMCHRRQAIKLQVDDTEDSDEEWTPRQQVKPPWMALRVEQRKHQKGMPKASFSNESSLKELSRTANLLNASGSEQAQKPVSPSGEASTSGQHSRLKLELRKKETERKMYSLRERKGHAYKEVSEPQDDDYLYCEMCQNFFIDSCAAHGPPTFVKDSAVDKGHPNRSALSLPPGLRIGPSGIPQAGLGVWNEASDLPLGLHFGPYEGRITEDEEAANNGYSWLITKGRNCYEYVDGKDKSWANWMRYVNCARDDEEQNLVAFQYHRQIFYRTCRVIRPGCELLVWYGDEYGQELGIKWGSKWKKELMAGREPKPEIHPCPSCCLAFSSQKFLSQHVERNHSSQNFPGPSARKLLQPENPCPGDQNQEQQYPDPHSRNDKTKGQEIKERSKLLNKRTWQREISRAFSSPPKGQMGSCRVGKRIMEEESRTGQKVNPGNTGKLFVGVGISRIAKVKYGECGQGFSVKSDVITHQRTHTGEKLYVCRECGRGFSWKSHLLIHQRIHTGEKPYVCRECGRGFSWQSVLLTHQRTHTGEKPYVCRECGRGFSRQSVLLTHQRRHTGEKPYVCRECGRGFSRQSVLLTHQRRHTGEKPYVCRECGRGFSWQSVLLTHQRTHTGEKPYVCRECGRGFSWQSVLLTHQRTHTGEKPYVCRECGRGFSNKSHLLRHQRTHTGEKPYVCRECGRGFRDKSHLLRHQRTHTGEKPYVCRECGRGFRDKSNLLSHQRTHTGEKPYVCRECGRGFSNKSHLLRHQRTHTGEKPYVCRECGRGFRNKSHLLRHQRTHTGEKPYVCRECGRGFSDRSSLCYHQRTHTGEKPYVCREDE

SEQ ID NO: 15537 - protein, 417 aa, Homo Sapiens
MGRRRAPELYRAPFPLYALQVDPSTGLLIAAGGGGAAKTGIKNGVHFLQLELINGRLSASLLHSHDTETRATMNLALAGDILAAGQDAHCQLLRFQAHQQQGNKAEKAGSKEQGPRQRKGAAPAEKKCGAETQHEGLELRVENLQAVQTDFSSDPLQKVVCFNHDNTLLATGGTDGYVRVWKVPSLEKVLEFKAHEGEIEDLALGPDGKLVTVGRDLKASVWQKDQLVTQLHWQENGPTFSSTPYRYQACRFGQVPDQPAGLRLFTVQIPHKRLRQPPPCYLTAWDGSNFLPLRTKSCGHEVVSCLDVSESGTFLGLGTVTGSVAIYIAFSLQCLYYVREAHGIVVTDVAFLPEKGRGPELLGSHETALFSVAVDSRCQLHLLPSRRSVPVWLLLLLCVGLIIVTILLLQSAFPGFL

SEQ ID NO: 15538 - protein, 226 aa, Homo Sapiens
MEAERRRQAEKPKKGRVGSNLLPERHPATGTPTTTVDSSAPPCRRLPGAGGGRSRFSPQGGQRGRPHSRRRHRTTFSPVQLEQLESAFGRNQYPDIWARESLARDTGLSEARIQVWFQNRRAKQRKQERSLLQPLAHLSPAAFSSFLPESTACPYSYAAPPPPVTCFPHPYSHALPSQPSTGGAFALSHQSEDWYPTLHPAPAGHLPCPPPPPMLPLSLEPSKSWN

SEQ ID NO: 15539 - protein, 737 aa, Homo Sapiens
MPDHDSTALLSRQTKRRRVDIGVKRTVGTASAFFAKARATFFSAMNPQGSEQDVEYSVVQHADGEKSNVLRKLLKRANSYEDAMMPFPGATIISQLLKNNMNKNGGTEPSFQASGLSSTGSEVHQEDICSNSSRDSPPECLSPFGRPTMSQFDMDRLCDEHLRAKRARVENIIRGMSHSPSVALRGNENEREMAPQSVSPRESYRENKRKQKLPQQQQQSFQQLVSARKEQKREERRQLKQQLEDMQKQLRQLQEKFYQIYDSTDSENDEDGNLSEDSMRSEILDARAQDSVGRSDNEMCELDPGQFIDRARALIREQEMAENKPKREGNNKERDHGPNSLQPEGKHLAETLKQELNTAMSQVVDTVVKVFSAKPSRQVPQVFPPLQIPQARFAVNGENHNFHTANQRLQCFGDVIIPNPLDTFGNVQMASSTDQTEALPLVVRKNSSDQSASGPAAGGHHQPLHQSPLSATTGFTTSTFRHPFPLPLMAYPFQSPLGAPSGSFSGKDRASPESLDLTRDTTSLRTKMSSHHLSHHPCSPAHPPSTAEGLSLSLIKSECGDLQDMSEISPYSGSAMQEGLSPNHLKKAKLMFFYTRYPSSNMLKTYFSDVKFNRCITSQLIKWFSNFREFYYIQMEKYARQAINDGVTSTEELSITRDCELYRALNMHYNKANDFEVPERFLEVAQITLREFFNAIIAGKDVDPSWKKAIYKVICKLDSEVPEIFKSPNCLQELLHE

SEQ ID NO: 15540 - protein, 592 aa, Homo Sapiens
MDPNSILLSPQPQICSHLAEACTEGERSSSPPELDRDSPFPWSQVPSSSPTDPEWFGDEHIQAKRARVETIVRGMCLSPNPLVPGNAQAGVSPRCPKKARERKRKQNLPTPQGLLMPAPAWDQGNRKGGPRVREQLHLLKQQLRHLQEHILQAAKPRDTAQGPGGCGTGKGPLSAKQGNGCGPRPWVVDGDHQQGTSKDLSGAEKHQESEKPSFLPSGAPASLEILRKELTRAVSQAVDSVLQKVLLDPPGHLTQLGRSFQGQVAEGRSEPSPPVGGACKDPLALAALPRRVQLQAGVPVGNLSLAKRLDSPRYPIPPRMTPKPCQDPPANFPLTAPSHIQENQILSQLLGHRYNNGHWSSSPPQDSSSQRHPSSEPALRPWRTTKPQPLVLSQQQCPLPFTSAHLESLPLLPSVKMEQRGLHAVMEALPFSLLHIQEGLNPGHLKKAKLMFFFTRYPSSNLLKVYFPDVQFNRCITSQMIKWFSNFREFYYIQMEKSARQAISDGVTNPKMLVVLRNSELFQALNMHYNKGNDFEVPDCFLEIASLTLQEFFRAVSAGRDSDPSWKKPIYKIISKLDSDIPEIFKSSSYPQ

SEQ ID NO: 15541 - protein, 245 aa, Homo Sapiens
MTSSYGHVLERQPALGGRLDSPGNLDTLQAKKNFSVSHLLDLEEAGDMVAAQADENVGEAGRSLLESPGLTSGSDTPQQDNDQLNSEEKKKRKQRRNRTTFNSSQLQALERVFERTHYPDAFVREDLARRVNLTEARVQVWFQNRRAKFRRNERAMLANKNASLLKSYSGDVTAVEQPIVPRPAPRPTDYLSWGTASPYSAMATYSATCANNSPAQGINMANSIANLRLKAKEYSLQRNQVPTVN

SEQ ID NO: 15542 - protein, 253 aa, Homo Sapiens
MDSAAAAFALDKPALGPGPPPPPPALGPGDCAQARKNFSVSHLLDLEEVAAAGRLAARPGARAEAREGAAREPSGGSSGSEAAPQDGECPSPGRGSAAKRKKKQRRNRTTFNSSQLQALERVFERTHYPDAFVREELARRVNLSEARVQVWFQNRRAKFRRNERAMLASRSASLLKSYSQEAAIEQPVAPRPTALSPDYLSWTASSPYSTVPPYSPGSSGPATPGVNMANSIASLRLKAKEFSLHHSQVPTVN

SEQ ID NO: 15543 - protein, 523 aa, Homo Sapiens
MMLRGNLKQVRIEKNPARLRALESAVGESEPAAAAAMALALAGEPAPPAPAPPEDHPDEEMGFTIDIKSFLKPGEKTYTQRCRLFVGNLPTDITEEDFKRLFERYGEPSEVFINRDRGFGFIRLESRTLAEIAKAELDGTILKSRPLRIRFATHGAALTVKNLSPVVSNELLEQAFSQFGPVEKAVVVVDDRGRATGKGFVEFAAKPPARKALERCGDGAFLLTTTPRPVIVEPMEQFDDEDGLPEKLMQKTQQYHKEREQPPRFAQPGTFEFEYASRWKALDEMEKQQREQVDRNIREAKEKLEAEMEAARHEHQLMLMRQDLMRRQEELRRLEELRNQELQKRKQIQLRHEEEHRRREEEMIRHREQEELRRQQEGFKPNYMENREQEMRMGDMGPRGAINMGDAFSPAPAGNQGPPPMMGMNMNNRATIPGPPMGPGPAMGPEGAANMGTPMMPDNGAVHNDRFPQGPPSQMGSPMGSRTGSETPQAPMSGVGPVSGGPGGFGRGSQGGNFEGPNKRRRY

SEQ ID NO: 15544 - protein, 328 aa, Homo Sapiens
MDAVLLEHFPGGLDAFPSSYFDEDDFFTDQSSRDPLEDGDELLADEQAEVEFLSHQLHEYCYRDGACLLLQPAPPAAPLALAPPSSGGLGEPDDGGGGGYCCETGAPPGGFPYSPGSPPSCLAYPCAGAAVLSPGARLRGLSGAAAAAARRRRRVRSEAELQQLRQAANVRERRRMQSINDAFEGLRSHIPTLPYEKRLSKVDTLRLAIGYINFLSELVQADLPLRGGGAGGCGGPGGGGRLGGDSPGSQAQKVIICHRGTRSPSPSDPDYGLPPLAGHSLSWTDEKQLKEQNIIRTAKVWTPEDPRKLNSKSSFNNIENEPPFEFVS

SEQ ID NO: 15545 - protein, 322 aa, Homo Sapiens
MADRDSGSEQGGAALGSGGSLGHPGSGSGSGGGGGGGGGGGGSGGGGGGAPGGLQHETQELASKRVDIQNKRFYLDVKQNAKGRFLKIAEVGAGGNKSRLTLSMSVAVEFRDYLGDFIEHYAQLGPSQPPDLAQAQDEPRRALKSEFLVRENRKYYMDLKENQRGRFLRIRQTVNRGPGLGSTQGQTIALPAQGLIEFRDALAKLIDDYGVEEEPAELPEGTSLTVDNKRFFFDVGSNKYGVFMRVSEVKPTYRNSITVPYKVWAKFGHTFCKYSEEMKKIQEKQREKRAACEQLHQQQQQQQEETAAATLLLQGEEEGEED

SEQ ID NO: 15546 - protein, 312 aa, Homo Sapiens
MADGDSGSERGGGGGPCGFQPASRGGGEQETQELASKRLDIQNKRFYLDVKQNAKGRFLKIAEVGAGGSKSRLTLSMAVAAEFRDSLGDFIEHYAQLGPSSPEQLAAGAEEGGGPRRALKSEFLVRENRKYYLDLKENQRGRFLRIRQTVNRGGGGFGAGPGPGGLQSGQTIALPAQGLIEFRDALAKLIDDYGGEDDELAGGPGGGAGGPGGGLYGELPEGTSITVDSKRFFFDVGCNKYGVFLRVSEVKPSYRNAITVPFKAWGKFGGAFCRYADEMKEIQERQRDKLYERRGGGSGGGEESEGEEVDED

SEQ ID NO: 15547 - protein, 347 aa, Homo Sapiens
MERARRRGGGGGRGRGGKNVGGSGLSKSRLYPQAQHSHYPHYAASATPNQAGGAAEIQELASKRVDIQKKRFYLDVKQSSRGRFLKIAEVWIGRGRQDNIRKSKLTLSLSVAAELKDCLGDFIEHYAHLGLKGHRQEHGHSKEQGSRRRQKHSAPSPPVSVGSEEHPHSVLKTDYIERDNRKYYLDLKENQRGRFLRIRQTMMRGTGMIGYFGHSLGQEQTIVLPAQGMIEFRDALVQLIEDYGEGDIEERRGGDDDPLELPEGTSFRVDNKRFYFDVGSNKYGIFLKVSEVRPPYRNTITVPFKAWTRFGENFIKYEEEMRKICNSHKEKRMDGRKASGEEQECLD

SEQ ID NO: 15548 - protein, 462 aa, Homo Sapiens
MASNSSSCPTPGGGHLNGYPVPPYAFFFPPMLGGLSPPGALTTLQHQLPVSGYSTPSPATIETQSSSSEEIVPSPPSPPPLPRIYKPCFVCQDKSSGYHYGVSACEGCKGFFRRSIQKNMVYTCHRDKNCIINKVTRNRCQYCRLQKCFEVGMSKESVRNDRNKKKKEVPKPECSESYTLTPEVGELIEKVRKAHQETFPALCQLGKYTTNNSSEQRVSLDIDLWDKFSELSTKCIIKTVEFAKQLPGFTTLTIADQITLLKAACLDILILRICTRYTPEQDTMTFSDGLTLNRTQMHNAGFGPLTDLVFAFANQLLPLEMDDAETGLLSAICLICGDRQDLEQPDRVDMLQEPLLEALKVYVRKRRPSRPHMFPKMLMKITDLRSISAKGAERVITLKMEIPGSMPPLIQEMLENSEGLDTLSGQPGGGGRDGGGLAPPPGSCSPSLSPSSNRSSPATHSP

SEQ ID NO: 15549 - protein, 455 aa, Homo Sapiens
MTTSGHACPVPAVNGHMTHYPATPYPLLFPPVIGGLSLPPLHGLHGHPPPSGCSTPSPATIETQSTSSEELVPSPPSPLPPPRVYKPCFVCQDKSSGYHYGVSACEGCKGFFRRSIQKNMIYTCHRDKNCVINKVTRNRCQYCRLQKCFEVGMSKESVRNDRNKKKKETSKQECTESYEMTAELDDLTEKIRKAHQETFPSLCQLGKYTTNSSADHRVRLDLGLWDKFSELATKCIIKIVEFAKRLPGFTGLTIADQITLLKAACLDILILRICTRYTPEQDTMTFSDGLTLNRTQMHNAGFGPLTDLVFTFANQLLPLEMDDTETGLLSAICLICGDRQDLEEPTKVDKLQEPLLEALKIYIRKRRPSKPHMFPKILMKITDLRSISAKGAERVITLKMEIPGSMPPLIQEMLENSEGHEPLTPSSSGNTAEHSPSISPSSVENSGVSQSPLVQ

SEQ ID NO: 15550 - protein, 454 aa, Homo Sapiens
MATNKERLFAAGALGPGSGYPGAGFPFAFPGALRGSPPFEMLSPSFRGLGQPDLPKEMASLSVETQSTSSEEMVPSSPSPPPPPRVYKPCFVCNDKSSGYHYGVSSCEGCKGFFRRSIQKNMVYTCHRDKNCIINKVTRNRCQYCRLQKCFEVGMSKEAVRNDRNKKKKEVKEEGSPDSYELSPQLEELITKVSKAHQETFPSLCQLGKYTTNSSADHRVQLDLGLWDKFSELATKCIIKIVEFAKRLPGFTGLSIADQITLLKAACLDILMLRICTRYTPEQDTMTFSDGLTLNRTQMHNAGFGPLTDLVFAFAGQLLPLEMDDTETGLLSAICLICGDRMDLEEPEKVDKLQEPLLEALRLYARRRRPSQPYMFPRMLMKITDLRGISTKGAERAITLKMEIPGPMPPLIREMLENPEMFEDDSSQPGPHPNASSEDEVPGGQGKGGLKSPA

SEQ ID NO: 15551 - protein, 313 aa, Homo Sapiens
MSQSRHRAEAPPLEREDSGTFSLGKMITAKPGKTPIQVLHEYGMKTKNIPVYECERSDVQIHVPTFTFRVTVGDITCTGEGTSKKLAKHRAAEAAINILKANASICFAVPDPLMPDPSKQPKNQLNPIGSLQELAIHHGWRLPEYTLSQEGGPAHKREYTTICRLESFMETGKGASKKQAKRNAAEKFLAKFSNISPENHISLTNVVGHSLGCTWHSLRNSPGEKINLLKRSLLSIPNTDYIQLLSEIAKEQGFNITYLDIDELSANGQYQCLAELSTSPITVCHGSGISCGNAQSDAAHNALQYLKIIAERK

SEQ ID NO: 15552 - protein, 346 aa, Homo Sapiens
MHLPGCAPAMADGSFSLAGHLLRSPGGSTSRLHSIEAILGFTKDDGILGTFPAERGARGAKERDRRLGARPACPKAPEEGSEPSPPPAPAPAPEYEAPRPYCPKEPGEARPSPGLPVGPATGEAKLSEEEQPKKKHRRNRTTFTTYQLHELERAFEKSHYPDVYSREELAGKVNLPEVRVQVWFQNRRAKWRRQEKLEVSSMKLQDSPLLSFSRSPPSATLSPLGAGPGSGGGPAGGALPLESWLGPPLPGGGATALQSLPGFGPPAQSLPASYTPPPPPPPFLNSPPLGPGLQPLAPPPPSYPCGPGFGDKFPLDEADPRNSSIAALRLKAKEHIQAIGKPWQAL

SEQ ID NO: 15553 - protein, 184 aa, Homo Sapiens
MFLSPGEGPATEGGGLGPGEEAPKKKHRRNRTTFTTYQLHQLERAFEASHYPDVYSREELAAKVHLPEVRVQVWFQNRRAKWRRQERLESGSGAVAAPRLPEAPALPFARPPAMSLPLEPWLGPGPPAVPGLPRLLGPGPGLQASFGPHAFAPTFADGFALEEASLRLLAKEHAQALDRAWPPA

SEQ ID NO: 15554 - protein, 714 aa, Homo Sapiens
MNTLQGPVSFKDVAVDFTQEEWQQLDPDEKITYRDVMLENYSHLVSVGYDTTKPNVIIKLEQGEEPWIMGGEFPCQHSPEAWRVDDLIERIQENEDKHSRQAACINSKTLTEEKENTFSQIYMETSLVPSSIIAHNCVSCGKNLESISQLISSDGSYARTKPDECNECGKTYHGEKMCEFNQNGDTYSHNEENILQKISILEKPFEYNECMEALDNEAVFIAHKRAYIGEKPYEWNDSGPDFIQMSNFNAYQRSQMEMKPFECSECGKSFCKKSKFIIHQRAHTGEKPYECNVCGKSFSQKGTLTVHRRSHLEEKPYKCNECGKTFCQKLHLTQHLRTHSGEKPYECSECGKTFCQKTHLTLHQRNHSGERPYPCNECGKSFSRKSALSDHQRTHTGEKLYKCNECGKSYYRKSTLITHQRTHTGEKPYQCSECGKFFSRVSYLTIHYRSHLEEKPYECNECGKTFNLNSAFIRHRKVHTEEKSHECSECGKFSQLYLTDHHTAHLEEKPYECNECGKTFLVNSAFDGHQPLPKGEKSYECNVCGKLFNELSYYTEHYRSHSEEKPYGCSECGKTFSHNSSLFRHQRVHTGEKPYECYECGKFFSQKSYLTIHHRIHSGEKPYECSKCGKVFSRMSNLTVHYRSHSGEKPYECNECGKVFSQKSYLTVHYRTHSGEKPYECNECGKKFHHRSAFNSHQRIHRRGNMNVLDVENL

SEQ ID NO: 15555 - protein, 420 aa, Homo Sapiens
MATSLGSNTYNRQNWEDADFPILCQTCLGENPYIRMTKEKYGKECKICARPFTVFRWCPGVRMRFKKTEVCQTCSKLKNVCQTCLLDLEYGLPIQVRDAGLSFKDDMPKSDVNKEYYTQNMEREISNSDGTRPVGMLGKATSTSDMLLKLARTTPYYKRNRPHICSFWVKGECKRGEECPYRHEKPTDPDDPLADQNIKDRYYGINDPVADKLLKRASTMPRLDPPEDKTITTLYVGGLGDTITETDLRNHFYQFGEIRTITVVQRQQCAFIQFATRQAAEVAAEKSFNKLIVNGRRLNVKWGRSQAARGKEKEKDGTTDSGIKLEPVPGLPGALPPPPAAEEEASANYFNLPPSGPPAVVNIALPPPPGIAPPPPPGFGPHMFHPMGPPPPFMRAPGPIHYPSQDPQRMGAHAGKHSSP

SEQ ID NO: 15556 - protein, 500 aa, Homo Sapiens
MDHTEGSPAEEPPAHAPSPGKFGERPPPKRLTREAMRNYLKERGDQTVLILHAKVAQKSYGNEKRFFCPPPCVYLMGSGWKKKKEQMERDGCSEQESQPCAFIGIGNSDQEMQQLNLEGKNYCTAKTLYISDSDKRKHFMLSVKMFYGNSDDIGVFLSKRIKVISKPSKKKQSLKNADLCIASGTKVALFNRLRSQTVSTRYLHVEGGNFHASSQQWGAFFIHLLDDDESEGEEFTVRDGYIHYGQTVKLVCSVTGMALPRLIIRKVDKQTALLDADDPVSQLHKCAFYLKDTERMYLCLSQERIIQFQATPCPKEPNKEMINDGASWTIISTDKAEYTFYEGMGPVLAPVTPVPVVESLQLNGGGDVAMLELTGQNFTPNLRVWFGDVEAETMYRCGESMLCVVPDISAFREGWRWVRQPVQVPVTLVRNDGIIYSTSLTFTYTPEPGPRPHCSAAGAILRANSSQVPPNESNTNSEGSYTNASTNSTSVTSSTATVVS

SEQ ID NO: 15557 - protein, 517 aa, Homo Sapiens
MDPAGAADPSVPPNPLTHLSLQDRSEMQLQSEADRRSLPGTWTRSSPEHTTILRGGVRRCLQQQCEQTVRILHAKVAQKSYGNEKRFFCPPPCVYLSGPGWRVKPGQDQAHQAGETGPTVCGYMGLDSASGSATETQKLNFEQQPDSREFGCAKTLYISDADKRKHFRLVLRLVLRGGRELGTFHSRLIKVISKPSQKKQSLKNTDLCISSGSKVSLFNRLRSQTVSTRYLSVEDGAFVASARQWAAFTLHLADGHSAQGDFPPREGYVRYGSLVQLVCTVTGITLPPMIIRKVAKQCALLDVDEPISQLHKCAFQFPGSPPGGGGTYLCLATEKVVQFQASPCPKEANRALLNDSSCWTIIGTESVEFSFSTSLACTLEPVTPVPLISTLELSGGGDVATLELHGENFHAGLKVWFGDVEAETMYRSPRSLVCVVPDVAAFCSDWRWLRAPITIPMSLVRADGLFYPSAFSFTYTPEYSVRPGHPGVPEPATDADALLESIHQEFTRTNFHLFIQT

SEQ ID NO: 15558 - protein, 1133 aa, Homo Sapiens
MPVQAPQWTDFLSCPICTQTFDETIRKPISLGCGHTVCKMCLNKLHRKACPFDQTTINTDIELLPVNSALLQLVGAQVPEQQPITLCSGVEDTKHYEEAKKCVEELALYLKPLSSARGVGLNSTTQSVLSRPMQRKLVTLVHCQLVEEEGRIRAMRAARSLGERTVTELILQHQNPQQLSSNLWAAVRARGCQFLGPAMQEEALKLVLLALEDGSALSRKVLVLFVVQRLEPRFPQASKTSIGHVVQLLYRASCFKVTKRDEDSSLMQLKEEFRTYEALRREHDSQIVQIAMEAGLRIAPDQWSSLLYGDQSHKSHMQSIIDKLQTPASFAQSVQELTIALQRTGDPANLNRLRPHLELLANIDPSPDAPPPTWEQLENGLVAVRTVVHGLVDYIQNHSKKGADQQQPPQHSKYKTYMCRDMKQRGGCPRGASCTFAHSQEELEKFRKMNKRLVPRRPLSASLGQLNEVGLPSAAILPDEGAVDLPSRKPPALPNGIVSTGNTVTQLIPRGTDPSYDSSLKPGKIDHLSSSAPGSPPDLLESVPKSISALPVNPHSIPPRGPADLPPMPVTKPLQMVPRGSQLYPAQQTDVYYQDPRGAAPPFEPAPYQQGMYYTPPPQCVSRFVRPPPSAPEPAPPYLDHYPPYLQERVVNSQYGTQPQQYPPIYPSHYDGRRVYPAPSYTREEIFRESPIPIEIPPAAVPSYVPESRERYQQIESYYPVAPHPTQIRPSYLREPPYSRLPPPPQPHPSLDELHRRRKEIMAQLEERKVISPPPFAPSPTLPPTFHPEEFLDEDLKVAGKYKGNDYSQYSPWSCDTIGSYIGTKDAKPKDVVAAGSVEMMNVESKGMRDQRLDLQRRAAETSDDDLIPFGDRPTVSRFGAISRTSKTIYQGAGPMQAMAPQGAPTKSINISDYSPYGTHGGWGASPYSPHQNIPSQGHFSERERISMSEVASHGKPLPSAEREQLRLELQQLNHQISQQTQLRGLEAVSNRLVLQREANTLAGQSQPPPPPPPKWPGMISSEQLSLELHQVEREIGKRTRELSMENQCSLDMKSKLNTSKQAENGQPEPQNKVPAEDLTLTFSDVPNGSALTQENISLLSNKTSSLNLSEDPEGGGDNNDSQRSGVTPSSAP

SEQ ID NO: 15559 - protein, 1191 aa, Homo Sapiens
MPVQAAQWTEFLSCPICYNEFDENVHKPISLGCSHTVCKTCLNKLHRKACPFDQTAINTDIDVLPVNFALLQLVGAQVPDHQSIKLSNLGENKHYEVAKKCVEDLALYLKPLSGGKGVASLNQSALSRPMQRKLVTLVNCQLVEEEGRVRAMRAARSLGERTVTELILQHQNPQQLSANLWAAVRARGCQFLGPAMQEEALKLVLLALEDGSALSRKVLVLFVVQRLEPRFPQASKTSIGHVVQLLYRASCFKVTKRDEDSSLMQLKEEFRSYEALRREHDAQIVHIAMEAGLRISPEQWSSLLYGDLAHKSHMQSIIDKLQSPESFAKSVQELTIVLQRTGDPANLNRLRPHLELLANIDPNPDAVSPTWEQLENAMVAVKTVVHGLVDFIQNYSRKGHETPQPQPNSKYKTSMCRDLRQQGGCPRGTNCTFAHSQEELEKYRLRNKKINATVRTFPLLNKVGVNNTVTTTAGNVISVIGSTETTGKIVPSTNGISNAENSVSQLISRSTDSTLRALETVKKVGKVGANGQNAAGPSADSVTENKIGSPPKTPVSNVAATSAGPSNVGTELNSVPQKSSPFLTRVPVYPPHSENIQYFQDPRTQIPFEVPQYPQTGYYPPPPTVPAGVAPCVPRFVRSNNVPESSLPPASMPYADHYSTFSPRDRMNSSPYQPPPPQPYGPVPPVPSGMYAPVYDSRRIWRPPMYQRDDIIRSNSLPPMDVMHSSVYQTSLRERYNSLDGYYSVACQPPSEPRTTVPLPREPCGHLKTSCEEQIRRKPDQWAQYHTQKAPLVSSTLPVATQSPTPPSPLFSVDFRADFSESVSGTKFEEDHLSHYSPWSCGTIGSCINAIDSEPKDVIANSNAVLMDLDSGDVKRRVHLFETQRRTKEEDPIIPFSDGPIISKWGAISRSSRTGYHTTDPVQATASQGSATKPISVSDYVPYVNAVDSRWSSYGNEATSSAHYVERDRFIVTDLSGHRKHSSTGDLLSLELQQAKSNSLLLQREANALAMQQKWNSLDEGRHLTLNLLSKEIELRNGELQSDYTEDATDTKPDRDIELELSALDTDEPDGQSEPIEEILDIQLGISSQNDQLLNGMAVENGHPVQQHQKEPPKQKKQSLGEDHVILEEQKTILPVTSCFSQPLPVSISNASCLPITTSVSAGNLILKTHVMSEDKNDFLKPVANGKMVNS

SEQ ID NO: 15560 - protein, 485 aa, Homo Sapiens; identical to SEQ ID NO: 11271

SEQ ID NO: 15561 - protein, 523 aa, Homo Sapiens
MPSVMEKPSAGSGILSRSRAKTVPNGGQPHSEDDSSEEEHSHDSMIRVGTNYQAVIPECKPESPARYSNKELKGMLVWSPNHCVSDAKLDKYIAMAKEKHGYNIEQALGMLLWHKHDVEKSLADLANFTPFPDEWTVEDKVLFEQAFGFHGKCFQRIQQMLPDKLIPSLVKYYYSWKKTRSRTSVMDRQARRLGGRKDKEDSDELEEGRGGVSEGEPDPADPKREPLPSRPLNARPGPGKKEVQVSQYRHHPLRTRRRPPKGMYLSPEGLTAVSGSPDLANLTLRGLDSQLISLKRQVQSMKQTNSSLRQALEGGIDPLRPPEANTKFNSRWTTDEQLLAVQAIRRYGKDFGAIAEVIGNKTLTQVKTFFVSYRRRFNLEEVLQEWEAEQDGAPGAPVPMEEARRGAPLPAPALEEDDEVQITSVSTSVPRSVPPAPPPPPPPTSLSQPPPLLRPPLPTAPTLLRQPPPLQQGRFLQPRLAPNQPPPPLIRPALAAPRHSARPGPQPPPTLIGTPLEPPAPSL

SEQ ID NO: 15562 - protein, 495 aa, Homo Sapiens
MRVGAEYQARIPEFDPGATKYTDKDNGGMLVWSPYHSIPDAKLDEYIAIAKEKHGYNVEQALGMLFWHKHNIEKSLADLPNFTPFPDEWTVEDKVLFEQAFSFHGKSFHRIQQMLPDKTIASLVKYYYSWKKTRSRTSLMDRQARKLANRHNQGDSDDDVEETHPMDGNDSDYDPKKEAKKEGNTEQPVQTSKIGLGRREYQSLQHRHHSQRSKCRPPKGMYLTQEDVVAVSCSPNAANTILRQLDMELISLKRQVQNAKQVNSALKQKMEGGIEEFKPPESNQKINARWTTEEQLLAVQGVRKYGKDFQAIADVIGNKTVGQVKNFFVNYRRRFNLEEVLQEWEAEQGTQASNGDASTLGEETKSASNVPSGKSTDEEEEAQTPQAPRTLGPSPPAPSSTPTPTAPIATLNQPPPLLRPTLPAAPALHRQPPPLQQQARFIQPRPTLNQPPPPLIRPANSMPPRLNPRPVLSTVGGQQPPSLIGIQTDSQSSLH

SEQ ID NO: 15563 - protein, 619 aa, Homo Sapiens
MASGAYNPYIEIIEQPRQRGMRFRYKCEGRSAGSIPGEHSTDNNRTYPSIQIMNYYGKGKVRITLVTKNDPYKPHPHDLVGKDCRDGYYEAEFGQERRPLFFQNLGIRCVKKKEVKEAIITRIKAGINPFNVPEKQLNDIEDCDLNVVRLCFQVFLPDEHGNLTTALPPVVSNPIYDNRAPNTAELRICRVNKNCGSVRGGDEIFLLCDKVQKDDIEVRFVLNDWEAKGIFSQADVHRQVAIVFKTPPYCKAITEPVTVKMQLRRPSDQEVSESMDFRYLPDEKDTYGNKAKKQKTTLLFQKLCQDHVETGFRHVDQDGLELLTSGDPPTLASQSAGITVNFPERPRPGLLGSIGEGRYFKKEPNLFSHDAVVREMPTGVSSQAESYYPSPGPISSGLSHHASMAPLPSSSWSSVAHPTPRSGNTNPLSSFSTRTLPSNSQGIPPFLRIPVGNDLNASNACIYNNADDIVGMEASSMPSADLYGISDPNMLSNCSVNMMTTSSDSMGETDNPRLLSMNLENPSCNSVLDPRDLRQLHQMSSSSMSAGANSNTTVFVSQSDAFEGSDFSCADNSMINESGPSNSTNPNSHGFVQDSQYSGIGSMQNEQLSDSFPYEFFQV

SEQ ID NO: 15564 - protein, 551 aa, Homo Sapiens
MDELFPLIFPAEPAQASGPYVEIIEQPKQRGMRFRYKCEGRSAGSIPGERSTDTTKTHPTIKINGYTGPGTVRISLVTKDPPHRPHPHELVGKDCRDGFYEAELCPDRCIHSFQNLGIQCVKKRDLEQAISQRIQTNNNPFQVPIEEQRGDYDLNAVRLCFQVTVRDPSGRPLRLPPVLSHPIFDNRAPNTAELKICRVNRNSGSCLGGDEIFLLCDKVQKEDIEVYFTGPGWEARGSFSQADVHRQVAIVFRTPPYADPSLQAPVRVSMQLRRPSDRELSEPMEFQYLPDTDDRHRIEEKRKRTYETFKSIMKKSPFSGPTDPRPPPRRIAVPSRSSASVPKPAPQPYPFTSSLSTINYDEFPTMVFPSGQISQASALAPAPPQVLPQAPAPAPAPAMVSALAQAPAPVPVLAPGPPQAVAPPAPKPTQAGEGTLSEALLQLQFDDEDLGALLGNSTDPAVFTDLASVDNSEFQQLLNQGIPVAPHTTEPMLMEYPEAITRLVTGAQRPPDPAPAPLGAPGLPNGLLSGDEDFSSIADMDFSALLSQISS

SEQ ID NO: 15565 - protein, 579 aa, Homo Sapiens
MLRSGPASGPSVPTGRAMPSRRVARPPAAPELGALGSPDLSSLSLAVSRSTDELEIIDEYIKENGFGLDGGQPGPGEGLPRLVSRGAASLSTVTLGPVAPPATPPPWGCPLGRLVSPAPGPGPQPHLVITEQPKQRGMRFRYECEGRSAGSILGESSTEASKTLPAIELRDCGGLREVEVTACLVWKDWPHRVHPHSLVGKDCTDGICRVRLRPHVSPRHSFNNLGIQCVRKKEIEAAIERKIQLGIDPYNAGSLKNHQEVDMNVVRICFQASYRDQQGQMRRMDPVLSEPVYDKKSTNTSELRICRINKESGPCTGGEELYLLCDKVQKEDISVVFSRASWEGRADFSQADVHRQIAIVFKTPPYEDLEIVEPVTVNVFLQRLTDGVCSEPLPFTYLPRDHDSYGVDKKRKRGMPDVLGELNSSDPHGIESKRRKKKPAILDHFLPNHGSGPFLPPSALLPDPDFFSGTVSLPGLEPPGGPDLLDDGFAYDPTAPTLFTMLDLLPPAPPHASAVVCSGGAGAVVGETPGPEPLTLDSYQAPGPGDGGTASLVGSNMFPNHYREAAFGGGLLSPGPEAT

SEQ ID NO: 15566 - protein, 1566 aa, Homo Sapiens
MTADKDKDKDKEKDRDRDRDREREKRDKARESENSRPRRSCTLEGGAKNYAESDHSEDEDNDNNSATAEESTKKNKKKPPKKKSRYERTDTGEITSYITEDDVVYRPGDCVYIESRRPNTPYFICSIQDFKLVHNSQACCRSPTPALCDPPACSLPVASQPPQHLSEAGRGPVGSKRDHLLMNVKWYYRQSEVPDSVYQHLVQDRHNENDSGRELVITDPVIKNRELFISDYVDTYHAAALRGKCNISHFSDIFAAREFKARVDSFFYILGYNPETRRLNSTQGEIRVGPSHQAKLPDLQPFPSPDGDTVTQHEELVWMPGVNDCDLLMYLRAARSMAAFAGMCDGGSTEDGCVAASRDDTTLNALNTLHESGYDAGKALQRLVKKPVPKLIEKCWTEDEVKRFVKGLRQYGKNFFRIRKELLPNKETGELITFYYYWKKTPEAASSRAHRRHRRQAVFRRIKTRTASTPVNTPSRPPSSEFLDLSSASEDDFDSEDSEQELKGYACRHCFTTTSKDWHHGGRENILLCTDCRIHFKKYGELPPIEKPVDPPPFMFKPVKEEDDGLSGKHSMRTRRSRGSMSTLRSGRKKQPASPDGRTSPINEDIRSSGRNSPSAASTSSNDSKAETVKKSAKKVKEEASSPLKSNKRQREKVASDTEEADRTSSKKTKTQEISRPNSPSEGEGESSDSRSVNDEGSSDPKDIDQDNRSTSPSIPSPQDNESDSDSSAQQQMLQAQPPALQAPTGVTPAPSSAPPGTPQLPTPGPTPSATAVPPQGSPTASQAPNQPQAPTAPVPHTHIQQAPALHPQRPPSPHPPPHPSPHPPLQPLTGSAGQPSAPSHAQPPLHGQGPPGPHSLQAGPLLQHPGPPQPFGLPPQASQGQAPLGTSPAAAYPHTSLQLPASQSALQSQQPPREQPLPPAPLAMPHIKPPPTTPIPQLPAPQAHKHPPHLSGPSPFSMNANLPPPPALKPLSSLSTHHPPSAHPPPLQLMPQSQPLPSSPAQPPGLTQSQNLPPPPASHPPTGLHQVAPQPPFAQHPFVPGGPPPITPPTCPSTSTPPAGPGTSAQPPCSGAAASGGSIAGGSSCPLPTVQIKEEALDDAEEPESPPPPPRSPSPEPTVVDTPSHASQSARFYKHLDRGYNSCARTDLYFMPLAGSKLAKKREEAIEKAKREAEQKAREEREREKEKEKEREREREREREAERAAKASSSAHEGRLSDPQLSGPGHMRPSFEPPPTTIAAVPPYIGPDTPALRTLSEYARPHVMSPTNRNHPFYMPLNPTDPLLAYHMPGLYNVDPTIRERELREREIREREIRERELRERMKPGFEVKPPELDPLHPAANPMEHFARHSALTIPPTAGPHPFASFHPGLNPLERERLALAGPQLRPEMSYPDRLAAERIHAERMASLTSDPLARLQMFNVTPHHHQHSHIHSHLHLHQQDPLHQGSAGPVHPLVDPLTAGPHLARFPYPPGTLPNPLLGQPPHEHEMLRHPVFGTPYPRDLPGAIPPPMSAAHQLQAMHAQSAELQRLAMEQQWLHGHPHMHGGHLPSQEDYYSRLKKEGDKQL

SEQ ID NO: 15567 - protein, 1097 aa, Homo Sapiens
MATQVMGQSSGGGGLFTSSGNIGMALPNDMYDLHDLSKAELAAPQLIMLANVALTGEVNGSCCDYLVGEERQMAELMPVGDNNFSDSEEGEGLEESADIKGEPHGLENMELRSLELSVVEPQPVFEASGAPDIYSSNKDLPPETPGAEDKGKSSKTKPFRCKPCQYEAESEEQFVHHIRVHSAKKFFVEESAEKQAKARESGSSTAEEGDFSKGPIRCDRCGYNTNRYDHYTAHLKHHTRAGDNERVYKCIICTYTTVSEYHWRKHLRNHFPRKVYTCGKCNYFSDRKNNYVQHVRTHTGERPYKCELCPYSSSQKTHLTRHMRTHSGEKPFKCDQCSYVASNQHEVTRHARQVHNGPKPLNCPHCDYKTADRSNFKKHVELHVNPRQFNCPVCDYAASKKCNLQYHFKSKHPTCPNKTMDVSKVKLKKTKKREADLPDNITNEKTEIEQTKIKGDVAGKKNEKSVKAEKRDVSKEKKPSNNVSVIQVTTRTRKSVTEVKEMDVHTGSNSEKFSKTKKSKRKLEVDSHSLHGPVNDEESSTKKKKKVESKSKNNSQEVPKGDSKVEENKKQNTCMKKSTKKKTLKNKSSKKSSKPPQKEPVEKGSAQMDPPQMGPAPTEAVQKGPVQVEPPPPMEHAQMEGAQIRPAPDEPVQMEVVQEGPAQKELLPPVEPAQMVGAQIVLAHMELPPPMETAQTEVAQMGPAPMEPAQMEVAQVESAPMQVVQKEPVQMELSPPMEVVQKEPVQIELSPPMEVVQKEPVKIELSPPIEVVQKEPVQMELSPPMGVVQKEPAQREPPPPREPPLHMEPISKKPPLRKDKKEKSNMQSERARKEQVLIEVGLVPVKDSWLLKESVSTEDLSPPSPPLPKENLREEASGDQKLLNTGEGNKEAPLQKVGAEEADESLPGLAANINESTHISSSGQNLNTPEGETLNGKHQTDSIVCEMKMDTDQNTRENLTGINSTVEEPVSPMLPPSAVEEREAVSKTALASPPATMAANESQEIDEDEGIHSHEGSDLSDNMSEGSDDSGLHGARPVPQESSRKNAKEALAVKAAKGDFVCIFCDRSFRKGKDYSKHLNRHLVNVYYLEEAAQGQE

SEQ ID NO: 15568 - protein, 979 aa, Homo Sapiens
MATQAYTELQAAPPPSQPPQAPPQAQPQPPPPPPPAAPQPPQPPTAAATPQPQYVTELQSPQPQAQPPGGQKQYVTELPAVPAPSQPTGAPTPSPAPQQYIVVTVSEGAMRASETVSEASPGSTASQTGVPTQVVQQVQGTQQRLLVQTSVQAKPGHVSPLQLTNIQVPQQALPTQRLVVQSAAPGSKGGQVSLTVHGTQQVHSPPEQSPVQANSSSSKTAGAPTGTVPQQLQVHGVQQSVPVTQERSVVQATPQAPKPGPVQPLTVQGLQPVHVAQEVQQLQQVPVPHVYSSQVQYVEGGDASYTASAIRSSTYSYPETPLYTQTASTSYYEAAGTATQVSTPATSQAVASSGSMPMYVSGSQVVASSTSTGAGASNSSGGGGSGGGGGGGGGGGGGGSGSTGGGGSGAGTYVIQGGYMLGSASQSYSHTTRASPATVQWLLDNYETAEGVSLPRSTLYCHYLLHCQEQKLEPVNAASFGKLIRSVFMGLRTRRLGTRGNSKYHYYGLRIKASSPLLRLMEDQQHMAMRGQPFSQKQRLKPIQKMEGMTNGVAVGQQPSTGLSDISAQVQQYQQFLDASRSLPDFTELDLQGKVLPEGVGPGDIKAFQVLYREHCEAIVDVMVNLQFTLVETLWKTFWRYNLSQPSEAPPLAVHDEAEKRLPKAILVLLSKFEPVLQWTKHCDNVLYQGLVEILIPDVLRPIPSALTQAIRNFAKSLESWLTHAMVNIPEEMLRVKVAAAGAFAQTLRRYTSLNHLAQAARAVLQNTAQINQMLSDLNRVDFANVQEQASWVCRCEDRVVQRLEQDFKVTLQQQNSLEQWAAWLDGVVSQVLKPYQGSAGFPKAAKLFLLKWSFYSSMVIRDLTLRSAASFGSFHLIRLLYDEYMYYLIEHRVAQAKGETPIAVMGEFANLATSLNPLDPDKDEEEEEEEESEDELPQDISLAAGGESPALGPETLEPPAKLARTDARGLFVQALPSS

SEQ ID NO: 15569 - protein, 723 aa, Homo Sapiens
MQNSEGGADSPASVALRPSAAAPPVPASPQRVLVQAASSNPKGAQMQPISLPRVQQVPQQVQPVQHVYPAQVQYVEGGDAVYTNGAIRTAYTYNPEPQMYAPSSTASYFEAPGGAQVTVAASSPPAVPSHSMVGITMDVGGSPIVSSAGAYLIHGGMDSTRHSLAHTSRSSPATLEMAIENLQKSEGITSHKSGLLNSHLQWLLDNYETAEGVSLPRSSLYNHYLRHCQEHKLDPVNAASFGKLIRSVFMGLRTRRLGTRGNSKYHYYGIRLKPDSPLNRLQEDTQYMAMRQQPMHQKPRYRPAQKTDSLGDSGSHSGLHSTPEQTMAVQSQHHQQYIDVSHVFPEFPAPDLGSFLLQDGVTLHDVKALQLVYRRHCEATVDVVMNLQFHYIEKLWLSFWNSKASSSDGPTSLPASDEDPEGAVLPKDKLISLCQCDPILRWMRSCDHILYQALVEILIPDVLRPVPSTLTQAIRNFAKSLEGWLTNAMSDFPQQVIQTKVGVVSAFAQTLRRYTSLNHLAQAARAVLQNTSQINQMLSDLNRVDFANVQEQASWVCQCEESVVQRLEQDFKLTLQQQSSLDQWASWLDSVVTQVLKQHAGSPSFPKAARQFLLKWSFYSSMVIRDLTLRSAASFGSFHLIRLLYDEYMFYLVEHRVAEATGETPIAVMGEFNDLASLSLTLLDKDDMGDEQRGSEAGPDARSLGEPLVKRERSDPNHSLQGI

SEQ ID NO: 15570 - protein, 749 aa, Homo Sapiens
MQTSETGSDTGSTVTLQTSVASQAAVPTQVVQQVPVQQQVQQVQTVQQVQHVYPAQVQYVEGSDTVYTNGAIRTTTYPYTETQMYSQNTGGNYFDTQGSSAQVTTVVSSHSMVGTGGIQMGVTGGQLISSSGGTYLIGNSMENSGHSVTHTTRASPATIEMAIETLQKSDGLSTHRSSLLNSHLQWLLDNYETAEGVSLPRSTLYNHYLRHCQEHKLDPVNAASFGKLIRSIFMGLRTRRLGTRGNSKYHYYGIRVKPDSPLNRLQEDMQYMAMRQQPMQQKQRYKPMQKVDGVADGFTGSGQQTGTSVEQTVIAQSQHHQQFLDASRALPEFGEVEISSLPDGTTFEDIKSLQSLYREHCEAILDVVVNLQFSLIEKLWQTFWRYSPSTPTDGTTITESSNLSEIESRLPKAKLITLCKHESILKWMCNCDHGMYQALVEILIPDVLRPIPSALTQAIRNFAKSLEGWLSNAMNNIPQRMIQTKVAAVSAFAQTLRRYTSLNHLAQAARAVLQNTSQINQMLSDLNRVDFANVQEQASWVCQCDDNMVQRLETDFKMTLQQQSTLEQWAAWLDNVMMQALKPYEGRPSFPKAARQFLLKWSFYSSMVIRDLTLRSAASFGSFHLIRLLYDEYMFYLVEHRVAQATGETPIAVMGEFGDLNAVSPGNLDKDEGSEVESEMDEELDDSSEPQAKREKTELSQAFPVGCMQPVLETGVQPSLLNPIHSEHIVTSTQTIRQCSATGNTYTAV

SEQ ID NO: 15571 - protein, 735 aa, Homo Sapiens
MHCGLLEEPDMDSTESWIERCLNESENKRYSSHTSLGNVSNDENEEKENNRASKPHSTPATLQWLEENYEIAEGVCIPRSALYMHYLDFCEKNDTQPVNAASFGKIIRQQFPQLTTRRLGTRGQSKYHYYGIAVKESSQYYDVMYSKKGAAWVSETGKKEVSKQTVAYSPRSKLGTLLPEFPNVKDLNLPASLPEEKVSTFIMMYRTHCQRILDTVIRANFDEVQSFLLHFWQGMPPHMLPVLGSSTVVNIVGVCDSILYKAISGVLMPTVLQALPDSLTQVIRKFAKQLDEWLKVALHDLPENLRNIKFELSRRFSQILRRQTSLNHLCQASRTVIHSADITFQMLEDWRNVDLNSITKQTLYTMEDSRDEHRKLITQLYQEFDHLLEEQSPIESYIEWLDTMVDRCVVKVAAKRQGSLKKVAQQFLLMWSCFGTRVIRDMTLHSAPSFGSFHLIHLMFDDYVLYLLESLHCQERANELMRAMKGEGSTAEVREEIILTEAAAPTPSPVPSFSPAKSATSVEVPPPSSPVSNPSPEYTGLSTTGAMQSYTWSLTYTVTTAAGSPAENSQQLPCMRNTHVPSSSVTHRIPVYPHREEHGYTGSYNYGSYGNQHPHPMQSQYPALPHDTAISGPLHYAPYHRSSAQYPFNSPTSRMEPCLMSSTPRLHPTPVTPRWPEVPSANTCYTSPSVHSARYGNSSDMYTPLTTRRNSEYEHMQHFPGFAYINGEASTGWAK

SEQ ID NO: 15572 - protein, 616 aa, Homo Sapiens
MAEDEPDAKSPKTGGRAPPGGAEAGEPTTLLQRLRGTISKAVQNKVEGILQDVQKFSDNDKLYLYLQLPSGPTTGDKSSEPSTLSNEEYMYAYRWIRNHLEEHTDTCLPKQSVYDAYRKYCESLACCRPLSTANFGKIIREIFPDIKARRLGGRGQSKYCYSGIRRKTLVSMPPLPGLDLKGSESPEMGPEVTPAPRDELVEAACALTCDWAERILKRSFSSIVEVARFLLQQHLISARSAHAHVLKAMGLAEEDEHAPRERSSKPKNGLENPEGGAHKKPERLAQPPKDLEARTGAGPLARGERKKSVVESSAPGANNLQVNALVARLPLLLPRAPRSLIPPIPVSPPILAPRLSSGALKVATLPLSSRAGAPPAAVPIINMILPTVPALPGPGPGPGRAPPGGLTQPRGTENREVGIGGDQGPHDKGVKRTAEVPVSEASGQAPPAKAAKQDIEDTASDAKRKRGRPRKKSGGSGERNSTPLKSAAAMESAQSSRLPWETWGSGGEGNSAGGAERPGPMGEAEKGAVLAQGQGDGTVSKGGRGPGSQHTKEAEDKIPLVPSKVSVIKGSRSQKEAFPLAKGEVDTAPQGNKDLKEHVLQSSLSQEHKDPKATPP

SEQ ID NO: 15573 - protein, 928 aa, Homo Sapiens
MAKVPELEDTFLQAQPAPQLSPGIQEDCCVQLLGKGLLVYPEETVYLAAEGQPGGEQGGGEKGEDPELPGAVKSEMHLNNGNFSSEEEDADNHDSKTKAADQYLSQKKTITQIVKDKKKQTQLTLQWLEENYIVCEGVCLPRCILYAHYLDFCRKEKLEPACAATFGKTIRQKFPLLTTRRLGTRGHSKYHYYGIGIKESSAYYHSVYSGKGLTRFSGSKLKNEGGFTRKYSLSSKTGTLLPEFPSAQHLVYQGCISKDKVDTLIMMYKTHCQCILDNAINGNFEEIQHFLLHFWQGMPDHLLPLLENPVIIDIFCVCDSILYKVLTDVLIPATMQEMPESLLADIRNFAKNWEQWVVSSLENLPEALTDKKIPIVRRFVSSLKRQTSFLHLAQIARPALFDQHVVNSMVSDIERVDLNSIGSQALLTISGSTDTESGIYTEHDSITVFQELKDLLKKNATVEAFIEWLDTVVEQRVIKTSKQNGRSLKKRAQDFLLKWSFFGARVMHNLTLNNASSFGSFHLIRMLLDEYILLAMETQFNNDKEQELQNLLDKYMKNSDASKAAFTASPSSCFLANRNKGSMVSSDAVKNESHVETTYLPLPSSQPGGLGPALHQFPAGNTDNMPLTGQMELSQIAGHLMTPPISPAMASRGSVINQGPMAGRPPSVGPVLSAPSHCSTYPEPIYPTLPQANHDFYSTSSNYQTVFRAQPHSTSGLYPHHTEHGRCMAWTEQQLSRDFFSGSCAGSPYNSRPPSSYGPSLQAQDSHNMQFLNTGSFNFLSNTGAASCQGATLPPNSPNGYYGSNINYPESHRLGSMVNQHVSVISSIRSLPPYSDIHDPLNILDDSGRKQTSSFYTDTSSPVACRTPVLASSLQTPIPSSSSQCMYGTSNQYPAQETLDSHGTSSREMVSSLPPINTVFMGTAAGGT

SEQ ID NO: 15574 - protein, 1363 aa, Homo Sapiens
MSSSRAQQMHAFSWIRNTLEEHPETSLPKQEVYDEYKSYCDNLGYHPLSAADFGKIMKNVFPNMKARRLGTRGKSKYCYSGLRKKAFVHMPTLPNLDFHKTGDGLEGAEPSGQLQNIDEEVISSACRLVCEWAQKVLSQPFDTVLELARFLVKSHYIGTKSMAALTVMAAAPAGMKGITQPSAFIPTAESNSFQPQVKTLPSPIDAKQQLQRKIQKKQQEQKLQSPLPGESAAKKSESATSNGVTNLPNGNPSILSPQPIGIVVAAVPSPIPVQRTRQLVTSPSPMSSSDGKVLPLNVQVVTQHMQSVKQAPKTPQNVPASPGGDRSARHRYPQILPKPANTSALTIRSPTTVLFTSSPIKTAVVPASHMSSLNVVKMTTISLTPSNSNTPLKHSASVSSATGTTEESRSVPQIKNGSVVSLQSPGSRSSSAGGTSAVEVKVEPETSSDEHPVQCQENSDEAKAPQTPSALLGQKSNTDGALQKPSNEGVIEIKATKVCDQRTKCKSRCNEMLPGTSTGNNQSTITLSVASQNLTFTSSSSPPNGDSINKDPKLCTKSPRKRLSSTLQETQVPPVKKPIVEQLSAATIEGQKQGSVKKDQKVPHSGKTEGSTAGAQIPSKVSVNVSSHIGANQPLNSSALVISDSALEQQTTPSSSPDIKVKLEGSVFLLDSDSKSVGSFNPNGWQQITKDSEFISASCEQQQDISVMTIPEHSDINDLEKSVWELEGMPQDTYSQQLHSQIQESSLNQIQAHSSDQLPLQSELKEFEPSVSQTNESYFPFDDELTQDSIVEELVLMEQQMSMNNSHSYGNCLGMTLQSQSVTPGAPMSSHTSSTHFYHPIHSNGTPIHTPTPTPTPTPTPTPTPTPTSEMIAGSQSLSRESPCSRLAQTTPVDSALGSSRHTPIGTPHSNCSSSVPPSPVECRNPFAFTPISSSMAYHDASIVSSSPVKPMQRPMATHPDKTKLEWMNNGYSGVGNSSVSGHGILPSYQELVEDRFRKPHAFAVPGQSYQSQSRHHDTHFGRLTPVSPVQHQGATVNNTNKQEGFAVPAPLDNKGTNSSASSNFRCRSVSPAVHRQRNLSGSTLYPVSNIPRSNVTPFGSPVTPEVHVFTNVHTDACANNIAQRSQSVPLTVMMQTAFPNALQKQANSKKITNVLLSKLDSDNDDAVRGLGMNNLPSNYTARMNLTQILEPSTVFPSANPQNMIDSSTSVYEFQTPSYLTKSNSTGQINFSPGDNQAQSEIGEQQLDFNSTVKDLLSGDSLQTNQQLVGQGASDLTNTASDFSSDIRLSSELSGSINDLNTLDPNLLFDPGRQQGQDDEATLEELKNDPLFQQICSESMNSMTSSGFEWIESKDHPTVEMLG

SEQ ID NO: 15575 - protein, 586 aa, Homo Sapiens
MAEGVPASPSSGEGSRGPHSGVIQWLVDNFCICEECSVPRCLMYEIYVETCGQNTENQVNPATFGKLVRLVFPDLGTRRLGTRGSARYHYDGICIKKSSFFYAQYCYLIGEKRYHSGDAIAFEKSTNYNSIIQQEATCEDHSPMKTDPVGSPLSEFRRCPFLEQEQAKKYSCNMMAFLADEYCNYCRDILRNVEDLLTSFWKSLQQDTVMLMSLPDVCQLFKCYDVQLYKGIEDVLLHDFLEDVSIQYLKSVQLFSKKFKLWLLNALEGVPALLQISKLKEVTLFVKRLRRKTYLSNMAKTMRMVLKSKRRVSVLKSDLQAIINQGTLATSKKALASDRSGADELENNPEMKCLRNLISLLGTSTDLRVFLSCLSSHLQAFVFQTSRSKEEFTKLAASFQLRWNLLLTAVSKAMTLCHRDSFGSWHLFHLLLLEYMIHILQSCLEEEEEEEDMGTVKEMLPDDPTLGQPDQALFHSLNSSLSQACASPSMEPLGVMPTHMGQGRYPVGVSNMVLRILGFLVDTAMGNKLIQVLLEDETTESAVKLSLPMGQEALITLKDGQQFVIQISDVPQSSEDIYFRENNANV

SEQ ID NO: 15576 - protein, 260 aa, Homo Sapiens
MELTQPAEDLIQTQQTPASELGDPEDPGEEAADGSDTVVLSLFPCTPEPVNPEPDASVSSPQAGSSLKHSTTLTNRQRGNEVSALPATLDSLSIHQLAAQGELDQLKEHLRKGDNLVNKPDERGFTPLIWASAFGEIETVRFLLEWGADPHILAKERESALSLASTGGYTDIVGLLLERDVDINIYDWNGGTPLLYAVRGNHVKCVEALLARGADLTTEADSGYTPMDLAVALGYRKVQQVIENHILKLFQSNLVPADPE

SEQ ID NO: 15577 - protein, 272 aa, Homo Sapiens
MEAQGVAEGAGPGAASGVPHPAALAPAAAPTLAPASVAAAASQFTLLVMQPCAGQDEAAAPGGSVGAGKPVRYLCEGAGDGEEEAGEDEADLLDTSDPPGGGESAASLEDLEDEETHSGGEGSSGGARRRGSGGGSMSKTCTYEGCSETTSQVAKQRKPWMCKKHRNKMYKDKYKKKKSDQALNCGGTASTGSAGNVKLEESADNILSIVKQRTGSFGDRPARPTLLEQVLNQKRLSLLRSPEVVQFLQKQQQLLNQQVLEQRQQQFPGTSM

SEQ ID NO: 15578 - protein, 184 aa, Homo Sapiens
MARSLVHDTVFYCLSVYQVKISPTPQLGAASSAEGHVGQGAPGLMGNMNPEGGVNHENGMNRDGGMIPEGGGGNQEPRQQPQPPPEEPAQAAMEGPQPENMQPRTRRTKFTLLQVEELESVFRHTQYPDVPTRRELAENLGVTEDKVRVWFKNKRARCRRHQRELMLANELRADPDDCVYIVVD

SEQ ID NO: 15579 - protein, 288 aa, Homo Sapiens
MEPPDQCSQYMTSLLSPAVDDEKELQDMNAMVLSLTEEVKEEEEDAQPEPEQGTAAGEKLKSAGAQGGEEKDGGGEEKDGGGAGVPGHLWEGDLEGTSGSDGNVEDSDQSEKEPGQQYSRPQGAVGGLEPGNAQQPNVHAFTPLQLQELERIFQREQFPSEFLRRRLARSMNVTELAVQIWFENRRAKWRRHQRALMARNMLPFMAVGQPVMVTAAEAITAPLFISGMRDDYFWDHSHSSSLCFPMPPFPPPSLPLPLMLLPPMPPAGQAEFGPFPFVIVPSFTFPNV

SEQ ID NO: 15580 - protein, 288 aa, Homo Sapiens
MEPPDQCSQYMTSLLSPAVDDEKELQDMNAMVLSLTEEVKEEEEDAQPEPEQGTAAGEKLKSAGAQGGEEKDGGGEEKDGGGAGVPGHLWEGNLEGTSGSDGNVEDSDQSEKEPGQQYSRPQGAVGGLEPGNAQQPNVHAFTPLQLQELECIFQREQFPSEFLRRRLARSMNVTELAVQIWFENRRAKWRRHQRALMARNMLPFMAVGQPVMVTAAEAITAPLFISGMRDDYFWDHSHSSSLCFPMPPFPPPSLPLPLMLLPPMPPAGQAEFGPFPFVIVPSFTFPNV

SEQ ID NO: 15581 - protein, 131 aa, Homo Sapiens; identical to SEQ ID NO: 7198

SEQ ID NO: 15582 - protein, 1914 aa, Homo Sapiens
MADGKGDAAAVAGAGAEAPAVAGAGDGVETESMVRGHRPVSPAPGASGLRPCLWQLETELREQEVSEVSSLNYCRSFCQTLLQYASNKNASEHIVYLLEVYRLAIQSFASARPYLTTECEDVLLVLGRLVLSCFELLLSVSESELPCEVWLPFLQSLQESHDALLEFGNNNLQILVHVTKEGVWKNPVLLKILSQQPVETEEVNKLIAQEGPSFLQMRIKHLLKSNCIPQATALSKLCAESKEISNVSSFQQAYITCLCSMLPNEDAIKEIAKVDCKEVLDIICNLESEGQDNTAFVLCTTYLTQQLQTASVYCSWELTLFWSKLQRRIDPSLDTFLERCRQFGVIAKTQQHLFCLIRVIQTEAQDAGLGVSILLCVRALQLRSSEDEEMKASVCKTIACLLPEDLEVRRACQLTEFLIEPSLDGFNMLEELYLQPDQKFDEENAPVPNSLRCELLLALKAHWPFDPEFWDWKTLKRHCHQLLGQEASDSDDDLSGYEMSINDTDVLESFLSDYDEGKEDKQYRRRDLTDQHKEKRDKKPIGSSERYQRWLQYKFFCLLCKRECIEARILHHSKMHMEDGIYTCPVCIKKFKRKEMFVPHVMEHVKMPPSRRDRSKKKLLLKGSQKGICPKSPSAIPEQNHSLNDQAKGESHEYVTFSKLEDCHLQDRDLYPCPGTDCSRVFKQFKYLSVHLKAEHQNNDENAKHYLDMKNRREKCTYCRRHFMSAFHLREHEQVHCGPQPYMCVSIDCYARFGSVNELLNHKQKHDDLRYKCELNGCNIVFSDLGQLYHHEAQHFRDASYTCNFLGCKKFYYSKIEYQNHLSMHNVENSNGDIKKSVKLEESATGEKQDCINQPHLLNQTDKSHLPEDLFCAESANSQIDTETAENLKENSDSNSSDQLSHSSSASMNEELIDTLDHSETMQDVLLSNEKVFGPSSLKEKCSSMAVCFDGTKFTCGFDGCGSTYKNARGMQKHLRKVHPYHFKPKKIKTKDLFPSLGNEHNQTTEKLDAEPKPCSDTNSDSPDEGLDHNIHIKCKREHQGYSSESSICASKRPCTEDTMLELLLRLKHLSLKNSITHGSFSGSLQGYPSSGAKSLQSVSSISDLNFQNQDENMPSQYLAQLAAKPFFCELQGCKYEFVTREALLMHYLKKHNYSKEKVLQLTMFQHRYSPFQCHICQRSFTRKTHLRIHYKNKHQIGSDRATHKLLDNEKCDHEGPCSVDRLKGDCSAELGGDPSSNSEKPHCHPKKDECSSETDLESSCEETESKTSDISSPIGSHREEQEGREGRGSRRTVAKGNLCYILNKYHKPFHCIHKTCNSSFTNLKGLIRHYRTVHQYNKEQLCLEKDKARTKRELVKCKKIFACKYKECNKRFLCSKALAKHCSDSHNLDHIEEPKVLSEAGSAARFSCNQPQCPAVFYTFNKLKHHLMEQHNIEGEIHSDYEIHCDLNGCGQIFTHRSNYSQHVYYRHKDYYDDLFRSQKVANERLLRSEKVCQTADTQGHEHQTTRRSFNAKSKKCGLIKEKKAPISFKTRAEALHMCVEHSEHTQYPCMVQGCLSVVKLESSIVRHYKRTHQMSSAYLEQQMENLVVCVKYGTKIKEEPPSEADPCIKKEENRSCESERTEHSHSPGDSSAPIQNTDCCHSSERDGGQKGCIESSSVFDADTLLYRGTLKCNHSSKTTSLEQCNIVQPPPPCKIENSIPNPNGTESGTYFTSFQLPLPRIKESETRQHSSGQENTVKNPTHVPKENFRKHSQPRSFDLKTYKPMGFESSFLKFIQESEEKEDDFDDWEPSEHLTLSNSSQSSNDLTGNVVANNMVNDSEPEVDIPHSSSDSTIHENLTAIPPLIVAETTTVPSLENLRVVLDKALTDCGELALKQLHYLRPVVVLERSKFSTPILDLFPTKKTDELCVGSS

SEQ ID NO: 15583 - protein, 523 aa, Homo Sapiens
MESAPAAPDPAASEPGSSGADAAAGSRETPLNQESARKSEPPAPVRRQSYSSTSRGISVTKKTHTSQIEIIPCKICGDKSSGIHYGVITCEGCKGFFRRSQQSNATYSCPRQKNCLIDRTSRNRCQHCRLQKCLAVGMSRDAVKFGRMSKKQRDSLYAEVQKHRMQQQQRDHQQQPGEAEPLTPTYNISANGLTELHDDLSNYIDGHTPEGSKADSAVSSFYLDIQPSPDQSGLDINGIKPEPICDYTPASGFFPYCSFTNGETSPTVSMAELEHLAQNISKSHLETCQYLREELQQITWQTFLQEEIENYQNKQREVMWQLCAIKITEAIQYVVEFAKRIDGFMELCQNDQIVLLKAGSLEVVFIRMCRAFDSQNNTVYFDGKYASPDVFKSLGCEDFISFVFEFGKSLCSMHLTEDEIALFSAFVLMSADRSWLQEKVKIEKLQQKIQLALQHVLQKNHREDGILTKLICKVSTLRALCGRHTEKLMAFKAIYPDIVRLHFPPLYKELFTSEFEPAMQIDG

SEQ ID NO: 15584 - protein, 470 aa, Homo Sapiens
MCENQLKTKADATAQIEVIPCKICGDKSSGIHYGVITCEGCKGFFRRSQQNNASYSCPRQRNCLIDRTNRNRCQHCRLQKCLALGMSRDAVKFGRMSKKQRDSLYAEVQKHQQRLQEQRQQQSGEAEALARVYSSSISNGLSNLNNETSGTYANGHVIDLPKSEGYYNVDSGQPSPDQSGLDMTGIKQIKQEPIYDLTSVPNLFTYSSFNNGQLAPGITMTEIDRIAQNIIKSHLETCQYTMEELHQLAWQTHTYEEIKAYQSKSREALWQQCAIQITHAIQYVVEFAKRITGFMELCQNDQILLLKSGCLEVVLVRMCRAFNPLNNTVLFEGKYGGMQMFKALGSDDLVNEAFDFAKNLCSLQLTEEEIALFSSAVLISPDRAWLIEPRKVQKLQEKIYFALQHVIQKNHLDDETLAKLIAKIPTITAVCNLHGEKLQVFKQSHPEIVNTLFPPLYKELFNPDCATGCK

SEQ ID NO: 15585 - protein, 518 aa, Homo Sapiens
MDRAPQRQHRASRELLAAKKTHTSQIEVIPCKICGDKSSGIHYGVITCEGCKGFFRRSQRCNAAYSCTRQQNCPIDRTSRNRCQHCRLQKCLALGMSRDAVKFGRMSKKQRDSLHAEVQKQLQQRQQQQQEPVVKTPPAGAQGADTLTYTLGLPDGQLPLGSSPDLPEASACPPGLLKASGSGPSYSNNLAKAGLNGASCHLEYSPERGKAEGRESFYSTGSQLTPDRCGLRFEEHRHPGLGELGQGPDSYGSPSFRSTPEAPYASLTEIEHLVQSVCKSYRETCQLRLEDLLRQRSNIFSREEVTGYQRKSMWEMWERCAHHLTEAIQYVVEFAKRLSGFMELCQNDQIVLLKAGAMEVVLVRMCRAYNADNRTVFFEGKYGGMELFRALGCSELISSIFDFSHSLSALHFSEDEIALYTALVLINAHRPGLQEKRKVEQLQYNLELAFHHHLCKTHRQSILAKLPPKGKLRSLCSQHVERLQIFQHLHPIVVQAAFPPLYKELFSTETESPVGLSK

SEQ ID NO: 15586 - protein, 497 aa, Homo Sapiens
MRTQIEVIPCKICGDKSSGIHYGVITCEGCKGFFRRSQRCNAAYSCTRQQNCPIDRTSRNRCQHCRLQKCLALGMSRDAVKFGRMSKKQRDSLHAEVQKQLQQRQQQQQEPVVKTPPAGAQGADTLTYTLGLPDGQLPLGSSPDLPEASACPPGLLKASGSGPSYSNNLAKAGLNGASCHLEYSPERGKAEGRESFYSTGSQLTPDRCGLRFEEHRHPGLGELGQGPDSYGSPSFRSTPEAPYASLTEIEHLVQSVCKSYRETCQLRLEDLLRQRSNIFSREEVTGYQRKSMWEMWERCAHHLTEAIQYVVEFAKRLSGFMELCQNDQIVLLKAGAMEVVLVRMCRAYNADNRTVFFEGKYGGMELFRALGCSELISSIFDFSHSLSALHFSEDEIALYTALVLINAHRPGLQEKRKVEQLQYNLELAFHHHLCKTHRQSILAKLPPKGKLRSLCSQHVERLQIFQHLHPIVVQAAFPPLYKELFSTETESPVGLSK

SEQ ID NO: 15587 - protein, 1687 aa, Homo Sapiens
MTSSSPAGLEGSDLSSINTMMSAVMSVGKVTENGGSPQGIKSPSKPPGPNRIGRRNQETKEEKSSYNCPLCEKICTTQHQLTMHIRQHNTDTGGADHSCSICGKSLSSASSLDRHMLVHSGERPYKCTVCGQSFTTNGNMHRHMKIHEKDPNSATATAPPSPLKRRRLSSKRKLSHDAESEREDPAPAKKMVEDGQSGDLEKKADEVFHCPVCFKEFVCKYGLETHMETHSDNPLRCDICCVTFRTHRGLLRHNALVHKQLPRDAMGRPFIQNNPSIPAGFHDLGFTDFSCRKFPRISQAWCETNLRRCISEQHRFVCDTCDKAFPMLCSLALHKQTHVAADQGQEKPQATPLPGDALDQKGFLALLGLQHTKDVRPAPAEEPLPDDNQAIQLQTLKCQLPQDPGCTNLLSLSPFEAASLGGSLTVLPATKDSIKHLSLQPFQKGFIIQPDSSIVVKPISGESAIELADIQQILKMAASAPPQISLPPFSKAPAAPLQAIFKHMPPLKPKPLVTPRTVVATSTPPPLINAQQASPGCISPSLPPPPLKLLKGSVEAASNAHLLQSKSGTQPHAATRLSLQQPRAELPGQPEMKTQLEQDSIIEALLPLSMEAKIKQEITEGELKAFMTAPGGKKTPAMRKVLYPCRFCNQVFAFSGVLRAHVRSHLGISPYQCNICDYIAADKAALIRHLRTHSGERPYICKICHYPFTVKANCERHLRKKHLKATRKDIEKNIEYVSSSAAELVDAFCAPDTVCRLCGEDLKHYRALRIHMRTHCGRGLGGGHKGRKPFECKECSAAFAAKRNCIHHILKQHLHVPEQDIESYVLAADGLGPAEAPAAEASGRGEDSGCAALGDCKPLTAFLEPQNGFLHRGPTQPPPPHVSIKLEPASSFAVDFNEPLDFSQKGLALVQVKQENISFLSPSSLVPYDCSMEPIDLSIPKNFRKGDKDLATPSEAKKPEEEAGSSEQPSPCPAPGPSLPVTLGPSGILESPMAPAPAATPEPPAQPLQGPVQLAVPIYSSALVSSPPLVGSSALLSGTALLRPLRPKPPLLLPKPPVTEELPPLASIAQIISSVSSAPTLLKTKVADPGPASTGSNTTASDSLGGSVPKAATTATPAATTSPKESSEPPAPASSPEAASPTEQGPAGTSKKRGRKRGMRSRPRANSGGVDLDSSGEFASIEKMLATTDTNKFSPFLQTAEDNTQDEVAGAPADHHGPSDEEQGSPPEDKLLRAKRNSYTNCLQKITCPHCPRVFPWASSLQRHMLTHTDSQSDAETAAAAGEVLDLTSRDREQPSEGATELRQVAGDAPVEQATAETASPVHREEHGRGESHEPEEEHGTEESTGDADGAEEDASSNQSLDLDFATKLMDFKLAEGDGEAGAGGAASQEQKLACDTCGKSFKFLGTLSRHRKAHGRQEPKDEKGDGASTAEEGPQPAPEQEEKPPETPAEVVESAPGAGEAPAEKLAEETEGPSDGESAAEKRSSEKSDDDKKPKTDSPKSVASKADKRKKVCSVCNKRFWSLQDLTRHMRSHTGERPYKCQTCERTFTLKHSLVRHQRIHQKARHAKHHGKDSDKEERGEEDSENESTHSGNNAVSENEAELAPNASNHMAVTRSRKEGLASATKDCSHREEKVTAGWPSEPGQGDLNPESPAALGQDLLEPRSKRPAHPILATADGASQLVGME

SEQ ID NO: 15588 - protein, 453 aa, Homo Sapiens
MRIPVDASTSRRFTPPSTALSPGKMSEALPLGAPDAGAALAGKLRSGDRSMVEVLADHPGELVRTDSPNFLCSVLPTHWRCNKTLPIAFKVVALGDVPDGTLVTVMAGNDENYSAELRNATAAMKNQVARFNDLRFVGRSGRGKSFTLTITVFTNPPQVATYHRAIKITVDGPREPRRHRQKLDDQTKPGSLSFSERLSELEQLRRTAMRVSPHHPAPTPNPRASLNHSTAFNPQPQSQMQDTRQIQPSPPWSYDQSYQYLGSIASPSVHPATPISPGRASGMTTLSAELSSRLSTAPDLTAFSDPRQFPALPSISDPRMHYPGAFTYSPTPVTSGIGIGMSAMGSATRYHTYLPPPYPGSSQAQGGPFQASSPSYHLYYGASAGSYQFSMVGGERSPPRILPPCTNASTGSALLNPSLPNQSDVVEAEGSHSNSPTNMAPSARLEEAVWRPY

SEQ ID NO: 15589 - protein, 604 aa, Homo Sapiens
MISVKRNTWRALSLVIGDCRKKGNFEYCQDRTEKHSTMPDSPVDVKTQSRLTPPTMPPPPTTQGAPRTSSFTPTTLTNGTSHSPTALNGAPSPPNGFSNGPSSSSSSSLANQQLPPACGARQLSKLKRFLTTLQQFGNDISPEIGERVRTLVLGLVNSTLTIEEFHSKLQEATNFPLRPFVIPFLKANLPLLQRELLHCARLAKQNPAQYLAQHEQLLLDASTTSPVDSSELLLDVNENGKRRTPDRTKENGFDREPLHSEHPSKRPCTISPGQRYSPNNGLSYQPNGLPHPTPPPPQHYRLDDMAIAHHYRDSYRHPSHRDLRDRNRPMGLHGTRQEEMIDHRLTDREWAEEWKHLDHLLNCIMDMVEKTRRSLTVLRRCQEADREELNYWIRRYSDAEDLKKGGGSSSSHSRQQSPVNPDPVALDAHREFLHRPASGYVPEEIWKKAEEAVNEVKRQAMTELQKAVSEAERKAHDMITTERAKMERTVAEAKRQAAEDALAVINQQEDSSESCWNCGRKASETCSGCNTARYCGSFCQHKDWEKHHHICGQTLQAQQQGDTPAVSSSVTPNSGAGSPMDTPPAATPRSTTPGTPSTIETTPR

SEQ ID NO: 15590 - protein, 521 aa, Homo Sapiens
MASNSLFSTVTPCQQNFFWDPSTSRRFSPPSSSLQPGKMSDVSPVVAAQQQQQQQQQQQQQQQQQQQQQQQEAAAAAAAAAAAAAAAAAVPRLRPPHDNRTMVEIIADHPAELVRTDSPNFLCSVLPSHWRCNKTLPVAFKVVALGEVPDGTVVTVMAGNDENYSAELRNASAVMKNQVARFNDLRFVGRSGRGKSFTLTITVFTNPPQVATYHRAIKVTVDGPREPRRHRQKLDDSKPSLFSDRLSDLGRIPHPSMRVGVPPQNPRPSLNSAPSPFNPQGQSQITDPRQAQSSPPWSYDQSYPSYLSQMTSPSIHSTTPLSSTRGTGLPAITDVPRRISDDDTATSDFCLWPSTLSKKSQAGASELGPFSDPRQFPSISSLTESRFSNPRMHYPATFTYTPPVTSGMSLGMSATTHYHTYLPPPYPGSSQSQSGPFQTSSTPYLYYGTSSGSYQFPMVPGGDRSPSRMLPPCTTTSNGSTLLNPNLPNQNDGVDADGSHSSSPTVLNSSGRMDESVWRPY

SEQ ID NO: 15591 - protein, 415 aa, Homo Sapiens
MRIPVDPSTSRRFTPPSPAFPCGGGGGKMGENSGALSAQAAVGPGGRARPEVRSMVDVLADHAGELVRTDSPNFLCSVLPSHWRCNKTLPVAFKVVALGDVPDGTVVTVMAGNDENYSAELRNASAVMKNQVARFNDLRFVGRSGRGKSFTLTITVFTNPTQVATYHRAIKVTVDGPREPRRHRQKLEDQTKPFPDRFGDLERLRMRVTPSTPSPRGSLSTTSHFSSQPQTPIQGTSELNPFSDPRQFDRSFPTLPTLTESRFPDPRMHYPGAMSAAFPYSATPSGTSISSLSVAGMPATSRFHHTYLPPPYPGAPQNQSGPFQANPSPYHLYYGTSSGSYQFSMVAGSSSGGDRSPTRMLASCTSSAASVAAGNLMNPSLGGQSDGVEADGSHSNSPTALSTPGRMDEAVWRPY

SEQ ID NO: 15592 - protein, 462 aa, Homo Sapiens
MDTKHFLPLDFSTQVNSSLTSPTGRGSMAAPSLHPSLGPGIGSPGQLHSPISTLSSPINGMGPPFSVISSPMGPHSMSVPTTPTLGFSTGSPQLSSPMNPVSSSEDIKPPLGLNGVLKVPAHPSGNMASFTKHICAICGDRSSGKHYGVYSCEGCKGFFKRTVRKDLTYTCRDNKDCLIDKRQRNRCQYCRYQKCLAMGMKREAVQEERQRGKDRNENEVESTSSANEDMPVERILEAELAVEPKTETYVEANMGLNPSSPNDPVTNICQAADKQLFTLVEWAKRIPHFSELPLDDQVILLRAGWNELLIASFSHRSIAVKDGILLATGLHVHRNSAHSAGVGAIFDRVLTELVSKMRDMQMDKTELGCLRAIVLFNPDSKGLSNPAEVEALREKVYASLEAYCKHKYPEQPGRFAKLLLRLPALRSIGLKCLEHLFFFKLIGDTPIDTFLMEMLEAPHQMT

SEQ ID NO: 15593 - protein, 533 aa, Homo Sapiens
MSWAARPPFLPQRHAAGQCGPVGVRKEMHCGVASRWRRRRPWLDPAAAAAAAVAGGEQQTPEPEPGEAGRDGMGDSGRDSRSPDSSSPNPLPQGVPPPSPPGPPLPPSTAPSLGGSGAPPPPPMPPPPLGSPFPVISSSMGSPGLPPPAPPGFSGPVSSPQINSTVSLPGGGSGPPEDVKPPVLGVRGLHCPPPPGGPGAGKRLCAICGDRSSGKHYGVYSCEGCKGFFKRTIRKDLTYSCRDNKDCTVDKRQRNRCQYCRYQKCLATGMKREAVQEERQRGKDKDGDGEGAGGAPEEMPVDRILEAELAVEQKSDQGVEGPGGTGGSGSSPNDPVTNICQAADKQLFTLVEWAKRIPHFSSLPLDDQVILLRAGWNELLIASFSHRSIDVRDGILLATGLHVHRNSAHSAGVGAIFDRVLTELVSKMRDMRMDKTELGCLRAIILFNPDAKGLSNPSEVEVLREKVYASLETYCKQKYPEQQGRFAKLLLRLPALRSIGLKCLEHLFFFKLIGDTPIDTFLMEMLEAPHQLA

SEQ ID NO: 15594 - protein, 463 aa, Homo Sapiens
MYGNYSHFMKFPAGYGGSPGHTGSTSMSPSAALSTGKPMDSHPSYTDTPVSAPRTLSAVGTPLNALGSPYRVITSAMGPPSGALAAPPGINLVAPPSSQLNVVNSVSSSEDIKPLPGLPGIGNMNYPSTSPGSLVKHICAICGDRSSGKHYGVYSCEGCKGFFKRTIRKDLIYTCRDNKDCLIDKRQRNRCQYCRYQKCLVMGMKREAVQEERQRSRERAESEAECATSGHEDMPVERILEAELAVEPKTESYGDMNMENSTNDPVTNICHAADKQLFTLVEWAKRIPHFSDLTLEDQVILLRAGWNELLIASFSHRSVSVQDGILLATGLHVHRSSAHSAGVGSIFDRVLTELVSKMKDMQMDKSELGCLRAIVLFNPDAKGLSNPSEVETLREKVYATLEAYTKQKYPEQPGRFAKLLLRLPALRSIGLKCLEHLFFFKLIGDTPIDTFLMEMLETPLQIT

SEQ ID NO: 15595 - protein, 1324 aa, Homo Sapiens
MSRRKQAKPQHFQSDPEVASLPRRDGDTEKGQPSRPTKSKDAHVCGRCCAEFFELSDLLLHKKNCTKNQLVLIVNENPASPPETFSPSPPPDNPDEQMNDTVNKTDQVDCSDLSEHNGLDREESMEVEAPVANKSGSGTSSGSHSSTAPSSSSSSSSSSGGGGSSSTGTSAITTSLPQLGDLTTLGNFSVINSNVIIENLQSTKVAVAQFSQEARCGGASGGKLAVPALMEQLLALQQQQIHQLQLIEQIRHQILLLASQNADLPTSSSPSQGTLRTSANPLSTLSSHLSQQLAAAAGLAQSLASQSASISGVKQLPPIQLPQSSSGNTIIPSNSGSSPNMNILAAAVTTPSSEKVASSAGASHVSNPAVSSSSSPAFAISSLLSPASNPLLPQQASANSVFPSPLPNIGTTAEDLNSLSALAQQRKSKPPNVTAFEAKSTSDEAFFKHKCRFCAKVFGSDSALQIHLRSHTGERPFKCNICGNRFSTKGNLKVHFQRHKEKYPHIQMNPYPVPEHLDNIPTSTGIPYGMSIPPEKPVTSWLDTKPVLPTLTTSVGLPLPPTLPSLIPFIKTEEPAPIPISHSATSPPGSVKSDSGGPESATRNLGGLPEEAEGSTLPPSGGKSEESGMVTNSVPTASSSVLSSPAADCGPAGSATTFTNPLLPLMSEQFKAKFPFGGLLDSAQASETSKLQQLVENIDKKATDPNECIICHRVLSCQSALKMHYRTHTGERPFKCKICGRAFTTKGNLKTHYSVHRAMPPLRVQHSCPICQKKFTNAVVLQQHIRMHMGGQIPNTPVPDSYSESMESDTGSFDEKNFDDLDNFSDENMEDCPEGSIPDTPKSADASQDSLSSSPLPLEMSSIAALENQMKMINAGLAEQLQASLKSVENGSIEGDVLTNDSSSVGGDMESQSAGSPAISESTSSMQALSPSNSTQEFHKSPSIEEKPQRAVPSEFANGLSPTPVNGGALDLTSSHAEKIIKEDSLGILFPFRDRGKFKNTACDICGKTFACQSALDIHYRSHTKERPFICTVCNRGFSTKGNLKQHMLTHQMRDLPSQLFEPSSNLGPNQNSAVIPANSLSSLIKTEVNGFVHVSPQDSKDTPTSHVPSGPLSSSATSPVLLPALPRRTPKQHYCNTCGKTFSSSSALQIHERTHTGEKPFACTICGRAFTTKGNLKVHMGTHMWNSTPARRGRRLSVDGPMTFLGGNPVKFPEMFQKDLAARSGSGDPSSFWNQYAAALSNGLAMKANEISVIQNGGIPPIPGSLGSGNSSPVSGLTGNLERLQNSEPNAPLAGLEKMASSENGTNFRFTRFVEDSKEIVTS

SEQ ID NO: 15596 - protein, 1007 aa, Homo Sapiens
MSRRKQRKPQQLISDCEGPSASENGDASEEDHPQVCAKCCAQFTDPTEFLAHQNACSTDPPVMVIIGGQENPNNSSASSEPRPEGHNNPQVMDTEHSNPPDSGSSVPTDPTWGPERRGEESPGHFLVAATGTAAGGGGGLILASPKLGATPLPPESTPAPPPPPPPPPPPGVGSGHLNIPLILEELRVLQQRQIHQMQMTEQICRQVLLLGSLGQTVGAPASPSELPGTGTASSTKPLLPLFSPIKPVQTSKTLASSSSSSSSSSGAETPKQAFFHLYHPLGSQHPFSAGGVGRSHKPTPAPSPALPGSTDQLIASPHLAFPSTTGLLAAQCLGAARGLEATASPGLLKPKNGSGELSYGEVMGPLEKPGGRHKCRFCAKVFGSDSALQIHLRSHTGERPYKCNVCGNRFTTRGNLKVHFHRHREKYPHVQMNPHPVPEHLDYVITSSGLPYGMSVPPEKAEEEAATPGGGVERKPLVASTTALSATESLTLLSTSAGTATAPGLPAFNKFVLMKAVEPKNKADENTPPGSEGSAISGVAESSTATRMQLSKLVTSLPSWALLTNHFKSTGSFPFPYVLEPLGASPSETSKLQQLVEKIDRQGAVAVTSAASGAPTTSAPAPSSSASSGPNQCVICLRVLSCPRALRLHYGQHGGERPFKCKVCGRAFSTRGNLRAHFVGHKASPAARAQNSCPICQKKFTNAVTLQQHVRMHLGGQIPNGGTALPEGGGAAQENGSEQSTVSGAGSFPQQQSQQPSPEEELSEEEEEEDEEEEEDVTDEDSLAGRGSESGGEKAISVRGDSEEASGAEEEVGTVAAAATAGKEMDSNEKTTQQSSLPPPPPPDSLDQPQPMEQGSSGVLGGKEEGGKPERSSSPASALTPEGEATSVTLVEELSLQEAMRKEPGESSSRKACEVCGQAFPSQAALEEHQKTHPKEGPLFTCVFCRQGFLERATLKKHMLLAHHQVQPFAPHGPQNIAALSLVPGCSPSITSTGLSPFPRKDDPTIP

SEQ ID NO: 15597 - protein, 1300 aa, Homo Sapiens
MSRRKQAKPQHLKSDEELLPPDGAPEHAAPGEGAEDADSGPESRSGGEETSVCEKCCAEFFKWADFLEHQRSCTKLPPVLIVHEDAPAPPPEDFPEPSPASSPSERAESEAAEEAGAEGAEGEARPVEKEAEPMDAEPAGDTRAPRPPPAAPAPPTPAYGAPSTNVTLEALLSTKVAVAQFSQGARAAGGSGAGGGVAAAAVPLILEQLMALQQQQIHQLQLIEQIRSQVALMQRPPPRPSLSPAAAPSAPGPAPSQLPGLAALPLSAGAPAAAIAGSGPAAPAAFEGAQPLSRPESGASTPGGPAEPSAPAAPSAAPAPAAPAPAPAPQSAASSQPQSASTPPALAPGSLLGAAPGLPSPLLPQTSASGVIFPNPLVSIAATANALDPLSALMKHRKGKPPNVSVFEPKASAEDPFFKHKCRFCAKVFGSDSALQIHLRSHTGERPFKCNICGNRFSTKGNLKVHFQRHKEKYPHIQMNPYPVPEYLDNVPTCSGIPYGMSLPPEKPVTTWLDSKPVLPTVPTSVGLQLPPTVPGAHGYADSPSATPASRSPQRPSPASSECASLSPGLNHVESGVSATAESPQSLLGGPPLTKAEPVSLPCTNARAGDAPVGAQASAAPTSVDGAPTSLGSPGLPAVSEQFKAQFPFGGLLDSMQTSETSKLQQLVENIDKKMTDPNQCVICHRVLSCQSALKMHYRTHTGERPFKCKICGRAFTTKGNLKTHFGVHRAKPPLRVQHSCPICQKKFTNAVVLQQHIRMHMGGQIPNTPLPEGFQDAMDSELAYDDKNAETLSSYDDDMDENSMEDDAELKDAATDPAKPLLSYAGSCPPSPPSVISSIAALENQMKMIDSVMSCQQLTGLKSVENGSGESDRLSNDSSSAVGDLESRSAGSPALSESSSSQALSPAPSNGESFRSKSPGLGAPEEPQEIPLKTERPDSPAAAPGSGGAPGRAGIKEEAPFSLLFLSRERGKCPSTVCGVCGKPFACKSALEIHYRSHTKERPFVCALCRRGCSTMGNLKQHLLTHRLKELPSQLFDPNFALGPSQSTPSLISSAAPTMIKMEVNGHGKAMALGEGPPLPAGVQVPAGPQTVMGPGLAPMLAPPPRRTPKQHNCQSCGKTFSSASALQIHERTHTGEKPFGCTICGRAFTTKGNLKVHMGTHMWNNAPARRGRRLSVENPMALLGGDALKFSEMFQKDLAARAMNVDPSFWNQYAAAITNGLAMKNNEISVIQNGGIPQLPVSLGGSALPPLGSMASGMDKARTGSSPPIVSLDKASSETAASRPFTRFIEDNKEIGIN

SEQ ID NO: 15598 - protein, 1053 aa, Homo Sapiens
MSRRKQAKPQHINSEEDQGEQQPQQQTPEFADAAPAAPAAGELGAPVNHPGNDEVASEDEATVKRLRREETHVCEKCCAEFFSISEFLEHKKNCTKNPPVLIMNDSEGPVPSEDFSGAVLSHQPTSPGSKDCHRENGGSSEDMKEKPDAESVVYLKTETALPPTPQDISYLAKGKVANTNVTLQALRGTKVAVNQRSADALPAPVPGANSIPWVLEQILCLQQQQLQQIQLTEQIRIQVNMWASHALHSSGAGADTLKTLGSHMSQQVSAAVALLSQKAGSQGLSLDALKQAKLPHANIPSATSSLSPGLAPFTLKPDGTRVLPNVMSRLPSALLPQAPGSVLFQSPFSTVALDTSKKGKGKPPNISAVDVKPKDEAALYKHKCKYCSKVFGTDSSLQIHLRSHTGERPFVCSVCGHRFTTKGNLKVHFHRHPQVKANPQLFAEFQDKVAAGNGIPYALSVPDPIDEPSLSLDSKPVLVTTSVGLPQNLSSGTNPKDLTGGSLPGDLQPGPSPESEGGPTLPGVGPNYNSPRAGGFQGSGTPEPGSETLKLQQLVENIDKATTDPNECLICHRVLSCQSSLKMHYRTHTGERPFQCKICGRAFSTKGNLKTHLGVHRTNTSIKTQHSCPICQKKFTNAVMLQQHIRMHMGGQIPNTPLPENPCDFTGSEPMTVGENGSTGAICHDDVIESIDVEEVSSQEAPSSSSKVPTPLPSIHSASPTLGFAMMASLDAPGKVGPAPFNLQRQGSRENGSVESDGLTNDSSSLMGDQEYQSRSPDILETTSFQALSPANSQAESIKSKSPDAGSKAESSENSRTEMEGRSSLPSTFIRAPPTYVKVEVPGTFVGPSTLSPGMTPLLAAQPRRQAKQHGCTRCGKNFSSASALQIHERTHTGEKPFVCNICGRAFTTKGNLKVHYMTHGANNNSARRGRKLAIENTMALLGTDGKRVSEIFPKEILAPSVNVDPVVWNQYTSMLNGGLAVKTNEISVIQSGGVPTLPVSLGATSVVNNATVSKMDGSQSGISADVEKPSATDGVPKHQFPHFLEENKIAVS

SEQ ID NO: 15599 - protein, 763 aa, Homo Sapiens; identical to SEQ ID NO: 11649

SEQ ID NO: 15600 - protein, 733 aa, Homo Sapiens
MERRSESPCLRDSPDRRSGSPDVKGPPPVKVARLEQNGSPMGARGRPNGAVAKAVGGLMIPVFCVVEQLDGSLEYDNREEHAEFVLVRKDVLFSQLVETALLALGYSHSSAAQAQGIIKLGRWNPLPLSYVTDAPDATVADMLQDVYHVVTLKIQLQSCSKLEDLPAEQWNHATVRNALKELLKEMNQSTLAKECPLSQSMISSIVNSTYYANVSATKCQEFGRWYKKYKKIKVERVERENLSDYCVLGQRPMHLPNMNQLASLGKTNEQSPHSQIHHSTPIRNQVPALQPIMSPGLLSPQLSPQLVRQQIAMAHLINQQIAVSRLLAHQHPQAINQQFLNHPPIPRAVKPEPTNSSVEVSPDIYQQVRDELKRASVSQAVFARVAFNRTQGLLSEILRKEEDPRTASQSLLVNLRAMQNFLNLPEVERDRIYQDERERSMNPNVSMVSSASSSPSSSRTPQAKTSTPTTDLPIKVDGANINITAAIYDEIQQEMKRAKVSQALFAKVAANKSQGWLCELLRWKENPSPENRTLWENLCTIRRFLNLPQHERDVIYEEESRHHHSERMQHVVQLPPEPVQVLHRQQSQPAKESSPPREEAPPPPPPTEDSCAKKPRSRTKISLEALGILQSFIHDVGLYPDQEAIHTLSAQLDLPKHTIIKFFQNQRYHVKHHGKLKEHLGSAVDVAEYKDEELLTESEENDSEEGSEEMYKVEAEEENADKSKAAPAEIDQR

SEQ ID NO: 15601 - protein, 1400 aa, Homo Sapiens
MMASFQRSNSHDKVRRIVAEEGRTARNLIAWSVPLESKDDDGKPKCQTGGKSKRTIQGTHKTTKQSTAVDCKITSSTTGDKHFDKSPTKTRHPRKIDLRARYWAFLFDNLRRAVDEIYVTCESDQSVVECKEVLMMLDNYVRDFKALIDWIQLQEKLEKTDAQSRPTSLAWEVKKMSPGRHVIPSPSTDRINVTSNARRSLNFGGSTGTVPAPRLAPTGVSWADKVKAHHTGSTASSEITPAQSCPPMTVQKASRKNERKDAEGWETVQRGRPIRSRSTAVMPKVSLATEATRSKDDSDKENVCLLPDESIQKGQFVGDGTSNTIESHPKDSLHSCDHPLAEKTQFTVSTLDDVKNSGSIRDNYVRTSEISAVHIDTECVSVMLQAGTPPLQVNEEKFPAEKARIENEMDPSDISNSMAEVLAKKEELADRLEKANEEAIASAIAEEEQLTREIEAEENNDINIETDNDSDFSASMGSGSVSFCGMSMDWNDVLADYEARESWRQNTSWGDIVEEEPARPPGHGIHMHEKLSSPSRKRTIAESKKKHEEKQMKAQQLREKLREEKTLKLQKLLEREKDVRKWKEELLDQRRRMMEEKLLHAEFKREVQLQAIVKKAQEEEAKVNEIAFINTLEAQNKRHDVLSKLKEYEQRLNELQEERQRRQEEKQARDEAVQERKRALEAERQARVEELLMKRKEQEARIEQQRQEKEKAREDAARERARDREERLAALTAAQQEAMEELQKKIQLKHDESIRRHMEQIEQRKEKAAELSSGRHANTDYAPKLTPYERKKQCSLCNVLISSEVYLFSHVKGRKHQQAVRENTSIQGRELSDEEVEHLSLKKYIIDIVVESTAPAEALKDGEERQKNKKKAKKIKARMNFRAKEYESLMETKNSGSDSPYKAKLQRLAKDLLKQVQVQDSGSWANNKVSALDRTLGEITRILEKENVADQIAFQAAGGLTALEHILQAVVPATNVNTVLRIPPKSLCNAINVYNLTCNNCSENCSDVLFSNKITFLMDLLIHQLTVYVPDENNTILGRNTNKQVFEGLTTGLLKVSAVVLGCLIANRPDGNCQPATPKIPTQEMKNKPSQGDPFNNRVQDLISYVVNMGLIDKLCACFLSVQGPVDENPKMAIFLQHAAGLLHAMCTLCFAVTGRSYSIFDNNRQDPTGLTAALQATDLAGVLHMLYCVLFHGTILDPSTASPKENYTQNTIQVAIQSLRFFNSFAALHLPAFQSIVGAEGLSLAFRHMASSLLGHCSQVSCESLLHEVIVCVGYFTVNHPDNQVIVQSGRHPTVLQKLCQLPFQYFSDPRLIKVLFPSLIAACYNNHQNKIILEQEMSCVLLATFIQDLAQTPGQAENQPYQPKGKCLGSQDYLELANRFPQQAWEEARQFFLKKEKK

SEQ ID NO: 15602 - protein, 348 aa, Homo Sapiens
MPRSFLVKKVKLDAFSSADLESAYGRARSDLGAPLHDKGYLSDYVGPSSVYDGDAEAALLKGPSPEPMYAAAVRGELGPAAAGSAPPPTPRPELATAAGGYINGDAAVSEGYAADAFFITDGRSRRKASNAGSAAAPSTASAAAPDGDAGGGGGAGGRSLGSGPGGRGGTRAGAGTEARAGPGAAGAGGRHACGECGKTYATSSNLSRHKQTHRSLDSQLARRCPTCGKVYVSMPAMAMHLLTHDLRHKCGVCGKAFSRPWLLQGHMRSHTGEKPFGCAHCGKAFADRSNLRAHMQTHSAFKHFQCKRCKKSFALKSYLNKHYESACFKGGAGGPAAPAPPQLSPVQA

SEQ ID NO: 15603 - protein, 307 aa, Homo Sapiens
MPRSFLVKKIKGDGFQCSGVPAPTYHPLETAYVLPGARGPPGDNGYAPHRLPPSSYDADQKPGLELAPAEPAYPPAAPEEYSDPESPQSSLSARYFRGEAAVTDSYSMDAFFISDGRSRRRRGGGGGDAGGSGDAGGAGGRAGRAGAQAGGGHRHACAECGKTYATSSNLSRHKQTHRSLDSQLARKCPTCGKAYVSMPALAMHLLTHNLRHKCGVCGKAFSRPWLLQGHMRSHTGEKPFGCAHCGKAFADRSNLRAHMQTHSAFKHYRCRQCDKSFALKSYLHKHCEAACAKAAEPPPPTPAGPAS

SEQ ID NO: 15604 - protein, 201 aa, Homo Sapiens
MSFATLRPAPPGRYLYPEVSPLSEDEDRGSDSSGSDEKPCRVHAARCGLQGARRRAGGRRAGGGGPGGRPGREPRQRHTANARERDRTNSVNTAFTALRTLIPTEPADRKLSKIETLRLASSYISHLGNVLLAGEACGDGQPCHSGPAFFHAARAGSPPPPPPPPPARDGENTQPKQICTFCLSNQRKLSKDRDRKTAIRS

SEQ ID NO: 15605 - protein, 216 aa, Homo Sapiens
MGGSGVGTAWHGPLARPSGTLPFASSMPSPVDASSADGGSGLGSHRRKRTTFSKGQLLELERAFAAWPYPNISTHEHLAWVTCLPEAKVQVWFQKRWAKIIKNRKSGILSPGSECPQSSCSLPDTLQQPWDPQMPGQPPPSSGTPQRTSVCRHSSCPAPGLSPRQGWEGAKAVAPWGSAGASEVHPSLERATPQTSLGSLSDLIYALAIVVNVDHS

SEQ ID NO: 15606 - protein, 1596 aa, Homo Sapiens
MESRETLSSSRQRGGESDFLPVSSAKPPAAPGCAGEPLLSTPGPGKGIPVGGERMEPEEEDELGSGRDVDSNSNADSEKWVAGDGLEEQEFSIKEANFTEGSLKLKIQTTKRAKKPPKNLENYICPPEIKITIKQSGDQKVSRAGKNSKATKEEERSHSKKKLLTASDLAASDLKGFQPQAYERPQKHSTLHYDTGLPQDFTGDTLKPKHQQKSSSQNHMDWSTNSDSGPVTQNCFISPESGRETASTSKIPALEPVASFAKAQGKKGSAGNTWSQLSNNNKDLLLGGVAPSPSSHSSPAPPSSSAECNGLQPLVDQDGGGTKEPPEPPTVGSKKKSSKKDVISQTIPNPDLDWVKNAQKAFDNTEGKREGYSADSAQEASPARQNVSSASNPENDSSHVRITIPIKAPSLDPTNHKRKKRQSIKAVVEKIMPEKALASGITMSSEVVNRILSNSEGNKKDPRVPKLSKMIENESPSVGLETGGNAEKVIPGGVSKPRKPPMVMTPPTCTDHSPSRKLPEIQHPKFAAKRRWTCSKPKPSTMLREAVMATSDKLMLEPPSAYPITPSSPLYTNTDSLTVITPVKKKRGRPKKQPLLTVETIHEGTSTSPVSPISREFPGTKKRKRRRNLAKLAQLVPGEDKPMSEMKFHKKVGKLGVLDKKTIKTINKMKTLKRKNILNQILSCSSSVALKAKAPPETSPGAAAIESKLGKQINVSKRGTIYIGKKRGRKPRAELPPPSEEPKTAIKHPRPVSSQPDVPAVPSNFQSLVASSPAAMHPLSTQLGGSNGNLSPASTETNFSELKTMPNLQPISALPTKTQKGIHSGTWKLSPPRLMANSPSHLCEIGSLKEITLSPVSESHSEETIPSDSGIGTDNNSTSDQAEKSSESRRRYSFDFCSLDNPEAIPSDTSTKNRHGHRQKHLIVDNFLAHESLKKPKHKRKRKSLQNRDDLQFLADLEELITKFQVFRISHRSYTFYHENPYPSIFRINFDHYYPVPYIQYDPLLYLRRTSDLKSKKKRGRPAKTNDTMTKVPFLQGFSYPIPSGSYYAPYGMPYTSMPMMNLGYYGQYPAPLYLSHTLGAASPFMRPTVPPPQFHTNSHVKMSGAAKHKAKHGVHLQGPVSMGLGDMQPSLNPPKVGSASLSSGRLHKRKHKHKHKHKEDRILGTHDNLSGLFAGKATGFSSHILSERLSSADKELPLVSEKNKHKEKQKHQHSEAGHKASKNNFEVDTLSTLSLSDAQHWTQAKEKGDLSSEPVDSCTKRYSGSGGDGGSTRSENLDVFSEMNPSNDKWDSDVSGSKRRSYEGFGTYREKDIQAFKMNRKERSSYDSSMSPGMPSPHLKVDQTAVHSKNEGSVPTMMTRKKPAAVDSVTIPPAPVLSLLAASAATSDAVGSSLKKRFKRREIEAIQCEVRKMCNYTKILSTKKNLDHVNKILKAKRLQRQSKTGNNFVKKRRGRPRKQPTQFDEDSRDQMPVLEKCIDLPSKRGQKPSLSPLVLEPAASQDTIMATIEAVIHMAREAPPLPPPPPPPLPPPPPPPLPPPPPLPKTPRGGKRKHKPQAPAQPPQQSPPQQPLPQEEEVKAKRQRKSRGSESEVLP

SEQ ID NO: 15607 - protein, 707 aa, Homo Sapiens
MSRDRFRSRGGGGGGFHRRGGGGGRGGLHDFRSPPPGMGLNQNRGPMGPGPGQSGPKPPIPPPPPHQQQQQPPPQQPPPQQPPPHQPPPHPQPHQQQQPPPPPQDSSKPVVAQGPGPAPGVGSAPPASSSAPPATPPTSGAPPGSGPGPTPTPPPAVTSAPPGAPPPTPPSSGVPTTPPQAGGPPPPPAAVPGPGPGPKQGPGPGGPKGGKMPGGPKPGGGPGLSTPGGHPKPPHRGGGEPRGGRQHHPPYHQQHHQGPPPGGPGGRSEEKISDSEGFKANLSLLRRPGEKTYTQRCRLFVGNLPADITEDEFKRLFAKYGEPGEVFINKGKGFGFIKLESRALAEIAKAELDDTPMRGRQLRVRFATHAAALSVRNLSPYVSNELLEEAFSQFGPIERAVVIVDDRGRSTGKGIVEFASKPAARKAFERCSEGVFLLTTTPRPVIVEPLEQLDDEDGLPEKLAQKNPMYQKERETPPRFAQHGTFEYEYSQRWKSLDEMEKQQREQVEKNMKDAKDKLESEMEDAYHEHQANLLRQDLMRRQEELRRMEELHNQEMQKRKEMQLRQEEERRRREEEMMIRQREMEEQMRRQREESYSRMGYMDPRERDMRMGGGGAMNMGDPYGSGGQKFPPLGGGGGIGYEANPGVPPATMSGSMMGSDMRTERFGQGGAGPVGGQGPRGMGPGTPAGYGRGREEYEGPNKKPRF

SEQ ID NO: 15608 - protein, 292 aa, Homo Sapiens
MEELTAFVSKSFDQKSKDGNGGGGGGGGKKDSITYREVLESGLARSRELGTSDSSLQDITEGGGHCPVHLFKDHVDNDKEKLKEFGTARVAEGIYECKEKREDVKSEDEDGQTKLKQRRSRTNFTLEQLNELERLFDETHYPDAFMREELSQRLGLSEARVQVWFQNRRAKCRKQENQMHKGVILGTANHLDACRVAPYVNMGALRMPFQQVQAQLQLEGVAHAHPHLHPHLAAHAPYLMFPPPPFGLPIASLAESASAAAVVAAAAKSNSKNSSIADLRLKARKHAEALGL

SEQ ID NO: 15609 - protein, 331 aa, Homo Sapiens
MEELTAFVSKSFDQKVKEKKEAITYREVLESGPLRGAKEPTGCTEAGRDDRSSPAVRAAGGGGGGGGGGGGGGGGGGVGGGGAGGGAGGGRSPVRELDMGAAERSREPGSPRLTEVSPELKDRKEDAKGMEDEGQTKIKQRRSRTNFTLEQLNELERLFDETHYPDAFMREELSQRLGLSEARVQVWFQNRRAKCRKQENQLHKGVLIGAASQFEACRVAPYVNVGALRMPFQQDSHCNVTPLSFQVQAQLQLDSAVAHAHHHLHPHLAAHAPYMMFPAPPFGLPLATLAADSASAASVVAAAAAAKTTSKNSSIADLRLKAKKHAAALGL

SEQ ID NO: 15610 - protein, 766 aa, Homo Sapiens
MKEKSKNAARTRREKENSEFYELAKLLPLPSAITSQLDKASIIRLTTSYLKMRVVFPEGLGEAWGHSSRTSPLDNVGRELGSHLLQTLDGFIFVVAPDGKIMYISETASVHLGLSQVELTGNSIYEYIHPADHDEMTAVLTAHQPYHSHFVQEYEIERSFFLRMKCVLAKRNAGLTCGGYKVIHCSGYLKIRQYSLDMSPFDGCYQNVGLVAVGHSLPPSAVTEIKLHSNMFMFRASLDMKLIFLDSRVAELTGYEPQDLIEKTLYHHVHGCDTFHLRCAHHLLLVKGQVTTKYYRFLAKHGGWVWVQSYATIVHNSRSSRPHCIVSVNYVLTDTEYKGLQLSLDQISASKPAFSYTSSSTPTMTDNRKGAKSRLSSSKSKSRTSPYPQYSGFHTERSESDHDSQWGGSPLTDTASPQLLDPADRPGSQHDASCAYRQFSDRSSLCYGFALDHSRLVEERHFHTQACEGGRCEAGRYFLGTPQAGREPWWGSRAALPLTKASPESREAYENSMPHIASVHRIHGRGHWDEDSVVSSPDPGSASESGDRYRTEQYQSSPHEPSKIETLIRATQQMIKEEENRLQLRKAPSDQLASINGAGKKHSLCFANYQQPPPTGEVCHGSALANTSPCDHIQQREGKMLSPHENDYDNSPTALSRISSPNSDRISKSSLILAKDYLHSDISPHQTAGDHPTVSPNCFGSHRQYFDKHAYTLTGYALEHLYDSETIRNYSLGCNGSHFDVTSHLRMQPDPAQGHKGTSVIITNGS

SEQ ID NO: 15611 - protein, 667 aa, Homo Sapiens
MKEKSKNAAKTRREKENGEFYELAKLLPLPSAITSQLDKASIIRLTTSYLKMRAVFPEGLGDAWGQPSRAGPLDGVAKELGSHLLQTLDGFVFVVASDGKIMYISETASVHLGLSQVELTGNSIYEYIHPSDHDEMTAVLTAHQPLHHHLLQEYEIERSFFLRMKCVLAKRNAGLTCSGYKVIHCSGYLKIRQYMLDMSLYDSCYQIVGLVAVGQSLPPSAITEIKLYSNMFMFRASLDLKLIFLDSRVTEVTGYEPQDLIEKTLYHHVHGCDVFHLRYAHHLLLVKGQVTTKYYRLLSKRGGWVWVQSYATVVHNSRSSRPHCIVSVNYVLTEIEYKELQLSLEQVSTAKSQDSWRTALSTSQETRKLVKPKNTKMKTKLRTNPYPPQQYSSFQMDKLECGQLGNWRASPPASAAAPPELQPHSESSDLLYTPSYSLPFSYHYGHFPLDSHVFSSKKPMLPAKFGQPQGSPCEVARFFLSTLPASGECQWHYANPLVPSSSSPAKNPPEPPANTARHSLVPSYEAPAAAVRRFGEDTAPPSFPSCGHYREEPALGPAKAARQAARDGARLALARAAPECCAPPTPEAPGAPAQLPFVLLNYHRVLARRGPLGGAAPAASGLACAPGGPEAATGALRLRHPSPAATSPPGAPLPHYLGASVIITNGR

SEQ ID NO: 15612 - protein, 284 aa, Homo Sapiens
MSMLPSFGFTQEQVACVCEVLQQGGNLERLGRFLWSLPACDHLHKNESVLKAKAVVAFHRGNFRELYKILESHQFSPHNHPKLQQLWLKAHYVEAEKLRGRPLGAVGKYRVRRKFPLPRTIWDGEETSYCFKEKSRGVLREWYAHNPYPSPREKRELAEATGLTTTQVSNWFKNRRQRDRAAEAKERENTENNNSSSNKQNQLSPLEGGKPLMSSSEEEFSPPQSPDQNSVLLLQGNMGHARSSNYSLPGLTASQPSHGLQTHQHQLQDSLLGPLTSSLVDLGS

SEQ ID NO: 15613 - protein, 291 aa, Homo Sapiens
MSMLPTFGFTQEQVACVCEVLQQGGNIERLGRFLWSLPACEHLHKNESVLKAKAVVAFHRGNFRELYKILESHQFSPHNHAKLQQLWLKAHYIEAEKLRGRPLGAVGKYRVRRKFPLPRSIWDGEETSYCFKEKSRSVLREWYAHNPYPSPREKRELAEATGLTTTQVSNWFKNRRQRDRAAEAKERENNENSNSNSHNPLNGSGKSVLGSSEDEKTPSGTPDHSSSSPALLLSPPPPGLPSLHSLGHPPGPSAVPVPVPGGGGADPLQHHHGLQDSILNPMSANLVDLGS

SEQ ID NO: 15614 - protein, 332 aa, Homo Sapiens
MVFRSPLDLYSSHFLLPNFADSHHRSILLASSGGGNGAGGGGGAGGGSGGGNGAGGGGAGGAGGGGGGGSRAPPEELSMFQLPTLNFSPEQVASVCETLEETGDIERLGRFLWSLPVAPGACEAINKHESILRARAVVAFHTGNFRDLYHILENHKFTKESHGKLQAMWLEAHYQEAEKLRGRPLGPVDKYRVRKKFPLPRTIWDGEQKTHCFKERTRSLLREWYLQDPYPNPSKKRELAQATGLTPTQVGNWFKNRRQRDRAAAAKNRLQHQAIGPSGMRSLAEPGCPTHGSAESPSTAASPTTSVSSLTERADTGTSILSVTSSDSECDV

SEQ ID NO: 15615 - protein, 781 aa, Homo Sapiens
MSSSSPTGQIASAADIKQENGMESASEGQEAHREVAGGAAVGLSPPAPAPFPLEPGDAATAAARVSGEEGAVAAAAAGAAADQVQLHSELLGRHHHAAAAAAQTPLAFSPDHVACVCEALQQGGNLDRLARFLWSLPQSDLLRGNESLLKARALVAFHQGIYPELYSILESHSFESANHPLLQQLWYKARYTEAERARGRPLGAVDKYRLRRKFPLPRTIWDGEETVYCFKEKSRNALKELYKQNRYPSPAEKRHLAKITGLSLTQVSNWFKNRRQRDRNPSETQSKSESDGNPSTEDESSKGHEDLSPHPLSSSSDGITNLSLSSHMEPVYMQQIGNAKISLSSSGVLLNGSLVPASTSPVFLNGNSFIQGPSGVILNGLNVGNTQAVALNPPKMSSNIVSNGISMTDILGSTSQDVKEFKVLQSSANSATTTSYSPSVPVSFPGLIPSTEVKREGIQTVASQDGGSVVTFTTPVQINQYGIVQIPNSGANSQFLNGSIGFSPLQLPPVSVAASQGNISVSSSTSDGSTFTSESTTVQQGKVFLSSLAPSAVVYTVPNTGQTIGSVKQEGLERSLVFSQLMPVNQNAQVNANLSSENISGSGLHPLASSLVNVSPTHNFSLSPSTLLNPTELNRDIADSQPMSAPVASKSTVTSVSNTNYATLQNCSLITGQDLLSVPMTQAALGEIVPTAEDQVGHPSPAVHQDFVQEHRLVLQSVANMKENFLSNSESKATSSLMMLDSKSKYVLDGMVDTVCEDLETDKKELAKLQTVQLDEDMQDL

SEQ ID NO: 15616 - protein, 739 aa, Homo Sapiens
MATLPAEPSAGPAAGGEAVAAAAATEEEEEEARQLLQTLQAAEGEAAAAAGAGAGAAAAGAEGPGSPGVPGSPPEAASEPPTGLRFSPEQVACVCEALLQAGHAGRLSRFLGALPPAERLRGSDPVLRARALVAFQRGEYAELYRLLESRPFPAAHHAFLQDLYLRARYHEAERARGRALGAVDKYRLRKKFPLPKTIWDGEETVYCFKERSRAALKACYRGNRYPTPDEKRRLATLTGLSLTQVSNWFKNRRQRDRTGAGGGAPCKSESDGNPTTEDESSRSPEDLERGAAPVSAEAAAQGSIFLAGTGPPAPCPASSSILVNGSFLAASGSPAVLLNGGPVIINGLALGEASSLGPLLLTGGGGAPPPQPSPQGASETKTSLVLDPQTGEVRLEEAQSEAPETKGAQVAAPGPALGEEVLGPLAQVVPGPPTAATFPLPPGPVPAVAAPQVVPLSPPPGYPTGLSPTSPLLNLPQVVPTSQVVTLPQAVGPLQLLAAGPGSPVKVAAAAGPANVHLINSGVGVTALQLPSATAPGNFLLANPVSGSPIVTGVALQQGKIILTATFPTSMLVSQVLPPAPGLALPLKPETAISVPEGGLPVAPSPALPEAHALGTLSAQQPPPAAATTSSTSLPFSPDSPGLLPNFPAPPPEGLMLSPAAVPVWSAGLELSAGTEGLLEAEKGLGTQAPHTVLRLPDPDPEGLLLGATAGGEVDEGLEAEAKVLTQLQSVPVEEPLEL

SEQ ID NO: 15617 - protein, 246 aa, Homo Sapiens
MFQLPILNFSPQQVAGVCETLEESGDVERLGRFLWSLPVAPAACEALNKNESVLRARAIVAFHGGNYRELYHILENHKFTKESHAKLQALWLEAHYQEAEKLRGRPLGPVDKYRVRKKFPLPRTIWDGEQKTHCFKERTRHLLREWYLQDPYPNPSKKRELAQATGLTPTQVGNWFKNRRQRDRAAAAKNRLQQQVLSQGSGRALRAEGDGTPEVLGVATSPAASLSSKAATSAISITSSDSECDI

SEQ ID NO: 15618 - protein, 728 aa, Homo Sapiens
MEAAAGGRGCFQPHPGLQKTLEQFHLSSMSSLGGPAAFSARWAQEAYKKESAKEAGAAAVPAPVPAATEPPPVLHLPAIQPPPPVLPGPFFMPSDRSTERCETVLEGETISCFVVGGEKRLCLPQILNSVLRDFSLQQINAVCDELHIYCSRCTADQLEILKVMGILPFSAPSCGLITKTDAERLCNALLYGGAYPPPCKKELAASLALGLELSERSVRVYHECFGKCKGLLVPELYSSPSAACIQCLDCRLMYPPHKFVVHSHKALENRTCHWGFDSANWRAYILLSQDYTGKEEQARLGRCLDDVKEKFDYGNKYKRRVPRVSSEPPASIRPKTDDTSSQSPAPSEKDKPSSWLRTLAGSSNKSLGCVHPRQRLSAFRPWSPAVSASEKELSPHLPALIRDSFYSYKSFETAVAPNVALAPPAQQKVVSSPPCAAAVSRAPEPLATCTQPRKRKLTVDTPGAPETLAPVAAPEEDKDSEAEVEVESREEFTSSLSSLSSPSFTSSSSAKDLGSPGARALPSAVPDAAAPADAPSGLEAELEHLRQALEGGLDTKEAKEKFLHEVVKMRVKQEEKLSAALQAKRSLHQELEFLRVAKKEKLREATEAKRNLRKEIERLRAENEKKMKEANESRLRLKRELEQARQARVCDKGCEAGRLRAKYSAQIEDLQVKLQHAEADREQLRADLLREREAREHLEKVVKELQEQLWPRARPEAAGSEGAAELEP

SEQ ID NO: 15619 - protein, 684 aa, Homo Sapiens
MENLQTNFSLVQGSTKKLNGMGDDGSPPAKKMITDIHANGKTINKVPTVKKEHLDDYGEAPVETDGEHVKRTCTSVPETLHLNPSLKHTLAQFHLSSQSSLGGPAAFSARHSQESMSPTVFLPLPSPQVLPGPLLIPSDSSTELTQTVLEGESISCFQVGGEKRLCLPQVLNSVLREFTLQQINTVCDELYIYCSRCTSDQLHILKVLGILPFNAPSCGLITLTDAQRLCNALLRPRTFPQNGSVLPAKSSLAQLKETGSAFEVEHECLGKCQGLFAPQFYVQPDAPCIQCLECCGMFAPQTFVMHSHRSPDKRTCHWGFESAKWHCYLHVNQKYLGTPEEKKLKIILEEMKEKFSMRSGKRNQSKTDAPSGMELQSWYPVIKQEGDHVSQTHSFLHPSYYLYMCDKVVAPNVSLTSAVSQSKELTKTEASKSISRQSEKAHSSGKLQKTVSYPDVSLEEQEKMDLKTSRELCSRLDASISNNSTSKRKSESATCNLVRDINKVGIGLVAAASSPLLVKDVICEDDKGKIMEEVMRTYLKQQEKLNLILQKKQQLQMEVKMLSSSKSMKELTEEQQNLQKELESLQNEHAQRMEEFYVEQKDLEKKLEQIMKQKCTCDSNLEKDKEAEYAGQLAELRQRLDHAEADRQELQDELRQEREARQKLEMMIKELKLQILKSSKTAKE

SEQ ID NO: 15620 - protein, 965 aa, Homo Sapiens
MALLCGLGQVTLRIWVSLPSQSENGIGFLAARAFLRSGGMEALTTQLGPGREGSSSPNSKQELQPYSGSSALKPNQVGETSLYGVPIVSLVIDGQERLCLAQISNTLLKNYSYNEIHNRRVALGITCVQCTPVQLEILRRAGAMPISSRRCGMITKREAERLCKSFLGEHKPPKLPENFAFDVVHECAWGSRGSFIPARYNSSRAKCIKCGYCSMYFSPNKFIFHSHRTPDAKYTQPDAANFNSWRRHLKLSDKSATDELSHAWEDVKAMFNGGTRKRTFSLQGGGGGGANGGSGGQGKGGAGGGGGGGPGCGAEMAPGPPPHKSLRCGEDEAAGPPGPPPPHPQRGLGLATGASGPAGPGGPGGGAGVRSYPVIPVPSKGFGLLQKLPPPLFPHPYGFPTAFGLCPKKDDPVLGAGEPKGGPGTGSGGGGAGTGGGAGGPGASHLPPGAGAGPGGGAMFWGHQPSGAAKDAAAVAAAAAAATVYPTFPMFWPAAGSLPVPSYPAAQSQAKAVAAAVAAAAAAAAAAAGSGAPEPLDGAEPAKESGLGAEERCPSALSRGPLDEDGTDEALPPPLAPLPPPPPPPARKGSYVSAFRPVVKDTESIAKLYGSAREAYGAGPARGPGPGAGSGGYVSPDFLSEGSSSYNSASPDVDTADEPEVDVESNRFPDDEDAQEETEPSAPSAGGGPDGEQPTGPPSATSSGADGPANSPDGGSPRPRRRLGPPPAGRPAFGDLAAEDLVRRPERSPPSGGGGYELREPCGPLGGPAPAKVFAPERDEHVKSAAVALGPAASYVCTPEAHEPDKEDNHSPADDLETRKSYPDQRSISQPSPANTDRGEDGLTLDVTGTHLVEKDIENLAREELQKLLLEQMELRKKLEREFQSLKDNFQDQMKRELAYREEMVQQLQIVRDTLCNELDQERKARYAIQQKLKEAHDALHHFSCKMLTPRHCTGNCSFKPPLLP

SEQ ID NO: 15621 - protein, 1001 aa, Homo Sapiens
MASSPLPGPNDILLASPSSAFQPDTLSQPRPGHANLKPNQVGQVILYGIPIVSLVIDGQERLCLAQISNTLLKNFSYNEIHNRRVALGITCVQCTPVQLEILRRAGAMPISSRRCGMITKREAERLCKSFLGENRPPKLPDNFAFDVSHECAWGCRGSFIPARYNSSRAKCIKCSYCNMYFSPNKFIFHSHRTPDAKYTQPDAANFNSWRRHLKLTDKSPQDELVFAWEDVKAMFNGGSRKRALPQPGAHPACHPLSSVKAAAVAAAAAVAGGGGLLGPHLLGAPPPPPPPPPPLAELAGAPHAHHKRPRFDDDDDSLQEAAVVAAASLSAAAASLSVAAASGGAGTGGGGAGGGCVAGVGVGAGAGAGAGAGAKGPRSYPVIPVPSKGSFGGVLQKFPGCGGLFPHPYTFPAAAAAFSLCHKKEDAGAAAEALGGAGAGGAGAAPKAGLSGLFWPAGRKDAFYPPFCMFWPPRTPGGLPVPTYLQPPPQPPSALGCALGESPALLRQAFLDLAEPGGAAGSAEAAPPPGQPPQVVANGPGSGPPPPAGGAGSRDALFESPPGGSGGDCSAGSTPPADSVAAAGAGAAAAGSGPAGSRVPAPHHPHLLEGRKAGGGSYHHSSAFRPVGGKDDAESLAKLHGASAGAPHSAQTHPHHHHHPHHHHHHHHPPQPPSPLLLLPPQPDEPGSERHHPAPPPPPPPPPPPPLAQHPHHRGLLSPGGTSCCYPSEDSSEDEDDEEEEQEVDVEGHKPPEGEEEEEGRDPDDDEEEDEETEVLLGDPLVGGGRFLQGRGPSEKGSSRDRAPAVAGAFPLGLNSSRLLQEDGKLGDPGSDLPPPPPPPLAPQKASGGGSSSPGSPVHHPSLEEQPSYKDSQKTKENNQVIVSTKDDNSFSDKNKEHSFFITDSDASGGDFWRERSGEHTQETNSPHSLKKDVENMGKEELQKVLFEQIDLRRRLEQEFQVLKGNTSFPVFNNFQDQMKRELAYREEMVQQLQIVSCIST

SEQ ID NO: 15622 - protein, 568 aa, Homo Sapiens
MLPGLAAAAAHRCSWSSLCRLRLRCRAAACNPSDRQEWQNLVTFGSFSNMVPCSHPYIGTLSQVKLYSTNVQKEGQGSQTLRVEKVPSFETAEGIGTELKAPLKQEPLQVRVKAVLKKREYGSKYTQNNFITGVRAINEFCLKSSDLEQLRKIRRRSPHEDTESFTVYLRSDVEAKSLEVWGSPEALAREKKLRKEAEIEYRERLFRNQKILREYRDFLGNTKPRSRTASVFFKGPGKVVMVAICINGLNCFFKFLAWIYTGSASMFSEAIHSLSDTCNQGLLALGISKSVQTPDPSHPYGFSNMRYISSLISGVGIFMMGAGLSWYHGVMGLLHPQPIESLLWAYCILAGSLVSEGATLLVAVNELRRNARAKGMSFYKYVMESRDPSTNVILLEDTAAVLGVIIAATCMGLTSITGNPLYDSLGSLGVGTLLGMVSAFLIYTNTEALLGRSIQPEQVQRLTELLENDPSVRAIHDVKATDLGLGKVRFKAEVDFDGRVVTRSYLEKQDFDQMLQEIQEVKTPEELETFMLKHGENIIDTLGAEVDRLEKELKKRNPEVRHVDLEIL

SEQ ID NO: 15623 - protein, 465 aa, Homo Sapiens
MNVTSLFSFTSPAVKRLLGWKQGDEEEKWAEKAVDALVKKLKKKKGAMEELEKALSCPGQPSNCVTIPRSLDGRLQVSHRKGLPHVIYCRVWRWPDLQSHHELKPLECCEFPFGSKQKEVCINPYHYKRVESPVLPPVLVPRHSEYNPQHSLLAQFRNLGQNEPHMPLNATFPDSFQQPNSHPFPHSPNSSYPNSPGSSSSTYPHSPTSSDPGSPFQMPADTPPPAYLPPEDPMTQDGSQPMDTNMMAPPLPSEINRGDVQAVAYEEPKHWCSIVYYELNNRVGEAFHASSTSVLVDGFTDPSNNKNRFCLGLLSNVNRNSTIENTRRHIGKGVHLYYVGGEVYAECLSDSSIFVQSRNCNYHHGFHPTTVCKIPSGCSLKIFNNQEFAQLLAQSVNHGFETVYELTKMCTIRMSFVKGWGAEYHRQDVTSTPCWIEIHLHGPLQWLDKVLTQMGSPHNPISSVS

SEQ ID NO: 15624 - protein, 467 aa, Homo Sapiens
MSSILPFTPPVVKRLLGWKKSAGGSGGAGGGEQNGQEEKWCEKAVKSLVKKLKKTGRLDELEKAITTQNCNTKCVTIPSTCSEIWGLSTPNTIDQWDTTGLYSFSEQTRSLDGRLQVSHRKGLPHVIYCRLWRWPDLHSHHELKAIENCEYAFNLKKDEVCVNPYHYQRVETPVLPPVLVPRHTEILTELPPLDDYTHSIPENTNFPAGIEPQSNYIPETPPPGYISEDGETSDQQLNQSMDTGSPAELSPTTLSPVNHSLDLQPVTYSEPAFWCSIAYYELNQRVGETFHASQPSLTVDGFTDPSNSERFCLGLLSNVNRNATVEMTRRHIGRGVRLYYIGGEVFAECLSDSAIFVQSPNCNQRYGWHPATVCKIPPGCNLKIFNNQEFAALLAQSVNQGFEAVYQLTRMCTIRMSFVKGWGAEYRRQTVTSTPCWIELHLNGPLQWLDKVLTQMGSPSVRCSSMS
